(19) United States
(12) Patent Application Publication
(10) Pub. No.: US 2021/0002706 A1
(43) Pub. Date: Jan. 7, 2021

(54) Methods For Determining Antimicrobial Drug Resistance

(71) Applicant: Ares Genetics GmbH, Vienna (AT)

(72) Inventors: Norhan MAHFOUZ, Vienna (AT); Stephan BEISKEN, Vienna (AT); Andreas POSCH, Vienna (AT)

(21) Appl. No.: 16/920,109

(22) Filed: Jul. 2, 2020

(30) Foreign Application Priority Data
Jul. 5, 2019 (EP) 19 184 836.5

(51) Int. Cl. C12Q 1/689; G16B 20/00; G16B 50/20

(52) U.S. Cl. CPC C12Q 1/689; G16B 20/00; C12Q 2600/158; C12Q 2600/106; C12Q 2600/156; G16B 50/20

(57) ABSTRACT

The present invention provides for the prediction or detection of antimicrobial drug resistance in a microorganism, particularly in a pathogenic microorganism, by determining the presence or absence of antimicrobial resistance markers (AMRs) in the microorganism. This allows for the rapid determination of whether a microorganism is resistant to one or more antimicrobial drugs. The microorganism can be obtained from a patient suffering or suspected of suffering from an infection by the microorganism, and once the determination is made, the patient can be given an antimicrobial drug to which the microorganism is not resistant.

### FIELD OF THE INVENTION

[0001] The invention disclosed herein relates to methods for the detection or prediction of the ability of a microorganism to be resistant to one or more antibiotic compounds or drugs, i.e., the ability to still be able to grow in the presence of such antibiotic. The methods are particularly useful in determining whether a microorganism, causing or suspected of causing an infection in a patient, is resistant to a particular antibiotic, so that the patient can be treated with an antibiotic against which the microorganism is not known to be resistant.

### BACKGROUND OF THE INVENTION

[0002] Antimicrobial drug resistance is on the rise globally. Estimates are that 700,000 to several million deaths result per year from infections caused by antimicrobial drug resistant microorganisms. For example, each year in the U.S., at least 2 million people become infected with bacteria that are resistant to antibiotics and at least 23.000 people die as a result. For instance, the so-called “ESKAPE” pathogens, e.g., Enterococcus faecium, Staphylococcus aureus, Klebsiella pneumoniae, Acinetobacter baumanii, Pseudomonas aeruginosa, and Enterobacter species, are known to be major causes of hospital acquired infections worldwide.

[0003] Rising antimicrobial drug/antibiotic resistance is caused mainly by their overuse in humans and animals, spread of resistant strains between the two, and dumping of inadequately treated effluents from industry. Antibiotics are known to increase selective pressure in bacterial populations, causing susceptible bacteria to die. This increases the percentage of resistant bacteria which continue growing. Even at very low dosage levels of administered antibiotics, resistant bacteria may have a growth advantage over susceptible bacteria. With resistance to antibiotics becoming more common there is greater need for alternative way to quickly identify resistant microorganisms such that patients can be administered effective antimicrobials and avoid administering antimicrobials to which the microorganisms are resistant. This leads not only to faster recovery but also avoids any unnecessary selective pressure on the microorganisms not causing the infection.

[0004] It is known that antibiotic resistance can be associated with genetic polymorphisms. For example, it has been shown that resistance can be correlated with genetic changes in the bacteria. Wozniak et al., 2012, BMC Genomics 13:S23 disclosed genetic determinants of drug resistance in Staphylococcus aureus based on genotype and phenotype data. Stoesser et al., 2013, J Antimicrob Chemother 68: 2234-2244 disclosed prediction of antimicrobial susceptibilities for Escherichia coli and Klebsiella pneumoniae isolates using whole genomic sequence data. Chewapreecha et al., 2014, PLoS Genet 10(8):e1004547 described a comprehensive identification method of single nucleotide polymorphisms associated with beta-lactam resistance within pneumococcal mosaic genes.

[0005] Such antimicrobial drug/antibiotic resistance mechanisms that emerge and spread globally challenge medical personnel's ability to treat common bacterial infections by reducing the effectiveness of or completely nullifying the effects of existing treatment methodologies. This inevitably leads to increased healthcare expenditure, increased length of stay at healthcare institution, and likely leads to a higher mortality rate. Specifically, antibiotic resistance not only makes diagnosing existing bacterial infections difficult, but it also has subsequent effects in other fields of healthcare.

[0006] Existing techniques for combating antibiotic resistance generally involve preventing the spread of antibiotic resistant microorganisms including strategies for controlling antibiotics consumption at the policy and management level, rather than predicting or detecting the various genetic causes of a resistance or a multiple resistance in a microorganism. Typically, a microorganism suspected of being resistant is tested for one or more known specific mutations in known resistance genes. However, these techniques are time- and labor-intensive. There is a need in the art for methods which can quickly determine whether an infectious microorganism is resistant to one or more antimicrobial drugs such that the patient can be administered, in a timelier manner, an antimicrobial drug to which the microorganism causing the infection is susceptible.

[0007] The present invention addresses the needs in the art by providing methods and antimicrobial resistance markers (AMRs), which can be used to predict or detect antimicrobial drug resistance/susceptibility of a microorganism, such as a bacterium causing or suspected of causing an infection in a patient.

### SUMMARY OF THE INVENTION

[0008] Disclosed herein are methods for determining or predicting the ability of a microorganism to be resistant to one or more antibiotic compounds or to one or more different classes of antibiotic compounds. In other words, the disclosed methods can predict or detect the antimicrobial drug resistance status of a microorganism, i.e., whether the microorganism is resistant or not resistant to one or more particular antibiotic compounds, which compounds can be from one or more different classes of antibiotic compounds. These methods can be used to diagnose infections caused by resistant microorganisms and allow for faster effective treatment of a patient by providing an antibiotic to which the microorganism is not resistant to a patient suffering from such an infection.

[0009] The present invention is based, in part, on the identification of antimicrobial resistance markers (AMRs), which when present or absent in a microorganism are indicative of not only the microorganism in which the marker and its correlation to resistance was originally observed but also in microorganisms of other genera, species or strains. In certain cases, the presence or absence of the AMR is directly responsible for the phenotypic change in resistance, in other cases, the presence or absence is statistically associated with such resistance.

[0010] The present invention is directed to a method for determining or predicting the antimicrobial drug resistance status of a (any) microorganism, which method comprises:
[0011] (i) determining the presence or absence in the microorganism of at least one nucleotide sequence identified in Table 1 or a variant of the nucleotide sequence, and/or
[0012] (ii) determining the presence or absence in the microorganism of at least one difference in at least one nucleotide sequence identified in Table I compared with a reference sequence,
[0013] wherein the presence or absence of the at least one nucleotide sequence and/or difference indicates the antimicrobial drug resistance status of the microorganism.

[0014] In an embodiment, one type of antimicrobial resistance marker (AMR) is a nucleotide sequence identified or a variant of the nucleotide sequence. Another type of AMR is a difference in a nucleotide sequence compared with a reference sequence.

[0015] In an embodiment, the microorganism being subject to the method for determining or predicting the antimicrobial drug resistance status of a microorganism is a microorganism different from the microorganism identified in Table I associated with the respective at least one nucleotide sequence and/or the at least one difference in at least one nucleotide sequence (AMR or mkr_id), the presence or absence of which is indicative of antimicrobial drug resistance of the microorganism being subject to the method. As used herein, a different microorganism is a microorganism of a different strain or subspecies, of a different species or of a different genus. Herein, the terms AMR, mkr_id or marker are used interchangeably.

[0016] In an embodiment, the at least one nucleotide sequence and/or the at least one difference in at least one nucleotide sequence (AMR) is identified in Table I in rows 0 to 3840. In an embodiment, the AMR is identified in Table I in rows 0 to 3751. In an embodiment, the AMR used in the methods of the invention is not one in rows 3752 to 3840 identified in Table 1. These AMRs (identified in rows 3752 to 3840 of Table I) are known for being indicative of antibiotic resistance in the microorganism in which they were first determined (which microorganism is given in Table I for each respective AMR). However, prior to the present invention as disclosed herein, these AMRs were not known to be indicative of antibiotic resistance when present or absent in microorganisms of different strains, species or genera, and along with all the other AMRs listed in Table I are useful in determining or predicting the antimicrobial drug resistance of any microorganism in which the AMR is accordingly present or absent. The column in Table I entitled Marker associated with Cross-Resistance indicates with a + those AMRs that when present or absent are indicative of resistance to more than one class/type of antibiotic drug. The column in Table I entitled Associated with resistance in multiple pathogens indicates with a + those AMRs that when present or absent are indicative of resistance in more than one kind of microorganism. The column in Table I entitled cross-resistance in multiple pathogens indicates with a + those AMRS that when present or absent are indicative of resistance to more than one class/type of antibiotic drug in more than one kind of microorganism.

[0017] In an embodiment, the presence or absence of the at least one nucleotide sequence and/or difference indicates that the microorganism is resistant to one or more antimicrobial drugs, preferably to one or more classes of antimicrobial drugs (e.g., to at least two different types of antimicrobial drugs). In an embodiment, the presence or absence of at least two nucleotide sequences in step (i) is determined or wherein the presence or absence of at least two differences in step (ii) is determined. In an embodiment, more than one difference in one nucleotide sequence in step (ii) is determined. In an embodiment, the AMR is associated with resistance to more than one antimicrobial drug. In an embodiment, the AMR is associated with resistance to more than one class of antimicrobial drugs. In an embodiment, the AMR is associated with resistance in more than one type of microorganism. In an embodiment, the AMR is associated with resistance to more than one antimicrobial drug in more than one type of microorganism. In an embodiment, the AMR is associated with resistance to more than one class of antimicrobial drugs in more than one type of microorganism.

[0018] In an embodiment, the difference in the nucleotide sequence is at the position (nc_pos) in the nucleotide sequence identified in Table I or the difference at the position in the nucleotide sequence is the nc_alt residue for that nucleotide sequence identified in Table 1 or the difference in the nucleotide sequence is a point mutation resulting in a change in the encoded amino acid sequence or which change results in a stop codon.

[0019] In certain embodiments, the AMR, the presence or absence of which in step (i) and/or (ii) is determined, is identified in rows 0 to 3840 of Table I, preferably in rows 0 to 3751 of Table I.

[0020] In an embodiment, the AMR, the presence or absence of which in step (i) and/or (ii) is determined, identified in the following rows of Table I is excluded in the methods of the invention: 3752 to 3840. In certain embodiments, when the microorganism, whose antimicrobial drug resistance status is to be determined or predicted, is Acinetobacter baumannii, the AMRs identified in rows 3752 to 3764 are excluded; when the microorganism is Escherichia coli, the AMRs identified in rows 3778 to 3784 are excluded; when the microorganism is Enterobacter cloacae, the AMRs identified in rows 3768 to 3776 are excluded; when the microorganism is Klebsiella aerogenes, the AMRs identified in rows 3785 to 3787 are excluded; when the microorganism is Klebsiella pneumoniae, the AMRs identified in rows 3788 to 3797 are excluded; when the microorganism is Pseudomonas aeruginosa, the AMRs identified in rows 3008 and 3009 are excluded; when the microorganism is Morganella morganii, the AMR identified in row 3798 is excluded; when the microorganism is Salmonella enterica, the AMRs identified in rows 3810 to 3815 are excluded; when the microorganism is Proteus mirabilis, the AMRs identified in rows 3799 to 3807 are excluded; when the microorganism is Serratia mascescens, the AMR identified in row 3816 is excluded; when the microorganism is Stenotrophomonas maltophilia, the AMR identified in row 3840 is excluded; when the microorganism is Shigella boydii, the AMRs identified in rows 3817 to 3820 are excluded; when the microorganism is Citrobacter freundii, the AMRs identified in rows 3765 to 3766 is excluded; when the microorganism is Shigella sonnei, the AMRs identified in rows 3821 to 3823 are excluded; when the microorganism is Staphylococcus aureus, the AMRs identified in rows 3824 to 3839 are excluded; when the microorganism is Citrobacter koseri, the AMR identified in row 3767 is excluded; when the microorganism is Enterobacter roggenkampii, the AMR identified in row 3777 is excluded.

[0021] The microorganism whose resistance is to be determined/predicted can be selected from the group consisting of Achromobacter, Acinetobacter, Burkholderia, Citrobacter, Enterobacter, Escherichia, Klebsiella, Kluyvera, Lelliottia, Morganella, Pantoea, Pluralibacter, Proteus, Providencia, Pseudomonas, Raoultella, Salmonella, Serratia, Shigella, Staphylococcus, and Stenotrophomonas spp.

[0022] Exemplary microorganisms include those listed in Table II. Particular microorganisms can include Achromobacter xylosoxidans, Acinetobacter baumannii, Acinetobacter beijerinckii, Acinetobacter bereziniae, Acinetobacter calcoaceticus, Acinetobacter gyllenbergii, Acinetobacter haemolyticus, Acinetobacter indicus, Acinetobacter johnsonii, Acinetobacter junii, Acinetobacter lactucae, Acinetobacter lwoffii, Acinetobacter nosocomialis, Acinetobacter oleivorans, Acinetobacter pittii, Acinetobacter radioresistens, Acinetobacter schindleri, Acinetobacter soli, Acinetobacter sp. ADP1, Acinetobacter sp. AR_0276, Acinetobacter sp. WC-743, Acinetobacter tandoii, Acinetobacter ursingii, Acinetobacter venetianus, Burkholderia ambifaria, Burkholderia cenocepacia, Citrobacter amalonaticus, Citrobacter braakii, Citrobacter freundii, Citrobacter koseri, Citrobacter pasteurii, Citrobacter portucalensis, Citrobacter rodentium, Citrobacter werkmanii, Enterobacter asburiae, Enterobacter bugandensis, Enterobacter cancerogenus, Enterobacter cloacae, Enterobacter cloacae complex, Enterobacter cloacae complex sp. FDA-CDC-AR_0132, Enterobacter cloacae complex sp. FDA-CDC-AR_0164, Enterobacter hormaechei, Enterobacter kobei, Enterobacter ludwigii, Enterobacter roggenkampii, Enterobacter sp. 638, Enterobacter sp. BIDMC 28, Enterobacter sp. MGH 1, Enterobacter sp. MGH 10, Enterobacter sp. MGH 14, Enterobacter sp. MGH 15, Enterobacter sp. MGH 22, Enterobacter sp. MGH 23, Enterobacter sp. MGH 24, Enterobacter sp. MGH 25, Enterobacter sp. MGH 3, Enterobacter sp. MGH 33, Enterobacter sp. MGH 37, Enterobacter sp. MGH 38, Enterobacter sp. MGH 6, Enterobacter sp. MGH 7, Enterobacter sp. R4-368, Enterococcus faecalis, Escherichia albertii, Escherichia coli, Klebsiella aerogenes, Klebsiella grimontii, Klebsiella michiganensis, Klebsiella oxytoca, Klebsiella pneumoniae, Klebsiella quasipneumoniae, Klebsiella variicola, Kluyvera cryocrescens, Kluyvera intermedia, Lelliottia amnigena, Morganella morganii, Pantoea agglomerans, Pantoea vagans, Pluralibacter gergoviae, Proteus mirabilis, Proteus vulgaris, Providencia rettgeri, Providencia stuartii, Pseudomonas aeruginosa, Pseudomonas denitrificans (nomen rejiciendum), Pseudomonas fluorescens, Pseudomonas nitroreducens, Pseudomonas putida, Pseudomonas stutzeri, Raoultella ornithinolytica, Raoultella planticola, Salmonella enterica, Serratia ficaria, Serratia fonticola, Serratia grimesii, Serratia liquefaciens, Serratia marcescens, Serratia odorifera, Serratia plymuthica, Serratia proteamaculans, Serratia rubidaea, Shigella boydii, Shigella dysenteriae, Shigella flexneri, Shigella sonnei, Staphylococcus aureus, Staphylococcus cohnii, Staphylococcus epidermidis, Staphylococcus equorum, Staphylococcus haemolyticus, Staphylococcus saprophyticus, Stenotrophomonas maltophilia.

[0023] The classes of antimicrobial drug can be one selected from the group consisting of lactams, such as monobactams, β-lactams, carbapenems; β-lactam inhibitors; penicillins; quinolones and derivatives thereof, preferably fluoroquinolones; aminoglycosides; polyketides; benzene-derived compounds, sulfonamides; tetracyclines; cephalosporins; lincosamides; macrolides; nitrofuranes; glycopeptides; oxazolidinones; ansamycins; carbacephems; and folate synthesis inhibitors. The antimicrobial drugs can be one selected from the group consisting of amoxicillin/K clavulanate (AUG), ampicillin (AM), ampicillin/sulbactam (A/S), aztreonam (AZT), cefazolin (CFZ), cefepime (CPE), cefotaxime (CFT), ceftazidime (CAZ), ceftriaxone (CAX), cefuroxime (CRM), cephalotin (CF), ciprofloxacin (CP), ertapenem (ETP), gentamicin (GM), imipenem (IMP), levofloxacin (LVX), meropenem (MER), piperacillin/tazobactam (P/T), tetracycline (TE), tobramycin (TO), and trimethoprim/sulfamethoxazole (T/S).

[0024] In an embodiment, the microorganism is obtained from a patient, preferably from a patient suffering from an infection caused or suspected of being caused by the microorganism.

[0025] In an embodiment, the determination of the presence or absence of the nucleotide sequence and/or difference (AMR) is by high throughput sequencing.

[0026] In an embodiment, the present invention also involves a method for determining whether a patient is infected with a microorganism potentially resistant to an antimicrobial drug, which method comprises:
[0027] (i) determining the presence or absence in a microorganism, contained or suspected of being contained in a sample obtained from the patient, of at least one nucleotide sequence identified in Table I or a variant of the nucleotide sequence, and/or
[0028] (ii) determining the presence or absence in the microorganism of at least one difference in at least one nucleotide sequence identified in Table I compared with a reference sequence,
[0029] wherein the presence or absence of the at least one nucleotide sequence and/or difference indicates that the patient is infected with an antimicrobial drug resistant microorganism.

[0030] In an embodiment, the present invention involves a method of selecting a treatment for a patient suffering from an infection with an antimicrobial drug resistant microorganism, which method comprises:
[0031] (a)(i) determining the presence or absence in a microorganism obtained from the patient of at least one nucleotide sequence identified in Table I or a variant of the nucleotide sequence, and/or (a)(ii) determining the presence or absence in the microorganism of at least one difference in at least one nucleotide sequence identified in Table I compared with a reference sequence;
[0032] (b) identifying the one or more antimicrobial drugs to which the microorganism is resistant; and
[0033] (c) selecting one or more antimicrobial drugs different from those identified in step (b) and to which the microorganism is not resistant. Optionally, the method further comprises administering to the patient one or more of the antimicrobial drugs selected in step (c).

[0034] In certain embodiments, the methods can comprise:
[0035] (1) (i) determining the presence and/or absence in Acinetobacter spp. of at least one nucleotide sequence identified in rows 0 to 183, 282 to 289, and 291 to 325 of Table I or a variant of the nucleotide sequence, and/or (ii) determining the presence in Acinetobacter spp., of at least one difference in at least one nucleotide sequence identified in rows 184 to 281, 290, and 326 to 330 of Table I compared with a reference sequence,
[0036] (2) (i) determining the presence and/or absence in Escherichia spp. of at least one nucleotide sequence identified in rows 1248 to 1499 of Table I or a variant of the nucleotide sequence, and/or (ii) determining the presence in Escherichia spp. of at least one difference in at least one nucleotide sequence identified in rows 1500 to 1586 of Table I compared with a reference sequence,
[0037] (3) (i) determining the presence and/or absence in Klebsiella spp. of at least one nucleotide sequence identified in rows 1587 to 1696, 1743 to 1782, 1792 to 2133, 2208 to 2396, 2425 to 2427, and 2431 to 2446 of Table I or a variant of the nucleotide sequence, and/or (ii) determining the presence and/or absence in Klebsiella spp., of at least one difference in at least one nucleotide sequence identified in rows 1697 to 1742, 1783 to 1791, 2134 to 2207, 2397 to 2424, 2428 to 2430, 2447, and 2448 of Table I compared with a reference sequence,
[0038] (4) (i) determining the presence and/or absence in Morganella spp. of at least one nucleotide sequence identified in rows 2460 to 2569 of Table I or a variant of the nucleotide sequence, and/or (ii) determining the presence and/or absence in Morganella spp., of at least one difference in at least one nucleotide sequence identified in rows 2570 to 2621 of Table I compared with a reference sequence,
[0039] (5) (i) determining the presence and/or absence in Proteus spp. of at least one nucleotide sequence identified in rows 2623 to 2754, and 2789 to 2792 of Table I or a variant of the nucleotide sequence, and/or (ii) determining the presence and/or absence in Proteus spp., of at least one difference in at least one nucleotide sequence identified in rows 2755 to 2788 of Table I compared with a reference sequence,
[0040] (6) (i) determining the presence and/or absence in Pseudomonas spp. of at least one nucleotide sequence identified in rows 2793 to 2861, 2877, and 2878 of Table I or a variant of the nucleotide sequence, and/or (ii) determining the presence and/or absence in Pseudomonas spp., of at least one difference in at least one nucleotide sequence identified in rows 2862 to 2876 of Table I compared with a reference sequence,
[0041] (7) (i) determining the presence and/or absence in Salmonella spp. of at least one nucleotide sequence identified in rows 2885 to 2990 of Table I or a variant of the nucleotide sequence, and/or (ii) determining the presence in Salmonella spp., of at least one difference in at least one nucleotide sequence identified in rows 2991 to 3008 of Table I compared with a reference sequence,
[0042] (8) (i) determining the presence and/or absence in Serratia spp. of at least one nucleotide sequence identified in rows 3009 to 3013, 3023 to 3028, 3031 to 3131, and 3188 to 3198 of Table I or a variant of the nucleotide sequence, and/or (ii) determining the presence and/or absence in Serratia spp., of at least one difference in at least one nucleotide sequence identified in rows 3014 to 3022, 3029, 3030, 3132 to 3187, 3199, and 3200 of Table I compared with a reference sequence,
[0043] (9) (i) determining the presence in Stenotrophomonas spp. of at least one nucleotide sequence identified in rows 3746 to 3751 of Table I or a variant of the nucleotide sequence,
[0044] (10) (i) determining the presence and/or absence in Shigella spp. of at least one nucleotide sequence identified in rows 3201 to 3234, 3237 to 3256, and 3263 to 3352 of Table I or a variant of the nucleotide sequence, and/or (ii) determining the presence in Shigella spp., of at least one difference in at least one nucleotide sequence identified in rows 3235, 3236, 3257 to 3262, and 3353 to 3375 of Table I compared with a reference sequence,
[0045] (11) (i) determining the presence and/or absence in Enterobacter spp. of at least one nucleotide sequence identified in rows 692 to 697, 702 to 1074, 1190 to 1201, 1213 to 1226, 1231 to 1233, 1235 to 1239, 1246, and 1247 of Table I or a variant of the nucleotide sequence, and/or (ii) determining the presence and/or absence in Enterobacter spp., of at least one difference in at least one nucleotide sequence identified in rows 698 to 701, 1075 to 1189, 1202 to 1212, 1227 to 1230, 1234, and 1240 to 1245 of Table I compared with a reference sequence,
[0046] (12) (i) determining the presence and/or absence in Staphylococcus spp. of at least one nucleotide sequence identified in rows 3376 to 3664 of Table I or a variant of the nucleotide sequence, and/or (ii) determining the presence in Staphylococcus spp., of at least one difference in at least one nucleotide sequence identified in rows 3665 to 3745 of Table I compared with a reference sequence,
[0047] (13) (i) determining the presence and/or absence in Burkholderia spp. of at least the nucleotide sequence identified in row 331 of Table I or a variant of the nucleotide sequence,
[0048] (14) (i) determining the presence and/or absence in Citrobacter spp. of at least one nucleotide sequence identified in rows 332 to 342, 345 to 361, 365 to 419, 422 to 581, 634 to 650, 653 to 683, 690, and 691 of Table I or a variant of the nucleotide sequence, and/or (ii) determining the presence in Citrobacter spp., of at least one difference in at least one nucleotide sequence identified in rows 343, 344, 362 to 364, 420, 421, 582 to 633, 651, 652, and 684 to 689 of Table I compared with a reference sequence,
[0049] (15) (i) determining the presence and/or absence in Kluyvera spp. of at least one nucleotide sequence identified in rows 2449 to 2457 of Table I or a variant of the nucleotide sequence, and/or (ii) determining the presence in Kluyvera spp., of at least one difference in at least one nucleotide sequence identified in rows 2458 to 2459 of Table I compared with a reference sequence,
[0050] (16) (i) determining the presence and/or absence in Pantoea spp. of at least the nucleotide sequence identified in row 2622 of Table I or a variant of the nucleotide sequence, and/or
[0051] (17) (i) determining the presence and/or absence in Raoultella spp. of at least one nucleotide sequence identified in rows 2879 to 2881, and 2883 of Table I or a variant of the nucleotide sequence, and/or (ii) determining the presence in Raoultella spp., of at least one difference in at least one nucleotide sequence identified in rows 2882, and 2884 of Table I compared with a reference sequence.

[0052] In certain embodiments of the methods disclosed herein, in addition to the use of the AMRs identified in rows 0 to 3840 whose presence or absence is determined to determine or predict antimicrobial resistance of a microorganism:

[0053] (1) when determining the presence and/or absence in Acinetobacter spp. of the at least one nucleotide sequence and/or the at least one difference in at least one nucleotide sequence, the at least one nucleotide sequence can further include those identified in rows 3765 to 3840 of Table I;

[0054] (2) when determining the presence and/or absence in Escherichia spp. of the at least one nucleotide sequence and/or the at least one difference in at least one nucleotide sequence, the at least one nucleotide sequence and/or the at least one difference can further include those identified in rows 3752 to 3777 and 3785 to 3840 of Table I;

[0055] (3) when determining the presence and/or absence in Klebsiella spp. of the at least one nucleotide sequence and/or the at least one difference in at least one nucleotide sequence, the at least one nucleotide sequence and/or the at least one difference can further include those identified in rows 3752 to 3784 and 3798 to 3840 of Table I;

[0056] (4) when determining the presence and/or absence in Morganella spp. of the at least one nucleotide sequence and/or the at least one difference in at least one nucleotide sequence, the at least one nucleotide sequence and/or the at least one difference can further include those identified in rows 3752 to 3797 and 3799 to 3840 of Table I;

[0057] (5) when determining the presence and/or absence in Proteus spp. of the at least one nucleotide sequence and/or the at least one difference in at least one nucleotide sequence, the at least one nucleotide sequence and/or the at least one difference can further include those identified in rows 3752 to 3798 and 3808 to 3840 of Table I;

[0058] (6) when determining the presence and/or absence in Pseudomonas spp. of the at least one nucleotide sequence and/or the at least one difference in at least one nucleotide sequence, the at least one nucleotide sequence and/or the at least one difference can further include those identified in rows 3752 to 3807 and 3810 to 3840 of Table I;

[0059] (7) when determining the presence and/or absence in Salmonella spp. of the at least one nucleotide sequence and/or the at least one difference in at least one nucleotide sequence, the at least one nucleotide sequence and/or the at least one difference can further include those identified in rows 3752 to 3809 and 3816 to 3840 of Table I;

[0060] (8) when determining the presence and/or absence in Serratia spp. of the at least one nucleotide sequence and/or the at least one difference in at least one nucleotide sequence, the at least one nucleotide sequence and/or the at least one difference can further include those identified in rows 3752 to 3815 and 3817 to 3840 of Table I;

[0061] (9) when determining the presence and/or absence in Stenotrophomonas spp. of the at least one nucleotide sequence and/or the at least one difference in at least one nucleotide sequence, the at least one nucleotide sequence and/or the at least one difference can further include those identified in rows 3752 to 3839 of Table I;

[0062] (10) when determining the presence and/or absence in Shigella spp. of the at least one nucleotide sequence and/or the at least one difference in at least one nucleotide sequence, the at least one nucleotide sequence and/or the at least one difference can further include those identified in rows 3752 to 3816 and 3824 to 3840 of Table I;

[0063] (11) when determining the presence and/or absence in Enterobacter spp. of the at least one nucleotide sequence and/or the at least one difference in at least one nucleotide sequence, the at least one nucleotide sequence and/or the at least one difference can further include those identified in rows 3752 to 3767 and 3778 to 3840 of Table I;

[0064] (12) when determining the presence and/or absence in Staphylococcus spp. of the at least one nucleotide sequence and/or the at least one difference in at least one nucleotide sequence, the at least one nucleotide sequence and/or the at least one difference can further include those identified in rows 3752 to 3823 and 3840 of Table I; and/or

[0065] (13) when determining the presence and/or absence in Citrobacter spp. of the at least one nucleotide sequence and/or the at least one difference in at least one nucleotide sequence, the at least one nucleotide sequence and/or the at least one difference can further include those identified in rows 3752 to 3764 and 3768 to 3840 of Table I.

[0066] In certain embodiments, the methods disclosed herein entail the use of at least 1, 2, 3, 4, 5, 6, 7, 8, 9, 10, 15, 20, 30, 40, 50, 60, 70, 80, 90, 100, 150, 200, 250, 300, 400, 500, 600, 700, 800, 900, 1000, 1500, 2000, 2500, 3000, 3250 of the AMRs identified in Table 1. In other embodiments, the methods disclosed herein entail the use of at least 1, 2, 3, 4, 5, 6, 7, 8, 9, 10, 15, 20, 30, 40, 50, 60, 70, 80, 90, 100, 150, 200, 250, 300, 400, 500, 600, 700, 800, 900, 1000, 1500, 2000, 2500, 3000, 3250 of the AMRs identified in Table I, except:

[0067] (1) when determining the presence and/or absence in Acinetobacter spp., the at least one nucleotide sequence and/or the at least one difference excludes those identified in rows 3752 to 3763 of Table I;

[0068] (2) when determining the presence and/or absence in Escherichia spp., the at least one nucleotide sequence and/or the at least one difference excludes those identified in rows 3778 to 3784 of Table I;

[0069] (3) when determining the presence and/or absence in Klebsiella spp., the at least one nucleotide sequence and/or the at least one difference excludes those identified in rows 3785 to 3797 of Table I;

[0070] (4) when determining the presence and/or absence in Morganella spp., the at least one nucleotide sequence and/or the at least one difference excludes that identified in row 3798 of Table I;

[0071] (5) when determining the presence and/or absence in Proteus spp., the at least one nucleotide sequence and/or the at least one difference excludes those identified in rows 3799 to 3807 of Table I;

[0072] (6) when determining the presence and/or absence in Pseudomonas spp., the at least one nucleotide sequence and/or the at least one difference excludes those identified in rows 3808 and 3809 of Table I;

[0073] (7) when determining the presence and/or absence in Salmonella spp., the at least one nucleotide sequence and/or the at least one difference excludes those identified in rows 3810 to 3815 of Table I;

[0074] (8) when determining the presence and/or absence in Serratia spp., the at least one nucleotide sequence and/or the at least one difference excludes that identified in row 3816 of Table I;

[0075] (9) when determining the presence and/or absence in Stenotrophomonas spp., the at least one nucleotide sequence and/or the at least one difference excludes that identified in row 3840 of Table I;

[0076] (10) when determining the presence and/or absence in Shigella spp., the at least one nucleotide sequence and/or the at least one difference excludes those identified in rows 3817 to 3823 of Table I;

[0077] (11) when determining the presence and/or absence in Enterobacter spp., the at least one nucleotide sequence and/or the at least one difference excludes those identified in rows 3768 to 3777 of Table I;

[0078] (12) when determining the presence and/or absence in Staphylococcus spp., the at least one nucleotide sequence and/or the at least one difference excludes those identified in rows 3824 to 3839 of Table I; and/or

[0079] (13) when determining the presence and/or absence in Citrobacter spp., the at least one nucleotide sequence and/or the at least one difference excludes those identified in rows 3765 to 3767 of Table I.

[0080] In an embodiment, the methods of the invention preferably entail the use of 1, 2, 3, 4, 5, 6, 7, 8, 9, 10 or more of those AMRs identified with a + in the column of Table I entitled Marker associated with Cross-Resistance. In an embodiment, the methods of the invention preferably entail the use of 1, 2, 3, 4, 5, 6, 7, 8, 9, 10 or more of those AMRs identified with a + in the column of Table I entitled Associated with resistance in multiple pathogens. In an embodiment, the methods of the invention preferably entail the use of 1, 2, 3, 4, 5, 6, 7, 8, 9, 10 or more of those AMRs identified with a + in the column of Table I entitled cross-resistance in multiple pathogens. In an embodiment, a combination of at least 2 AMRs identified with a + from at least two of the aforementioned columns in Table I (at least one from each column) can be used in the methods described herein.

### DETAILED DESCRIPTION OF THE INVENTION

[0081] Although the present invention is described in detail below, it is to be understood that this invention is not limited to the particular methodologies, protocols and reagents described herein as these may vary. It is also to be understood that the terminology used herein is for the purpose of describing particular embodiments only, and is not intended to limit the scope of the present invention which will be limited only by the appended claims. Unless defined otherwise, all technical and scientific terms used herein have the same meanings as commonly understood by one of ordinary skill in the art.

[0082] In the following, the elements of the present invention will be described. These elements are listed with specific embodiments, however, it should be understood that they may be combined in any manner and in any number to create additional embodiments. The variously described examples and preferred embodiments should not be construed to limit the present invention to only the explicitly described embodiments. This description should be understood to support and encompass embodiments which combine the explicitly described embodiments with any number of the disclosed and/or preferred elements. Furthermore, any permutations and combinations of all described elements in this application should be considered disclosed by the description of the present application unless the context indicates otherwise.

[0083] Preferably, the terms used herein are defined as described in “A multilingual glossary of biotechnological terms: (IUPAC Recommendations)”, H. G. W. Leuenberger, B. Nagel, and H. Kölbl, Eds., (1995) Helvetica Chimica Acta, CH-4010 Basel, Switzerland.

[0084] The practice of the present invention will employ, unless otherwise indicated, conventional methods of biochemistry, cell biology, immunology, and recombinant DNA techniques which are explained in the literature in the field (cf., e.g., Molecular Cloning: A Laboratory Manual, 2nd Edition, J. Sambrook et al. eds., Cold Spring Harbor Laboratory Press, Cold Spring Harbor 1989).

[0085] Throughout this specification and the claims which follow, unless the context requires otherwise, the word “comprise”, and variations such as “comprises” and “comprising”, will be understood to imply the inclusion of a stated member, integer or step or group of members, integers or steps but not the exclusion of any other member, integer or step or group of members, integers or steps although in some embodiments such other member, integer or step or group of members, integers or steps may be excluded, i.e., the subject-matter consists in the inclusion of a stated member, integer or step or group of members, integers or steps. The terms “a” and “an” and “the” and similar reference used in the context of describing the invention (especially in the context of the claims) are to be construed to cover both the singular and the plural, unless otherwise indicated herein or clearly contradicted by context. Recitation of ranges of values herein is merely intended to serve as a shorthand method of referring individually to each separate value falling within the range. Unless otherwise indicated herein, each individual value is incorporated into the specification as if it were individually recited herein.

[0086] All methods described herein can be performed in any suitable order unless otherwise indicated herein or otherwise clearly contradicted by context. The use of any and all examples, or exemplary language (e.g., “such as”), provided herein is intended merely to better illustrate the invention and does not pose a limitation on the scope of the invention otherwise claimed No language in the specification should be construed as indicating any non-claimed element essential to the practice of the invention.

[0087] Several documents are cited throughout the text of this specification. Each of the documents cited herein (including all patents, patent applications, scientific publications, manufacturer's specifications, instructions, etc.), whether supra or infra, are hereby incorporated by reference in their entirety. Nothing herein is to be construed as an admission that the invention is not entitled to antedate such disclosure by virtue of prior invention.

[0088] In an embodiment of the invention, a method for determining or predicting the antimicrobial drug resistance status of a microorganism is provided, which method comprises (i) determining the presence or absence in the microorganism of at least one nucleotide sequence identified in Table I or a variant of the nucleotide sequence, and/or (ii) determining the presence or absence in the microorganism of at least one difference in at least one nucleotide sequence identified in Table I compared with a reference sequence, wherein the presence or absence of the at least one nucleotide sequence and/or difference indicates the antimicrobial drug resistance status of the microorganism, i.e., that the microorganism is or is not resistant to one or more antimicrobial drugs or types/classes of antimicrobial drugs. In a preferred embodiment, the presence or absence of the at least one nucleotide sequence and/or difference indicates the microorganism is resistant to one or more antimicrobial drugs or to one or more types/classes of antimicrobial drugs.

[0089] In an embodiment, a diagnostic method for determining whether a patient is infected with a microorganism potentially resistant to an antimicrobial drug is provided, which method comprises (i) determining the presence or absence in a microorganism, contained or suspected of being contained in a sample obtained from the patient, of at least one nucleotide sequence identified in Table I or a variant of the nucleotide sequence, and/or (ii) determining the presence or absence in the microorganism of at least one difference in at least one nucleotide sequence identified in Table I compared with a reference sequence, wherein the presence or absence of the at least one nucleotide sequence and/or difference indicates that the patient is infected with an antimicrobial drug resistant microorganism.

[0090] In an embodiment, a method of selecting a treatment for a patient suffering from an infection with an antimicrobial drug resistant microorganism is provided, which method comprises (a)(i) determining the presence or absence in a microorganism, contained or suspected of being contained in a sample obtained from the patient, of at least one nucleotide sequence identified in Table I or a variant of the nucleotide sequence, and/or (a)(ii) determining the presence or absence in the microorganism of at least one difference in at least one nucleotide sequence identified in Table I compared with a reference sequence; (b) identifying the one or more antimicrobial drugs to which the microorganism is resistant; and (c) selecting one or more antimicrobial drugs different from those identified in step (b) and to which the microorganism is not resistant. The method can further comprise a step of administering the selected one or more antimicrobial drugs to the patient, e.g., in a method of treatment. The patient can be a vertebrate, preferably a mammal, for example, human, dog, cat, pig, horse, cattle, sheep, goat, mouse, or rat, preferably the patient is human.

[0091] In an embodiment, the at least one nucleotide sequence and/or the at least one difference in nucleotide sequence, the presence or absence of which in step (i) and/or (ii) is determined, is identified in rows 0 to 3840 of Table I, preferably in rows 0 to 3751 of Table I.

[0092] In an embodiment, the at least one nucleotide sequence and/or the at least one difference in nucleotide sequence, the presence or absence of which in step (i) and/or (ii) is determined, identified in the following rows of Table I is excluded in the methods of the invention: 3752 to 3840.

[0093] Exemplary antimicrobial drug classes include, but are not limited to lactams, such as monobactams, β-lactams, carbapenems; β-lactam inhibitors; penicillins; quinolones and derivatives thereof, preferably fluoroquinolones; aminoglycosides; polyketides; benzene-derived compounds, sulfonamides; tetracyclines; cephalosporins; lincosamides; macrolides; nitrofuranes; glycopeptides; oxazolidinones; ansamycins; carbacephems; and folate synthesis inhibitors. Exemplary antimicrobial drugs falling within the above classes include, but are not limited to amoxicillin/K clavulanate (AUG), ampicillin (AM), ampicillin/sulbactam (A/S), aztreonam (AZT), cefazolin (CFZ), cefepime (CPE), cefotaxime (CFT), ceftazidime (CAZ), ceftriaxone (CAX), cefuroxime (CRM), cephalotin (CF), ciprofloxacin (CP), ertapenem (ETP), gentamicin (GM), imipenem (IMP), levofloxacin (LVX), meropenem (MER), piperacillin/tazobactam (P/T), tetracycline (TE), tobramycin (TO), and trimethoprim/sulfamethoxazole (T/S).

[0094] In other embodiments, the method comprises determining the presence/absence of at least two, at least three, at least four, at least five, at least six, at least seven, at least eight, at least nine, at least ten, such as two or more, three or more, four or more, five or more, etc., nucleotide sequences/differences (AMRs). In an embodiment, the microorganism is the one identified in the same respective row as the nucleotide sequence/difference (AMR) in Table I and the antimicrobial drug to which resistance is associated is also identified in the same respective row as the nucleotide sequence/difference (AMR) in Table II. For example, for marker id AR000059 in row 17 of Table I, the marker when present, e.g., in Acinetobacter baumannii, indicates resistance to gentamicin in the aminoglycoside class of antimicrobial drugs, which indication for resistance has a p value of 4.2093×10⁻¹² as set forth in row 18 of Table II. This same maker when present, e.g., in Acinetobacter baumannii, also indicates resistance to ciprofloxacin in the fluoroquinolone class of antimicrobial drugs, which indication has a p value of 0.0245643 as set forth in row 1398 of Table II (see also row 1399 of Table II disclosing that the same marker indicates resistance to levofloxacin with a p value of 1.33364×10⁻¹²). This same marker when present also indicates resistance in Proteus mirabilis to, e.g., gentamicin, tobramycin, cefuroxime, cefotaxime, among others, see rows 37945, 37946, 38355, and 38505 of Table II. Thus, this marker not only indicates resistance to multiple antimicrobial drugs, but also to antimicrobial drugs in different classes and in different, unrelated microorganisms.

[0095] In another example, for marker id AR000503-G146* in row 1564 of Table I, when preferably a thymidine residue (T) is present at position 436 in the nucleotide sequence (a difference from the adenosine residue (A) present in the reference sequence), in, e.g., Escherichia coli, indicates resistance to ampicillin in the penicillin class of antimicrobial drugs, which indication has a p value of 4.07194×10⁻⁶ as set forth in row 22696 of Table II. Where the alternative amino acid is indicated by an asterix, this means that the change in the encoding nucleotide resulted in a stop codon and that the protein sequence terminates. In yet another example, for marker id AR003113-E729D in row 2764 of Table I, when preferably a thymidine residue (T) is present at position 2187 in the nucleotide sequence (a difference from the guanosine residue (G) present in the reference sequence), in, e.g., Proteus mirabilis, indicates resistance to tobramycin and ceftazidime, see rows 40092 and 40225 in Table II, respectively. This same marker also indicates resistance to multiple classes of antimicrobial drugs in Serratia marcescens, see rows 47084 (gentamicin) and 47271 (trimethoprim-sulfamethoxaole) in Table II.

[0096] In particular embodiments, the methods disclosed herein comprise determining the presence or absence of the at least one nucleotide sequence and determining the presence or absence of the at least one difference in a nucleotide sequence. In an embodiment, the methods of the invention can comprise determining the presence/absence of a combination of any number of nucleotide sequences/differences (AMRs). In an embodiment, only the nucleotide sequences/differences the presence of which is indicative of antimicrobial drug resistance are determined. In an embodiment, only the nucleotide sequences/differences the absence of which is indicative of antimicrobial drug resistance are determined.

[0097] In certain embodiments of the methods disclosed herein, antimicrobial drug resistance is indicated where the presence or absence of the difference in a particular nucleotide sequence can be any difference located at the position identified in Table I for that particular nucleotide sequence (nc_pos), i.e., any nucleotide except for the wild-type nucleotide. In certain embodiments of the methods disclosed herein, antimicrobial drug resistance is indicated where the presence or absence of the difference in a particular nucleotide sequence not only is located at the position identified in Table I for that particular nucleotide sequence but also where the specific difference at that position is as identified in Table I (nc_alt) for that particular nucleotide sequence. In an embodiment, the specific difference at the specific position also includes any difference in the same codon in which the specific position is located and which leads to the same or to a different change in the encoded amino acid sequence.

[0098] The present invention is based, in part, on the identification of antimicrobial resistance markers (AMRs), which when present or absent in a microorganism, are indicative of the microorganism being resistant to one or more antimicrobial drugs. In certain cases, the presence or absence of the AMR is directly responsible for the phenotypic change in resistance, in other cases, the presence or absence is statistically associated with such resistance. These markers are identified in Table I and have been identified in a number of different exemplary microorganisms, such as Achromobacter, Acinetobacter, Burkholderia, Citrobacter, Enterobacter, Escherichia, Klebsiella, Kluyvera, Lelliottia, Morganella, Pantoea, Pluralibacter, Proteus, Providencia, Pseudomonas, Raoultella, Salmonella, Serratia, Shigella, Staphylococcus, and Stenotrophomonas spp.

[0099] As used herein, a variant of a nucleotide sequence whose presence or absence is to be determined can be one that is at least 80%, at least 85%, at least 90%, at least 95%, at least 96%, at least 97%, at least 98%, or at least 99% identical over the entire length of the sequence compared to the corresponding nucleotide sequence disclosed herein. The variant can be a naturally occurring variant observed in other isolates of the sequence from the same microorganism, e.g., from the same genus or from the same species. In cases where the specified nucleotide sequence encodes a peptide/protein, the variant nucleotide sequence also will typically encode the same peptide/protein having essentially the same wild type amino acid sequence and activity. Essentially the same means that although there may be amino acid substitutions in the sequence, the encoded peptide/protein will have the same activity, though such activity may be increased or decreased. For example, the activity is decreased by no more than 5%, no more than 10%, no more than 15%, no more than 20%, no more than 25%, no more than 30%, no more than 35%, no more than 40%, no more than 45% or no more than 50%. Further, nucleotide sequences in which a difference in the sequence is to be determined can encompass variants of the sequence. A variant of the sequence can be one that is a naturally occurring variant in which there are differences at positions observed in other isolates of the sequence from the same microorganism, e.g., from the same genus or from the same species, other than the difference specified in Table I.

[0100] Table I identifies each AMR by an individual identifier number or a unique marker ID, and whether or not its presence or absence in the microorganism is indicative of (associated with) resistance of the microorganism to at least the listed antimicrobial drugs in Table II for that marker. For certain AMRs where the presence or absence of a difference in the nucleotide sequence is indicative of resistance, a preferred position (i.e., nc_pos or aa_pos) where the difference is located, as well as a preferred difference (i.e., nc_alt or as alt) in the sequence are disclosed in Table I. If there is any discrepancy between the identification number of an AMR in the text and in Tables I or II, the identification set forth in the tables is controlling. The abbreviated headings in Table I are “mrk_id”—marker ID; “nc_pos”/“aa_pos”—position in the nucleotide/amino acid sequence, respectively, of the difference; “nc_ref”/“aa_ref”—the wild-type nucleotide/amino acid residue, respectively, at that position; “nc_alt”/“aa_alt”—the preferred changed in the nucleotide/amino acid sequence, respectively, at that position whose presence or absence is associated with antimicrobial drug resistance.

[0101] Further, Table I in the column “Marker associated with Cross-Resistance” identifies the particular AMRs that are indicative of resistance to more than one class/type of antimicrobial drug, e.g., resistance to imipenem (a carbapenem) and tobramycin (an aminoglycoside), with the plus (+) symbol. “The minus (−) symbol means that the marker is indicative of resistance only to one class of antimicrobial drugs. In the column “Associated with resistance in multiple pathogens”, Table I identifies those markers with the plus (+) symbol that are associated with resistance in more than one type of microorganism. The minus (−) symbol means that the maker is indicative of resistance only in the one type of microorganism with which it is associated in Table I. In the column “cross-resistance in multiple pathogens”, Table I identifies those markers with the plus (+) symbol that are indicative of resistance to more than one class/type of antimicrobial drug in more than one type of microorganism. Any marker identified with a plus (+) symbol in one or more of these three columns is a preferred marker for use in the methods disclosed herein.

[0102] Table I also sets forth for each of the identified AMRs the sequence identifier number (SEQ ID NO) in the Sequence Listing for the nucleotide sequence (DNA Sequence) and its encoded amino acid sequence (PRT Sequence). The nucleotide and encoded amino acid sequences set forth in the Sequence Listing are the respective wild type/reference nucleotide and amino acid sequences, except where a difference in the sequence indicates antimicrobial drug resistance. In those AMRs, the preferred position of the difference is indicated by “n” in the nucleotide sequence and “Xaa” in the amino acid sequence.

[0103] In Table II, 25 drugs grouped into drug classes based on their category in the 2017 EUCAST guidelines (EUCAST. European Committee on Antimicrobial Susceptibility Testing Antifungal Agents Breakpoint tables for interpretation of MICs. Eucast 1-5) are disclosed: 5 drugs belong to cephalosporins (cefuroxime—2nd generation, cefotaxime, ceftazidime and ceftriaxone—3rd generation, cefepime—4th generation), 7 to penicillins, 3 to carbapenems, 3 to fluoroquinolones, 2 to aminoglycosides, in addition to 1 tetracycline, 1 monobactam, 1 folate pathway inhibitor, 1 lincosamide and 1 macrolide. It is important to note that even though Tables I and II deal with the same AMRs, the number of entries from Tables I will not match the number of entries in Table II since a single marker (single entry in Table I) can be reported as indicative of resistance against multiple compounds and in multiple microorganisms and, therefore, have more than one entry in Table II.

[0104] Table II also sets forth the performance of the respective marker in predicting resistance against the respective antimicrobial drug in a particular species using performance metrics such as sensitivity, specificity, accuracy, positive predictive value (ppv), and negative predictive value (npv).

[0105] As used herein, the reference sequence is the corresponding wild-type sequence in the microorganism for the particular nucleotide/amino acid sequence. The wild-type sequence can be the sequence found in same genus and/or same genus/species of the microorganism which is or is not resistant to the respective antimicrobial drug, depending on whether the presence or absence of the difference indicates resistance. The reference sequence can also be that disclosed in a reference database or be the result of sequencing a number of different isolates of the same microbial species where the sequence having the highest frequency is the reference sequence.

[0106] Where the microorganism is Acinetobacter spp., preferably Acinetobacter baumannii, Acinetobacter calcoaceticus, Acinetobacter haemolyticus, Acinetobacter nosocomialis, Acinetobacter pitti, or Acinetobacter sp. ADP1, the AMRs that when present or absent are indicative of resistance to at least one antimicrobial drug are preferably selected from those identified in rows 0 to 330 of Table I.

[0107] The AMRs can optionally further comprise those identified in rows 3752 to 3764 of Table I. A preferred difference in the nucleotide sequence identified in rows 184 to 281, 290, 326 to 330, and optionally in row 3764 of Table 1 is set forth in each of the same respective rows of Table I. The preferred at least one antimicrobial drug to which resistance is indicated by the presence or absence of the AMR is disclosed for the same respective marker ID of the AMR in Table II.

[0108] Those AMRs when present in Acinetobacter spp. which are indicative of resistance to at least one antimicrobial drug are preferably selected from those identified in rows 0 to 66, 73 to 83, 85 to 92, 94 to 99, 101, 103 to 108, 117 to 123, 125 to 127, 129 to 140, 142 to 145, 150 to 157, 161, 164, 166, 167, 170 to 183, 185, 186, 188, 190, 191, 195 to 202, 204, 205, 207 to 211, 213, 216 to 230, 234 to 247, 249 to 253, 255 to 263, 265, 267 to 270, and 272 to 282, 284, 285 to 290, 292 to 330 of Table I.

[0109] Those AMRs when absent in Acinetobacter spp. which are indicative of resistance to at least one antimicrobial drug are preferably selected from those identified in rows 67 to 72, 84, 93, 100, 102, 109 to 116, 124, 128, 141, 146 to 149, 158 to 160, 162, 163, 165, 168, 169, 184, 187, 189, 192 to 194, 203, 206, 212, 214, 215, 231 to 233, 248, 254, 264, 266, 271, 283, and 291 of Table I.

[0110] Those AMRs which involve a nucleotide sequence that when present in Acinetobacter spp. are indicative of resistance to at least one antimicrobial drug are preferably selected from those identified in rows 0 to 66, 73 to 83, 85 to 92, 94 to 99, 101, 103 to 108, 117 to 123, 125 to 127, 129 to 140, 142 to 145, 150 to 157, 161, 164, 166, 167, 170 to 183, 282, 284 to 289, 292 to 325, and 330 of Table I. Further, the AMRs which involve at least one difference in at least one nucleotide sequence compared to a reference sequence that when present are indicative of resistance to at least one antimicrobial drug are preferably selected from those identified in rows 185, 186, 188, 190, 191, 195 to 202, 204, 205, 207 to 211, 213, 216 to 230, 234 to 247, 249 to 253, 255 to 263, 265, 267 to 270, and 272 to 281, 290, and 326 to 329 in Table I.

[0111] Those AMRs which involve a nucleotide sequence that when absent in Acinetobacter spp. are indicative of resistance to at least one antimicrobial drug are preferably selected from those identified in rows 67 to 72, 84, 93, 100, 102, 109 to 116, 124, 128, 141, 146 to 149, 158 to 160, 162, 163, 165, 168, 169, 283, and 291 of Table I. Further, the AMRs which involve at least one difference in at least one nucleotide sequence compared to a reference sequence that when absent are indicative of resistance to at least one antimicrobial drug are preferably selected from those identified in rows 184, 187, 189, 192 to 194, 203, 206, 212, 214, 215, 231 to 233, 248, 254, 264, 266, and 271 in Table I.

[0112] Those AMRs when present in Acinetobacter baumannii which are indicative of resistance to at least one antimicrobial drug are preferably selected from those identified in rows 0 to 66, 73 to 83, 85 to 92, 94 to 99, 101, 103 to 108, 117 to 123, 125 to 127, 129 to 140, 142 to 145, 150 to 157, 161, 164, 166, 167, 170 to 183, 185, 186, 188, 190, 191, 195 to 202, 204, 205, 207 to 211, 213, 216 to 230, 234 to 247, 249 to 253, 255 to 263, 265, 267 to 270, and 272 to 281 of Table I. Those AMRs when absent in Acinetobacter baumannii which are indicative of resistance to at least one antimicrobial drug are preferably selected from those identified in rows 67 to 72, 84, 93, 100, 102, 109 to 116, 124, 128, 141, 146 to 149, 158 to 160, 162, 163, 165, 168, 169, 184, 187, 189, 192 to 194, 203, 206, 212, 214, 215, 231 to 233, 248, 254, 264, 266, and 271 of Table I.

[0113] Those AMRs when present in Acinetobacter calcoaceticus which are indicative of resistance to at least one antimicrobial drug are preferably selected from those identified in row 282 of Table I. Those AMRs when absent in Acinetobacter calcoaceticus which are indicative of resistance to at least one antimicrobial drug are preferably selected from those identified in row 283 of Table I.

[0114] Those AMRs when present in Acinetobacter haemolyticus which are indicative of resistance to at least one antimicrobial drug are preferably selected from those identified in row 284 of Table I.

[0115] Those AMRs when present in Acinetobacter nosocomialis which are indicative of resistance to at least one antimicrobial drug are preferably selected from those identified in rows 285 to 290 of Table I.

[0116] Those AMRs when present in Acinetobacter pitti which are indicative of resistance to at least one antimicrobial drug are preferably selected from those identified in rows 292 to 325 of Table I. Those AMRs when absent in Acinetobacter pitti which are indicative of resistance to at least one antimicrobial drug are preferably selected from those identified in row 291 of Table I.

[0117] Those AMRs when present in Acinetobacter sp. ADP1 which are indicative of resistance to at least one antimicrobial drug are preferably selected from those identified in row 330 of Table I.

[0118] In embodiments where the Acinetobacter microorganism is a particular species of Acinetobacter, the methods preferably comprise determining the presence and/or absence of the AMRs determined to be indicative of antimicrobial drug resistance in that species set forth in Table I.

[0119] It is intended that the foregoing disclosure regarding the AMRs for Acinetobacter spp. be equally applicable to all of the methods disclosed herein, in particular those methods which comprise steps of determining the presence or absence of nucleotide sequences and/or differences in nucleotide sequences. In an embodiment, those AMRs for Acinetobacter spp. having p values not greater than 0.1, 0.01, 0.001, 0.0001, 10⁻⁵, 10⁻¹⁰, or 10⁻²⁰ as set forth in Table II are the AMRs used in the methods disclosed herein to indicate antimicrobial drug resistance. In an embodiment, those AMRs for Acinetobacter spp. having ppv values greater than 0.7, 0.75, 0.8, 0.85, 0.9, 0.95, or 0.98 as set forth in Table II are the AMRs used in the methods disclosed herein to indicate antimicrobial drug resistance. In an embodiment, those AMRs for Acinetobacter spp. having p values not greater than 0.1, 0.01, 0.001, 0.0001, 10⁻⁵, 10⁻¹⁰, or 10⁻²⁰ as set forth in Table II and having ppv values greater than 0.7, 0.75, 0.8, 0.85, 0.9, 0.95, or 0.98 as set forth in Table II are the AMRs used in the methods disclosed herein to indicate antimicrobial drug resistance.

[0120] In accordance with the foregoing, in an exemplary embodiment, where the microorganism is Acinetobacter, the methods disclosed herein comprise (i) determining the presence and/or absence in Acinetobacter spp. of at least one nucleotide sequence identified in rows 0 to 183, 282 to 289, 291 to 325, and 330 of Table I or a variant of the nucleotide sequence, and/or (ii) determining the presence in Acinetobacter spp., of at least one difference in at least one nucleotide sequence identified in rows 184 to 281, 290, and 326 to 330 of Table I compared with a reference sequence.

[0121] In an embodiment, the method comprises determining the presence in Acinetobacter spp. of at least one nucleotide sequence identified in rows 0 to 66, 73 to 83, 85 to 92, 94 to 99, 101, 103 to 108, 117 to 123, 125 to 127, 129 to 140, 142 to 145, 150 to 157, 161, 164, 166, 167, 170 to 183, 282, 284 to 289, 292 to 325, and 330 of Table I or a variant of the nucleotide sequence. In an embodiment, the method comprises determining the presence in Acinetobacter spp. of at least one difference in at least one nucleotide sequence identified in rows 185, 186, 188, 190, 191, 195 to 202, 204, 205, 207 to 211, 213, 216 to 230, 234 to 247, 249 to 253, 255 to 263, 265, 267 to 270, and 272 to 281, 290, and 326 to 329 of Table I compared with a reference sequence.

[0122] In an embodiment, the method comprises determining the absence in Acinetobacter spp. of at least one nucleotide sequence identified in rows 67 to 72, 84, 93, 100, 102, 109 to 116, 124, 128, 141, 146 to 149, 158 to 160, 162, 163, 165, 168, 169, 283, and 291 of Table I or a variant of the nucleotide sequence. In an embodiment, the method comprises determining the absence in Acinetobacter spp. of at least one difference in at least one nucleotide sequence identified in rows 184, 187, 189, 192 to 194, 203, 206, 212, 214, 215, 231 to 233, 248, 254, 264, 266, and 271 of Table I compared with a reference sequence.

[0123] Where the microorganism is Citrobacter spp., preferably Citrobacter amalonaticus, Citrobacter braakii, Citrobacter freundii, Citrobacter koseri, Citrobacter pasteurii, Citrobacter portucalensis, Citrobacter rodentium, or Citrobacter werkmanii, the AMRs that when present or absent are indicative of resistance to at least one antimicrobial drug are preferably selected from those identified in rows 332 to 691 of Table I. The AMRs can optionally further comprise those identified in rows 3765 to 3767 of Table I. A preferred difference in the nucleotide sequence identified in rows 343, 344, 362 to 364, 420, 421, 582 to 633, 651, 652, and 684 to 689 of Table 1 is set forth in each of the same respective rows of Table I. The preferred at least one antimicrobial drug to which resistance is indicated by the presence or absence of the AMR is disclosed for the same respective marker ID of the AMR in Table II.

[0124] Those AMRs when present in Citrobacter spp. which are indicative of resistance to at least one antimicrobial drug are preferably selected from those identified in rows 332 to 344, 347 to 406, 408 to 419, 421 to 443, 445 to 449, 451 to 453, 455 to 476, 478 to 521, 525 to 608, 610 to 614, 616, 618 to 632, 634, 638, 639, 642 to 651, 653 to 655, 657, 659, 660, 663 to 667, 671 to 673, 675 to 680, and 688 to 691 of Table I.

[0125] Those AMRs when absent in Citrobacter spp. which are indicative of resistance to at least one antimicrobial drug are preferably selected from those identified in rows 345, 346, 407, 420, 444, 450, 454, 477, 522 to 524, 609, 615, 617, 633, 635 to 637, 640, 641, 652, 656, 658, 661, 662, 669, 670, 674, and 681 to 687 of Table I.

[0126] Those AMRs which involve a nucleotide sequence that when present in Citrobacter spp. are indicative of resistance to at least one antimicrobial drug are preferably selected from those identified in rows 332 to 342, 347 to 361, 365 to 406, 408 to 419, 422 to 443, 445 to 449, 451 to 453, 455 to 476, 478 to 521, 525 to 581, 634, 638, 639, 642 to 650, 653 to 655, 657, 659, 660, 663 to 667, 671 to 673, 675 to 680, 690, and 691 of Table I. Further, the AMRs which involve at least one difference in at least one nucleotide sequence compared to a reference sequence that when present are indicative of resistance to at least one antimicrobial drug are preferably selected from those identified in rows 343, 344, 362 to 364, 421, 582 to 608, 610 to 614, 616, 618 to 632, 651, 688 and 689 in Table I.

[0127] Those AMRs which involve a nucleotide sequence that when absent in Citrobacter spp. are indicative of resistance to at least one antimicrobial drug are preferably selected from those identified in rows 345, 346, 444, 450, 454, 477, 522 to 524, 635 to 637, 640, 641, 656, 658, 661, 662, 669, 670, 674, and 681 to 683 of Table I. Further, the AMRs which involve at least one difference in at least one nucleotide sequence compared to a reference sequence that when absent are indicative of resistance to at least one antimicrobial drug are preferably selected from those identified in rows 609, 615, 617, 633, 652, and 684 to 687 in Table I.

[0128] Those AMRs when present in Citrobacter amalonaticus which are indicative of resistance to at least one antimicrobial drug are preferably selected from those identified in rows 332 to 344 of Table I.

[0129] Those AMRs when present in Citrobacter braakii which are indicative of resistance to at least one antimicrobial drug are preferably selected from those identified in rows 347 to 364 of Table I. Those AMRs when absent in Citrobacter braakii which are indicative of resistance to at least one antimicrobial drug are preferably selected from those identified in rows 345 and 346 of Table I.

[0130] Those AMRs when present in Citrobacter freundii which are indicative of resistance to at least one antimicrobial drug are preferably selected from those identified in rows 365 to 406, 408 to 419, and 421 of Table I. Those AMRs when absent in Citrobacter freundii which are indicative of resistance to at least one antimicrobial drug are preferably selected from those identified in rows 407 and 420 of Table I.

[0131] Those AMRs when present in Citrobacter koseri which are indicative of resistance to at least one antimicrobial drug are preferably selected from those identified in rows 422 to 443, 445 to 449, 451 to 453, 455 to 476, 478 to 521, 525 to 608, 610 to 614, 616, 618 to 632 of Table I. Those AMRs when absent in Citrobacter koseri which are indicative of resistance to at least one antimicrobial drug are preferably selected from those identified in rows 444, 450, 454, 477, 522 to 524, 609, 615, 617, and 633 of Table I.

[0132] Those AMRs when present in Citrobacter pasteurii which are indicative of resistance to at least one antimicrobial drug are preferably selected from those identified in rows 634, 638, 639, and 642 to 651 of Table I. Those AMRs when absent in Citrobacter pasteurii which are indicative of resistance to at least one antimicrobial drug are preferably selected from those identified in rows 635 to 637, 640, 641, and 652 of Table I.

[0133] Those AMRs when present in Citrobacter portucalensis which are indicative of resistance to at least one antimicrobial drug are preferably selected from those identified in rows 653 to 655, and 657 of Table I. Those AMRs when absent in Citrobacter portucalensis which are indicative of resistance to at least one antimicrobial drug are preferably selected from those identified in rows 656 of Table I.

[0134] Those AMRs when present in Citrobacter rodentium which are indicative of resistance to at least one antimicrobial drug are preferably selected from those identified in rows 659, 660, 663 to 667, 671 to 673, 675 to 680, 688, and 689 of Table I. Those AMRs when absent in Citrobacter rodentium which are indicative of resistance to at least one antimicrobial drug are preferably selected from those identified in rows 658, 661, 662, 669, 670, 674, and 681 to 687 of Table I.

[0135] Those AMRs when present in Citrobacter werkmanii which are indicative of resistance to at least one antimicrobial drug are preferably selected from those identified in rows 690 and 691 of Table I.

[0136] In embodiments where the Citrobacter microorganism is a particular species of Citrobacter, the methods preferably comprise determining the presence and/or absence of the AMRs determined to be indicative of antimicrobial drug resistance in that species set forth in Table I.

[0137] It is intended that the foregoing disclosure regarding the AMRs for Citrobacter spp. be equally applicable to all of the methods disclosed herein, in particular those methods which comprise steps of determining the presence or absence of nucleotide sequences and/or differences in nucleotide sequences.

[0138] In an embodiment, those AMRs for Citrobacter spp. having p values not greater than 0.1, 0.01, 0.001, 0.0001, 10⁻⁵, 10⁻¹⁰, or 10⁻²⁰ as set forth in Table II are the AMRs used in the methods disclosed herein to indicate antimicrobial drug resistance. In an embodiment, those AMRs for Acinetobacter spp. having ppv values greater than 0.7, 0.75, 0.8, 0.85, 0.9, 0.95, or 0.98 as set forth in Table II are the AMRs used in the methods disclosed herein to indicate antimicrobial drug resistance. In an embodiment, those AMRs for Citrobacter spp. having p values not greater than 0.1, 0.01, 0.001, 0.0001, 10⁻⁵, 10⁻¹⁰, or 10⁻²⁰ as set forth in Table II and having ppv values greater than 0.7, 0.75, 0.8, 0.85, 0.9, 0.95, or 0.98 as set forth in Table II are the AMRs used in the methods disclosed herein to indicate antimicrobial drug resistance.

[0139] In accordance with the foregoing, in an exemplary embodiment, where the microorganism is Citrobacter, the methods disclosed herein comprise (i) determining the presence and/or absence in Citrobacter spp. of at least one nucleotide sequence identified in rows 332 to 342, 347 to 361, 365 to 406, 408 to 419, 422 to 443, 445 to 449, 451 to 453, 455 to 476, 478 to 521, 525 to 581, 634, 638, 639, 642 to 650, 653 to 655, 657, 659, 660, 663 to 667, 671 to 673, 675 to 680, 690, and 691 of Table I or a variant of the nucleotide sequence, and/or (ii) determining the presence and/or absence in Citrobacter spp., of at least one difference in at least one nucleotide sequence identified in rows 343, 344, 362 to 364, 421, 582 to 608, 610 to 614, 616, 618 to 632, 651, 688 and 689 of Table I compared with a reference sequence.

[0140] In an embodiment, the method comprises determining the presence in Citrobacter spp. of at least one nucleotide sequence identified in rows 332 to 342, 347 to 361, 365 to 406, 408 to 419, 422 to 443, 445 to 449, 451 to 453, 455 to 476, 478 to 521, 525 to 581, 634, 638, 639, 642 to 650, 653 to 655, 657, 659, 660, 663 to 667, 671 to 673, 675 to 680, 690, and 691 of Table I or a variant of the nucleotide sequence. In an embodiment, the method comprises determining the presence in Citrobacter spp. of at least one difference in at least one nucleotide sequence identified in rows 343, 344, 362 to 364, 421, 582 to 608, 610 to 614, 616, 618 to 632, 651, 688 and 689 of Table I compared with a reference sequence.

[0141] In an embodiment, the method comprises determining the absence in Citrobacter spp. of at least one nucleotide sequence identified in rows 345, 346, 444, 450, 454, 477, 522 to 524, 635 to 637, 640, 641, 656, 658, 661, 662, 669, 670, 674, and 681 to 683 of Table I or a variant of the nucleotide sequence. In an embodiment, the method comprises determining the absence in Citrobacter spp. of at least one difference in at least one nucleotide sequence identified in rows 609, 615, 617, 633, 652, and 684 to 687 of Table I compared with a reference sequence.

[0142] Where the microorganism is Escherichia spp., preferably Escherichia coli, the AMRs that when present or absent are indicative of resistance to at least one antimicrobial drug are preferably selected from those identified in rows 1248 to 1586 of Table I. The AMRs can optionally further comprise those identified in rows 3778 to 3784 of Table I. A preferred difference in the nucleotide sequence identified in rows 1500 to 1586 of Table I is set forth in each of the same respective rows of Table I. The preferred at least one antimicrobial drug to which resistance is indicated by the presence of the AMR is disclosed for the same respective marker ID of the AMR in Table II.

[0143] Those AMRs which involve a nucleotide sequence that when present in Escherichia spp. are indicative of resistance to at least one antimicrobial drug are preferably selected from those identified in rows 1248 to 1253, 1255 to 1484, 1487 to 1499 of Table I. Further, the AMRs which involve at least one difference in at least one nucleotide sequence compared to a reference sequence that when present are indicative of resistance to at least one antimicrobial drug are preferably selected from those identified in rows 1500 to 1579 and 1583 to 1586 in Table I.

[0144] Those AMRs which involve a nucleotide sequence that when absent in Escherichia spp. are indicative of resistance to at least one antimicrobial drug are preferably selected from those identified in rows 1254, 1485, and 1486 of Table I. Further, the AMRs which involve at least one difference in at least one nucleotide sequence compared to a reference sequence that when absent are indicative of resistance to at least one antimicrobial drug are preferably selected from those identified in rows 1580 to 1582 in Table I.

[0145] It is intended that the foregoing disclosure regarding the AMRs for Escherichia spp. be equally applicable to all of the methods disclosed herein, in particular those methods which comprise steps of determining the presence or absence of nucleotide sequences and/or differences in nucleotide sequences. In an embodiment, those AMRs for Escherichia spp. having p values not greater than 0.1, 0.01, 0.001, 0.0001, 10⁻⁵, 10⁻¹⁰, or 10⁻²⁰ as set forth in Table II are the AMRs used in the methods disclosed herein to indicate antimicrobial drug resistance. In an embodiment, those AMRs for Escherichia spp. having ppv values greater than 0.7, 0.75, 0.8, 0.85, 0.9, 0.95, or 0.98 as set forth in Table II are the AMRs used in the methods disclosed herein to indicate antimicrobial drug resistance. In an embodiment, those AMRs for Escherichia spp. having p values not greater than 0.1, 0.01, 0.001, 0.0001, 10⁻⁵, 10⁻¹⁰, or 10⁻²⁰ as set forth in Table II and having ppv values greater than 0.7, 0.75, 0.8, 0.85, 0.9, 0.95, or 0.98 as set forth in Table II are the AMRs used in the methods disclosed herein to indicate antimicrobial drug resistance.

[0146] In accordance with the foregoing, in an exemplary embodiment, where the microorganism is Escherichia, the methods disclosed herein comprise (i) determining the presence and/or absence in Escherichia spp. of at least one nucleotide sequence identified in rows 1248 to 1499 of Table I or a variant of the nucleotide sequence, and/or (ii) determining the presence and/or absence in Escherichia spp. of at least one difference in at least one nucleotide sequence identified in rows 1500 to 1586 of Table I compared with a reference sequence.

[0147] In an embodiment, the method comprises determining the presence in Escherichia spp. of at least one nucleotide sequence identified in rows 1248 to 1253, 1255 to 1484, 1487 to 1499 of Table I or a variant of the nucleotide sequence. In an embodiment, the method comprises determining the presence in Escherichia spp. of at least one difference in at least one nucleotide sequence identified in rows 1500 to 1579 and 1583 to 1586 of Table I compared with a reference sequence.

[0148] In an embodiment, the method comprises determining the absence in Escherichia spp. of at least one nucleotide sequence identified in rows 1254, 1485, and 1486 of Table I or a variant of the nucleotide sequence. In an embodiment, the method comprises determining the absence in Escherichia spp. of at least one difference in at least one nucleotide sequence identified in rows 1580 to 1582 of Table I compared with a reference sequence.

[0149] Where the microorganism is Klebsiella spp., preferably Klebsiella aerogenes, Klebsiella michiganensis, Klebsiella oxytoca, Klebsiella pneumoniae, Klebsiella quasipneumoniae or Klebsiella variicola the AMRs that when present or absent are indicative of resistance to at least one antimicrobial drug are preferably selected from those identified in rows 1587 to 2448 of Table I. The AMRs can optionally further comprise those identified in rows 3785 to 3797 of Table I. A preferred difference in the nucleotide sequence identified in rows 1697 to 1742, 1783 to 1791, 2134 to 2207, 2397 to 2424, 2428 to 2430, 2447, and 2448 of Table 1 is set forth in each of the same respective rows of Table I. The preferred at least one antimicrobial drug to which resistance is indicated by the presence or absence of the AMR is disclosed for the same respective marker ID of the AMR in Table II.

[0150] Those AMRs when present in Klebsiella spp. which are indicative of resistance to at least one antimicrobial drug are preferably selected from those identified in rows 1587 to 1717, 1719 to 1736, 1739 to 1744, 1746 to 1749, 1752 to 1754, 1756 to 1765, 1767 to 1773, 1775 to 1780, 1782, 1784, 1786, 1788, 1789, 1792 to 1794, 1796, 1797, 1800, 1803, 1804, 1806, 1807, 1820, 1821, 1829 to 1834, 1836 to 1841, 1843 to 1864, 1866 to 1878, 1880 to 1887, 1889 to 1910, 1912 to 2027, 2034 to 2040, 2045 to 2051, 2058, 2059, 2061 to 2066, 2077, 2079, 2082, 2084 to 2090, 2093, 2094, 2100, 2110 to 2116, 2119 to 2121, 2132 to 2134, 2136, 2139 to 2148, 2150 to 2154, 2156 to 2171, 2173, 2175, 2177 to 2185, 2187, 2188, 2193, 2194, 2196 to 2199, 2202, 2204, 2206 to 2211, 2213 to 2222, 2264 to 2273, 2275 to 2380, 2382 to 2388, 2390 to 2397, 2401, 2403, 2409 to 2415, 2417 to 2420, 2422 to 2425, 2427 to 2431, 2441, 2442, and 2444 to 2447 of Table I.

[0151] Those AMRs when absent in Klebsiella spp. which are indicative of resistance to at least one antimicrobial drug are preferably selected from those identified in rows 1718, 1737, 1738, 1740, 1745, 1750, 1751, 1755, 1766, 1774, 1781, 1783, 1785, 1787, 1790, 1791, 1795, 1798, 1799, 1801, 1802, 1805, 1808 to 1819, 1822 to 1828, 1835, 1842, 1865, 1879, 1888, 1911, 2028 to 2033, 2041 to 2044, 2052 to 2057, 2060, 2067 to 2076, 2078, 2080, 2081, 2083, 2091, 2092, 2095 to 2099, 2101 to 2109, 2117, 2118, 2122 to 2131, 2135, 2137, 2138, 2149, 2155, 2172, 2174, 2176, 2186, 2189 to 2192, 2195, 2200, 2201, 2203, 2205, 2212, 2223 to 2263, 2274, 2381, 2389, 2398 to 2400, 2402, 2405 to 2408, 2416, 2421, 2426, 2432 to 2440, 2443, and 2448 of Table I.

[0152] Those AMRs which involve a nucleotide sequence that when present in Klebsiella spp. are indicative of resistance to at least one antimicrobial drug are preferably selected from those identified in rows 1587 to 1696, 1743, 1744, 1746 to 1749, 1752 to 1754, 1756 to 1765, 1767 to 1773, 1775 to 1780, 1782, 1792 to 1794, 1796, 1797, 1800, 1803, 1804, 1806, 1807, 1820, 1821, 1829 to 1834, 1836 to 1841, 1843 to 1864, 1866 to 1878, 1880 to 1887, 1889 to 1910, 1912 to 2027, 2034 to 2040, 2045 to 2051, 2058, 2059, 2061 to 2066, 2077, 2079, 2082, 2084 to 2090, 2093, 2094, 2100, 2110 to 2116, 2119 to 2121, 2132, 2133, 2208 to 2211, 2213 to 2222, 2264 to 2273, 2275 to 2380, 2382 to 2388, 2390 to 2396, 2425, 2427, 2431, 2441, 2442, and 2444 to 2446 of Table I. Further, the AMRs which involve at least one difference in at least one nucleotide sequence compared to a reference sequence that when present are indicative of resistance to at least one antimicrobial drug are preferably selected from those identified in rows 1697 to 1717, 1719 to 1736, 1739, 1741, 1742, 1784, 1786, 1788, 1789, 2134, 2136, 2139 to 2148, 2150 to 2154, 2156 to 2171, 2173, 2175, 2177 to 2185, 2187, 2188, 2193, 2194, 2196 to 2199, 2202, 2204, 2206, 2207, 2397 to 2397, 2401, 2403, 2409 to 2415, 2417 to 2420, 2422 to 2424, 2428 to 2430, and 2447 in Table I.

[0153] Those AMRs which involve a nucleotide sequence that when absent in Klebsiella spp. are indicative of resistance to at least one antimicrobial drug are preferably selected from those identified in rows 1745, 1750, 1751, 1755, 1766, 1774, 1781, 1795, 1798, 1799, 1801, 1802, 1805, 1808 to 1819, 1822 to 1828, 1835, 1842, 1865, 1879, 1888, 1911, 2028 to 2033, 2041 to 2044, 2052 to 2057, 2060, 2067 to 2076, 2078, 2080, 2081, 2083, 2091, 2092, 2095 to 2099, 2101 to 2109, 2117, 2118, 2122 to 2131, 2212, 2223 to 2263, 2274, 2381, 2389, 2426, 2432 to 2440, and 2443 of Table I. Further, the AMRs which involve at least one difference in at least one nucleotide sequence compared to a reference sequence that when absent are indicative of resistance to at least one antimicrobial drug are preferably selected from those identified in rows 1718, 1737, 1738, 1740, 1783, 1785, 1787, 1790, 1791, 2135, 2137, 2138, 2149, 2155, 2172, 2174, 2176, 2186, 2189 to 2192, 2195, 2200, 2201, 2203, 2205, 2398 to 2400, 2402, 2405 to 2408, 2416, 2421, and 2448 in Table I.

[0154] Those AMRs when present in Klebsiella aerogenes which are indicative of resistance to at least one antimicrobial drug are preferably selected from those identified in rows 1587 to 1696, 1697 to 1717, 1719 to 1736, 1739, 1741, and 1742 of Table I. Those AMRs when absent in Klebsiella aerogenes which are indicative of resistance to at least one antimicrobial drug are preferably selected from those identified in rows 1718, 1737, 1738 and 1740 of Table I.

[0155] Those AMRs when present in Klebsiella michiganensis which are indicative of resistance to at least one antimicrobial drug are preferably selected from those identified in rows 1743, 1744, 1746 to 1749, 1752 to 1754, 1756 to 1765, 1767 to 1773, 1775 to 1780, 1782, 1784, 1786, 1788, and 1789 of Table I. Those AMRs when absent in Klebsiella michiganensis which are indicative of resistance to at least one antimicrobial drug are preferably selected from those identified in rows 1745, 1750, 1751, 1755, 1766, 1774, 1781, 1783, 1785, 1787, 1790, and 1791 of Table I.

[0156] Those AMRs when present in Klebsiella oxytoca which are indicative of resistance to at least one antimicrobial drug are preferably selected from those identified in rows 1792 to 1794, 1796, 1797, 1800, 1803, 1804, 1806, 1807, 1820, 1821, 1829 to 1834, 1836 to 1841, 1843 to 1864, 1866 to 1878, 1880 to 1887, 1889 to 1910, 1912 to 2027, 2034 to 2040, 2045 to 2051, 2058, 2059, 2061 to 2066, 2077, 2079, 2082, 2084 to 2090, 2093, 2094, 2100, 2110 to 2116, 2119 to 2121, 2132, 2133, 2134, 2136, 2139 to 2148, 2150 to 2154, 2156 to 2171, 2173, 2175, 2177 to 2185, 2187, 2188, 2193, 2194, 2196 to 2199, 2202, 2204, 2206, and 2207 of Table I. Those AMRs when absent in Klebsiella oxytoca which are indicative of resistance to at least one antimicrobial drug are preferably selected from those identified in rows 1795, 1798, 1799, 1801, 1802, 1805, 1808 to 1819, 1822 to 1828, 1835, 1842, 1865, 1879, 1888, 1911, 2028 to 2033, 2041 to 2044, 2052 to 2057, 2060, 2067 to 2076, 2078, 2080, 2081, 2083, 2091, 2092, 2095 to 2099, 2101 to 2109, 2117, 2118, 2122 to 2131, 2135, 2137, 2138, 2149, 2155, 2172, 2174, 2176, 2186, 2189 to 2192, 2195, 2200, 2201, 2203, and 2205 of Table I.

[0157] Those AMRs when present in Klebsiella pneumoniae which are indicative of resistance to at least one antimicrobial drug are preferably selected from those identified in rows 2208 to 2211, 2213 to 2222, 2264 to 2273, 2275 to 2380, 2382 to 2388, 2390 to 2396, 2397 to 2397, 2401, 2403, 2409 to 2415, 2417 to 2420, and 2422 to 2424 of Table I. Those AMRs when absent in Klebsiella pneumoniae which are indicative of resistance to at least one antimicrobial drug are preferably selected from those identified in rows 2212, 2223 to 2263, 2274, 2381, 2389, 2398 to 2400, 2402, 2405 to 2408, 2416, and 2421 of Table I.

[0158] Those AMRs when present in Klebsiella quasipneumoniae which are indicative of resistance to at least one antimicrobial drug are preferably selected from those identified in rows 2425, and 2427 to 2430 of Table I. Those AMRs when absent in Klebsiella quasipneumoniae which are indicative of resistance to at least one antimicrobial drug are preferably selected from those identified in row 2426 of Table I.

[0159] Those AMRs when present in Klebsiella variicola which are indicative of resistance to at least one antimicrobial drug are preferably selected from those identified in rows 2431, 2441, 2442, and 2444 to 2447 of Table I. Those AMRs when absent in Klebsiella variicola which are indicative of resistance to at least one antimicrobial drug are preferably selected from those identified in row 2448 of Table I. In embodiments where the Klebsiella microorganism is a particular species of Klebsiella, the methods preferably comprise determining the presence and/or absence of the AMRs determined to be indicative of antimicrobial drug resistance in that species set forth in Table I.

[0160] It is intended that the foregoing disclosure regarding the AMRs for Klebsiella spp. be equally applicable to all of the methods disclosed herein, in particular those methods which comprise steps of determining the presence or absence of nucleotide sequences and/or differences in nucleotide sequences. In an embodiment, those AMRs for Klebsiella spp. having p values not greater than 0.1, 0.01, 0.001, 0.0001, 10⁻⁵, 10⁻¹⁰, or 10⁻²⁰ as set forth in Table II are the AMRs used in the methods disclosed herein to indicate antimicrobial drug resistance. In an embodiment, those AMRs for Klebsiella spp. having ppv values greater than 0.7, 0.75, 0.8, 0.85, 0.9, 0.95, or 0.98 as set forth in Table II are the AMRs used in the methods disclosed herein to indicate antimicrobial drug resistance. In an embodiment, those AMRs for Klebsiella spp. having p values not greater than 0.1, 0.01, 0.001, 0.0001, 10⁻⁵, 10⁻¹⁰, or 10⁻²⁰ as set forth in Table II and having ppv values greater than 0.7, 0.75, 0.8, 0.85, 0.9, 0.95, or 0.98 as set forth in Table II are the AMRs used in the methods disclosed herein to indicate antimicrobial drug resistance.

[0161] In accordance with the foregoing, in an exemplary embodiment, where the microorganism is Klebsiella, the methods disclosed herein comprise (i) determining the presence and/or absence in Klebsiella spp. of at least one nucleotide sequence identified in rows 1587 to 1696, 1743 to 1782, 1792 to 2133, 2208 to 2396, 2425 to 2427, and 2431 to 2446 of Table I or a variant of the nucleotide sequence, and/or (ii) determining the presence and/or absence in Klebsiella spp., of at least one difference in at least one nucleotide sequence identified in rows 1697 to 1742, 1783 to 1791, 2134 to 2207, 2397 to 2424, 2428 to 2430, 2447, and 2448 of Table I compared with a reference sequence.

[0162] In an embodiment, the method comprises determining the presence in Klebsiella spp. of at least one nucleotide sequence identified in rows 1587 to 1696, 1743, 1744, 1746 to 1749, 1752 to 1754, 1756 to 1765, 1767 to 1773, 1775 to 1780, 1782, 1792 to 1794, 1796, 1797, 1800, 1803, 1804, 1806, 1807, 1820, 1821, 1829 to 1834, 1836 to 1841, 1843 to 1864, 1866 to 1878, 1880 to 1887, 1889 to 1910, 1912 to 2027, 2034 to 2040, 2045 to 2051, 2058, 2059, 2061 to 2066, 2077, 2079, 2082, 2084 to 2090, 2093, 2094, 2100, 2110 to 2116, 2119 to 2121, 2132, 2133, 2208 to 2211, 2213 to 2222, 2264 to 2273, 2275 to 2380, 2382 to 2388, 2390 to 2396, 2425, 2427, 2431, 2441, 2442, and 2444 to 2446 of Table I or a variant of the nucleotide sequence. In an embodiment, the method comprises determining the presence in Klebsiella spp. of at least one difference in at least one nucleotide sequence identified in rows 1697 to 1717, 1719 to 1736, 1739, 1741, 1742, 1784, 1786, 1788, 1789, 2134, 2136, 2139 to 2148, 2150 to 2154, 2156 to 2171, 2173, 2175, 2177 to 2185, 2187, 2188, 2193, 2194, 2196 to 2199, 2202, 2204, 2206, 2207, 2397 to 2397, 2401, 2403, 2409 to 2415, 2417 to 2420, 2422 to 2424, 2428 to 2430, and 2447 of Table I compared with a reference sequence.

[0163] In an embodiment, the method comprises determining the absence in Klebsiella spp. of at least one nucleotide sequence identified in rows 1745, 1750, 1751, 1755, 1766, 1774, 1781, 1795, 1798, 1799, 1801, 1802, 1805, 1808 to 1819, 1822 to 1828, 1835, 1842, 1865, 1879, 1888, 1911, 2028 to 2033, 2041 to 2044, 2052 to 2057, 2060, 2067 to 2076, 2078, 2080, 2081, 2083, 2091, 2092, 2095 to 2099, 2101 to 2109, 2117, 2118, 2122 to 2131, 2212, 2223 to 2263, 2274, 2381, 2389, 2426, 2432 to 2440, and 2443 of Table I or a variant of the nucleotide sequence. In an embodiment, the method comprises determining the absence in Klebsiella spp. of at least one difference in at least one nucleotide sequence identified in rows 1718, 1737, 1738, 1740, 1783, 1785, 1787, 1790, 1791, 2135, 2137, 2138, 2149, 2155, 2172, 2174, 2176, 2186, 2189 to 2192, 2195, 2200, 2201, 2203, 2205, 2398 to 2400, 2402, 2405 to 2408, 2416, 2421, and 2448 of Table I compared with a reference sequence.

[0164] Where the microorganism is Morganella spp., preferably Morganella morganii, the AMRs that when present or absent are indicative of resistance to at least one antimicrobial drug are preferably selected from those identified in 2460 to 2621 of Table I. The AMRs can further comprise those identified in row 3798 of Table I. A preferred difference in the nucleotide sequence identified in rows 2570 to2621 of Table I is set forth in each of the same respective rows of Table I. The preferred at least one antimicrobial drug to which resistance is indicated by the presence of the AMR is disclosed for the same respective marker ID of the AMR in Table II.

[0165] Those AMRs when present in Morganella spp. which are indicative of resistance to at least one antimicrobial drug are preferably selected from those identified in rows 2460 to 2471, 2473 to 2488, 2490 to 2495, 2511 to 2515, 2519 to 2523, 2525, 2526, 2528 to 2530, 2539 to 2586, 2588, 2589, 2591 to 2621 of Table I.

[0166] Those AMRs when absent in Morganella spp. which are indicative of resistance to at least one antimicrobial drug are preferably selected from those identified in rows 2472, 2489, 2496 to 2510, 2516 to 2518, 2524, 2527, 2531 to 2538, 2587, and 2590 of Table I.

[0167] Those AMRs which involve a nucleotide sequence that when present in Morganella spp. are indicative of resistance to at least one antimicrobial drug are preferably selected from those identified in rows 2460 to 2471, 2473 to 2488, 2490 to 2495, 2511 to 2515, 2519 to 2523, 2525, 2526, 2528 to 2530, 2539 to 2569 of Table I. Further, the AMRs which involve at least one difference in at least one nucleotide sequence compared to a reference sequence that when present are indicative of resistance to at least one antimicrobial drug are preferably selected from those identified in rows 2570 to 2586, 2588, 2589, 2591 to 2621 in Table I.

[0168] Those AMRs which involve a nucleotide sequence that when absent in Morganella spp. are indicative of resistance to at least one antimicrobial drug are preferably selected from those identified in rows 2472, 2489, 2496 to 2510, 2516 to 2518, 2524, 2527, and 2531 to 2538 of Table I. Further, the AMRs which involve at least one difference in at least one nucleotide sequence compared to a reference sequence that when absent are indicative of resistance to at least one antimicrobial drug are preferably selected from those identified in rows 2587, and 2590 in Table I.

[0169] It is intended that the foregoing disclosure regarding the AMRs for Morganella spp. be equally applicable to all of the methods disclosed herein, in particular those methods which comprise steps of determining the presence or absence of nucleotide sequences and/or differences in nucleotide sequences. In an embodiment, those AMRs for Morganella spp. having p values not greater than 0.1, 0.01, 0.001, 0.0001, 10⁻⁵, 10⁻¹⁰, or 10⁻²⁰ as set forth in Table II are the AMRs used in the methods disclosed herein to indicate antimicrobial drug resistance. In an embodiment, those AMRs for Morganella spp. having ppv values greater than 0.7, 0.75, 0.8, 0.85, 0.9, 0.95, or 0.98 as set forth in Table II are the AMRs used in the methods disclosed herein to indicate antimicrobial drug resistance. In an embodiment, those AMRs for Morganella spp. having p values not greater than 0.1, 0.01, 0.001, 0.0001, 10⁻⁵, 10⁻¹⁰, or 10⁻²⁰ as set forth in Table II and having ppv values greater than 0.7, 0.75, 0.8, 0.85, 0.9, 0.95, or 0.98 as set forth in Table II are the AMRs used in the methods disclosed herein to indicate antimicrobial drug resistance.

[0170] In accordance with the foregoing, in an exemplary embodiment, where the microorganism is Morganella, the methods disclosed herein comprise (i) determining the presence and/or absence in Morganella spp. of at least one nucleotide sequence identified in rows 2460 to 2569 of Table I or a variant of the nucleotide sequence, and/or (ii) determining the presence and/or absence in Morganella spp., of at least one difference in at least one nucleotide sequence identified in rows 2570 to 2621 of Table I compared with a reference sequence.

[0171] In an embodiment, the method comprises determining the presence in Morganella spp. of at least one nucleotide sequence identified in rows 2460 to 2471, 2473 to 2488, 2490 to 2495, 2511 to 2515, 2519 to 2523, 2525, 2526, 2528 to 2530, 2539 to 2569 of Table I or a variant of the nucleotide sequence. In an embodiment, the method comprises determining the presence in Morganella spp. of at least one difference in at least one nucleotide sequence identified in rows 2570 to 2586, 2588, 2589, 2591 to 2621 of Table I compared with a reference sequence.

[0172] In an embodiment, the method comprises determining the absence in Morganella spp. of at least one nucleotide sequence identified in rows 2472, 2489, 2496 to 2510, 2516 to 2518, 2524, 2527, and 2531 to 2538 of Table I or a variant of the nucleotide sequence. In an embodiment, the method comprises determining the absence in Morganella spp. of at least one difference in at least one nucleotide sequence identified in rows 2587 and 2590 of Table I compared with a reference sequence.

[0173] Where the microorganism is Proteus spp., preferably Proteus mirabilis or Proteus vulgaris, the AMRs that when present or absent are indicative of resistance to at least one antimicrobial drug are preferably selected from those identified in rows 2623 to 2792 of Table I. The AMRs can further comprise those identified in rows 3799 to 3807 of Table I. A preferred difference in the nucleotide sequence identified in rows 2755 to 2788 of Table 1 is set forth in each of the same respective rows of Table I. The preferred at least one antimicrobial drug to which resistance is indicated by the presence or absence of the AMR is disclosed for the same respective marker ID of the AMR in Table II.

[0174] Those AMRs when present in Proteus spp. which are indicative of resistance to at least one antimicrobial drug are preferably selected from those identified in rows 2623 to 2636, 2639, 2646 to 2663, and 2665 to 2792 of Table I.

[0175] Those AMRs when absent in Proteus spp. which are indicative of resistance to at least one antimicrobial drug are preferably selected from those identified in rows 2637, 2638, 2640 to 2645, and 2664 of Table I.

[0176] Those AMRs which involve a nucleotide sequence that when present in Proteus spp. are indicative of resistance to at least one antimicrobial drug are preferably selected from those identified in rows 2623 to 2636, 2639, 2646 to 2754, and 2789 to 2792 of Table I. Further, the AMRs which involve at least one difference in at least one nucleotide sequence compared to a reference sequence that when present are indicative of resistance to at least one antimicrobial drug are preferably selected from those identified in rows 2755 to 2663, and 2665 to 2788 in Table I.

[0177] Those AMRs which involve a nucleotide sequence that when absent in Proteus spp. are indicative of resistance to at least one antimicrobial drug are preferably selected from those identified in rows 2637, 2638, and 2640 to 2645 of Table I. Further, the AMRs which involve at least one difference in at least one nucleotide sequence compared to a reference sequence that when absent are indicative of resistance to at least one antimicrobial drug are preferably selected from those identified in row 2664 in Table I.

[0178] Those AMRs when present in Proteus mirabilis which are indicative of resistance to at least one antimicrobial drug are preferably selected from those identified in rows 2623 to 2636, 2639, 2646 to 2663, and 2665 to 2788 of Table I. Those AMRs when absent in Proteus mirabilis which are indicative of resistance to at least one antimicrobial drug are preferably selected from those identified in rows 2637, 2638, 2640 to 2645, and 2664 of Table I.

[0179] Those AMRs when present in Proteus vulgaris which are indicative of resistance to at least one antimicrobial drug are preferably selected from those identified in rows 2789 to 2792 of Table I.

[0180] In embodiments where the Proteus microorganism is a particular species of Proteus, the methods preferably comprise determining the presence and/or absence of the AMRs determined to be indicative of antimicrobial drug resistance in that species set forth in Table I.

[0181] It is intended that the foregoing disclosure regarding the AMRs for Proteus spp. be equally applicable to all of the methods disclosed herein, in particular those methods which comprise steps of determining the presence or absence of nucleotide sequences and/or differences in nucleotide sequences. In an embodiment, those AMRs for Proteus spp. having p values not greater than 0.1, 0.01, 0.001, 0.0001, 10⁻⁵, 10⁻¹⁰, or 10⁻²⁰ as set forth in Table II are the AMRs used in the methods disclosed herein to indicate antimicrobial drug resistance. In an embodiment, those AMRs for Proteus spp. having ppv values greater than 0.7, 0.75, 0.8, 0.85, 0.9, 0.95, or 0.98 as set forth in Table II are the AMRs used in the methods disclosed herein to indicate antimicrobial drug resistance. In an embodiment, those AMRs for Proteus spp. having p values not greater than 0.1, 0.01, 0.001, 0.0001, 10⁻⁵, 10⁻¹⁰, or 10⁻²⁰ as set forth in Table II and having ppv values greater than 0.7, 0.75, 0.8, 0.85, 0.9, 0.95, or 0.98 as set forth in Table II are the AMRs used in the methods disclosed herein to indicate antimicrobial drug resistance.

[0182] In accordance with the foregoing, in an exemplary embodiment, where the microorganism is Proteus, the methods disclosed herein comprise (i) determining the presence and/or absence in Proteus spp. of at least one nucleotide sequence identified in rows 2623 to 2754 and 2789 to 2792 of Table I or a variant of the nucleotide sequence, and/or (ii) determining the presence and/or absence in Proteus spp., of at least one difference in at least one nucleotide sequence identified in rows 2755 to 2788 of Table I compared with a reference sequence.

[0183] In an embodiment, the method comprises determining the presence in Proteus spp. of at least one nucleotide sequence identified in rows 2623 to 2636, 2639, 2646 to 2754, and 2789 to 2792 of Table I or a variant of the nucleotide sequence. In an embodiment, the method comprises determining the presence in Proteus spp. of at least one difference in at least one nucleotide sequence identified in rows 2755 to 2663, and 2665 to 2788 of Table I compared with a reference sequence.

[0184] In an embodiment, the method comprises determining the absence in Proteus spp. of at least one nucleotide sequence identified in rows 2637, 2638, and 2640 to 2645 of Table I or a variant of the nucleotide sequence. In an embodiment, the method comprises determining the absence in Proteus spp. of at least one difference in at least one nucleotide sequence identified in row 2664 of Table I compared with a reference sequence.

[0185] Where the microorganism is Pseudomonas spp., preferably Pseudomonas aeruginosa, Pseudomonas fluorescens or Pseudomonas nitroreducens, the AMRs that when present or absent are indicative of resistance to at least one antimicrobial drug are preferably selected from those identified in rows 2793 to 2878 of Table I. The AMRs can further comprise those identified in rows 3808 and 3809 of Table I. A preferred difference in the nucleotide sequence identified in rows 2862 to 2876 of Table 1 is set forth in each of the same respective rows of Table I. The preferred at least one antimicrobial drug to which resistance is indicated by the presence or absence of the AMR is disclosed for the same respective marker ID of the AMR in Table II.

[0186] Those AMRs when present in Pseudomonas spp. which are indicative of resistance to at least one antimicrobial drug are preferably selected from those identified in rows 2793, 2794, 2796 to 2862, 2864 to 2870, and 2872 to 2878 of Table I. Further, the AMRs which involve at least one difference in at least one nucleotide sequence compared to a reference sequence that when present are indicative of resistance to at least one antimicrobial drug are preferably selected from those identified in rows 2862, 2864 to 2870, and 2872 to 2876 in Table I.

[0187] Those AMRs when absent in Pseudomonas spp. which are indicative of resistance to at least one antimicrobial drug are preferably selected from those identified in row 2795 of Table I. Further, the AMRs which involve at least one difference in at least one nucleotide sequence compared to a reference sequence that when absent are indicative of resistance to at least one antimicrobial drug are preferably selected from those identified in rows 2863 and 2871 in Table I.

[0188] Those AMRs which involve a nucleotide sequence that when present in Pseudomonas spp. are indicative of resistance to at least one antimicrobial drug are preferably selected from those identified in rows 2793, 2794, 2796 to 2861, 2877, and 2878 of Table I. Further, the AMRs which involve at least one difference in at least one nucleotide sequence compared to a reference sequence that when present are indicative of resistance to at least one antimicrobial drug are preferably selected from those identified in rows 2862, 2864 to 2870, and 2872 to 2876 in Table I.

[0189] Those AMRs which involve a nucleotide sequence that when absent in Pseudomonas spp. are indicative of resistance to at least one antimicrobial drug are preferably selected from those identified in row 2795 of Table I. Further, the AMRs which involve at least one difference in at least one nucleotide sequence compared to a reference sequence that when absent are indicative of resistance to at least one antimicrobial drug are preferably selected from those identified in rows 2863 and 2871 in Table I.

[0190] Those AMRs when present in Pseudomonas aeruginosa which are indicative of resistance to at least one antimicrobial drug are preferably selected from those identified in rows 2793, 2794, 2796 to 2862, 2864 to 2870, and 2872 to 2876 of Table I. Those AMRs when absent in Pseudomonas aeruginosa which are indicative of resistance to at least one antimicrobial drug are preferably selected from those identified in rows 2795, 2863, and 2871 of Table I.

[0191] Those AMRs when present in Pseudomonas fluorescens which are indicative of resistance to at least one antimicrobial drug are preferably selected from those identified in row 2877 of Table I.

[0192] Those AMRs when present in Pseudomonas nitroreducens which are indicative of resistance to at least one antimicrobial drug are preferably selected from those identified in row 2878 of Table I.

[0193] In embodiments where the Pseudomonas microorganism is a particular species of Pseudomonas, the methods preferably comprise determining the presence and/or absence of the AMRs determined to be indicative of antimicrobial drug resistance in that species set forth in Table I.

[0194] It is intended that the foregoing disclosure regarding the AMRs for Pseudomonas spp. be equally applicable to all of the methods disclosed herein, in particular those methods which comprise steps of determining the presence or absence of nucleotide sequences and/or differences in nucleotide sequences. In an embodiment, those AMRs for Pseudomonas spp. having p values not greater than 0.1, 0.01, 0.001, 0.0001, 10⁻⁵, 10⁻¹⁰, or 10⁻²⁰ as set forth in Table II are the AMRs used in the methods disclosed herein to indicate antimicrobial drug resistance. In an embodiment, those AMRs for Pseudomonas spp. having ppv values greater than 0.7, 0.75, 0.8, 0.85, 0.9, 0.95, or 0.98 as set forth in Table II are the AMRs used in the methods disclosed herein to indicate antimicrobial drug resistance. In an embodiment, those AMRs for Pseudomonas spp. having p values not greater than 0.1, 0.01, 0.001, 0.0001, 10⁻⁵, 10⁻¹⁰, or 10⁻²⁰ as set forth in Table II and having ppv values greater than 0.7, 0.75, 0.8, 0.85, 0.9, 0.95, or 0.98 as set forth in Table II are the AMRs used in the methods disclosed herein to indicate antimicrobial drug resistance.

[0195] In accordance with the foregoing, in an exemplary embodiment, where the microorganism is Pseudomonas, the methods disclosed herein comprise (i) determining the presence and/or absence in Pseudomonas spp. of at least one nucleotide sequence identified in rows 2793 to 2861, 2877, and 2878 of Table I or a variant of the nucleotide sequence, and/or (ii) determining the presence and/or absence in Pseudomonas spp., of at least one difference in at least one nucleotide sequence identified in rows 2862 to 2876 of Table I compared with a reference sequence.

[0196] In an embodiment, the method comprises determining the presence in Pseudomonas spp. of at least one nucleotide sequence identified in rows 2793, 2794, 2796 to 2861, 2877, and 2878 of Table I or a variant of the nucleotide sequence. In an embodiment, the method comprises determining the presence in Pseudomonas spp. of at least one difference in at least one nucleotide sequence identified in rows 2862, 2864 to 2870, and 2872 to 2876 of Table I compared with a reference sequence.

[0197] In an embodiment, the method comprises determining the absence in Pseudomonas spp. of at least one nucleotide sequence identified in row 2795 of Table I or a variant of the nucleotide sequence. In an embodiment, the method comprises determining the absence in Pseudomonas spp. of at least one difference in at least one nucleotide sequence identified in rows 2863 and 2871 of Table I compared with a reference sequence.

[0198] Where the microorganism is Salmonella spp., preferably Salmonella enterica, the AMRs that when present or absent are indicative of resistance to at least one antimicrobial drug are preferably selected from those identified in rows 2885 to 3008 of Table I. The AMRs can further comprise those identified in rows 3810 to 3815 of Table I. A preferred difference in the nucleotide sequence identified in rows 2991 to 3008 of Table 1 is set forth in each of the same respective rows of Table I. The preferred at least one antimicrobial drug to which resistance is indicated by the presence of the AMR is disclosed for the same respective marker ID of the AMR in Table II.

[0199] Those AMRs when present in Salmonella spp. which are indicative of resistance to at least one antimicrobial drug are preferably selected from those identified in rows 2885 to 2898, and 2990 to 3008 of Table I.

[0200] Those AMRs when absent in Salmonella spp. which are indicative of resistance to at least one antimicrobial drug are preferably selected from those identified in row 2899 of Table I.

[0201] Those AMRs which involve a nucleotide sequence that when present in Salmonella spp. are indicative of resistance to at least one antimicrobial drug are preferably selected from those identified in rows 2885 to 2898, and 2990 of Table I. Further, the AMRs which involve at least one difference in at least one nucleotide sequence compared to a reference sequence that when present are indicative of resistance to at least one antimicrobial drug are preferably selected from those identified in rows 2991 to 3008 in Table I.

[0202] Those AMRs which involve a nucleotide sequence that when absent in Salmonella spp. are indicative of resistance to at least one antimicrobial drug are preferably selected from those identified in row 2899 of Table I.

[0203] It is intended that the foregoing disclosure regarding the AMRs for Salmonella spp. be equally applicable to all of the methods disclosed herein, in particular those methods which comprise steps of determining the presence or absence of nucleotide sequences and/or differences in nucleotide sequences. In an embodiment, those AMRs for Salmonella spp. having p values not greater than 0.1, 0.01, 0.001, 0.0001, 10⁻⁵, 10⁻¹⁰, or 10⁻²⁰ as set forth in Table II are the AMRs used in the methods disclosed herein to indicate antimicrobial drug resistance. In an embodiment, those AMRs for Salmonella spp. having ppv values greater than 0.7, 0.75, 0.8, 0.85, 0.9, 0.95, or 0.98 as set forth in Table II are the AMRs used in the methods disclosed herein to indicate antimicrobial drug resistance. In an embodiment, those AMRs for Salmonella spp. having p values not greater than 0.1, 0.01, 0.001, 0.0001, 10⁻⁵, 10⁻¹⁰, or 10⁻²⁰ as set forth in Table II and having ppv values greater than 0.7, 0.75, 0.8, 0.85, 0.9, 0.95, or 0.98 as set forth in Table II are the AMRs used in the methods disclosed herein to indicate antimicrobial drug resistance.

[0204] In accordance with the foregoing, in an exemplary embodiment, where the microorganism is Salmonella, the methods disclosed herein comprise (i) determining the presence in Salmonella spp. of at least one nucleotide sequence identified in rows 2885 to 2990 of Table I or a variant of the nucleotide sequence, and/or (ii) determining the presence in Salmonella spp., of at least one difference in at least one nucleotide sequence identified in rows 2991 to 3008 of Table I compared with a reference sequence.

[0205] In an embodiment, the method comprises determining the presence in Salmonella spp. of at least one nucleotide sequence identified in rows 2885 to 2898, and 2990 of Table I or a variant of the nucleotide sequence. In an embodiment, the method comprises determining the presence in Salmonella spp. of at least one difference in at least one nucleotide sequence identified in rows 2991 to 3008 of Table I compared with a reference sequence.

[0206] In an embodiment, the method comprises determining the absence in Salmonella spp. of at least one nucleotide sequence identified in row 2899 of Table I or a variant of the nucleotide sequence.

[0207] Where the microorganism is Serratia spp., preferably Serratia ficaria, Serratia fonticola, Serratia liquefaciens, Serratia marcescens Serratia odorifera, Serratia plymuthica or Serratia rubidaea, the AMRs that when present or absent are indicative of resistance to at least one antimicrobial drug are preferably selected from those identified in rows 3009 to 3200 of Table I. The AMRs can further comprise those identified in row 3816 of Table I. A preferred difference in the nucleotide sequence identified in rows 3014 to 3022, 3029, 3030, 3132 to 3185, 3186, 3187, 3199, and 3200 of Table I is set forth in each of the same respective rows of Table I. The preferred at least one antimicrobial drug to which resistance is indicated by the presence or absence of the AMR is disclosed for the same respective marker ID of the AMR in Table II.

[0208] Those AMRs when present in Serratia spp. which are indicative of resistance to at least one antimicrobial drug are preferably selected from those identified in rows of 3012, 3014, 3021, 3023, 3024, 3028, 3030 to 3043, 3046 to 3112, 3114 to 3135, 3137 to 3146, 3149 to 3185, 3188 to 3190, 3196, and 3198 to 3200 Table I.

[0209] Those AMRs when absent in Serratia spp. which are indicative of resistance to at least one antimicrobial drug are preferably selected from those identified in rows 3009 to 3011, 3013, 3015 to 3020, 3022, 3025 to 3027, 3029, 3044, 3045, 3113, 3136, 3147, 3148, 3186, 3187, 3191 to 3195, and 3197 of Table I.

[0210] Those AMRs which involve a nucleotide sequence that when present in Serratia spp. are indicative of resistance to at least one antimicrobial drug are preferably selected from those identified in rows 3012, 3023, 3024, 3028, 3031 to 3043, 3046 to 3112, 3114 to 3131, 3188 to 3190, 3196, and 3198 of Table I. Further, the AMRs which involve at least one difference in at least one nucleotide sequence compared to a reference sequence that when present are indicative of resistance to at least one antimicrobial drug are preferably selected from those identified in rows 3014, 3021, 3030, 3132 to 3135, 3137 to 3147, 3149 to 3185, 3199, and 3200 in Table I.

[0211] Those AMRs which involve a nucleotide sequence that when absent in Serratia spp. are indicative of resistance to at least one antimicrobial drug are preferably selected from those identified in rows 3009 to 3011, 3013, 3025 to 3027, 3044, 3045, 3113, 3191 to 3195, and 3197 of Table I. Further, the AMRs which involve at least one difference in at least one nucleotide sequence compared to a reference sequence that when absent are indicative of resistance to at least one antimicrobial drug are preferably selected from those identified in rows 3015 to 3020, 3022, 3029, 3136, 3147, 3148, 3186, and 3187 in Table I.

[0212] Those AMRs when absent in Serratia ficaria which are indicative of resistance to at least one antimicrobial drug are preferably selected from those identified in row 3009 of Table I.

[0213] Those AMRs when present in Serratia fonticola which are indicative of resistance to at least one antimicrobial drug are preferably selected from those identified in rows 3012, 3014, and 3021 of Table I. Those AMRs when absent in Serratia fonticola which are indicative of resistance to at least one antimicrobial drug are preferably selected from those identified in rows 3010, 3011, 3013, 3015 to 3020, and 3022 of Table I.

[0214] Those AMRs when present in Serratia liquefaciens which are indicative of resistance to at least one antimicrobial drug are preferably selected from those identified in rows 3023, 3024, 3028, and 3030 of Table I. Those AMRs when absent in Serratia liquefaciens which are indicative of resistance to at least one antimicrobial drug are preferably selected from those identified in rows 3025 to 3027, and 3029 of Table I.

[0215] Those AMRs when present in Serratia marcescens which are indicative of resistance to at least one antimicrobial drug are preferably selected from those identified in rows 3031 to 3043, 3046 to 3112, 3114 to 3135, 3137 to 3146, and 3149 to 3185 of Table I. Those AMRs when absent in Serratia marcescens which are indicative of resistance to at least one antimicrobial drug are preferably selected from those identified in rows 3044, 3045, 3113, 3136, 3147, and 3148 of Table I.

[0216] Those AMRs when absent in Serratia odorifera which are indicative of resistance to at least one antimicrobial drug are preferably selected from those identified in rows 3186 and 3187 of Table I.

[0217] Those AMRs when present in Serratia plymuthica which are indicative of resistance to at least one antimicrobial drug are preferably selected from those identified in rows 3188 and 3189 of Table I.

[0218] Those AMRs when present in Serratia rubidaea which are indicative of resistance to at least one antimicrobial drug are preferably selected from those identified in rows 3190, 3196, 3198 to 3200 of Table I. Those AMRs when absent in Serratia rubidaea which are indicative of resistance to at least one antimicrobial drug are preferably selected from those identified in rows 3191 to 3195, and 3197 of Table I.

[0219] In embodiments where the Serratia microorganism is a particular species of Serratia, the methods preferably comprise determining the presence and/or absence of the AMRs determined to be indicative of antimicrobial drug resistance in that species set forth in Table I.

[0220] It is intended that the foregoing disclosure regarding the AMRs for Serratia spp. be equally applicable to all of the methods disclosed herein, in particular those methods which comprise steps of determining the presence or absence of nucleotide sequences and/or differences in nucleotide sequences. In an embodiment, those AMRs for Serratia spp. having p values not greater than 0.1, 0.01, 0.001, 0.0001, 10⁻⁵, 10⁻¹⁰, or 10⁻²⁰ as set forth in Table II are the AMRs used in the methods disclosed herein to indicate antimicrobial drug resistance. In an embodiment, those AMRs for Serratia spp. having ppv values greater than 0.7, 0.75, 0.8, 0.85, 0.9, 0.95, or 0.98 as set forth in Table II are the AMRs used in the methods disclosed herein to indicate antimicrobial drug resistance. In an embodiment, those AMRs for Serratia spp. having p values not greater than 0.1, 0.01, 0.001, 0.0001, 10⁻⁵, 10⁻¹⁰, or 10⁻²⁰ as set forth in Table II and having ppv values greater than 0.7, 0.75, 0.8, 0.85, 0.9, 0.95, or 0.98 as set forth in Table II are the AMRs used in the methods disclosed herein to indicate antimicrobial drug resistance.

[0221] In accordance with the foregoing, in an exemplary embodiment, where the microorganism is Serratia, the methods disclosed herein comprise (i) determining the presence and/or absence in Serratia spp. of at least one nucleotide sequence identified in rows 3009 to 3013, 3023 to 3028, 3031 to 3131, 3188, and 3189 to 3198 of Table I or a variant of the nucleotide sequence, and/or (ii) determining the presence and/or absence in Serratia spp., of at least one difference in at least one nucleotide sequence identified in rows 3014 to 3022, 3029, 3030, 3132 to 3185, 3186, 3187, 3199, and 3200 of Table I compared with a reference sequence.

[0222] In an embodiment, the method comprises determining the presence in Serratia spp. of at least one nucleotide sequence identified in rows 3012, 3023, 3024, 3028, 3031 to 3043, 3046 to 3112, 3114 to 3131, 3188 to 3190, 3196, and 3198 of Table I or a variant of the nucleotide sequence. In an embodiment, the method comprises determining the presence in Serratia spp. of at least one difference in at least one nucleotide sequence identified in rows 3014, 3021, 3030, 3132 to 3135, 3137 to 3147, 3149 to 3185, 3199, and 3200 of Table I compared with a reference sequence.

[0223] In an embodiment, the method comprises determining the absence in Serratia spp. of at least one nucleotide sequence identified in rows 3009 to 3011, 3013, 3025 to 3027, 3044, 3045, 3113, 3191 to 3195, and 3197 of Table I or a variant of the nucleotide sequence. In an embodiment, the method comprises determining the absence in Serratia spp. of at least one difference in at least one nucleotide sequence identified in rows 3015 to 3020, 3022, 3029, 3136, 3147, 3148, 3186, and 3187 of Table I compared with a reference sequence.

[0224] Where the microorganism is Stenotrophomonas spp., preferably Stenotrophomonas maltophilia, the AMRs that when present are indicative of resistance to at least one antimicrobial drug are preferably selected from those identified in rows 3746 to 3751 of Table I. The AMRs can further comprise those identified in row 3840 of Table I. The preferred at least one antimicrobial drug to which resistance is indicated by the presence of the AMR is disclosed for the same respective marker ID of the AMR in Table II.

[0225] It is intended that the foregoing disclosure regarding the AMRs for Stenotrophomonas spp. be equally applicable to all of the methods disclosed herein, in particular those methods which comprise steps of determining the presence or absence of nucleotide sequences and/or differences in nucleotide sequences. In an embodiment, those AMRs for Stenotrophomonas spp. having p values not greater than 0.1, 0.01, 0.001, 0.0001, 10⁻⁵, 10⁻¹⁰, or 10⁻²⁰ as set forth in Table II are the AMRs used in the methods disclosed herein to indicate antimicrobial drug resistance. In an embodiment, those AMRs for Stenotrophomonas spp. having ppv values greater than 0.7, 0.75, 0.8, 0.85, 0.9, 0.95, or 0.98 as set forth in Table II are the AMRs used in the methods disclosed herein to indicate antimicrobial drug resistance. In an embodiment, those AMRs for Stenotrophomonas spp. having p values not greater than 0.1, 0.01, 0.001, 0.0001, 10⁻⁵, 10⁻¹⁰, or 10⁻²⁰ as set forth in Table II and having ppv values greater than 0.7, 0.75, 0.8, 0.85, 0.9, 0.95, or 0.98 as set forth in Table II are the AMRs used in the methods disclosed herein to indicate antimicrobial drug resistance.

[0226] In accordance with the foregoing, in an exemplary embodiment, where the microorganism is Stenotrophomonas, the methods disclosed herein comprise (i) determining the presence in Stenotrophomonas spp. of at least one nucleotide sequence identified in rows 3746 to 3751 of Table I or a variant of the nucleotide sequence.

[0227] Where the microorganism is Kluyvera spp., preferably Kluyvera intermedia, the AMRs that when present are indicative of resistance to at least one antimicrobial drug are preferably selected from those identified in rows 2449 to 2459 of Table I. The preferred at least one antimicrobial drug to which resistance is indicated by the presence of the AMR is disclosed for the same respective marker ID of the AMR in Table II.

[0228] Those AMRs when present in Kluyvera spp. which are indicative of resistance to at least one antimicrobial drug are preferably selected from those identified in rows 2449 to 2458 of Table I. Those AMRs when absent in Proteus spp. which are indicative of resistance to at least one antimicrobial drug are preferably selected from those identified in row 2459 of Table I.

[0229] Those AMRs which involve a nucleotide sequence that when present in Kluyvera spp. are indicative of resistance to at least one antimicrobial drug are preferably selected from those identified in rows 2449 to 2457 of Table I. Further, the AMRs which involve at least one difference in at least one nucleotide sequence compared to a reference sequence that when present are indicative of resistance to at least one antimicrobial drug are preferably selected from those identified in row 2458 in Table I.

[0230] Further, the AMRs which involve at least one difference in at least one nucleotide sequence compared to a reference sequence that when absent are indicative of resistance to at least one antimicrobial drug are preferably selected from those identified in row 2459 in Table I.

[0231] It is intended that the foregoing disclosure regarding the AMRs for Kluyvera spp. be equally applicable to all of the methods disclosed herein, in particular those methods which comprise steps of determining the presence or absence of nucleotide sequences and/or differences in nucleotide sequences. In an embodiment, those AMRs for Kluyvera spp. having p values not greater than 0.1, 0.01, 0.001, 0.0001, 10⁻⁵, 10⁻¹⁰, or 10⁻²⁰ as set forth in Table II are the AMRs used in the methods disclosed herein to indicate antimicrobial drug resistance. In an embodiment, those AMRs for Kluyvera spp. having ppv values greater than 0.7, 0.75, 0.8, 0.85, 0.9, 0.95, or 0.98 as set forth in Table II are the AMRs used in the methods disclosed herein to indicate antimicrobial drug resistance. In an embodiment, those AMRs for Kluyvera spp. having p values not greater than 0.1, 0.01, 0.001, 0.0001, 10⁻⁵, 10⁻¹⁰, or 10⁻²⁰ as set forth in Table II and having ppv values greater than 0.7, 0.75, 0.8, 0.85, 0.9, 0.95, or 0.98 as set forth in Table II are the AMRs used in the methods disclosed herein to indicate antimicrobial drug resistance.

[0232] In accordance with the foregoing, in an exemplary embodiment, where the microorganism is Kluyvera, the methods disclosed herein comprise (i) determining the presence in Kluyvera spp. of at least one nucleotide sequence identified in rows 2449 to 2457 of Table I or a variant of the nucleotide sequence, and/or (ii) determining the presence and/or absence in Kluyvera spp., of at least one difference in at least one nucleotide sequence identified in rows 2458 and 2459 of Table I compared with a reference sequence.

[0233] Where the microorganism is Burkholdia spp., preferably Burkholdia cenocepacia, the AMRs that when present are indicative of resistance to at least one antimicrobial drug are preferably selected from those identified in row 331 of Table I. The preferred at least one antimicrobial drug to which resistance is indicated by the presence of the AMR is disclosed for the same respective marker ID of the AMR in Table II.

[0234] In accordance with the foregoing, in an exemplary embodiment, where the microorganism is Burkholdia, the methods disclosed herein comprise (i) determining the presence in Burkholdia spp. of the nucleotide sequence identified in row 331 of Table I or a variant of the nucleotide sequence.

[0235] Where the microorganism is Pantoea spp., preferably Pantoea vagans, the AMRs that when present are indicative of resistance to at least one antimicrobial drug are preferably selected from those identified in row 2622 of Table I. The preferred at least one antimicrobial drug to which resistance is indicated by the presence of the AMR is disclosed for the same respective marker ID of the AMR in Table II.

[0236] In accordance with the foregoing, in an exemplary embodiment, where the microorganism is Pantoea, the methods disclosed herein comprise (i) determining the presence in Pantoea spp. of the nucleotide sequence identified in row 2622 of Table I or a variant of the nucleotide sequence.

[0237] Where the microorganism is Shigella spp., preferably Shigella boydii, Shigella dysenteriae, Shigella flexneri, or Shigella sonnei, the AMRs that when present or absent are indicative of resistance to at least one antimicrobial drug are preferably selected from those identified in rows 3201 to 3375 of Table I. The AMRS can further comprise those identified in rows 3817 to 3823 of Table I. A preferred difference in the nucleotide sequence identified in rows 3235, 3236, 3257 to 3262, and 3353 to 3375 of Table I is set forth in each of the same respective rows of Table I. The preferred at least one antimicrobial drug to which resistance is indicated by the presence or absence of the AMR is disclosed for the same respective marker ID of the AMR in Table II.

[0238] Those AMRs when present in Shigella spp. which are indicative of resistance to at least one antimicrobial drug are preferably selected from those identified in rows 3201, 3203 to 3223, 3225 to 3236, 3238 to 3262, 3264 to 3280, 3282 to 3285, 3287, 3289 to 3355, 3357 to 3373, and 3375 of Table I.

[0239] Those AMRs when absent in Shigella spp. which are indicative of resistance to at least one antimicrobial drug are preferably selected from those identified in rows 3202, 3224, 3237, 3263, 3281, 3286, 3288, 3356, and 3374 of Table I.

[0240] Those AMRs which involve a nucleotide sequence that when present in Shigella spp. are indicative of resistance to at least one antimicrobial drug are preferably selected from those identified in rows 3201, 3203 to 3223, 3225 to 3234, 3238 to 3256, 3264 to 3280, 3282 to 3285, 3287, and 3289 to 3352 of Table I. Further, the AMRs which involve at least one difference in at least one nucleotide sequence compared to a reference sequence that when present are indicative of resistance to at least one antimicrobial drug are preferably selected from those identified in rows 3235, 3236, 3257 to 3262, 3353 to 3355, 3357 to 3373, and 3375 in Table I.

[0241] Those AMRs which involve a nucleotide sequence that when absent in Shigella spp. are indicative of resistance to at least one antimicrobial drug are preferably selected from those identified in rows 3202, 3224, 3237, 3263, 3281, 3286, and 3288 of Table I. Further, the AMRs which involve at least one difference in at least one nucleotide sequence compared to a reference sequence that when absent are indicative of resistance to at least one antimicrobial drug are preferably selected from those identified in rows 3356 and 3374 in Table I.

[0242] Those AMRs when present in Shigella boydii which are indicative of resistance to at least one antimicrobial drug are preferably selected from those identified in rows 3201, 3203 to 3223, and 3225 to 3236 of Table I. Those AMRs when absent in Shigella boydii which are indicative of resistance to at least one antimicrobial drug are preferably selected from those identified in row 3202 and 3224 of Table I.

[0243] Those AMRs when absent in Shigella dysenteriae which are indicative of resistance to at least one antimicrobial drug are preferably selected from those identified in row 3237 of Table I.

[0244] Those AMRs when present in Shigella flexneri which are indicative of resistance to at least one antimicrobial drug are preferably selected from those identified in rows 3238 to 3262 of Table I.

[0245] Those AMRs when present in Shigella sonnei which are indicative of resistance to at least one antimicrobial drug are preferably selected from those identified in rows 3264 to 3280, 3282 to 3285, 3287, 3289 to 3355, 3357 to 3373, and 3375 of Table I. Those AMRs when absent in Shigella sonnei which are indicative of resistance to at least one antimicrobial drug are preferably selected from those identified in rows 3263, 3281, 3286, 3288, 3356, and 3374 of Table I.

[0246] In embodiments where the Shigella microorganism is a particular species of Shigella, the methods preferably comprise determining the presence and/or absence of the AMRs determined to be indicative of antimicrobial drug resistance in that species set forth in Table I.

[0247] It is intended that the foregoing disclosure regarding the AMRs for Shigella spp. be equally applicable to all of the methods disclosed herein, in particular those methods which comprise steps of determining the presence or absence of nucleotide sequences and/or differences in nucleotide sequences. In an embodiment, those AMRs for Shigella spp. having p values not greater than 0.1, 0.01, 0.001, 0.0001, 10⁻⁵, 10⁻¹⁰, or 10⁻²⁰ as set forth in Table II are the AMRs used in the methods disclosed herein to indicate antimicrobial drug resistance. In an embodiment, those AMRs for Shigella spp. having ppv values greater than 0.7, 0.75, 0.8, 0.85, 0.9, 0.95, or 0.98 as set forth in Table II are the AMRs used in the methods disclosed herein to indicate antimicrobial drug resistance. In an embodiment, those AMRs for Shigella spp. having p values not greater than 0.1, 0.01, 0.001, 0.0001, 10⁻⁵, 10⁻¹⁰, or 10⁻²⁰ as set forth in Table II and having ppv values greater than 0.7, 0.75, 0.8, 0.85, 0.9, 0.95, or 0.98 as set forth in Table II are the AMRs used in the methods disclosed herein to indicate antimicrobial drug resistance.

[0248] In accordance with the foregoing, in an exemplary embodiment, where the microorganism is Shigella, the methods disclosed herein comprise (i) determining the presence and/or absence in Shigella spp. of at least one nucleotide sequence identified in rows 3201 to 3234, 3237 to 3256, and 3263 to 3352 of Table I or a variant of the nucleotide sequence, and/or (ii) determining the presence in Shigella spp., of at least one difference in at least one nucleotide sequence identified in rows 3235, 3236, 3257 to 3262, and 3353 to 3375 of Table I compared with a reference sequence.

[0249] In an embodiment, the method comprises determining the presence in Shigella spp. of at least one nucleotide sequence identified in rows 3201, 3203 to 3223, 3225 to 3234, 3238 to 3256, 3264 to 3280, 3282 to 3285, 3287, and 3289 to 3352 of Table I or a variant of the nucleotide sequence. In an embodiment, the method comprises determining the presence in Shigella spp. of at least one difference in at least one nucleotide sequence identified in rows 3235, 3236, 3257 to 3262, 3353 to 3355, 3357 to 3373, and 3375 of Table I compared with a reference sequence.

[0250] In an embodiment, the method comprises determining the absence in Shigella spp. of at least one nucleotide sequence identified in rows 3202, 3224, 3237, 3263, 3281, 3286, and 3288 of Table I or a variant of the nucleotide sequence. In an embodiment, the method comprises determining the absence in Shigella spp. of at least one difference in at least one nucleotide sequence identified in rows 3356 and 3374 of Table I compared with a reference sequence.

[0251] Where the microorganism is Enterobacter spp., preferably Enterobacter asburiae, Enterobacter cancerogenus, Enterobacter cloacae, Enterobacter cloacae complex, Enterobacter hormaechei, Enterobacter ludwigii, Enterobacter roggenkampii, Enterobacter sp. MGH 1, and Enterobacter sp. MGH 15, the AMRs that when present or absent are indicative of resistance to at least one antimicrobial drug are preferably selected from those identified in rows 692 to 1247 of Table I. The AMRs can further comprise those identified in rows 3768 to 3777 of Table I. A preferred difference in the nucleotide sequence identified in rows 698 to 701, 1075 to 1189, 1202 to 1212, 1227 to 1230, 1324, and 1240 to 1245 of Table I is set forth in each of the same respective rows of Table I. The preferred at least one antimicrobial drug to which resistance is indicated by the presence of the AMR is disclosed for the same respective marker ID of the AMR in Table II.

[0252] Those AMRs when present in Enterobacter spp. which are indicative of resistance to at least one antimicrobial drug are preferably selected from those identified in rows 692 to 700, 702 to 717, 719 to 988, 991 to 1033, 1035 to 1043, 1047 to 1050, 1052 to 1097, 1099 to 1103, 1105, 1106, 1108 to 1195, 1197 to 1214, 1216 to 1220, 1222, 1226, 1227, 1229 to 1232, 1234, 1238 to 1240, and 1242 to 1246 of Table I.

[0253] Those AMRs when absent in Enterobacter spp. which are indicative of resistance to at least one antimicrobial drug are preferably selected from those identified in rows 701, 718, 989, 990, 1034, 1044 to 1046, 1051, 1098, 1104, 1107, 1196, 1215, 1221, 1223 to 1225, 1228, 1233, 1235 to 1237, 1241, and 1247 of Table I.

[0254] Those AMRs which involve a nucleotide sequence that when present in Enterobacter spp. are indicative of resistance to at least one antimicrobial drug are preferably selected from those identified in rows 692 to 697, 702 to 717, 719 to 988, 991 to 1033, 1035 to 1043, 1047 to 1050, 1052 to 1074, 1190 to 1195, 1197 to 1201, 1213, 1214, 1216 to 1220, 1222, 1226, 1231, 1232, 1238, 1239, and 1246 of Table I. Further, the AMRs which involve at least one difference in at least one nucleotide sequence compared to a reference sequence that when present are indicative of resistance to at least one antimicrobial drug are preferably selected from those identified in rows 698 to 700, 1075 to 1096, 1099 to 1103, 1105, 1106, 1108 to 1189, 1202 to 1212, 1227, 1229, 1230, 1234, 1240, and 1242 to 1245 in Table I.

[0255] Those AMRs which involve a nucleotide sequence that when absent in Enterobacter spp. are indicative of resistance to at least one antimicrobial drug are preferably selected from those identified in rows 718, 989, 990, 1034, 1044 to 1046, 1051, 1196, 1215, 1221, 1223 to 1225, 1233, 1235 to 1237, and 1247 of Table I. Further, the AMRs which involve at least one difference in at least one nucleotide sequence compared to a reference sequence that when absent are indicative of resistance to at least one antimicrobial drug are preferably selected from those identified in rows 701, 1098, 1104, 1107, 1228, and 1241 in Table I.

[0256] Those AMRs when present in Enterobacter asburiae which are indicative of resistance to at least one antimicrobial drug are preferably selected from those identified in rows 692 to 699 of Table I.

[0257] Those AMRs when present in Enterobacter cancerogenus which are indicative of resistance to at least one antimicrobial drug are preferably selected from those identified in row 700 of Table I. Those AMRs when absent in Enterobacter cancerogenus which are indicative of resistance to at least one antimicrobial drug are preferably selected from those identified in row 701 of Table I.

[0258] Those AMRs when present in Enterobacter cloacae which are indicative of resistance to at least one antimicrobial drug are preferably selected from those identified in rows 702 to 717, 719 to 988, 991 to 1033, 1035 to 1043, 1047 to 1050, 1052 to 1097, 1099 to 1103, 1105, 1106, and 1108 to 1189 of Table I. Those AMRs when absent in Enterobacter cloacae which are indicative of resistance to at least one antimicrobial drug are preferably selected from those identified in rows 718, 989, 990, 1034, 1044 to 1046, 1051, 1098, 1104, and 1107 of Table I.

[0259] Those AMRs when present in Enterobacter cloacae complex which are indicative of resistance to at least one antimicrobial drug are preferably selected from those identified in rows 1190 to 1195, 1197 to 1212 of Table I. Those AMRs when absent in Enterobacter cloacae complex which are indicative of resistance to at least one antimicrobial drug are preferably selected from those identified in row 1196 of Table I.

[0260] Those AMRs when present in Enterobacter hormaechei which are indicative of resistance to at least one antimicrobial drug are preferably selected from those identified in rows 1213, 1214, 1216 to 1220, 1222, 1226, 1227, 1229, 1230 of Table I. Those AMRs when absent in Enterobacter hormaechei which are indicative of resistance to at least one antimicrobial drug are preferably selected from those identified in rows 1215, 1221, 1223 to 1225, and 1228 of Table I.

[0261] Those AMRs when present in Enterobacter ludwigii which are indicative of resistance to at least one antimicrobial drug are preferably selected from those identified in rows 1231, 1232, and 1234 of Table I. Those AMRs when absent in Enterobacter lugwigii which are indicative of resistance to at least one antimicrobial drug are preferably selected from those identified in row 1234 of Table I.

[0262] Those AMRs when present in Enterobacter roggenkampii which are indicative of resistance to at least one antimicrobial drug are preferably selected from those identified in rows 1238 to 1240, 1242 to 1245 of Table I. Those AMRs when absent in Enterobacter roggenkampii which are indicative of resistance to at least one antimicrobial drug are preferably selected from those identified in rows 1235 to 1237, and 1241 of Table I.

[0263] Those AMRs when present in Enterobacter sp. MGH 1 which are indicative of resistance to at least one antimicrobial drug are preferably selected from those identified in row 1246 of Table I.

[0264] Those AMRs when absent in Enterobacter sp. MGH 15 which are indicative of resistance to at least one antimicrobial drug are preferably selected from those identified in row 1247 of Table I.

[0265] In embodiments where the Enterobacter microorganism is a particular species of Enterobacter, the methods preferably comprise determining the presence and/or absence of the AMRs determined to be indicative of antimicrobial drug resistance in that species set forth in Table I.

[0266] It is intended that the foregoing disclosure regarding the AMRs for Enterobacter spp. be equally applicable to all of the methods disclosed herein, in particular those methods which comprise steps of determining the presence or absence of nucleotide sequences and/or differences in nucleotide sequences. In an embodiment, those AMRs for Enterobacter spp. having p values not greater than 0.1, 0.01, 0.001, 0.0001, 10⁻⁵, 10⁻¹⁰, or 10⁻²⁰ as set forth in Table II are the AMRs used in the methods disclosed herein to indicate antimicrobial drug resistance. In an embodiment, those AMRs for Enterobacter spp. having ppv values greater than 0.7, 0.75, 0.8, 0.85, 0.9, 0.95, or 0.98 as set forth in Table II are the AMRs used in the methods disclosed herein to indicate antimicrobial drug resistance. In an embodiment, those AMRs for Enterobacter spp. having p values not greater than 0.1, 0.01, 0.001, 0.0001, 10⁻⁵, 10⁻¹⁰, or 10⁻²⁰ as set forth in Table II and having ppv values greater than 0.7, 0.75, 0.8, 0.85, 0.9, 0.95, or 0.98 as set forth in Table II are the AMRs used in the methods disclosed herein to indicate antimicrobial drug resistance.

[0267] In accordance with the foregoing, in an exemplary embodiment, where the microorganism is Enterobacter, the methods disclosed herein comprise (i) determining the presence and/or absence in Enterobacter spp. of at least one nucleotide sequence identified in rows 692 to 697, 702 to 1074, 1190 to 1201, 1213 to 1226, 1231 to 1233, 1235 to 1239, 1246, and 1247 of Table I or a variant of the nucleotide sequence, and/or (ii) determining the presence and/or absence in Enterobacter spp., of at least one difference in at least one nucleotide sequence identified in rows 698 to 701, 1075 to 1189, 1202 to 1212, 1227 to 1230, 1234, and 1240 to 1245 of Table I compared with a reference sequence.

[0268] In an embodiment, the method comprises determining the presence in Enterobacter spp. of at least one nucleotide sequence identified in rows 692 to 697, 702 to 717, 719 to 988, 991 to 1033, 1035 to 1043, 1047 to 1050, 1052 to 1074, 1190 to 1195, 1197 to 1201, 1213, 1214, 1216 to 1220, 1222, 1226, 1231, 1232, 1238, 1239, and 1246 of Table I or a variant of the nucleotide sequence. In an embodiment, the method comprises determining the presence in Enterobacter spp. of at least one difference in at least one nucleotide sequence identified in rows 698 to 700, 1075 to 1096, 1099 to 1103, 1105, 1106, 1108 to 1189, 1202 to 1212, 1227, 1229, 1230, 1234, 1240, and 1242 to 1245 of Table I compared with a reference sequence.

[0269] In an embodiment, the method comprises determining the absence in Enterobacter spp. of at least one nucleotide sequence identified in rows 718, 989, 990, 1034, 1044 to 1046, 1051, 1196, 1215, 1221, 1223 to 1225, 1233, 1235 to 1237, and 1247 of Table I or a variant of the nucleotide sequence. In an embodiment, the method comprises determining the absence in Enterobacter spp. of at least one difference in at least one nucleotide sequence identified in rows 701, 1098, 1104, 1107, 1228, and 1241 of Table I compared with a reference sequence.

[0270] Where the microorganism is Staphylococcus spp., preferably Staphylococcus aureus, the AMRs that when present or absent are indicative of resistance to at least one antimicrobial drug are preferably selected from those identified in rows 3376 to 3745 of Table I. The AMRs can further comprise those identified in rows 3824 to 3839 of Table I. A preferred difference in the nucleotide sequence identified in rows 3365 to 3745 of Table I is set forth in each of the same respective rows of Table I. The preferred at least one antimicrobial drug to which resistance is indicated by the presence of the AMR is disclosed for the same respective marker id of the AMR in Table II.

[0271] Those AMRs when present in Staphylococcus spp. which are indicative of resistance to at least one antimicrobial drug are preferably selected from those identified in rows 3376 to 3385, 3387 to 3393, 3395 to 3398, 3401, 3402, 3404, 3405, 3407, 3410 to 3412, 3414, 3416, 3418 to 3422, 3425 to 3429, 3431 to 3435, 3437 to 3441, 3443 to 3448, 3450, 3451, 3454 to 3461, 3463 to 3469, 3471 to 3475, 3477 to 3494, 3496 to 3506, 3508 to 3510, 3513 to 3528, 3533 to 3577, 3582 to 3593, 3595 to 3601, 3603 to 3652, 3654 to 3669, 3672 to 3675, 3678, 3679, 3681 to 3689, 3691, 3692, 3695 to 3701, 3703, 3704, 3706 to 3708, 3710 to 3722, 3724, 3728 to 3730, 3734 to 3736, 3738, 3741, and 3743 to 3745 of Table I.

[0272] Those AMRs when absent in Staphylococcus spp. which are indicative of resistance to at least one antimicrobial drug are preferably selected from those identified in rows 3386, 3394, 3399, 3400, 3423, 3424, 3430, 3436, 3442, 3449, 3452, 3453, 3462, 3470, 3476, 3495, 3507, 3511, 3512, 3529 to 3532, 3578 to 3581, 3594, 3602, 3653, 3670, 3671, 3676, 3677, 3680, 3690, 3693, 3694, 3702, 3705, 3709, 3723, 3725 to 3727, 3731 to 3733, 3737, 3739, 3740, and 3742 of Table I.

[0273] Those AMRs which involve a nucleotide sequence that when present in Staphylococcus spp. are indicative of resistance to at least one antimicrobial drug are preferably selected from those identified in rows 3376 to 3385, 3387 to 3393, 3395 to 3398, 3401, 3402, 3404, 3405, 3407, 3410 to 3412, 3414, 3416, 3418 to 3422, 3425 to 3429, 3431 to 3435, 3437 to 3441, 3443 to 3448, 3450, 3451, 3454 to 3461, 3463 to 3469, 3471 to 3475, 3477 to 3494, 3496 to 3506, 3508 to 3510, 3513 to 3528, 3533 to 3577, 3582 to 3593, 3595 to 3601, 3603 to 3652, 3654 to 3664 of Table I. Further, the AMRs which involve at least one difference in at least one nucleotide sequence compared to a reference sequence that when present are indicative of resistance to at least one antimicrobial drug are preferably selected from those identified in rows 3665 to 3669, 3672 to 3675, 3678, 3679, 3681 to 3689, 3691, 3692, 3695 to 3701, 3703, 3704, 3706 to 3708, 3710 to 3722, 3724, 3728 to 3730, 3734 to 3736, 3738, 3741, and 3743 to 3745 in Table I.

[0274] Those AMRs which involve a nucleotide sequence that when absent in Staphylococcus spp. are indicative of resistance to at least one antimicrobial drug are preferably selected from those identified in rows 3386, 3394, 3399, 3400, 3423, 3424, 3430, 3436, 3442, 3449, 3452, 3453, 3462, 3470, 3476, 3495, 3507, 3511, 3512, 3529 to 3532, 3578 to 3581, 3594, 3602, 3653 of Table I. Further, the AMRs which involve at least one difference in at least one nucleotide sequence compared to a reference sequence that when absent are indicative of resistance to at least one antimicrobial drug are preferably selected from those identified in rows 3670, 3671, 3676, 3677, 3680, 3690, 3693, 3694, 3702, 3705, 3709, 3723, 3725 to 3727, 3731 to 3733, 3737, 3739, 3740, and 3742 in Table I.

[0275] It is intended that the foregoing disclosure regarding the AMRs for Staphylococcus spp. be equally applicable to all of the methods disclosed herein, in particular those methods which comprise steps of determining the presence or absence of nucleotide sequences and/or differences in nucleotide sequences. In an embodiment, those AMRs for Staphylococcus spp. having p values not greater than 0.1, 0.01, 0.001, 0.0001, 10⁻⁵, 10⁻¹⁰, or 10⁻²⁰ as set forth in Table II are the AMRs used in the methods disclosed herein to indicate antimicrobial drug resistance. In an embodiment, those AMRs for Staphylococcus spp. having ppv values greater than 0.7, 0.75, 0.8, 0.85, 0.9, 0.95, or 0.98 as set forth in Table II are the AMRs used in the methods disclosed herein to indicate antimicrobial drug resistance. In an embodiment, those AMRs for Staphylococcus spp. having p values not greater than 0.1, 0.01, 0.001, 0.0001, 10⁻⁵, 10⁻¹⁰, or 10⁻²⁰ as set forth in Table II and having ppv values greater than 0.7, 0.75, 0.8, 0.85, 0.9, 0.95, or 0.98 as set forth in Table II are the AMRs used in the methods disclosed herein to indicate antimicrobial drug resistance.

[0276] In accordance with the foregoing, in an exemplary embodiment, where the microorganism is Staphylococcus, the methods disclosed herein comprise (i) determining the presence and/or absence in Staphylococcus spp. of at least one nucleotide sequence identified in rows 3376 to 3664 of Table I or a variant of the nucleotide sequence, and/or (ii) determining the presence and/or absence in Staphylococcus spp., of at least one difference in at least one nucleotide sequence identified in rows 3665 to 3745 of Table I compared with a reference sequence.

[0277] In an embodiment, the method comprises determining the presence in Staphylococcus spp. of at least one nucleotide sequence identified in rows 3376 to 3385, 3387 to 3393, 3395 to 3398, 3401, 3402, 3404, 3405, 3407, 3410 to 3412, 3414, 3416, 3418 to 3422, 3425 to 3429, 3431 to 3435, 3437 to 3441, 3443 to 3448, 3450, 3451, 3454 to 3461, 3463 to 3469, 3471 to 3475, 3477 to 3494, 3496 to 3506, 3508 to 3510, 3513 to 3528, 3533 to 3577, 3582 to 3593, 3595 to 3601, 3603 to 3652, 3654 to 3664 or a variant of the nucleotide sequence. In an embodiment, the method comprises determining the presence in Staphylococcus spp. of at least one difference in at least one nucleotide sequence identified in rows 3665 to 3669, 3672 to 3675, 3678, 3679, 3681 to 3689, 3691, 3692, 3695 to 3701, 3703, 3704, 3706 to 3708, 3710 to 3722, 3724, 3728 to 3730, 3734 to 3736, 3738, 3741, and 3743 to 3745 of Table I compared with a reference sequence.

[0278] In an embodiment, the method comprises determining the absence in Staphylococcus spp. of at least one nucleotide sequence identified in rows 3386, 3394, 3399, 3400, 3423, 3424, 3430, 3436, 3442, 3449, 3452, 3453, 3462, 3470, 3476, 3495, 3507, 3511, 3512, 3529 to 3532, 3578 to 3581, 3594, 3602, 3653 of Table I or a variant of the nucleotide sequence. In an embodiment, the method comprises determining the absence in Staphylococcus spp. of at least one difference in at least one nucleotide sequence identified in rows 3670, 3671, 3676, 3677, 3680, 3690, 3693, 3694, 3702, 3705, 3709, 3723, 3725 to 3727, 3731 to 3733, 3737, 3739, 3740, and 3742 of Table I compared with a reference sequence.

[0279] Where the microorganism is Raoultella spp., preferably Raoultella ornithinolytica or Raoultella planticola, the AMRs that when present or absent are indicative of resistance to at least one antimicrobial drug are preferably selected from those identified in rows 2879 to 2884 of Table I. A preferred difference in the nucleotide sequence identified in rows 2882 and 2884 of Table 1 is set forth in each of the same respective rows of Table I. The preferred at least one antimicrobial drug to which resistance is indicated by the presence or absence of the AMR is disclosed for the same respective marker ID of the AMR in Table II.

[0280] Those AMRs when present in Raoultella spp. which are indicative of resistance to at least one antimicrobial drug are preferably selected from those identified in rows 2879 to 2882 of Table I.

[0281] Those AMRs when absent in Raoultella spp. which are indicative of resistance to at least one antimicrobial drug are preferably selected from those identified in rows 2883 and 2884 of Table I.

[0282] Those AMRs which involve a nucleotide sequence that when present in Raoultella spp. are indicative of resistance to at least one antimicrobial drug are preferably selected from those identified in rows 2879 to 2881 of Table I. Further, the AMRs which involve at least one difference in at least one nucleotide sequence compared to a reference sequence that when present are indicative of resistance to at least one antimicrobial drug are preferably selected from those identified in rows 2882 in Table I.

[0283] Those AMRs which involve a nucleotide sequence that when absent in Raoultella spp. are indicative of resistance to at least one antimicrobial drug are preferably selected from those identified in row 2883 of Table I. Further, the AMRs which involve at least one difference in at least one nucleotide sequence compared to a reference sequence that when absent are indicative of resistance to at least one antimicrobial drug are preferably selected from those identified in row 2884 in Table I.

[0284] Those AMRs when present in Raoultella ornithinolytica which are indicative of resistance to at least one antimicrobial drug are preferably selected from those identified in rows 2879 to 2882 of Table I.

[0285] Those AMRs when absent in Raoultella planticola which are indicative of resistance to at least one antimicrobial drug are preferably selected from those identified in rows 2883 and 2884 of Table I.

[0286] In embodiments where the Raoultella microorganism is a particular species of Raoultella, the methods preferably comprise determining the presence and/or absence of the AMRs determined to be indicative of antimicrobial drug resistance in that species set forth in Table I.

[0287] It is intended that the foregoing disclosure regarding the AMRs for Raoultella spp. be equally applicable to all of the methods disclosed herein, in particular those methods which comprise steps of determining the presence or absence of nucleotide sequences and/or differences in nucleotide sequences. In an embodiment, those AMRs for Raoultella spp. having p values not greater than 0.1, 0.01, 0.001, 0.0001, 10⁻⁵, 10⁻¹⁰, or 10⁻²⁰ as set forth in Table II are the AMRs used in the methods disclosed herein to indicate antimicrobial drug resistance. In an embodiment, those AMRs for Raoultella spp. having ppv values greater than 0.7, 0.75, 0.8, 0.85, 0.9, 0.95, or 0.98 as set forth in Table II are the AMRs used in the methods disclosed herein to indicate antimicrobial drug resistance. In an embodiment, those AMRs for Raoultella spp. having p values not greater than 0.1, 0.01, 0.001, 0.0001, 10⁻⁵, 10⁻¹⁰, or 10⁻²⁰ as set forth in Table II and having ppv values greater than 0.7, 0.75, 0.8, 0.85, 0.9, 0.95, or 0.98 as set forth in Table II are the AMRs used in the methods disclosed herein to indicate antimicrobial drug resistance.

[0288] In accordance with the foregoing, in an exemplary embodiment, where the microorganism is Raoultella, the methods disclosed herein comprise (i) determining the presence and/or absence in Raoultella spp. of at least one nucleotide sequence identified in rows 2879 to 2881, and 2883 of Table I or a variant of the nucleotide sequence, and/or (ii) determining the presence and/or absence in Raoultella spp., of at least one difference in at least one nucleotide sequence identified in rows 2882 and 2884 of Table I compared with a reference sequence.

[0289] In an embodiment, the method comprises determining the presence in Raoultella spp. of at least one nucleotide sequence identified in rows 2879 to 2881 of Table I or a variant of the nucleotide sequence. In an embodiment, the method comprises determining the presence in Raoultella spp. of at least one difference in at least one nucleotide sequence identified in rows 2882 of Table I compared with a reference sequence.

[0290] In an embodiment, the method comprises determining the absence in Raoultella spp. of at least one nucleotide sequence identified in row 2883 of Table I or a variant of the nucleotide sequence. In an embodiment, the method comprises determining the absence in Raoultella spp. of at least one difference in at least one nucleotide sequence identified in row 2884 of Table I compared with a reference sequence.

[0291] Preferred AMRs whose presence or absence is determined are those having p values of less than 10′, more preferably less than 10⁻³, 10⁻⁴, 10⁻⁵, 10⁻¹⁰, 10⁴⁵, 10⁻²⁰, 10′⁵, 10⁻³°, 10⁻⁴°. The p value for each AMR is set forth in Table II. In an embodiment, the antimicrobial drug resistance status is indicated by the presence and/or absence of AMRs having a p value of less than 10⁻², 10⁻³, 10⁻⁴, 10⁻⁵, 10⁻¹⁰, 10⁻¹⁵, 10⁻²⁰, 10⁻²⁵, 10⁻³⁰, 10⁻⁴⁰.

[0292] Preferred AMRs whose presence or absence is determined are those having positive predictive value (ppv) of greater than 0.6, 0.65, 0.7, 0.75, 0.8, 0.85, 0.9, 0.95, 0.96, 0.97, or 0.98. The ppv for each AMR is set forth in Table II. In an embodiment, the antimicrobial drug resistance status is indicated by the presence and/or absence of AMRs having a ppv of at least 0.6, 0.65, 0.7, 0.75, 0.8, 0.85, 0.9, 0.95, 0.96, 0.97, or 0.98. In certain embodiments, preferred AMRs are those meeting threshold values of one or of combinations of particular values for p value, ppv, npv, specificity, sensitivity, specificity, and/or accuracy.

[0293] The determination of the presence or absence of nucleotide sequences and/or the differences in nucleotide sequences in the microorganism can be carried out using nucleic acid sequencing techniques, preferably, high throughput sequencing, e.g., “next generation” or third generation sequencing, such as by the Illumina/Solexa or the Oxford Nanopore methodology.

[0294] In some embodiments, the entire genome of the microorganism and any extra-genomic nucleic acids present in the microorganism are sequenced. In some embodiments, only the coding sequences of the genome/extra-genomic nucleic acids are sequenced. In some embodiments, only the non-coding sequences of the genomic/extra-genomic nucleic acids are sequenced. The extra-genomic nucleic acids can be naturally occurring in the microorganism or are not naturally occurring, for example, an artificial plasmid transformed into the microorganism.

[0295] In an embodiment, the difference in the nucleotide sequence is a point mutation, optionally resulting in a change in the amino acid sequence of the encoded amino acid sequence. In an embodiment, the point mutation does not result in the creation of a stop codon. In an embodiment, the point mutation results in the creation of a stop codon. In embodiments where the presence or absence of a difference in a nucleotide sequence is indicative of antimicrobial drug resistance, the nucleotide sequence is a nucleic acid of the microorganism, such as a gene, that preferably encodes a protein/peptide, and the difference can be a base substitution or an insertion or deletion of one or more bases, e.g., allowing for an in-frame deletion or addition in the encoded protein/peptide. The difference can also be the result of a gene fusion.

[0296] In an embodiment of the invention, one or more of the AMRs identified in Table I, whose nucleotide and amino acid sequences are set forth in the Sequence Listing, can be used as antimicrobial drug resistance markers.

[0297] The term “AMR” refers herein to a genetic marker which is a nucleotide sequence or difference in a nucleotide sequence compared to a corresponding reference sequence associated with antimicrobial drug resistance, particularly antibiotic resistance. In certain embodiments, the presence or absence of such AMR in the genomic or extra-genomic DNA of a microorganism, particularly bacterium, indicates antimicrobial drug resistance. The AMR may be a gene or a naturally occurring variant thereof. In certain embodiments, the AMR may be a coding region of a gene or a naturally occurring variant thereof. In certain embodiments, the AMR may be a non-coding region of a gene or a naturally occurring variant thereof. In certain embodiments, the AMR may be an intergenic region or a naturally occurring variant thereof, and thus not a gene. In certain embodiments, AMRs associated with antimicrobial drug resistance are specific mutations or differences in a nucleotide sequence compared to a corresponding wild type/reference sequence.

[0298] The terms “subject” or “patient” are used interchangeably and relate to vertebrates, preferably mammals. For example, mammals in the context of the present invention are humans, non-human primates, domesticated animals such as dogs, cats, sheep, cattle, goats, pigs, horses etc., laboratory animals such as mice, rats, rabbits, fish, guinea pigs, etc. as well as animals in captivity such as animals of zoos. The term “animal” also includes humans. Preferably, the terms “subject” or “patient” refer to male and female mammals, in particular male and female humans. The subject can be of any age, including neonates (e.g., from birth to about 6 months), infants (e.g., from about 6 months to about 2 years), children (e.g., from about 2 years to about 10 years), adolescents (e.g., from about 10 years to about 21 years), and adults (e.g., about 21 years and older).

[0299] As used herein, “sample” includes any biological sample obtained from a subject, e.g., from the body of the subject. Examples of such biological samples include whole blood, blood fractions such as plasma, serum, smears or swabs of a tissue, sputum, bronchial aspirate, urine, semen, stool, bile, gastrointestinal secretions, reproductive system secretions, lymph fluid, liquor, bone marrow, organ aspirates and tissue biopsies, including punch biopsies. Optionally, the biological sample can be obtained from a mucous membrane of the patient. The term “sample” can also include processed biological samples such as fractions or isolates, e.g., nucleic acids or isolated cells. Preferably, the biological sample contains nucleic acids, e.g., DNA or mRNA, such that the sequence of the nucleic acids can be determined. In an embodiment, the sample can be one that is obtained from a tissue showing signs of a disease state, e.g., showing signs of infection. In a preferred embodiment, the sample is blood or blood plasma obtained from the subject. The sample is analyzed according to the methods of the invention and during the method or thereafter is not normally returned to the body. In most embodiments, the presence of the subject's body is not necessary in order to carry out the methods of the invention.

[0300] Tissues of the patient from which the sample can be obtained include, but are not limited to, throat, mouth, nasal, stomach, intestinal, skin, liver, pancreatic, lung, neuronal cervical, vaginal, urethral, rectal, penial, and muscle. Any suitable method for obtaining the sample from the patient and/or from an appropriate tissue can be used in connection with the present invention.

[0301] In one embodiment, the sample is blood plasma, preferably obtained directly from the subject. The blood plasma is preferably cell-free, preferably mainly/mostly cell-free, e.g., fewer than 10,000, 1,000, 100, or 10 cells per mL. The biological sample, e.g., blood plasma, may contain free circulating nucleic acids, comprising nucleic acids of the subject and nucleic acids not of the subject, e.g., those of a microorganism. In one embodiment the biological sample can be diluted or concentrated. In another embodiment the sample is processed prior to sequencing, preferably the sample is purified to remove cellular components, such as lipids and proteins, prior to sequencing.

[0302] The term “in vivo” relates to the situation in a subject.

[0303] The term “genome” relates to the total amount of genetic information in the chromosomes of a cell.

[0304] The term “exome” refers to part of the genome formed by exons, which are coding portions of expressed genes. The exome provides the genetic blueprint used in the synthesis of proteins and other functional gene products. It is the most functionally relevant part of the genome and, therefore, it is most likely to contribute to the phenotype of an organism.

[0305] The terms “extra-genomic nucleic acids” or “extra-genomic DNA” as used herein may refer to naturally occurring extra-genomic nucleic acids or extra-genomic DNA in a microorganism, preferably in a bacterium, or to not naturally occurring extra-genomic nucleic acids or extra-genomic DNA, as for example, an artificial plasmid transformed into the microorganism, or a plasmid acquired from another microorganism, preferably another bacterium, e.g., due to bacterial conjugation.

[0306] The term “bacterial conjugation” as used herein denotes the transfer of genetic material between bacterial cells by direct cell-to-cell contact or by a bridge-like connection between two cells. It is a mechanism of horizontal gene transfer as are transformation and transduction; although these two other mechanisms do not involve cell-to-cell contact.

[0307] The term “transcriptome” relates to the set of all RNA molecules, including mRNA, rRNA, tRNA, and other non-coding RNA produced in one cell or a population of cells. In context of the present invention the transcriptome means the set of all RNA molecules produced in one cell, a population of cells, or all cells of a given individual at a certain time point.

[0308] The term “genetic material” includes isolated nucleic acid, either DNA or RNA, a section of a double helix, a section of a chromosome, or an organism's or cell's entire genome, in particular its exome or transcriptome.

[0309] According to the invention, “nucleic acid” is preferably deoxyribonucleic acid (DNA) or ribonucleic acid (RNA). Nucleic acids include genomic DNA, cDNA, mRNA, recombinantly produced and chemically synthesized molecules. A nucleic acid may be present as a single-stranded or double-stranded and linear or covalently circularly closed molecule, as well as mixtures thereof. A nucleic acid can be isolated. Preferably, the nucleic acid is a free circulating DNA and/or RNA molecule. In one embodiment, the term “nucleic acid” is also understood to mean “nucleic acid sequence”. Further, prior to sequencing, the nucleic acids can be processed, for example, enriched or amplified. In cases where the nucleic acid obtained from the sample is RNA, the RNA can be reverse transcribed into DNA for sequencing or the RNA itself can be sequenced.

[0310] The term “mutation” refers to a change of or a difference in the nucleic acid sequence (nucleotide substitution, addition or deletion) compared to a reference. According to the invention, the term “mutation” includes point mutations, indels, fusions, chromothripsis and RNA edits.

[0311] According to the invention, the term “indel” describes a special mutation class, defined as a mutation resulting in a co-localized insertion and deletion and a net gain or loss in nucleotides. In coding regions of the genome, unless the length of an indel is a multiple of 3, they produce a frameshift mutation. Indels can be contrasted with a point mutation; where an indel inserts and deletes nucleotides from a sequence, a point mutation is a form of substitution that replaces one of the nucleotides.

[0312] According to the invention, the term “chromothripsis” refers to a genetic phenomenon by which specific regions of the genome are shattered and then stitched together via a single devastating event.

[0313] Fusions can generate hybrid genes formed from two previously separate genes. It can occur as the result of a translocation, interstitial deletion, or chromosomal inversion. Often, fusion genes are oncogenes. Oncogenic fusion genes may lead to a gene product with a new or different function from the two fusion partners.

[0314] In context of the present invention, the term “sequencing” means to determine the sequence of at least one nucleic acid, and it includes any method that is used to determine the order of the bases in a strand of at least one nucleic acid. A preferred method of sequencing is high-throughput sequencing, such as next-generation sequencing or third generation sequencing.

[0315] For clarification purposes: the terms “Next Generation Sequencing” or “NGS” in the context of the present invention mean all high throughput sequencing technologies which, in contrast to the “conventional” sequencing methodology known as Sanger chemistry, read nucleic acid templates randomly in parallel along the entire genome by breaking the entire genome into small pieces. Such NGS technologies (also known as massively parallel sequencing technologies) are able to deliver nucleic acid sequence information of a whole genome, exome, transcriptome (all transcribed sequences of a genome) or methylome (all methylated sequences of a genome) in very short time periods, e.g., within 1-2 weeks, preferably within 1-7 days or most preferably within less than 24 hours and allow, in principle, single cell sequencing approaches. Multiple NGS platforms which are commercially available or which are mentioned in the literature can be used in the context of the present invention, e.g., those described in detail in Zhang et al., 2011, The impact of next-generation sequencing on genomics. J. Genet Genomics 38:95-109; or in Voelkerding et al., 2009, Next generation sequencing: From basic research to diagnostics, Clinical chemistry 55:641-658. Non-limiting examples of such NGS technologies/platforms are
[0316] 1) The sequencing-by-synthesis technology known as pyrosequencing implemented, e.g., in the GS-FLX 454 Genome Sequencer™ of Roche-associated company 454 Life Sciences (Branford, Conn.), first described in Ronaghi et al., 1998, A sequencing method based on real-time pyrophosphate, Science 281:363-365. This technology uses an emulsion PCR in which single-stranded DNA binding beads are encapsulated by vigorous vortexing into aqueous micelles containing PCR reactants surrounded by oil for emulsion PCR amplification. During the pyrosequencing process, light emitted from phosphate molecules during nucleotide incorporation is recorded as the polymerase synthesizes the DNA strand.
[0317] 2) The sequencing-by-synthesis approaches developed by Solexa (now part of Illumina Inc., San Diego, Calif.) which is based on reversible dye-terminators and implemented, e.g., in the Illumina/Solexa Genome Analyzer™ and in the Illumina HiSeq 2000 Genome Analyzer™. In this technology, all four nucleotides are added simultaneously into oligo-primed cluster fragments in flow-cell channels along with DNA polymerase. Bridge amplification extends cluster strands with all four fluorescently labeled nucleotides for sequencing.
[0318] 3) Sequencing-by-ligation approaches, e.g., implemented in the SOLid™ platform of Applied Biosystems (now Life Technologies Corporation, Carlsbad, Calif.). In this technology, a pool of all possible oligonucleotides of a fixed length are labeled according to the sequenced position. Oligonucleotides are annealed and ligated; the preferential ligation by DNA ligase for matching sequences results in a signal informative of the nucleotide at that position. Before sequencing, the DNA is amplified by emulsion PCR. The resulting bead, each containing only copies of the same DNA molecule, are deposited on a glass slide. As a second example, the Polonator™ G.007 platform of Dover Systems (Salem, N.H.) also employs a sequencing-by-ligation approach by using a randomly arrayed, bead-based, emulsion PCR to amplify DNA fragments for parallel sequencing.
[0319] 4) Single-molecule sequencing technologies such as, e.g., implemented in the PacBio RS system of Pacific Biosciences (Menlo Park, Calif.) or in the HeliScope™ platform of Helicos Biosciences (Cambridge, Mass.). The distinct characteristic of this technology is its ability to sequence single DNA or RNA molecules without amplification, defined as Single-Molecule Real Time (SMRT) DNA sequencing. For example, HeliScope uses a highly sensitive fluorescence detection system to directly detect each nucleotide as it is synthesized. A similar approach based on fluorescence resonance energy transfer (FRET) has been developed from Visigen Biotechnology (Houston, Tex.). Other fluorescence-based single-molecule techniques are from U.S. Genomics (GeneEngine™) and Genovoxx (AnyGene™)
[0320] 5) Nano-technologies for single-molecule sequencing in which various nanostructures are used which are, e.g., arranged on a chip to monitor the movement of a polymerase molecule on a single strand during replication. Non-limiting examples for approaches based on nano-technologies are the GridON™ platform of Oxford Nanopore Technologies (Oxford, UK), the hybridization-assisted nano-pore sequencing (HANS™) platforms developed by Nabsys (Providence, R.I.), and the proprietary ligase-based DNA sequencing platform with DNA nanoball (DNB) technology called combinatorial probe-anchor ligation (cPAL™)
[0321] 6) Electron microscopy based technologies for single-molecule sequencing, e.g., those developed by LightSpeed Genomics (Sunnyvale, Calif.) and Halcyon Molecular (Redwood City, Calif.)
[0322] 7) Ion semiconductor sequencing which is based on the detection of hydrogen ions that are released during the polymerization of DNA. For example, Ion Torrent Systems (San Francisco, Calif.) uses a high-density array of micro-machined wells to perform this biochemical process in a massively parallel way. Each well holds a different DNA template. Beneath the wells is an ion-sensitive layer and beneath that a proprietary Ion sensor.

[0323] Other sequencing methods useful in the context of the invention include tunneling currents sequencing (Xu et al., 2007, The electronic properties of DNA bases, Small 3:1539-4543, Di Ventra, 2013, Fast DNA sequencing by electrical means inches closer, Nanotechnology 24:342501). Particularly preferable next-generation sequencing (NGS) methodologies include Illumina, IONTorrent and NanoPore sequencing.

[0324] Preferably, DNA and RNA preparations serve as starting material for NGS. Such nucleic acids can be easily obtained from biological samples, e.g., from blood or fresh, flash-frozen or formalin-fixed tissue samples or from freshly isolated cells. Although nucleic acids extracted can be highly fragmented, they are nonetheless suitable for NGS applications.

[0325] Several targeted NGS methods for exome sequencing are described in the literature (for review see, e.g., Teer and Mullikin, 2010, Human Mol Genet 19:R145-51), all of which can be used in conjunction with the present invention. Many of these methods (described, e.g., as genome capture, genome partitioning, genome enrichment, etc.) use hybridization techniques and include array-based (e.g., Hodges et al., 2007, Nat Genet 39:1522-1527) and liquid-based (e.g., Choi et al., 2009, Proc Natl Acad Sci USA 106:19096-19101) hybridization approaches. Commercial kits for DNA sample preparation and subsequent exome capture are also available: for example, Illumina Inc. (San Diego, Calif.) offers the TruSeq™ DNA Sample Preparation Kit and the Exome Enrichment Kit TruSeq™ Exome Enrichment Kit.

[0326] In certain embodiments of the invention, in order to reduce the number of false positive findings, it is preferred to determine/compare the sequences in replicates. Thus, it is preferred that nucleic acid sequences in a biological sample be sequenced twice, three times or more. In one embodiment, the sequencing of nucleic acid sequences obtained from a sample is determined twice, three times or more. It may also be possible to determine the sequence more than once by determining at least once the sequence in genomic DNA and determining at least once the sequence in RNA of said sample. For example, by determining the variations between replicates of a sample, the expected rate of false positive (FDR) mutations as a statistical quantity can be estimated. Technical repeats of a sample should generate identical results and any detected mutation in this “same vs. same comparison” is a false positive. Furthermore, various quality related metrics (e.g., coverage or SNP quality) may be combined into a single quality score using a machine learning approach.

[0327] In context of the present invention, the term “database” relates to an organized collection of data, preferably as an electronic filing system. In an embodiment, a sequence database is a type of database that is composed of a collection of computerized (“digital”) nucleic acid sequences, protein sequences, or other polymer sequences stored on a computer. Preferably, the database is a collection of nucleic acid sequences, i.e., the genetic information from a number of species. The genetic information can be derived from the genome and/or the exome and/or the transcriptome of a species. Exemplary nucleic acid databases useful in the present invention include, but are not limited to, International Nucleotide Sequence Database (INSD), DNA Data Bank of Japan (National Institute of Genetics), EMBL (European Bioinformatics Institute), GenBank (National Center for Biotechnology Information), Bioinformatic Harvester, Gene Disease Database, SNPedia, CAMERA Resource for microbial genomics and metagenomics, EcoCyc (a database that describes the genome and the biochemical machinery of the model organism E. coli K-12), Ensembl (provides automatic annotation databases for human, mouse, other vertebrate and eukaryote genomes) Ensembl Genomes (provides genome-scale data for bacteria, protists, fungi, plants and invertebrate metazoa, through a unified set of interactive and programmatic interfaces (using the Ensembl software platform)), Exome Aggregation Consortium (ExAC) (exome sequencing data from a wide variety of large-scale sequencing projects (Broad Institute)), PATRIC (PathoSystems Resource Integration Center), MGI Mouse Genome (Jackson Laboratory), JGI Genomes of the DOE-Joint Genome Institute (provides databases of many eukaryote and microbial genomes), National Microbial Pathogen Data Resource (a manually curated database of annotated genome data for the pathogens Campylobacter, Chlamydia, Chlamydophila, Haemophilus, Listeria, Mycoplasma, Neisseria, Staphylococcus, Streptococcus, Treponema, Ureaplasma and Vibrio), RegulonDB (a model of the complex regulation of transcription initiation or regulatory network of the cell E. coli K-12), Saccharomyces Genome Database (genome of the yeast model organism), Viral Bioinformatics Resource Center (curated database containing annotated genome data for eleven virus families), The SEED platform (includes all complete microbial genomes, and most partial genomes, the platform is used to annotate microbial genomes using subsystems), WormBase ParaSite (parasitic species), UCSC Malaria Genome Browser (genome of malaria causing species (Plasmodium falciparum and others)), Rat Genome Database (genomic and phenotype data for Rattus norvegicus), INTEGRALL (database dedicated to integrons, bacterial genetic elements involved in the antibiotic resistance), VectorBase (NIAID Bioinformatics Resource Center for Invertebrate Vectors of Human Pathogens), EzGenome, comprehensive information about manually curated genome projects of prokaryotes (archaea and bacteria), GeneDB (Apicomplexan Protozoa, Kinetoplastid Protozoa, Parasitic Helminths, Parasite Vectors as well as several bacteria and viruses), EuPathDB (eukaryotic pathogen database resources includes amoeba, fungi, plasmodium, trypanosomatids etc.); The 1000 Genomes Project (providing the genomes of more than a thousand anonymous participants from a number of different ethnic groups), Personal Genome Project (providing human genomes).

[0328] Exemplary microorganisms encompassed within the methods of the invention include bacteria, fungi and parasites, preferably bacteria. Exemplary bacteria include, but are not limited to, those listed above and the following: Acinetobacter spp., such as Acinetobacter baumannii, Escherichia spp., such as Escherichia coli, Klebsiella spp., such as Klebsiella aerogenes, Klebsiella oxytoca, Klebsiella pneumoniae, Morganella spp., such as Morganella morganii, Proteus spp., such as Proteus mirabilis, Pseudomonas spp., such as Pseudomonas aeruginosa, Salmonella spp., such as Salmonella enterica, Serratia spp., such as Serratia marcescens, Stenotrophomonas spp., such as Stenotrophomonas maltophilia, Shigella spp., such as Shigella boydii, Shigella flexneri, Shigella sonnei, Enterobacter spp., such as Enterobacter cloacae, Staphylococcus spp., such as Staphylococcus aureus, Neisseria meningitis, Streptococcus pneumoniae, Streptococcus pyogenes, Moraxella catarrhalis, Bordetella pertussis, Clostridium tetani, Corynebacterium diphtheria, Haemophilus influenza, Streptococcus agalactiae, Chlamydia trachomatis, Chlamydia pneumoniae, Helicobacter pylori, Bacillus anthracis, Yersinia pestis, Staphylococcus epidermis, Clostridium perfringens, Clostridium botulinum, Legionella pneumophila, Coxiella burnetii, Brucella spp. such as B. abortus, B. canis, B. melitensis, B. neotomae, B. ovis, B. suis, B. pinnipediae, Francisella spp. such as F. novicida, F. philomiragia, F. tularensis, Neisseria gonorrhoeae, Treponema pallidum, Haemophilus ducreyi, Enterococcus faecalis, Enterococcus faecium, Staphylococcus saprophyticus, Yersinia enterocolitica, Mycobacterium tuberculosis, Rickettsia spp., Listeria monocytogenes, Vibrio cholera, Salmonella typhi, Borrelia burgdorferi, and Porphyromonas gingivalis.

[0329] In an embodiment, the term “percentage identity” within the context of nucleotide sequences is intended to denote a percentage of nucleotides which are identical between the two sequences to be compared, obtained after the best alignment, this percentage being purely statistical and the differences between the two sequences being distributed randomly and over their entire length. Sequence comparisons between two nucleic acid sequences are conventionally carried out by comparing these sequences after having aligned them optimally, said comparison being carried out by segment or by “window of comparison” in order to identify and compare local regions of sequence similarity. The optimal alignment of the sequences for comparison may be produced, besides manually, by means of the local homology algorithm of Smith and Waterman, 1981, Ads App. Math. 2, 482, by means of the local homology algorithm of Needleman and Wunsch, 1970, J. Mol. Biol. 48, 443, by means of the similarity search method of Pearson and Lipman, 1988, Proc. Natl Acad. Sci. USA 85, 2444, or by means of computer programs which use these algorithms (GAP, BESTFIT, FASTA, BLAST P, BLAST N and TFASTA in Wisconsin Genetics Software Package, Genetics Computer Group, 575 Science Drive, Madison, Wis.).

[0330] The percentage identity is calculated by determining the number of identical positions between the two nucleic sequences being compared, dividing this number by the number of positions compared and multiplying the result obtained by 100 so as to obtain the percentage identity between these two sequences.

[0331] The term “wild type” as used herein refers to the phenotype of the typical form of a species of a microorganism as it occurs in nature. However, most or all gene loci exist in a variety of allelic forms, which vary in frequency throughout the geographic range of a species, and it is held that in most instances a uniform wild type does not exist in nature. In general, however, the most prevalent allele, i.e., the one with the highest gene frequency, is the one deemed as wild type. Within the context of the present invention, the nucleotide and amino acid sequences depicted in the Sequence Listing, except for the “n” and “Xaa” positions refer to wild type sequences, of which naturally occurring variants exist, e.g., due to the said variety of allelic forms.

[0332] “Reference nucleotide sequences”, for instance, are not particularly limited to those set forth in the Sequence Listing and may be taken from one or more databases, such as those listed above. Depending on the microorganism to be tested, different reference nucleic acid sequences can be used for aligning; e.g., corresponding wild type gene sequences, mutated gene sequences associated with antimicrobial drug resistance, or intergenic nucleic acid sequences associated with antimicrobial drug resistance, preferably antibiotic resistance. Using such reference nucleotide sequences, nucleotide alterations present in the input nucleotide sequences may be obtained that mediate antimicrobial drug resistance in one or more microbial genus and species. Particularly, nucleotide alterations present in the input nucleotide sequences may be obtained that mediate antimicrobial drug resistance in one or more microorganisms of different genus and/or species.

[0333] In context of the present invention, the term “antibiotic resistance” means a loss of susceptibility of microorganism to the killing, or growth-inhibiting properties of an antibiotic agent. It also relates to resistance of a microorganism to an antimicrobial drug that was originally effective for treatment of infections caused by it. Resistant microorganisms, including bacteria, are able to withstand attack by antimicrobial drugs, such as antibacterial drugs, so that standard treatments become ineffective and infections persist.

[0334] In the context of the present invention, the terms “susceptible”, “susceptibility”, “sensitive” or “sensitivity” as used herein refer to the ability of a microorganism, preferably a bacterium, to be growth inhibited or killed by an antimicrobial drug.

[0335] In an embodiment, the present invention is directed also to a device for carrying out the method according to the present invention, wherein the presence or absence of nucleotide sequences and/or differences in nucleotide sequences to determine whether or not a microorganism is resistant to one or more antimicrobial drugs is computed by a central processing unit of the device. In an embodiment, the present invention is directed also to a device for carrying out the method according to the present invention, wherein (i) determining the presence or absence in the microorganism of at least one nucleotide sequence identified in Table I or a variant of the nucleotide sequence, and/or (ii) determining the presence or absence in the microorganism of at least one difference in at least one nucleotide sequence identified in Table I compared with a reference sequence, is computed by a central processing unit of the device. In an embodiment, the central processing unit is a field-programmable gate array (FPGA).

[0336] The methodology of the present invention is preferably not restricted to the determination of an antimicrobial drug resistance status of a single specific microorganism. In one embodiment, the present method determines the status for all microorganisms, e.g., present in a sample obtained from a patient, preferably all microorganisms relevant for an infection in the patient.

[0337] Thus, the present invention provides a useful method for determining the antimicrobial drug resistance status of a microorganism causing or suspected of causing an infection in a patient within short time, such that an appropriate therapy for the infection can be selected within short time, as well as to avoid non-effective therapies such as administering antimicrobials to which the microorganism is resistant.

[0338] The present invention is described in detail by the figures and examples below, which are used only for illustration purposes and are not meant to be limiting. Owing to the description and the examples, further embodiments which are likewise included in the invention are accessible to the skilled worker.

### FIGURES

[0339] FIG. 1 depicts a schematic diagram for the computational work-flow applied for the identification of AMRs.

### EXAMPLES

[0340] 1. Determination of Antimicrobial Resistance Markers (AMRs)

[0341] Bacterial Isolates

[0342] The dataset of 11,087 isolates consisted of 1,001 isolates from the S. aureus strain collection of Saarland University Medical Center and a collection of 10,086 413 Gram-negative bacterial clinical isolates that form part of the microbiology strain collection of Siemens Healthcare Diagnostics (West Sacramento, Calif., 415 USA). DNA extraction using the Siemens VERSANT® sample preparation system and whole-genome next-generation sequencing were performed for all isolates (2×100 bp paired-end on Illumina Hiseq2000/2500 sequencers).

[0343] Susceptibility Testing and Resistance Profiles

[0344] For 993 isolates from the S. aureus strain collection detection of methicillin resistant and susceptible Staphylococcus aureus (MRSA/MSSA) isolates was performed. The specimen were plated on CHROMagar MRSA detection biplates (Mast, Germany). All MRSA positive culture isolates were further confirmed using a penicillin binding protein 2a latex agglutination test (Alere, Germany).

[0345] For 9,998 isolates from the Gram-negative isolate collection antimicrobial susceptibility testing (AST) was performed. Frozen reference AST panels were prepared following Clinical Laboratory Standards Institute (CLSI) recommendationsl. The antimicrobial agents included in the panels are set forth below in “Drug Information”. Prior to use with clinical isolates, AST panels were tested and considered acceptable for testing with clinical isolates when the QC results met QC ranges described by CLSI (CLSI Performance Standards for Antimicrobial Susceptibility Testing; Twenty-Fifth Informational Supplement. CLSI document M100-S25, Wayne, P. C. and L. S. I. 2015. M100-S25 Performance Standards for Antimicrobial. (2014)). Isolates were cultured on trypticase soy agar with 5% sheep blood (BBL, 436 Cockeysville, Md.) and incubated in ambient air at 35±1° C. for 18-24 h. Isolated colonies panels were inoculated according to CLSI recommendations (CLSI additional reference) and incubated in ambient air at 35±1° C. for 16-20 h. Panel results 439 were read visually, and minimal inhibitory concentrations (MIC) were determined.

[0346] Drug Information

[0347] The 25 used drugs were grouped into different drug classes based on their category in the EUCAST guidelines (EUCAST. European Committee on Antimicrobial Susceptibility Testing Antifungal Agents Breakpoint tables for interpretation of MICs. Eucast 1-5 (2017)): 5 drugs belong to cephalosporins (cefuroxime—2nd generation, cefotaxime, ceftazidime and ceftriaxone—3rd generation, cefepime—4th generation), 7 to penicillins, 3 to carbapenems, 3 to fluoroquinolones, 2 to aminoglycosides in addition to 1 tetracycline, 1 monobactam, 1 folate pathway inhibitor, 1 lincosamide and 1 macrolide.

[0348] Antimicrobial Marker Extraction

[0349] Antimicrobial markers were extracted per species and antimicrobial compound.

[0350] Data Preparation

[0351] Genotype matrix (X): A sample by feature presence/absence matrix of genes, single nucleotide variants, and small genetic variations was compiled. Features were encoded categorically into 0 (absence) and 1 (presence). Nearly constant features and sparse features with missing values are removed.

[0352] Phenotype vector (y): Associated sample-wise minimum inhibitory concentrations were transformed into categorical labels for antimicrobial resistance (R) and antimicrobial susceptibility (S) using EUCAST guidelines v. 7.1 2. Intermediate values (I) were converted to resistance value (R).

[0353] Training/Test sets: Prior to marker extraction, i.e., feature selection, the data set (X/y) was split into a training (Xtrain/ytrain) and test (Xtest/ytest) set for independent validation using stratified sampling on the phenotype (y) and information about population structure consisting of the year the sample was isolated, name of the submitting organization, geographical location, t-SNE projected genomic distance, and multi-compound resistance information.

[0354] Data Processing

[0355] Extracted markers, so called Self-Consistent Feature Sets, were derived from the consensus of multiple individual Genome-Wide-Analysis (GWAS) runs on bootstrapped training sets in order to increase the robustness of the extracted markers (FIG. 1).

[0356] Bootstrapping: Multiple training subsets (Xtrain′) were created by repeated sampling with replacement on the original training set (Xtrain) prior to GWAS and feature extraction.

[0357] GWAS: The training set (Xtrain) was subjected to GWAS for feature selection—once prior to bootstrapping and ten times (m) after bootstrapping. MatrixEQTL (Shabalin, 2012, Matrix eQTL: Ultra fast eQTL analysis via large matrix operations, Bioinformatics (doi:10.1093/bioinformatics/bts163)) was used for association testing between individual features and phenotypes using linear regression. Covariates as listed in section ‘Training/Test sets’ were added to the analysis with MatrixEQTL to account for the population structure and multi-compound resistance. Features were selected after each GWAS run based on a false discovery rate (FDR) of less than 0.05 (I) before the residual effect of other high-ranking features (II) was analyzed. These conditional analyses reduced the effect of already selected features over five iterations by addition of primary components as fixed effects from PLS-DA analyses on previously selected features and their associated phenotypes. Any additional features that came out of these conditional GWAS analyses with a FDR of less than 0.05 were added to the selected features. In addition, up to five top-ranking features according to PPV or NPV below the required FDR of 0.05 were also added to each feature set selection round. The filtered—feature selected—training subset (Xtrain′) contained the entirety of features from (I) and iterations in (II).

[0358] Feature Selection: The self-consistent feature set for a species-compound pair was defined as all significant features from the repeated GWAS feature selections runs that came up in at more than two runs in total.

[0359] Evaluation

[0360] The self-consistent feature set was evaluated using random forest models. Model parameters were optimized using exhaustive grid search and the model was trained with cross validation on a balanced training set of Xtrain′ before model performance was assessed using the test set (Xtest).

[0361] For every species-compound pair, the markers comprising the self-consistent feature set are reported in Tables I and II. To demonstrate the performance of said markers in predicting resistance against said compound in isolates of the said species, we report performance metrics such as sensitivity, specificity, accuracy, positive predictive value (ppv), and negative predictive value (npv), as set forth in Table II.

[0362] The reported performance metrics can be calculated for every feature from a confusion matrix, i.e., a table reflecting how many isolates are correctly and incorrectly labelled as resistant to a compound based on the presence (or absence) of a feature.

[0363] Table III presents a confusion matrix for binary classification, where tp are true positive, fp—false positive, fn—false negative, and to—true negative counts. Here, a positive case refers to resistance and a negative case refers to susceptibility.

TABLE III
A confusion matrix for binary classification.

Prediction

| | As Positive/ | As Negative/ |
|---|---|---|
| Actual | Resistant | Susceptible |
| Positive/Resistant | tp | fn |
| Negative/Susceptible | fp | tn |

[0364] According to scientific literature (e.g., Sokolova, et al., 2006, Beyond Accuracy, F-Score and ROC: A Family of Discriminant Measures for Performance Evaluation, pages 1015-1021 (Springer, Berlin, Heidelberg (doi:10.1007/11941439_1144)), accuracy, sensitivity, specificity, positive predictive value and negative predictive value are among the commonly accepted performance evaluation metrics that can be calculated from a confusion matrix (Table III).

$$accuracy = \frac{tp + tn}{tp + fp + fn + tn}$$

$$sensitivity = \frac{tp}{tp + fn}$$

$$specificity = \frac{tn}{fp + tn}$$

$$positive predicitve value = \frac{tp}{tp + fp}$$

$$negative predictive value = \frac{tn}{fn + tn}$$

[0365] Using the foregoing methodology, the AMRs that were identified in various microorganisms whose absence or presence in the microorganism is associated with/indicative of a microorganism being resistant to one or more antimicrobial drugs are listed in rows 0 to 3840 of Table I. Further, the subset of AMRs identified that indicate that the microorganism is resistant to more than one type/class of antimicrobial drug are listed in the rows of Table I in which a plus (+) is in the column “Marker associated with Cross-Resistance. The subset of AMRs identified that indicate antimicrobial resistance in more than one species of microorganism are listed in the rows of Table I in which a plus (+) is in the column “Associated with resistance in multiple pathogens”. Those AMRs identified that are associated with antimicrobial resistance to more than one type/class of antimicrobial drug in more than one species of microorganism are listed in the rows of Table I in which a plus (+) is in the column “cross-resistance in multiple pathogens.

[0366] 2. Determining the Antimicrobial Drug Resistance Status of a Microorganism

[0367] A sample that has been obtained from a patient having or suspected of having an infection, which sample contains or is suspected of containing a microorganism causing or suspected of causing the infection in the patient, is processed using standard methods such that the genome and/or extra-genomic nucleic acids of the microorganism is sequenced using a high throughput method of sequencing.

[0368] The resulting sequence information is compared with a database containing the AMRs identified in Tables I and II along with their relevance to antimicrobial drug resistance, i.e., whether an individual AMR is present or absent in the microorganism indicates resistance to an antimicrobial drug, specifically the drug associated with the respective AMR. The comparison will result in a determination of the antimicrobial drug resistance status of the microorganism.

[0369] If the microorganism is not resistant to any antimicrobial drugs, the patient will be give any antimicrobial drug determined to be appropriate by the treating physician. If the microorganism is determined to be resistant to one or more antimicrobial drugs, an appropriate antimicrobial drug to which the microorganism is sensitive will be given to the patient.

Lengthy table referenced here
US20210002706A1-20210107-T00001
Please refer to the end of the specification for access instructions.

Lengthy table referenced here
US20210002706A1-20210107-T00002
Please refer to the end of the specification for access instructions.

LENGTHY TABLES
The patent application contains a lengthy table section. A copy of the table is available in electronic form from the USPTO web site (https://seqdata.uspto.gov/?pageRequest=docDetail&DocID=US20210002706A1). An electronic copy of the table will also be available from the USPTO upon request and payment of the fee set forth in 37 CFR 1.19(b)(3).

The application's sequence listing, which the Patent Office published only in electronic form, follows.

SEQUENCE LISTING (7682 sequences)

SEQ ID NO: 1 - DNA, 402 bp, Acinetobacter baumannii
atggcgggtggacaacgcttaaagcgaatggcggattcagtacagcgcgagctttctgaacttatccgtcaggagttgaaagatccgcgtctgggtggtcttgtgaccatctcaggcgttaaagtcagtccggacttaggttatgccgatgtctatgtgaccgtgatgggtcgtgaattaagcgatgaccaaaacgaagtggctcaccgtgaaacactagatattttgaataaagcatctggttttttacgtcaggagttgagtcgtcgtattaaaacgcgcatcacgcctcgcttgcgtttccattacgataaaactaatgcatatggtaactatatgtttggtcttatcgaaaaagcggtacaagatttaccgaaacgtgagtcagatgacgaagagtaa

SEQ ID NO: 2 - protein, 133 aa, Acinetobacter baumannii
MAGGQRLKRMADSVQRELSELIRQELKDPRLGGLVTISGVKVSPDLGYADVYVTVMGRELSDDQNEVAHRETLDILNKASGFLRQELSRRIKTRITPRLRFHYDKTNAYGNYMFGLIEKAVQDLPKRESDDEE

SEQ ID NO: 3 - DNA, 258 bp, Acinetobacter baumannii
atgtcagaacaacctatttcacctactgtacaacttaatacgcgtggtttacgttgtccggaacctgtcatgatgctgcatcaggcgattcgcaaagcaaaatcaggagatgttgttgaagtgttggcgactgacccttcgacttcttgggatatccctaagttttgtatgcatttgggacatgaactcctattaaaagaagaagttctagatgagcagaaccataaagaataccgttatctggtacaaaaaggatag

SEQ ID NO: 4 - protein, 85 aa, Acinetobacter baumannii
MSEQPISPTVQLNTRGLRCPEPVMMLHQAIRKAKSGDVVEVLATDPSTSWDIPKFCMHLGHELLLKEEVLDEQNHKEYRYLVQKG

SEQ ID NO: 5 - DNA, 696 bp, Acinetobacter baumannii
atgagccgctctattcgtctattaaatcttttacagcaactccgtgaatctcgttatcccgttactgctcaagtcttggctgaacgcttgggaattagtattcgcagcatttaccgtgatattgatagtttacgtgctcaaggtgtgagaatagatgcatcggcaggtttggggtttcagcttaaagaagacattttattaccaccggttacttttaatgagaatgaagccgaggctctatttttagctttagagtggttgaaagacgttccagatcaggcaatgaaatcggcagccgtttcaatctattccaaactttatgcggttttaccagagcaccggaaatatttgatcgatgatatgacgctaggtgttacacattactggcatccggttgatgaagctttagtagaacaagtacgtttagcgattcgtaaacaagtaaagatcaaagtcgattattgcgatgaacacaagcgtataagtcaacgttctctttggccttttgctttagggtatttacatgacaaagttgtacttgctgcttggtgtgaattacggcaggcatttcgccattttcggatagatcgtattcataacttgcaaatgagtgaggaaatatatcctgaatttaaaaaacatctgtttcaaagatggtggaaacaagaaatgcaaaggactactgacaaaaactga

SEQ ID NO: 6 - protein, 231 aa, Acinetobacter baumannii
MSRSIRLLNLLQQLRESRYPVTAQVLAERLGISIRSIYRDIDSLRAQGVRIDASAGLGFQLKEDILLPPVTFNENEAEALFLALEWLKDVPDQAMKSAAVSIYSKLYAVLPEHRKYLIDDMTLGVTHYWHPVDEALVEQVRLAIRKQVKIKVDYCDEHKRISQRSLWPFALGYLHDKVVLAAWCELRQAFRHFRIDRIHNLQMSEEIYPEFKKHLFQRWWKQEMQRTTDKN

SEQ ID NO: 7 - DNA, 1251 bp, Proteus mirabilis
atgcagaaacatgatgcattcgctgccctgcgctatagagatttctcaattgtcaccattaatcaattttgcttaacattagcaattttgattcaagaaattattgttgcctattcactttatcaaattaccaaagaccctttaactttaggtttaattggacttgcagaagccattccatttattgccctatcgctttggggtggttattttgctgataaatttaataaacaggtcatcatgaaaatctgtttatttttctcagtacctcttcctttagttttatggttactgttccatctgcatgggttgggtcatatcagtgtaaatttcctttcttggggtatttatgcagttatttttggtttgggcaccatacgtggtttttacaacccttctgctacatccctaaaaccatttttaattccacgtgagctttatgcaaatggtgcaacatggacaaccattggttggcagagtggtgtaattattgggcctatgctcggtgggttcatgctcgcttatttaggcagagaaaccagtctttttagtgttgccggtctccttagtatctgctttattctcattaatttattacataaacgtagctttcctaaaattgaaactgccaatgttatagaaagcttaggcgatggctttcgctttatttggaaaaccaaaatagttctttgggcgatttctttagaccttgcctctgttttatttggtggtgtaatcgctctactccctatttttgccgaagatattttaaaagtcggtcctgaaggcttgggttacttgcgtgcggctccttctattggtgcgctcattactatgattgctttaactcgttttccgccaactcagcacgcatggcgtaatatgctacttgcagttgcagggtttggtgtatttacaatccttttcgcgttctcgaacaacatgtggttatccctatttgcgttggcgatgacgggtgcttgcgacagtatttcggtggtagttagacaaaccattttgcaaatattcccaccagaaaatatgcgtggtcgcgtagcggctgtaaatggaatgtttgtctcatcaagtaatgagctgggtgcatttgaatcaggcttggctgccaaatatttgggaactattgcagcgactatttttggtggttgtatgactcttgcagtagtaaccttctgttggctaaaaaccaatgatctttttaaagtcgatattactaaaagctcagaagattag

SEQ ID NO: 8 - protein, 416 aa, Proteus mirabilis
MQKHDAFAALRYRDFSIVTINQFCLTLAILIQEIIVAYSLYQITKDPLTLGLIGLAEAIPFIALSLWGGYFADKFNKQVIMKICLFFSVPLPLVLWLLFHLHGLGHISVNFLSWGIYAVIFGLGTIRGFYNPSATSLKPFLIPRELYANGATWTTIGWQSGVIIGPMLGGFMLAYLGRETSLFSVAGLLSICFILINLLHKRSFPKIETANVIESLGDGFRFIWKTKIVLWAISLDLASVLFGGVIALLPIFAEDILKVGPEGLGYLRAAPSIGALITMIALTRFPPTQHAWRNMLLAVAGFGVFTILFAFSNNMWLSLFALAMTGACDSISVVVRQTILQIFPPENMRGRVAAVNGMFVSSSNELGAFESGLAAKYLGTIAATIFGGCMTLAVVTFCWLKTNDLFKVDITKSSED

SEQ ID NO: 9 - DNA, 570 bp, Acinetobacter baumannii
atgggtgcaaattctgcgctaatttttggaattttaattaacgtcgcgattttattggtctttttccgttttttaatgcaattggcggcagtaagtccttataatcctgtggttttatcgacagtaaaggcgactaagattgttgatatttttggccgaatttttccaacagtcgcaaaaggccgattcaatctggcagcgttggttcttttaattattttatatttactgaaaattttcggtgtaatgtatctttcgggttccatgccaaatagtccagttcatttagtgattctgacttttgtgaccatgattcaggatttgattcgtttctgccgttacttaatttttgcaacaatcattttgagttgggtcgttatgtttactcaatctcgttcaccttatattgaggtgattcaagatttagctgaaccgttactcgccccattccgtcgtttattacctaatatggggatgattgacttatctccaattctggcatttttggcactctatattgccgagatcttaatgaatgaagtcgctaaagttttattaactggactttaa

SEQ ID NO: 10 - protein, 189 aa, Acinetobacter baumannii
MGANSALIFGILINVAILLVFFRFLMQLAAVSPYNPVVLSTVKATKIVDIFGRIFPTVAKGRFNLAALVLLIILYLLKIFGVMYLSGSMPNSPVHLVILTFVTMIQDLIRFCRYLIFATIILSWVVMFTQSRSPYIEVIQDLAEPLLAPFRRLLPNMGMIDLSPILAFLALYIAEILMNEVAKVLLTGL

SEQ ID NO: 11 - DNA, 549 bp, Acinetobacter baumannii
atgtctcagccaatcgaaattattgccaaaggtttaacgcgtgaacgccaaagagcagggctttcattggcagaggttgcgcgccgtgcaggtgttgccaaatctacactttctcaattagaggcagggcaaggtaatccaagtattgaaaccttgtgggcactttgtgttgcactcaatattccatttgcacgtttgatggaagaaccgagcaatcaagtgcaagtcattcgctgtggcgatgggccaacggtgagttcggagattgccaattacaaagcaattttgttggcgacctgtccaccccatgcgcgccgagatgtttatttattgattgttgagccgggcgaagatcgactttcagaaccacatccagttggttcggtagaacatattattgtagtggaagggcgagctttggtgggtttaattgatgaagcggttgagctgggtgttggagactatatttgttatccagccgatcaaaaacatatatttagagctttggaaacaggcacaaaagcgttgttaatctctgaacaaaactaa

SEQ ID NO: 12 - protein, 182 aa, Acinetobacter baumannii
MSQPIEIIAKGLTRERQRAGLSLAEVARRAGVAKSTLSQLEAGQGNPSIETLWALCVALNIPFARLMEEPSNQVQVIRCGDGPTVSSEIANYKAILLATCPPHARRDVYLLIVEPGEDRLSEPHPVGSVEHIIVVEGRALVGLIDEAVELGVGDYICYPADQKHIFRALETGTKALLISEQN

SEQ ID NO: 13 - DNA, 696 bp, Acinetobacter baumannii
atggaaaatcgttcgttatatcatgccatgactacatacgctcttattagaaaacttagtaaagatactactcgctcgattttctttgtgtgcttagcaacgagtgtcgttggtatgtccttaggttcactcgccgcaagttatggcttagcactttggatcccactttgcctatccatatttgtgctcgcgggaactgctgaatttatttttattggattcttggcggtaggcggtagcccgattgcagctgcaattgcaggactactcgtcaatttaagacatctgccttttggcattgcggtcaatgaactgattcgaggcaaattttctcaatattttggatctcatatcatgaacgatgaaagcgttttgtttggtatggcacagcctgatttcgaaaccaaaaaggctgcttactggctatgtggtataggcatcatgctcagttggccgctcggcgtcactgcaggttattttattgggagtgctattccagaccctaaaacatttggcttagatgcgatttttccagctattttaattgctcttactttttctgctttaaagaataaggtgactcgaaaagctgcatttgccggatcaactttagcgttgataaccacaccctttttagccgcaggacttccaattctgatttcgctttttggcttgatatggagtagaagaaaatga

SEQ ID NO: 14 - protein, 231 aa, Acinetobacter baumannii
MENRSLYHAMTTYALIRKLSKDTTRSIFFVCLATSVVGMSLGSLAASYGLALWIPLCLSIFVLAGTAEFIFIGFLAVGGSPIAAAIAGLLVNLRHLPFGIAVNELIRGKFSQYFGSHIMNDESVLFGMAQPDFETKKAAYWLCGIGIMLSWPLGVTAGYFIGSAIPDPKTFGLDAIFPAILIALTFSALKNKVTRKAAFAGSTLALITTPFLAAGLPILISLFGLIWSRRK

SEQ ID NO: 15 - DNA, 603 bp, Acinetobacter baumannii
atgaaacgattaaataaaagcgaaaccacacgacaacacattttagataccagttttgaactggtattacataaaggttttgtcggtgttggtttacaagaaattttaaaggcttgtgacgtacctaaaggttcgttctatcactactttgcttcaaaagaggcgtttggctgtgcgttgctcgagcaatacatggccaattataaagtccgtatggaacagctttggcagcacagtgagcaaagtgcccatgcccgtttaatggctttatggcaggcgtggattgatgatccggtccatggtagctgggctgaaaactgcttgattgtgaaattggcagccgaagtttcggacttatcagaagatatgcgtcaaattctaaatgacggtgtgcacaaattaacgcagcgtctagctttgctactcaaagaagggcaacaagaaggatcaattccaaaacatattgaacctttgaaaactgcgcaagtcatgtatcagctatggttaggtgctgctttacttacaaaattgtcgcaagacaaagcacatctacatctagccttagaaaccactcaacaactcttaaaaccgatagaggaataa

SEQ ID NO: 16 - protein, 200 aa, Acinetobacter baumannii
MKRLNKSETTRQHILDTSFELVLHKGFVGVGLQEILKACDVPKGSFYHYFASKEAFGCALLEQYMANYKVRMEQLWQHSEQSAHARLMALWQAWIDDPVHGSWAENCLIVKLAAEVSDLSEDMRQILNDGVHKLTQRLALLLKEGQQEGSIPKHIEPLKTAQVMYQLWLGAALLTKLSQDKAHLHLALETTQQLLKPIEE

SEQ ID NO: 17 - DNA, 2835 bp, Proteus mirabilis
atgagccaaagtcatatccgtattcgaggcgcacgcacccataacttaaaaaatgtgtcactcgatattccacgcgacaaatttgtggtaattacggggctatcaggttcaggaaaatcttctcttgcctttgataccttgtatgccgaaggacagcgccgttacgtcgaatcactttcggcctatgcccgtcagtttttatcgcaaatggaaaaacctgaagttgactcgattgaaggtttatcaccagccattgcgattgagcaaaagtctactagccataacccacgttcaacggttggtacgattaccgaaatttatgactatttgcgtctgctttatgcacgtgtcggtacgccttattgccctgaacacgacttacctatggttgcgcaaactgtttctgaaatggtcgatgcggtaaaaaaccttgaggaaggtacagcacttatgttgcttgcccctgttgttcgtgagcgtaaaggtgaatacagcaacttgttcgaacaactgcaaggtcaaggtttcgttcgtgcccgtgttgatggtgaaatcattgatattgatacaccaccggaactcgacaaaaagaaaaaacataccattgaagtcgttgttgaccgctttaaagtacgtgatgacttaggcaaccgtattgctgaatcatttgaaactgcactgcgtttaggtggcgatattgcagttttatcgtggatgaatggcgaacacccagatcgcgttttttctgcaaaacactcatgccctgaatgtgatcgcgcagtcgcagagcttgagccacgtttattttcatttaataacccgttcggtgcgtgccctgtctgtgatggcttaggtacacgtagccattttagccctgaaaaactcattcctaaccctgagcttgcaattagtgaaggtgctattcgtggttgggatcgtcaacgtccttattactattcaatgctgcaaaaagttgccgaccatttcggttttcaacttgatacaccatggaatcagttagataaagacacgcaaaagaaattcttacaaggtactggcaaagaaaaaatcgatttaagttatatcgatgaacgtggccgtaaacatacacgcgtgcaaccttttgaaggaattttgccacaccttgaacgtcgctatcgtgaaactgaaagtaactatgtacgtgatgatttagcacaatatttgtctaatgcagcttgtgatgcatgtggcggttcacgtctcaatgaaatttcacgtcatgttcgtgtgaaagacaaaaccattgctgacattacccgcatgtcgattggagatgccgaaagttactatcaaggtataaaccttgaaggtgccaaaggtgaaattgcagataaaatctttaaagagattcgtgagcgtttacatttcttggtgagtgttggcctgaactatttaagtctggctcgttctgccgaaacactatcgggtggtgaagcccagcgtatccgtctagcttcgcaaattggtgcaggtttgatgggtgtcatgtacgtccttgatgaaccatcaattggtctccatcaacgtgataatgatcgtttattacaaacgctaattcgcttacgtgatttgggcaatacggtattagttgttgaacatgatgaagatgcaatccgtgcagctgaccatattattgatatcggccctggtgctggcgtgcatggtggtgttgtcattgctgaaggtacgtatgatgagctggctaaacatgccgactcgctcacaggtcaatatctttcaggcaaactcaaaattgaagtgccaaaacagcgaactcaaccacctaaacctgaagaaaaaattaaactttcaggtgcagcgggtcataacttaaaaaatgtcgatttaaccatcccacttggcattatgacttgtgttacgggtgtttcaggttcaggtaaatcaacactgattaaccgtacgttacttccactggctgcaacacagctcaacggtgcaacgactttaacagctgaaaaatttgactcgattgatggtctacaacatctggataaagtcgttgatattgaccaaagcccaattggccgtacaccgcgctctaatccagcgacttatacgggtctatttacgccaattcgtgaattatttgctcaaacaccagaagcgaaagcccgtggttatagcgcgggtcgtttctcatttaacgtaaaaggcggacgctgcgaagcgtgtgaaggcgacggtatgattaaagtcgcaatgcatttcttaccagacatgtatgtaccttgcgatgcttgtcatggtaagcgctataaccgtgaaacacttgaagtcggttataaaggcaaaaacatttctgacgttttagaaatgacggttgaagatgctgctgagttctttagtgctattccagttattcaccgtcgtttagaaaccttaactcaggtaggtctaggctatattcgtttaggtcaagctgcgactacactctctggtggtgaagcacagcgtgtcaaactggctcgtgagttagcgaaacgtgatacgggtaaaacgctttatatcttggatgaaccaacaacaggtctgcatttccatgatattgccaagttactcgatattttgcatgagctacgcaacaagggtaataccattgtggtgattgaacataaccttgatgtcattaaaacagcagactgggtggtcgacttaggtccagaaggtggttcgggcggtggtatgatcattgctgaagggacacctgaacaagtagccgaggtcgagatttcccatactggccgcttcttgaaaccgatgttgaaacaataa

SEQ ID NO: 18 - protein, 944 aa, Proteus mirabilis
MSQSHIRIRGARTHNLKNVSLDIPRDKFVVITGLSGSGKSSLAFDTLYAEGQRRYVESLSAYARQFLSQMEKPEVDSIEGLSPAIAIEQKSTSHNPRSTVGTITEIYDYLRLLYARVGTPYCPEHDLPMVAQTVSEMVDAVKNLEEGTALMLLAPVVRERKGEYSNLFEQLQGQGFVRARVDGEIIDIDTPPELDKKKKHTIEVVVDRFKVRDDLGNRIAESFETALRLGGDIAVLSWMNGEHPDRVFSAKHSCPECDRAVAELEPRLFSFNNPFGACPVCDGLGTRSHFSPEKLIPNPELAISEGAIRGWDRQRPYYYSMLQKVADHFGFQLDTPWNQLDKDTQKKFLQGTGKEKIDLSYIDERGRKHTRVQPFEGILPHLERRYRETESNYVRDDLAQYLSNAACDACGGSRLNEISRHVRVKDKTIADITRMSIGDAESYYQGINLEGAKGEIADKIFKEIRERLHFLVSVGLNYLSLARSAETLSGGEAQRIRLASQIGAGLMGVMYVLDEPSIGLHQRDNDRLLQTLIRLRDLGNTVLVVEHDEDAIRAADHIIDIGPGAGVHGGVVIAEGTYDELAKHADSLTGQYLSGKLKIEVPKQRTQPPKPEEKIKLSGAAGHNLKNVDLTIPLGIMTCVTGVSGSGKSTLINRTLLPLAATQLNGATTLTAEKFDSIDGLQHLDKVVDIDQSPIGRTPRSNPATYTGLFTPIRELFAQTPEAKARGYSAGRFSFNVKGGRCEACEGDGMIKVAMHFLPDMYVPCDACHGKRYNRETLEVGYKGKNISDVLEMTVEDAAEFFSAIPVIHRRLETLTQVGLGYIRLGQAATTLSGGEAQRVKLARELAKRDTGKTLYILDEPTTGLHFHDIAKLLDILHELRNKGNTIVVIEHNLDVIKTADWVVDLGPEGGSGGGMIIAEGTPEQVAEVEISHTGRFLKPMLKQ

SEQ ID NO: 19 - DNA, 768 bp, Acinetobacter baumannii
atgaaaaaactagcaattgcatcagctcttttatctgctcttgcagtaagtggcgcagcaaacgcttaccaagctgaagttggtggttcttacaattatcttgatccagataacggcagcagcgtaagcaaattcggtgttgatgggacttattatttcaaccctgttcaaacacgtaatgcaccgcttgcagaagcagcattcttaaaccgtgcaagtaacgttaacgcacatgttaactatggcgataacagcggcacaaaagacactcaatatggcgtaggcgttgagtacttcgttcctaactctgacttttaccttagcggtgatgtaggcagaaacgaacgtgaaatcgacaacactaatatcgacagtaaagtgactacttatgctgcagaagtaggttatttaccagctcctggtttattacttgctctaggtgttaaaggttacgacgagaaagacggtaaagacggtgcagatcctaccgttcgtgctaagtatgtaactcaagttggtcaacatgacgtaaaccttgaagcttatggtgcgtttggtgaccttgacgaatataaagttcgcggtgactactacatcgataaaactttaagtttaggtgtggactactacaataacgacttaactgataaagatgaatttggtatcaatgctaaaaaattcttaaatcagcaagtaagtgttgaaggtcgtgttggattcggtgataacgacaacacttatggtgttcgtgcagcataccgcttctaa

SEQ ID NO: 20 - protein, 255 aa, Acinetobacter baumannii
MKKLAIASALLSALAVSGAANAYQAEVGGSYNYLDPDNGSSVSKFGVDGTYYFNPVQTRNAPLAEAAFLNRASNVNAHVNYGDNSGTKDTQYGVGVEYFVPNSDFYLSGDVGRNEREIDNTNIDSKVTTYAAEVGYLPAPGLLLALGVKGYDEKDGKDGADPTVRAKYVTQVGQHDVNLEAYGAFGDLDEYKVRGDYYIDKTLSLGVDYYNNDLTDKDEFGINAKKFLNQQVSVEGRVGFGDNDNTYGVRAAYRF

SEQ ID NO: 21 - DNA, 1344 bp, Acinetobacter baumannii
atgccgagcttaacaccgttacatgaaacttattgtaaatgggatcgtacgccacctagtcaggccgacgtactagaaggtttagctcaactgttcagtaccagcttaaatggtgtacatgaattaatacaagtcattaatattgaagtattaaaaaatgcttttggtattagcgcccaaaatgctaaaaatttccaaaaacggcccgctgtccaaaaggtatatcaattttcttatggtgccttacaaaaatatggtagttgttttttagcaccagggttacgtcgtattattgaaaaatttccaacccttcatgagaagccattaacaccaacccttcattttttagtaggagtgttaaatggtattttcggagactatctacttaaacagcacagtcccctcgccttgccaatggttctatacgaccactacggtgcaatccaacaaggcgaacttgcaggccgtattgtaattttagttcatggtttgtgcatgaaccatcttacttggtcaaatgcacattatggcgggattggtgagcgtttgttagcgcagcgtgatcacaacacgatgctgtatttaaattacaatacaggccgccgtatttcagccaatggccgcagtttctcaaatttattagaagatttagtacagcgtaatccaagaattaccagcattgatttaattggtcatagcatgggtggattagtttcccgtagcgcactgttttacggtaaacaaaatatgtaccaatggattcatatggtcgaaaacctcgtctgtattggatctccccaccacggtgcagtacttgagcgttttggatttgcactacaagatcggctaggcgcttttccatttgttggcctaattggtcagctggttaacatccgtagtaatgggattttagacctacgccatggtagtgttcgagatgatgactgggaatacatggatgcccgtattggtatgatggatgacaaccgtgctccggctcctctaccttcccatatcaatacctttttagtggcaggaacactcgagtttgaaaaggtgcgtaataaagcgcttaccgtgattggcgattacttagtgagtgtaaaaagcgcgctaggtgaacatcctaatccacgttttcagcttaaagttccagactcacataaagcggtgttttatggcttaaatcactttgaaattcagtatcactcaagtgttgccgaacagattactcgctggttatatcctcatgtgaatgattatgtgcaagacggtattcaaacccatattattgatatgccgaactatacgctcgaagatttagaaggaattgtagagacgtaa

SEQ ID NO: 22 - protein, 447 aa, Acinetobacter baumannii
MPSLTPLHETYCKWDRTPPSQADVLEGLAQLFSTSLNGVHELIQVINIEVLKNAFGISAQNAKNFQKRPAVQKVYQFSYGALQKYGSCFLAPGLRRIIEKFPTLHEKPLTPTLHFLVGVLNGIFGDYLLKQHSPLALPMVLYDHYGAIQQGELAGRIVILVHGLCMNHLTWSNAHYGGIGERLLAQRDHNTMLYLNYNTGRRISANGRSFSNLLEDLVQRNPRITSIDLIGHSMGGLVSRSALFYGKQNMYQWIHMVENLVCIGSPHHGAVLERFGFALQDRLGAFPFVGLIGQLVNIRSNGILDLRHGSVRDDDWEYMDARIGMMDDNRAPAPLPSHINTFLVAGTLEFEKVRNKALTVIGDYLVSVKSALGEHPNPRFQLKVPDSHKAVFYGLNHFEIQYHSSVAEQITRWLYPHVNDYVQDGIQTHIIDMPNYTLEDLEGIVET

SEQ ID NO: 23 - DNA, 1173 bp, Acinetobacter baumannii
atgatgagacgattagcagcccccttattatgtagtagtttcttcttgttaatggcctgtggctctaataatactaattcaaaaaatcctgaacaaaatacaactgcaaaaacagagcagatcagtgctgccaaacaaacttatcaggtcgaggcagtcgcacattttaaagagccttgggcgatcaccagtttgcctgatcaacgcttattggtgactgaacggcaaggtaagctaaaaatttttaatccacaaaataaacaagtgctagatgttcagggtgttccagcggtgaactatggcggacagggtggtttaggggatgttgctctacacccagactttgccaaaaactactggatatatcttagttatgcagccaaagggcaaggtgggtctggtgcagtgatttcacgtgcgaaactagatttatctaatcctaatcaaccaaaaattaccgatataaagcaaatttggcagcaagtacctaaagtgtcaggacaaggccattatgggcatcgcatgctttttggtgcagatggtaagctttgggtcagttcaggtgagcgtcaaaagtttgaccctgcccaaaatatgaaaagtaacttgggcaaaatcttgcgtttaaatgacgacggttcagcagccttaggtaacccattttatgagcaaggcggtgtcactgctgaaatatggtcacttggacatcgtaacccattaggaatggcctttgatcgtaaaggacagctatgggtggttgagatggggcctaaaggtggtgatgagcttaatattattaccaaaggcgaaaactatggttatccgattgtttcaaatggagatcattattcaggtcagcctattccagatcatcacacgcgcccagagtttaaagcgccagaaattgactggacccctgtaatctcaccgtcgagcttaattatttatcgcggacaacaatttcccgcatggcaaaataaagctttaattggcgggttatcttcagaagcaattgtagttgtagatttagagcataagcccgtaaaagaagtacaaagattagagatgaagcaacgtattcgtgggttacatgaagcacaagacggttcaatttgggtaattgaagatggccccaatgctcgtttactcaagctgagtaagaaaccctcttaa

SEQ ID NO: 24 - protein, 390 aa, Acinetobacter baumannii
MMRRLAAPLLCSSFFLLMACGSNNTNSKNPEQNTTAKTEQISAAKQTYQVEAVAHFKEPWAITSLPDQRLLVTERQGKLKIFNPQNKQVLDVQGVPAVNYGGQGGLGDVALHPDFAKNYWIYLSYAAKGQGGSGAVISRAKLDLSNPNQPKITDIKQIWQQVPKVSGQGHYGHRMLFGADGKLWVSSGERQKFDPAQNMKSNLGKILRLNDDGSAALGNPFYEQGGVTAEIWSLGHRNPLGMAFDRKGQLWVVEMGPKGGDELNIITKGENYGYPIVSNGDHYSGQPIPDHHTRPEFKAPEIDWTPVISPSSLIIYRGQQFPAWQNKALIGGLSSEAIVVVDLEHKPVKEVQRLEMKQRIRGLHEAQDGSIWVIEDGPNARLLKLSKKPS

SEQ ID NO: 25 - DNA, 624 bp, Acinetobacter baumannii
gtgcaaacagttaatcaaagtggtcgccccaaagatctggaaaagcgtgctcgtatcttacaggccgctaaagctatttttttaaagtccggttatcacggtaccagcatgaacctgattgcacaggaagcaggcgttactaaactcacggtttataatcactttcaagacaaagcaaacctgtttatctgtgccattacagaaacttgtgaagagactctaggcactaaaccatttgaattagatgcatcggcagacttttatcaaacactttatatggtgtgttcacgtgccttgcagattatttattcccccgaagcacttaaactcgagcatgtattatttgaacttgcagcagagcaaagtccactcgccctacagttttttgacgcatcccatacccgtctgcaaaatcagttagttgagttttttcaaaaagctgctcaattaggttttattcaggccgatgatccgctatatcaaacagagctgcttttgaccttattgcttggtgtacgccatcacaaggttctacttagaattattcctgtaccgaatgctcaagagatagatcggtttattcgagatgctattgatttatttctactcagatatcggcattaa

SEQ ID NO: 26 - protein, 207 aa, Acinetobacter baumannii
MQTVNQSGRPKDLEKRARILQAAKAIFLKSGYHGTSMNLIAQEAGVTKLTVYNHFQDKANLFICAITETCEETLGTKPFELDASADFYQTLYMVCSRALQIIYSPEALKLEHVLFELAAEQSPLALQFFDASHTRLQNQLVEFFQKAAQLGFIQADDPLYQTELLLTLLLGVRHHKVLLRIIPVPNAQEIDRFIRDAIDLFLLRYRH

SEQ ID NO: 27 - DNA, 1062 bp, Acinetobacter baumannii
atgagtattcaagttaaaaatattgaaaaacactttggtgcattccatgcgcttaaaaatatttcactcgatttcccagagggagaactggttgccttactcggcccatctggctgcggtaaaacgacgctacttcgtattattgcgggtttagagtcagcagatggtggtcaagtcttactagaaggcgaagatgcaaccaatgtacatgtccgtgaacgtcaggtcggttttgtttttcagcattatgctttattccgtcatatgaccgtatttgacaatattgcctttggtttacgtgttcgtcctcgtgccacacgcccatcggaagccgaaattaaaaaacgtgtgactcgtctactcgatttggttcaactgggctttttagcagaccgttatccagcccagctttctggtggtcaacgccaacgtattgccttagctcgtgcacttgccgtagaacctcgtgtgttattgcttgatgagccatttggtgcactagatgctaaggttcgtaaagaattacgccgctggttacgtaacttgcatgatgagctacatatcacttcaattttcgtaacccatgaccaggaagaagcacttgaggtagcagaccaaattattgtgatgaataaaggtaacgtcgaacaaattggttctccgcgtgaagtttacgaaaaacctgcaacgccatttgtatttgatttcttgggtcaagcaaatcgttttgaaggtgaacatgcaagcggtattatccgcattggcaatgatcgtatcgaattaccgaccacagttcaggcaccacaaggaaaagtaattgcttttgcccgtccggatgagttacatattcatgcgcaaccacaggcaaatacaattgaagcaacttttgtacgtgaagtctggattgctggaaaagtagtggcggaattacaagatcgtaatggacgtttaattgagattgctctgagcagtgaagctgcaaaacaacatgcatttaaaccaaatcaaactgtttgggtaagtgcatctcaacttcacctatttgcagatcaagttgcttaa

SEQ ID NO: 28 - protein, 353 aa, Acinetobacter baumannii
MSIQVKNIEKHFGAFHALKNISLDFPEGELVALLGPSGCGKTTLLRIIAGLESADGGQVLLEGEDATNVHVRERQVGFVFQHYALFRHMTVFDNIAFGLRVRPRATRPSEAEIKKRVTRLLDLVQLGFLADRYPAQLSGGQRQRIALARALAVEPRVLLLDEPFGALDAKVRKELRRWLRNLHDELHITSIFVTHDQEEALEVADQIIVMNKGNVEQIGSPREVYEKPATPFVFDFLGQANRFEGEHASGIIRIGNDRIELPTTVQAPQGKVIAFARPDELHIHAQPQANTIEATFVREVWIAGKVVAELQDRNGRLIEIALSSEAAKQHAFKPNQTVWVSASQLHLFADQVA

SEQ ID NO: 29 - DNA, 609 bp, Acinetobacter baumannii
atgacacacactgtaattgttccgggtgtaggtggaagtgaacatcaacattggcaatcttggttgcagcgtcaactcgtgtctagttctcgcgttgagcaaaagaactgggatagacccgtattaagcgaatggattgagcaattcgttaacacagttcaagcagtacaagcaccagtccaaattgttgcgcatagtttcggctgcctaactagtgttgctgccttagcagagcatccagagttacaacttcaagttaaaaaactgattttggttgctcctgcaaatccggcacgttttggtgaagcgggatttgcccgtcatagtttgactgactacaaagattattttcatcagctaaaaattaatgtgcctgcaacgctactcattagtgaaaatgatccatggttagacttttttgatgctttacagcttgcgaaatcttggcaattaaccccgattaaccttggacaagtcggtcatattaatgttgcttcaggcttcggtccgtttcctgacttactgaatcatctacttcctgaagactcaatgtgtagccactcatctattgatccggtaaagacacatttctctttgaaatttgcttaa

SEQ ID NO: 30 - protein, 202 aa, Acinetobacter baumannii
MTHTVIVPGVGGSEHQHWQSWLQRQLVSSSRVEQKNWDRPVLSEWIEQFVNTVQAVQAPVQIVAHSFGCLTSVAALAEHPELQLQVKKLILVAPANPARFGEAGFARHSLTDYKDYFHQLKINVPATLLISENDPWLDFFDALQLAKSWQLTPINLGQVGHINVASGFGPFPDLLNHLLPEDSMCSHSSIDPVKTHFSLKFA

SEQ ID NO: 31 - DNA, 1257 bp, Acinetobacter baumannii
atgggttatcagaagatcgtggttcctgccgacggtgataaaattacagtaaaagcagacctgtcactgaatgtaccaaatcatccaattattcctttcattgagggtgacggtattggtgtagatattacaccgacaatgaaaaaagttgttgatgcggcaattttaaaagcctatggcggcaaacgctctattgaatggatggaagtgtattgcggtgaaaaggccaataaaatttacggtacttatatgccggaagaaacctttgaagcgctgcgtgaatttgtagtttcaattaaaggccctttaactacaccagtcggtggtggtattcgttcactcaacgttgcactacgtcaagaactggatttgtatgtatgtgtacgtcctgtgcgttggttccaaggcgtcccttcacccgttcaacatcctgagttaactgacatggtgattttccgtgaaaactcggaagatatttatgcaggtattgaatggaaagcagattctgaagaagctaaaaaagttattaaattccttcaagaagaaatgggggtcacaaaaatccgtttccctgaaggatgtggtattggtattaaacctgtttccaaagaaggaacacagcgtttagttcgtaaggctattcagtttgcaatagataatgacaaaccttcggtgactcttgttcataaaggcaatattatgaaatataccgaaggtgcctttaaagaatgggggtatgagttagcactagatcgtttcggtggtgaattaatcgatggcggcccatgggttaaaattaagaatcctaaaaatggtaaagacatcattattaaagacgtgatcgcagatgctttcttacaacagatcttgatgcgtcctgctgactattctgtaattgcaacccttaatttaaatggtgactatatttccgatgcattagcagcagaagtagggggaatcgggattgcgccaggtgcgaatattggtggagctattgcagtgtatgaagcaacgcatggcactgcacctaaatatgctgggcaagataaagtcaacccgggttcaattattctctctgctgaaatgatgctccgtgatatggggtggatagaagcagcggacctgattattaaaggtatttcaggagcgattgcagctaaaaccgtaacttacgattttgagcgtttaatgccgggagcgaccttgttacgttgctcagaatttggcgatgccataattcagcacatggaagattaa

SEQ ID NO: 32 - protein, 418 aa, Acinetobacter baumannii
MGYQKIVVPADGDKITVKADLSLNVPNHPIIPFIEGDGIGVDITPTMKKVVDAAILKAYGGKRSIEWMEVYCGEKANKIYGTYMPEETFEALREFVVSIKGPLTTPVGGGIRSLNVALRQELDLYVCVRPVRWFQGVPSPVQHPELTDMVIFRENSEDIYAGIEWKADSEEAKKVIKFLQEEMGVTKIRFPEGCGIGIKPVSKEGTQRLVRKAIQFAIDNDKPSVTLVHKGNIMKYTEGAFKEWGYELALDRFGGELIDGGPWVKIKNPKNGKDIIIKDVIADAFLQQILMRPADYSVIATLNLNGDYISDALAAEVGGIGIAPGANIGGAIAVYEATHGTAPKYAGQDKVNPGSIILSAEMMLRDMGWIEAADLIIKGISGAIAAKTVTYDFERLMPGATLLRCSEFGDAIIQHMED

SEQ ID NO: 33 - DNA, 1542 bp, Acinetobacter baumannii
atgaaatatgactttgaacaatcggataaagcttttttcggccatcctaaaccattacaaacgctattttttacagagctttgggaaagattttcttattatggaatccggcccttactcgttctttatatgattgcgatggtcaatgacggcggtctagcacttgatcgaccaactgccgcagcgattgttggattatttgcaggctccatgtatttaatgaccgtttttggggggtgggttgctgataactggttaggccaagcacgtgctgtctggtacggttcaattattattgccttaggtcacttatcaattgcccttacatctgtatttgatcaatctttcttttacttaggtttagtactgattgttttaggtaccggattatttaaaacatgtatttccgtgatcgtgggaacactatataaagccaatgatgcaagacgtgatgcaggtttttccattttctatatgggaattaacatggggtcatttattgccccacttattacagggcttttggcgaaagaccatggctggcatttaggctttggtattggtggcattgggatgttaattgctttattaattttccgttttatggcaatgcctcagctccaaacatttaatgagctacgccaagaagctaatagctgtagcaaacctgttgtagaaaataaaaatgcgcctaaaattgtatttagctttttattcgcagttgcagtcgttattgcgctaaccttcctcggtatcattcacatcaatcccgtcgctgtcgcaacctatttaaccgtaggtattagcattgggattattgcttattttgcatatttactacttttcctgaatttagagcaacatgaaaaatttaaaataattatttgcttcgttttattagcagcctctgccctattttggtcagctttcgaacaaaaacccacgacttttactttatttgcgcaagattatacggaccgtattgttttcggatttgaaatcccaactgtatggtttgaatcaatcaatgctctttttattattatctttgctcccgttgcagcttggctatgggcgaagctaggtaaagcgaataaagatccaagctatatcagcaaatttattattgcgttgttattcgcagcaggtggctttttacttatgtctctagccagtcattttgctattcatggcggagtagtttcaccattttggttagtcggtactttatttcttcttaccataggtgaactttgcttaagcccaattggcttatcaaccatgaccaaacttgcacctgatgtcatacgtagtcaaattatgggtttatggtttacaggtacagctcttggcaaccttatggcaggtttaattggcgggcaagtctcggcagatggtattaatcatttacctagcctatttatgcgctgtgtattagccttggttattggcgcaatcgtgttatttttattaaagaaaccaatgaataaattaatggacaaaagtaccaacaaagttcaacctgatttggaaacgatatga

SEQ ID NO: 34 - protein, 513 aa, Acinetobacter baumannii
MKYDFEQSDKAFFGHPKPLQTLFFTELWERFSYYGIRPLLVLYMIAMVNDGGLALDRPTAAAIVGLFAGSMYLMTVFGGWVADNWLGQARAVWYGSIIIALGHLSIALTSVFDQSFFYLGLVLIVLGTGLFKTCISVIVGTLYKANDARRDAGFSIFYMGINMGSFIAPLITGLLAKDHGWHLGFGIGGIGMLIALLIFRFMAMPQLQTFNELRQEANSCSKPVVENKNAPKIVFSFLFAVAVVIALTFLGIIHINPVAVATYLTVGISIGIIAYFAYLLLFLNLEQHEKFKIIICFVLLAASALFWSAFEQKPTTFTLFAQDYTDRIVFGFEIPTVWFESINALFIIIFAPVAAWLWAKLGKANKDPSYISKFIIALLFAAGGFLLMSLASHFAIHGGVVSPFWLVGTLFLLTIGELCLSPIGLSTMTKLAPDVIRSQIMGLWFTGTALGNLMAGLIGGQVSADGINHLPSLFMRCVLALVIGAIVLFLLKKPMNKLMDKSTNKVQPDLETI

SEQ ID NO: 35 - DNA, 3753 bp, Acinetobacter baumannii
atgaacacaatggatacttttcatcaaatggataaatctcaccaaggctatatcaccgaattcaacgataaaagtgagtttgaacaacgcattaatacagcttggcgacgtgccgaacctgaagctgtagaagagctattacaagctgctgcggtatctgatgatttagatcataaaatttatgaccttgcatttaaccttgcccataatttacgtgaacgtaagacctcttcaggtaaagcaggtattgttcaagggttattacaagaattctctctttcttcacaagaaggcgtggctttgatgtgtcttgctgaagctttgcttcgtattccagacacagcaacacgtgatttgctcattcgcgataaaatcaatcaaggtaactggaaagaacatgttggccaaagcagcttaatgtttgtgaatgctgctgcatggggtctcatgttaactggtaagcttatggaaacaccaaagcaaaccagtctttcaagtgtacttactggccttttagcacgtagtggccgtggcattattcgtaaagcagttgacgttgcaatgcgtatgatgggtgaacagtttgtgactggtgaaaccatcgaagaagctgtcgaccacgcaaaagtacttgaggataaaggtttccgctattcttatgacatgttaggtgaagctgccttaaccgaccatgatgctgaacgttactttaatgattacacacaagccattcatgcaattggtaaagcgtctaatggtaaaggcgtatatgatggccctggtatctcaattaagctttcagctttacatccacgttaccaacgtgcgcaaattgaacgtgttcacaaagaactctacggcaaagtatttgaactcgctcgtttagctaaacagtacaatattggtttaaatatcgatgcagaagaatcagagcgtttagaaatttctcttgagttacttgagcgtctttgttttgagccagaacttgcgaactggaaaggcattggtttcgtaattcaagcttaccaaaaacgctgcttctttgtggttgattatattattgaccttgctaagcgtagccaaaagcgtctgatgatccgtcttgtaaaaggcgcatattgggatagcgaaattaagaaagcacaaatcgaaggtatggatgactaccctgtctttacacgtaaagttcatactgacttgtcttatatcgcttgtgctaaaaaattacttgcagcaccagagtttatttatccacaatttgcgacgcataatgctcaaactttagcaacgatctatcatttagcagatccaagcaaatattacgctggtcaatatgagttccaatgcttacatggtatgggcgagccgctttatgaacaagttgttggtccacgtgaacaaaataaattaggcgtgccatgccgtatttatgctccggttggtaaccacgaaacattgttagcttatttagtccgtcgtttacttgaaaatggcgcgaatacttcatttgttaaccgtattgccgataaaactcttaaagttgaagatcttatccagtctccaatttatgatattcgtaatgcagctaaacttgaaggttcggttggtttaaaacatccatcaattccactacctttagatatgtacggaacgcttcgtaaaaactctaaaggttatgacttagcaaatgacaccccacttgcagctttagatagcacagctcaagaattacgtaatcgtatttggcaaagccatccgttgttggctaatgctgattctttagaacaaggtcattctgttgcaattacaaacccagcacaaaatgatgaaattgttggttatgtacaagaagctgatcttaagcatgtcgaaatcgctcttactgcagctgaacaaacccagtcagaatggtcaaatacgcctaaggatcaacgcgctcaatacttaaaacgcgcagctgacctcatggaaagccgtattcaagagttgatggtattactttgccgtgaaagtggtaaaacttatgccaatgcgattgcagaagttcgtgaggctgtagatttcctacgttactatgcaacccaagttgaaaatcttcctgcaaatacagttattcagcctttaggtactgtactttgtattagcccatggaacttccctcttgcaattttctcaggtcaaattgctgcggcattagtcagtggtaactgtgttattgctaaaccagctgaacaaactccattgatcgcagcccaagcagttcagattttatgggaagctggtattccacatggtgctgtacagctacttcctggccgcggtgaaacagtaggtgctcagctcagccaagatagccgtatcgatggcattatgtttactggctcgactgaagttgcaaaaattttacagaagaccgttgcaaaacgtttatctgaaaatggtcaatctattccactcattgcagagactggcggtcaaaatgcaatgattgttgactcatctgctttaactgaacaagttgtattagatgttgtaagttctgcttttgatagcgcaggtcaacgctgctctgctttacgtattttatgtgtacaagaagacagtgctgcaaccgttattaaaatgcttaaaggtgcaatgcaacagttgatcgtaggtaaccctgcaattttaaaaactgacattggtcctgttattgatgacgaagcaaaacagacgattgaccagcacatccagaaaatgaaatcgaagggttatccggtacatcaattgatgtttggtgcaacaagccaaacagaattagataaaggaacttttgttgtgccaacagcaattgaacttcctaatcttgatgacttacaacgtgaagtttttggtccggttttacacatcattacctataagtatggtgaacttgagcaactcatctcaagaatcaacgctaaaggttatggtttaactatgggtctgcatacccgtattgatgaaaccatccaaaccgtaattcaacatgctgaagtgggtaacctttatatcaaccgtaatattgttggtgctgttgttggcgtacaaccattcggtggtgaaggtttatctggtacaggccctaaagcgggtggccctctttatatgtatcgcttaatgcagcattgttctaacaaagtattagcaactccatttgcggtaaaaaatgagcaaaccgtttttgaaggctttacccgtgaggtttatcaaagcttacaaaactgggcgaaacaacatttaccacaagcaaaccgtgaaattgaaccttttggtgttggaaagttttatgagttacaaggccctactggggaaagtaaccaatatattattttgccgcgccatcgtgttctttcaattgctgatacagaacaagatcaattgcatcagttacttgcaatctttgcagttggcagccaagctgctgtaatgccaaatagtccattattggcaaaacataaacaaacgttgccaaaagatgtacttgatgcgattactaccattaaaaacatcactacagatgattttgatgcagttttacatcacggcaaccgtgaagaaatcttctcattacagcaagaaattgctagccgttctggcgcaattgttggtattactcatgttgaaccaaatgagtcgattccacttgaacgtttggtaattgaacgtgcaattagcgtaaatacagctgcggctggcggtaatgcaagcttaatgacaatgtctgaataa

SEQ ID NO: 36 - protein, 1250 aa, Acinetobacter baumannii
MNTMDTFHQMDKSHQGYITEFNDKSEFEQRINTAWRRAEPEAVEELLQAAAVSDDLDHKIYDLAFNLAHNLRERKTSSGKAGIVQGLLQEFSLSSQEGVALMCLAEALLRIPDTATRDLLIRDKINQGNWKEHVGQSSLMFVNAAAWGLMLTGKLMETPKQTSLSSVLTGLLARSGRGIIRKAVDVAMRMMGEQFVTGETIEEAVDHAKVLEDKGFRYSYDMLGEAALTDHDAERYFNDYTQAIHAIGKASNGKGVYDGPGISIKLSALHPRYQRAQIERVHKELYGKVFELARLAKQYNIGLNIDAEESERLEISLELLERLCFEPELANWKGIGFVIQAYQKRCFFVVDYIIDLAKRSQKRLMIRLVKGAYWDSEIKKAQIEGMDDYPVFTRKVHTDLSYIACAKKLLAAPEFIYPQFATHNAQTLATIYHLADPSKYYAGQYEFQCLHGMGEPLYEQVVGPREQNKLGVPCRIYAPVGNHETLLAYLVRRLLENGANTSFVNRIADKTLKVEDLIQSPIYDIRNAAKLEGSVGLKHPSIPLPLDMYGTLRKNSKGYDLANDTPLAALDSTAQELRNRIWQSHPLLANADSLEQGHSVAITNPAQNDEIVGYVQEADLKHVEIALTAAEQTQSEWSNTPKDQRAQYLKRAADLMESRIQELMVLLCRESGKTYANAIAEVREAVDFLRYYATQVENLPANTVIQPLGTVLCISPWNFPLAIFSGQIAAALVSGNCVIAKPAEQTPLIAAQAVQILWEAGIPHGAVQLLPGRGETVGAQLSQDSRIDGIMFTGSTEVAKILQKTVAKRLSENGQSIPLIAETGGQNAMIVDSSALTEQVVLDVVSSAFDSAGQRCSALRILCVQEDSAATVIKMLKGAMQQLIVGNPAILKTDIGPVIDDEAKQTIDQHIQKMKSKGYPVHQLMFGATSQTELDKGTFVVPTAIELPNLDDLQREVFGPVLHIITYKYGELEQLISRINAKGYGLTMGLHTRIDETIQTVIQHAEVGNLYINRNIVGAVVGVQPFGGEGLSGTGPKAGGPLYMYRLMQHCSNKVLATPFAVKNEQTVFEGFTREVYQSLQNWAKQHLPQANREIEPFGVGKFYELQGPTGESNQYIILPRHRVLSIADTEQDQLHQLLAIFAVGSQAAVMPNSPLLAKHKQTLPKDVLDAITTIKNITTDDFDAVLHHGNREEIFSLQQEIASRSGAIVGITHVEPNESIPLERLVIERAISVNTAAAGGNASLMTMSE

SEQ ID NO: 37 - DNA, 1014 bp, Proteus mirabilis
atgaatacacaacgtgaacaattgatacatacatggcttacatctgttcttgaaaatgatcaatttcagatcgcttatttagcaggggatgcaagctttcgacgttatgctcgcatccagttacaaaataaaacgtatatgcttatggatgcgcctcctgaaaaagaagactgtgttccgtttgtgaccattgacgagttttttgcagggcatggggttcgggtacctcagatcgttgcaaaagatttaaatcaaggttttttattgttagaagactttggtgatgtgctgctgtctacattgttaaacgatgaaacagttgatcaatattatgaacagagttttaaacagcttattcatttgcaatcgattaatggggctgaacatttcccggcttattcttatgaaaagcttttatcggaaatgcagttgttaacagattggatgttaccgtcactcgatatccatccaacagctgagcaaaagaaaactattgatgatgcatttgatttcttggctcaggcagcattagctcaaccgcaagttattgtacatcgtgattttcatagccgtaatttaatgaaaattgctaatgaagaagaattgggagtaattgacttccaagacgcggttattggtgctgatacatatgatttaatctcgattacacgtgatgcatacgtgcagtggaatgctgagcgtgtttatcaatggtttaaagtgttctatgagcttttaccagcatctgctaaacaaaaccgaagctttgaccaatttaaacgtgatgctgatttaatggcaattcaacgccatatcaaaattttaggtatctttgtccgtttgttcgagcgagatggtaagtctggttatttgaaggatttaccacgagtcatgtggtatttacttgaagagagccgtggctatcatgagcttgatgactttatggcgtttattcacagttcagtaatgcctaaatttattgaaaaatatggcccttatgaggttgcagcataa

SEQ ID NO: 38 - protein, 337 aa, Proteus mirabilis
MNTQREQLIHTWLTSVLENDQFQIAYLAGDASFRRYARIQLQNKTYMLMDAPPEKEDCVPFVTIDEFFAGHGVRVPQIVAKDLNQGFLLLEDFGDVLLSTLLNDETVDQYYEQSFKQLIHLQSINGAEHFPAYSYEKLLSEMQLLTDWMLPSLDIHPTAEQKKTIDDAFDFLAQAALAQPQVIVHRDFHSRNLMKIANEEELGVIDFQDAVIGADTYDLISITRDAYVQWNAERVYQWFKVFYELLPASAKQNRSFDQFKRDADLMAIQRHIKILGIFVRLFERDGKSGYLKDLPRVMWYLLEESRGYHELDDFMAFIHSSVMPKFIEKYGPYEVAA

SEQ ID NO: 39 - DNA, 1860 bp, Acinetobacter calcoaceticus
atggcacttttgcaaattgctgaaccgggtcaatccagtgccccacaccaacatcgcattgcgattggtattgacctaggaacaacacactcattagttgcgacagtgttatcaggcaaacctaaagtactcaatgatgttcaaaatagaagattacttccttctatcgttcattatggggacaatacaactcattatggtgaagaagctaaaccgtttatcattgcagatccaaaaaatacaattgtttctgttaaacgatttatgggccgttcaaaggcagatattaaatttcaacacccttatgagttagtaggctcagaaaatgaaatgcctgcttttgaaactcgtgctggacgcaaaacaccagtagaaatctcagctgaaattttaaaacaattaaaagctcgcgctgaagacagcttacaaaatcctgttaatggagcagtaattaccgttcctgcatatttcgatgaagctcagcgtcaagcaactcgcgatgcagctcaacttgcaggtttaaatgtattacgtttattaaatgagcctacagctgccgctgtagcttatggattagatcaagaaagtaatttagcgaccgaccgtaattatgtaatttatgacttgggtggcggtacttttgacgtatctatcttacgtttttcacaaggcgtattcgaagttttagcgactggtggtcacactgctttaggtggtgatgacttagaccgtctaatcgtaaaatgggctaaaaaacagcttaatattgatgtattaagcgatgaagattatgccgtatttattgtggcagcacgtcaagctaaagaacaattatcaactcaagattcagttgaattaaagttactcgaagcaactctcacactagatcgccctacatttgaaagcattattcaagtagcattagacaaaacgattagtgtttgtaaacgtgtactgcgtgatgcaaaactcgagttaaccgatattcaaaatgttgttttggtaggtggttctactcgctcttatgctgttcaaaaagcagtacgggaagtttttgcccaagaacctctttgcacgatcaacccagatgaagtggtggcaattggcgcttctattacagccaaccagttaatcggtaatagccaagatggttctcttcttttagatgtaacccctctttctctgggtctagagacaatgggaggactcgttgagcgcctgatatctcgtaatacagcgattcctgttgcacgtcgccaagagttcaccacctatcaagatggccaaactgctatgttaattcatgtagttcagggcgaacgtgatttagttgaacattgccgttcattaggtagatttgtacttcatggcattccaccaatgactgcaggccaagctcgtattgaagtcactttccaagttgatgcagatggcttactcaccgtttctgctcgtgaagcaacttctggcgtgcaagctcatatcgatatcaaaccatcttatggtttatctgaggcagatacggaacgcttattaattgaaggtttccaacatgccgaagaggacaaaaatcttcgtcatttaaaagaaactaaagttgaagcagaacgtgagcttgaggctcttgagcaagcattaaaagtagatgcagatttacttgatgaaaagcagcttgaagcactcaactctgccaagggatcattaaaagctcagcttgaaggcagtgatatccaagcgattgagcaagcagttcaacaacttaaagtacatagtgatgcttttgcagcactacggatgaatcgacatattgaccatgccttaaaaggcacgaagctcgatgattggtcaaaatcaaattaa

SEQ ID NO: 40 - protein, 619 aa, Acinetobacter calcoaceticus
MALLQIAEPGQSSAPHQHRIAIGIDLGTTHSLVATVLSGKPKVLNDVQNRRLLPSIVHYGDNTTHYGEEAKPFIIADPKNTIVSVKRFMGRSKADIKFQHPYELVGSENEMPAFETRAGRKTPVEISAEILKQLKARAEDSLQNPVNGAVITVPAYFDEAQRQATRDAAQLAGLNVLRLLNEPTAAAVAYGLDQESNLATDRNYVIYDLGGGTFDVSILRFSQGVFEVLATGGHTALGGDDLDRLIVKWAKKQLNIDVLSDEDYAVFIVAARQAKEQLSTQDSVELKLLEATLTLDRPTFESIIQVALDKTISVCKRVLRDAKLELTDIQNVVLVGGSTRSYAVQKAVREVFAQEPLCTINPDEVVAIGASITANQLIGNSQDGSLLLDVTPLSLGLETMGGLVERLISRNTAIPVARRQEFTTYQDGQTAMLIHVVQGERDLVEHCRSLGRFVLHGIPPMTAGQARIEVTFQVDADGLLTVSAREATSGVQAHIDIKPSYGLSEADTERLLIEGFQHAEEDKNLRHLKETKVEAERELEALEQALKVDADLLDEKQLEALNSAKGSLKAQLEGSDIQAIEQAVQQLKVHSDAFAALRMNRHIDHALKGTKLDDWSKSN

SEQ ID NO: 41 - DNA, 2148 bp, Acinetobacter baumannii
gtgcttatttttcatggaaaacctgttcatggagctatcttcgatatggatgggacaatgtttgatactgaacggttgcggtttcaaacattgcaacaggcatctcaagaactcattgggcaggagttttcacacgaatatttaatgcaatgtttggggttaagtgcgactacagcggaaaagcttgcacaacgtttatacggagtagatgttccatataaggaaattcgaaaacgtgccgatgagatggaactagaacatattcgaaaacacggcgtgcctattaaaaaaggtttggttcaagttctagagcgtttaagaaaatctggtttaagaatggctgtggctacttcaagccgtagagcaattgccgaagaatatttaattaatgcgaatgtttataaattttttgatgtcattacttgtggggatgaagtagaacaagggaagccacatccagaaatctttttaaaagcggctagtcaacttcatttagacgctaaccagtgtcttatgtttgaagattcggaaaatggtttaacttcagcacatacatcgaaaggtctaacgattttattaaaagatattaaagaaccaaatgatgaaatgctggaaaaagcgcatttttattatgaacagatgtatgactttttaaccgaccttgaccaatttattcctgttatggatacgccagagatacaggaaccttttccgcaaagtctgaatcagcttactgttggaatacatggtttcggtgctattggcggtggttatatagcgcagatcttgtcgcattgggatggttatacgaaaccaaaacgtataattgcgtcaacacgaaatagtcttttccgcgaagctgtaaatgcgtttggaacctatagtattcgctatgggcaattttcttatgatgaacgtattgaaaatatgaccattgtggattctgacaatgagcaacaaatgttagagatgtatactcattcaagtttgattgcattatgtttgcctgagcaagcgatcgaacctgaatcaaagataattgcaaaagggttatatgcgcgttttaactcaccacttgaaacatgtatagaacctttaacctttctaattattttaaataaggttggtgcgaaatatttggttatgaagcatcttaaagaagctctactagagttaaccaacgatgaagatgtaaccgagcatattttaaaagagcattacttttgtgacaccgtagttaatcgcatggtttcaaaactttctaatcagaatttatatcgtcaacttcgtattaagcataattttcttgaacagcatttagaagatgtggagcaagaagaccaaatcgaaattgaagattgtaataaactaactccagatcaactaaatcaggcttctatctatgttgataacatgcgccgtaatttccagccgggacatatcttacaaagcatggatttaatcttgttccatagtgaaactgatatgccaatctatgtagagaaaggcagtcctttacttgaaaagttgcgtcaggtggtattggttgaccaaattactgacattcaactcattaaaaatcgtttatggaatggtgtacatgcgatgcttgcttggtatgcatctttaatgggttatgaatctattggtgttgccatgggtgatcatttagttaaagcatttgcagagaacttaattgcagaagtgaagcagggacttgctattgtattacctaactatgcaaaagatctggatcgaatgtcacaaagttttctagactcatgtgaatatgcatttaaagatccttgtcaacgcgtagctagagatccactacgcaaactcaatcataatgaacgtgtcatggcttcaattgctgtgaatattcgtcatgatttgccttataaaaacttattaaaaggcgctgctttaggttatgcctatgcgattcaatttttagaaattgaagagactaaagctgttgagcatctgcagcagcaaattcagaacctagacttgagtacaactcaaagaagacagtttgaagctgaattggttcaacttatccaatatttgttttctgaacaaggtaaacaacctttggacattaagctgaacaataccaaaactacatcaaatcaatatgtttga

SEQ ID NO: 42 - protein, 715 aa, Acinetobacter baumannii
MLIFHGKPVHGAIFDMDGTMFDTERLRFQTLQQASQELIGQEFSHEYLMQCLGLSATTAEKLAQRLYGVDVPYKEIRKRADEMELEHIRKHGVPIKKGLVQVLERLRKSGLRMAVATSSRRAIAEEYLINANVYKFFDVITCGDEVEQGKPHPEIFLKAASQLHLDANQCLMFEDSENGLTSAHTSKGLTILLKDIKEPNDEMLEKAHFYYEQMYDFLTDLDQFIPVMDTPEIQEPFPQSLNQLTVGIHGFGAIGGGYIAQILSHWDGYTKPKRIIASTRNSLFREAVNAFGTYSIRYGQFSYDERIENMTIVDSDNEQQMLEMYTHSSLIALCLPEQAIEPESKIIAKGLYARFNSPLETCIEPLTFLIILNKVGAKYLVMKHLKEALLELTNDEDVTEHILKEHYFCDTVVNRMVSKLSNQNLYRQLRIKHNFLEQHLEDVEQEDQIEIEDCNKLTPDQLNQASIYVDNMRRNFQPGHILQSMDLILFHSETDMPIYVEKGSPLLEKLRQVVLVDQITDIQLIKNRLWNGVHAMLAWYASLMGYESIGVAMGDHLVKAFAENLIAEVKQGLAIVLPNYAKDLDRMSQSFLDSCEYAFKDPCQRVARDPLRKLNHNERVMASIAVNIRHDLPYKNLLKGAALGYAYAIQFLEIEETKAVEHLQQQIQNLDLSTTQRRQFEAELVQLIQYLFSEQGKQPLDIKLNNTKTTSNQYV

SEQ ID NO: 43 - DNA, 1530 bp, Acinetobacter pittii
atgacgcaacaaaacgctcaatcgacttctgaaccaactatttccgaaaacgatttaattgcacagcgtcatgccaaattaaagcaaatccaagatgttgcaaaggaaactggaaagagtccttggccaaatacattcaaacgtgaacattacgctgctgatttacaagaacaatttaaagatcagtctaaagaacaaatcgaaagcgctgaacatgtttatgtaaaagttgctggccgtgtcatgttaaaccgtggttctttcatggtgattcaagacatgactggtcgtatccaattatatgttgaccgtaaaggtttaccaaaagatacgcttgaaactattaaaggtttagaccttggcgatattattgctgctgaaggttatatcggtcgttctggcaaaggtgacttatatgtacaccttgaaggttttgaacttcttacaaaatcgcttcgtccattgccggataaatttcatggtttgaacgacacagaagttaaatatcgtaagcgttatcttgacttaattgtgaatgaagaaacgcgtaagacttttgaaattcgtgccaaagtcgttgcaggtattcgcgcatttttaaccaatgaacgtttcatggaagttgaaacgccaatgatgcatgtgattccgggtggtgcgtctgcacgtccgtttgagacgcatcataatgctttagatatgccattattcttacgtatcgcaccagagctttatttaaaacgtttagttgttggtggttttgagcgtgtgtttgaaattaaccgtaacttccgtaatgaaggggtatcaacacgtcataaccctgaatttaccatgatcgagttttatcaggcatatgctgattataaagacttgatggctttgactgaaaacatgcttgaaaagctagcaattgatattttaggtacgactgatgtgccttaccaaggcgaagtgtttagctttaaagggccattcaagaaaatctctatgtttgatgcgattttggagaataatccgcagttcacgcctgaaaatgtaggcgatcgtgaattccttgcaaaatttgttcgtgaggaattaaaagaagaagttaaacctggttttggtttaggtaagcttcaaacaatcgtatttgaagaaacggttgagactaaacttcgtcagcctacttttattactgagtacccagcagagacttctccacttgctcgccgtaatgatgataatccgcacattactgatcgttttgagttctttattggtggccgtgaattggcaaacggctttagtgagttaaatgatccgattgatcaggctgaacgtttccaagcgcaagttgctgaaaaagatgctggtgatgatgaagcaatgcattacgatgcagagtttgttgaagcacttgaatatggtttacctccaacagcgggtgaaggtattggtattgaccgtttggttatgctttttgcagatgcaccaagtattcgtgatgtgattttgttcccgcatatgcgtcgtaaagaaggttaa

SEQ ID NO: 44 - protein, 509 aa, Acinetobacter pittii
MTQQNAQSTSEPTISENDLIAQRHAKLKQIQDVAKETGKSPWPNTFKREHYAADLQEQFKDQSKEQIESAEHVYVKVAGRVMLNRGSFMVIQDMTGRIQLYVDRKGLPKDTLETIKGLDLGDIIAAEGYIGRSGKGDLYVHLEGFELLTKSLRPLPDKFHGLNDTEVKYRKRYLDLIVNEETRKTFEIRAKVVAGIRAFLTNERFMEVETPMMHVIPGGASARPFETHHNALDMPLFLRIAPELYLKRLVVGGFERVFEINRNFRNEGVSTRHNPEFTMIEFYQAYADYKDLMALTENMLEKLAIDILGTTDVPYQGEVFSFKGPFKKISMFDAILENNPQFTPENVGDREFLAKFVREELKEEVKPGFGLGKLQTIVFEETVETKLRQPTFITEYPAETSPLARRNDDNPHITDRFEFFIGGRELANGFSELNDPIDQAERFQAQVAEKDAGDDEAMHYDAEFVEALEYGLPPTAGEGIGIDRLVMLFADAPSIRDVILFPHMRRKEG

SEQ ID NO: 45 - DNA, 537 bp, Acinetobacter baumannii
gtgaagggtggtgccggtttatggattaaacttgcggctattccattgtttattgtgacggtggttattaccaaacttttaattgaccgtagtcagaccaaacacaaaacgctgtcttatttatttttatttgaagctatttttctctttgcttttatggctgctgggctttactttgagccatttaaaaatgccgattcgattacggttgcaatcactggcggcctcggtttaattgctttagcgattcgtaatacatcaagcaaaaccctcattaaaaatattagcccaagtaccatgatgacaggcaacactacccagcttgggattgatattgctaacttgcttaaaaataataatgctgccaatcgggcaagtttgcttaaaagtgccagtattgtaattggctttgttataggtgctttgatgggggcggtactctatgtctattttgacttttggagcgtagcgccgtttattttacccatcctttatttttcttatttggcttcacagcagaagtttaaacaagcttaa

SEQ ID NO: 46 - protein, 178 aa, Acinetobacter baumannii
MKGGAGLWIKLAAIPLFIVTVVITKLLIDRSQTKHKTLSYLFLFEAIFLFAFMAAGLYFEPFKNADSITVAITGGLGLIALAIRNTSSKTLIKNISPSTMMTGNTTQLGIDIANLLKNNNAANRASLLKSASIVIGFVIGALMGAVLYVYFDFWSVAPFILPILYFSYLASQQKFKQA

SEQ ID NO: 47 - DNA, 924 bp, Acinetobacter baumannii
gtggtttttcaggtaattttaccaattttgattttattattgatggggtactgtagtgtcctcattaaactggtaacacctgaacaaattaaggctctgagtgcatttgttattaaaatttctttacctgcttttttaatccaatctttagccaataaaaacttacaagatatttggcaccctgcttattttattgcttatggtggcggctctttaatcttgttttttggggcttttatcctttaccgcaagtattttaaaaatagcctgacacatagtgcggtcatatcgatgggcgcttctatgtcaaatacaggttttatgggtacagcgattctaaccatgctaatggggagtcatgctgcaatctatatatctttaaccttaattatcgaaaatttattaatagttgctttaatgcttattttggcagaagcgggtttgcaccaacagcaacggcttttgcctttactgaaaaaaacattcattaatttacttaaaaaccctgtaattattgcaattttagttgggatgagttgcattttgctagatattcatctgccttcaaaacttagacaagccttagaacttttaggaagaacagcttcgcctctagcattatttgctattggtggcagcttggttggtattggtattaccgccgtgaatttccaaagtatattgttggctggatttaatgtcatccttatgcctgttgtgatttttggactgttccttttactgccaaacgtgagccaagagatgttatatgctggcactttacttgctgcgctgccaatgccgatcgcttttggtatttttgggcaagcctacggtttaaatgaaagagcattaacccccttaatgattagtaccattattggctttatgggggtgagtgggcttattgctttgtggtggtaa

SEQ ID NO: 48 - protein, 307 aa, Acinetobacter baumannii
MVFQVILPILILLLMGYCSVLIKLVTPEQIKALSAFVIKISLPAFLIQSLANKNLQDIWHPAYFIAYGGGSLILFFGAFILYRKYFKNSLTHSAVISMGASMSNTGFMGTAILTMLMGSHAAIYISLTLIIENLLIVALMLILAEAGLHQQQRLLPLLKKTFINLLKNPVIIAILVGMSCILLDIHLPSKLRQALELLGRTASPLALFAIGGSLVGIGITAVNFQSILLAGFNVILMPVVIFGLFLLLPNVSQEMLYAGTLLAALPMPIAFGIFGQAYGLNERALTPLMISTIIGFMGVSGLIALWW

SEQ ID NO: 49 - DNA, 2721 bp, Proteus mirabilis
atgccttctaaaattaagtttaaacagtcaactctttctcactctatgcatttaatcttaaaaatgcagagtatacctaaacttatttgtagcagcttattattaagtttatgtgttactccttgttatgctcaaagttcggctgagaccgttacaccagaagcaaaccagacggtaacagattcattggtacaacaaactaatacaaataacccaagtgatgttccaattaccgatgtcgctactcttgtaactcaagtacagcaacaacaagatagcttggctatattgcaacaacaagaacaatttccgaatcagattgaagaatttaagccaattacgcttgataatcttgaagacttaccggttatgcctgttgatcagaatatggcaaatgaaatttatcgggtagcagaagaggcaaaaaacgaggctcaaaacttccagaatggtacgcaaaaacaaccagaaatggtggtgaatgacgcatcacaagcagaattacatgaaattaatcaggcccctgtaaatattgaccagctcatgcatgagattcaatctgatagtaagattgtggttgaagccaatgaaacaggaaaaactttacctgagcttactgctgccgttgaagagccacccgaagaaaaaggtttctttagacgtatattcaataaaatccgtccacctcgggtaattccaatggagcagataccccgtattactgctgaggttacgggtgcgccagatgatttagctaaaaatatcaaaggtaaattatctacatttacccaagaatcatttgaagattttaatgcagcgctaccgcaacttaggagcttaagtaatcaggctgctcaagctgtaggctattacaatgctgagtttcgttttgaaaagttaagtgccagtcgcgtacgcgttaatgtaacgccaaatgaaccagtacggattaatgaacaaaacattgaatttactggtgctggtgcaaaacagccacaatttcaggtcattcgtttagttcctgaccaagatgtaggtgatatttttaatcatggcctttacgaaaccacaaaaagccgaattgtcgatgctgcatcggataatggttattttgatgcgtattggcgtttacatgacgtaaaagtgagccaacctgaaaataaagcggatattaacctcaagtatgagacgggggagcgttataagcttggtaaggttgagtttcgcatgagcgatccatcaaaaccattacctttaaatatgaatattcttgaaagcatggcaccatggaaagagggtgatgactatgctttttggcgtgtaaatgttttagcaaataacctgactaactcacgttattttaactataccttggtcgattcaattaaacccgacccaattgaaaaaccacttgagttaccacccgatttacaagcgttggtcgatcagcagaatgttgatattgacgaatcgaagctgcttcctttagagcaacaacaacttgccaaagcacgccagttggcgtcctcaagtaaagaagtgacacaaaatgtggtagatgaaaaacaatttgccggaactgaaagtgtacaagccgcacccgcatctttaaaagctgcaactgtacagcatgaagaacaagagtctgaacaagaccgtttacaggctcaagctcgggaagaaaaacgtataccagtgattgtgacgttaaatgccgataaactaaatagtctggaaacaggtattggttacggtaccgacactggcgcccgtttacgtagtcaatatagacgttcgattgtaaataaatacggtcattcatttgatgcaaacttggagctttcccaaattcgtcaatctatagatgggcgctatagtattccttataaacatccgttaaatgattactttaatattgtgggtggttacgagcgtgagacgagggatgatattggtccggatgtaagcttacttacagaatcggcagttttagggggtgagcgagttattaaaaaaccactcggaaactggcaacatactattggggtacgttatcgtctcgaccgcctaactcaaaaggggaatgtggatatctctgagctaccagatgcatttaaaactgctgcatcagagcaagaagcattattatttagttatgagacctctaaaacttcaagtaatacacgcttaaacccgaccaaagcttttaaacaaacttataaattagaattaggtagtgaaagtttactttcagatgccaatatggcgattgcaactgcgggttggagatttatttattctttaggtgaaaatgatgaccatcagtttgttgggcggtccgattttagttatatttttaccgatgagtttgataaagttccatacaatttaagattctttactggtggtgaccagacaattcgtggttttgattataaaagtctttcaccagaagataatggatataagattggtggacaggctctagcagtaggctctttagaatataactatcaattcaaagagggttggcgagcagctgttttttctgattttggtaatgcttacgataagagttttagtaatccgacggcctatagtgtgggtgttggtattcgttggaagtccccaattggaccaattcgtttagacgtggcttctggtatttctgatgataaccatccgattcgtttgcatttctttattggtccacaactttaa

SEQ ID NO: 50 - protein, 906 aa, Proteus mirabilis
MPSKIKFKQSTLSHSMHLILKMQSIPKLICSSLLLSLCVTPCYAQSSAETVTPEANQTVTDSLVQQTNTNNPSDVPITDVATLVTQVQQQQDSLAILQQQEQFPNQIEEFKPITLDNLEDLPVMPVDQNMANEIYRVAEEAKNEAQNFQNGTQKQPEMVVNDASQAELHEINQAPVNIDQLMHEIQSDSKIVVEANETGKTLPELTAAVEEPPEEKGFFRRIFNKIRPPRVIPMEQIPRITAEVTGAPDDLAKNIKGKLSTFTQESFEDFNAALPQLRSLSNQAAQAVGYYNAEFRFEKLSASRVRVNVTPNEPVRINEQNIEFTGAGAKQPQFQVIRLVPDQDVGDIFNHGLYETTKSRIVDAASDNGYFDAYWRLHDVKVSQPENKADINLKYETGERYKLGKVEFRMSDPSKPLPLNMNILESMAPWKEGDDYAFWRVNVLANNLTNSRYFNYTLVDSIKPDPIEKPLELPPDLQALVDQQNVDIDESKLLPLEQQQLAKARQLASSSKEVTQNVVDEKQFAGTESVQAAPASLKAATVQHEEQESEQDRLQAQAREEKRIPVIVTLNADKLNSLETGIGYGTDTGARLRSQYRRSIVNKYGHSFDANLELSQIRQSIDGRYSIPYKHPLNDYFNIVGGYERETRDDIGPDVSLLTESAVLGGERVIKKPLGNWQHTIGVRYRLDRLTQKGNVDISELPDAFKTAASEQEALLFSYETSKTSSNTRLNPTKAFKQTYKLELGSESLLSDANMAIATAGWRFIYSLGENDDHQFVGRSDFSYIFTDEFDKVPYNLRFFTGGDQTIRGFDYKSLSPEDNGYKIGGQALAVGSLEYNYQFKEGWRAAVFSDFGNAYDKSFSNPTAYSVGVGIRWKSPIGPIRLDVASGISDDNHPIRLHFFIGPQL

SEQ ID NO: 51 - DNA, 1005 bp, Proteus mirabilis
atgcaagaccgtctaatcagtggaacagaaaaacctgaagatcattttgatcgggctattcgaccgacttcacttgccgattatatcgggcaaccagtcgtacgcgagcaaatggaaattttcatcggtgcggctcgtggtcgtggtgaagcactcgatcacacactgattttcggtccaccgggcttaggaaaaaccacgcttgccaatattattgcgcgtgaaatgggtggcaatctcaaatccacttcagggcctgttttagagcgtgcgggtgatttggctgcaatgctgactaaccttgaagaaggcgatgttttatttattgatgaaattcaccgtctttcaccagtgattgaagaaattctttatccggcaatggaagattaccaacttgatatcatgattggtgaaggtcctgctgctcgttcaattaaactcgatttaccaccttttacgctcgttgctgcgaccacacgtgccggcttactcacctcgcctctacgtgaccgtttcggtattgtgcaacgtcttgaattctattctgtagaagacctaactcacatcgtgtcacgatctgcaaacctcatggatgtacccattacagttgagggtgcagaagaagttgcacgccgttcacgcggaacaccgcgtattgccaatcgtttattacgccgtgtacgtgactatgcacaagtaaaaggtacaggcgaagttaaccatgaaatggcacaacgtgcgcttgatatgcttaatgtcgataaagctggtttagataccttagaccgacgttatttaagtatgttgttagaacgttttgatggtggacctgctggtgttgaagcccttgcagctgctatggctgaagatagcggaacacttgaagatgttattgaaccttatttaattcagcaaggttatgttatgcgtaccgcacgaggtcgcattgcaaccaaccaatcttatttgcagtttggcatgacgccacctgagcctaaaaactaa

SEQ ID NO: 52 - protein, 334 aa, Proteus mirabilis
MQDRLISGTEKPEDHFDRAIRPTSLADYIGQPVVREQMEIFIGAARGRGEALDHTLIFGPPGLGKTTLANIIAREMGGNLKSTSGPVLERAGDLAAMLTNLEEGDVLFIDEIHRLSPVIEEILYPAMEDYQLDIMIGEGPAARSIKLDLPPFTLVAATTRAGLLTSPLRDRFGIVQRLEFYSVEDLTHIVSRSANLMDVPITVEGAEEVARRSRGTPRIANRLLRRVRDYAQVKGTGEVNHEMAQRALDMLNVDKAGLDTLDRRYLSMLLERFDGGPAGVEALAAAMAEDSGTLEDVIEPYLIQQGYVMRTARGRIATNQSYLQFGMTPPEPKN

SEQ ID NO: 53 - DNA, 1071 bp, Proteus mirabilis
atggtgacactcatccctgcttttatcatttttttgtttagcagcatgttttatgcaggtaaagctgaacatttacccattgccattattgatcaagaccagagtgaactaagccgtaatattggaaagtatctttcactaaatcatacagtcgatgtaaaaacaattactacaagctcaagtgaagccgagagattactcaatgaaaccaaaatatggggttatgtttttattccggatggtgccgaaaaacgttttgtgaaagctcaagatgcacaaatcagtattgcttttaaccaatctttttttagtgtcgggaacacgatttcctcggcgatgttagtcagcactctcaatgctttagcagactatgctggccagaattatcttgcaaataatattccctatttagatgtccctacagcacacgtcaaaatttcaacgctttataacccgagcatgagctatgagttctatttagaacccttcatggttccagccgtattacatttattactatgttgctgtgtggcatttgccattggacaagaaattaaacgcggtacactaacacagtgggtgaaccgagagagttttattcaaggcttattggctaaaaatttgctgtatagctttattttctgtttctggacttggttatggatgttttggctggttgaaattcgaggctggtttgtagcaggttcactaagtttcttattagctgctcagttcttgctttatttttcttatgctttaattagtagtaccgtcattctcgcgaccaaaaatttaagtaaaacttttggttttattgcagtatatggcggatcttctttaagttttgcaggcgttactctaccattaaataatgcaccgattttcactaaattttggtcattgattattccgtacaccccttatgcaaagctccagaccgaacaatgggtgattggaagtccacttttcatttcaatgtctcccttcttaatacttattggctactgccttatttatttctttttaagttgtttgctgcttaaaaaactggttcaaggagcaacatcatga

SEQ ID NO: 54 - protein, 356 aa, Proteus mirabilis
MVTLIPAFIIFLFSSMFYAGKAEHLPIAIIDQDQSELSRNIGKYLSLNHTVDVKTITTSSSEAERLLNETKIWGYVFIPDGAEKRFVKAQDAQISIAFNQSFFSVGNTISSAMLVSTLNALADYAGQNYLANNIPYLDVPTAHVKISTLYNPSMSYEFYLEPFMVPAVLHLLLCCCVAFAIGQEIKRGTLTQWVNRESFIQGLLAKNLLYSFIFCFWTWLWMFWLVEIRGWFVAGSLSFLLAAQFLLYFSYALISSTVILATKNLSKTFGFIAVYGGSSLSFAGVTLPLNNAPIFTKFWSLIIPYTPYAKLQTEQWVIGSPLFISMSPFLILIGYCLIYFFLSCLLLKKLVQGATS

SEQ ID NO: 55 - DNA, 285 bp, Acinetobacter baumannii
atgattgttgttaccctcacctataaaaaaccattgaccgaagttgacgctgtactcaaagaacatattgcatttttagatcattactatgagcaaaagaaatttttagcgtcgggacgccgtgaaaatagagtaggtggtgtaattatagttctaagctcttcgcttcaagaggctgaagagattatgaaaaatgatccgttttatatttatgatgtagctgattatgattttatgtggtttgagccatcgaaaagtttagaagaaattaaagagtttgtttaa

SEQ ID NO: 56 - protein, 94 aa, Acinetobacter baumannii
MIVVTLTYKKPLTEVDAVLKEHIAFLDHYYEQKKFLASGRRENRVGGVIIVLSSSLQEAEEIMKNDPFYIYDVADYDFMWFEPSKSLEEIKEFV

SEQ ID NO: 57 - DNA, 1491 bp, Proteus mirabilis
atggaaaagcaagttgatgtattaatcattggtgcaggcatatcaggaataggagttgctgcccatttatctaaaaactctccacaacgtcagtttgaaattttggagcgtcgtgaatcgtttggtggaacttgggatcttttccgctatcctggtatccgttctgattcagatatgtctacttttggttttaactttaaaccatggcgcaaagccaatgttctcgctgatggtgcctctattaaaggatatctaggggaagtgattgatgagtttaagttaaaagaaaaaattcatttcggccatcgtgtcctttctgcgaattatgattctgcctcgaaaaagtggcatgttattgttgaggacaataagaaaaaacagcagacttgggttgctaacttcgttgtaggttgtactggttattataattatgaccaaggttacgcgccgactttcccaaatcaagaagctttcaaaggtcaactcattcatccacaacattggcctgaaaacttggattataagggtaaaaaagtagtaattattggtagcggagctacagcaattacactggtgcctgcaatgtcaaaaggtggagcaggtcatgtaacgatgttgcaacgttcaccaacttatattgcttctgttccgtctattgatttcatctatgaaaaaactcgtagatttatgtctgaagaagcagcctataaatttacgcgtgctcgtaatattggtatgcaacgagcaatttatgcattgtctcaaaagcatcctaaaacagttcgtcgtttactcttaaaagcaattgaaatgcaacttaagggtaaagttgatatgaaacattttacaccttcatataacccttgggatcagcgtctttgcgtagttcctgatggtgatttattcaaaattcttcgtgaaggtaaggcgagtgttgagactgatcaaattgaaaaatttactgagactggtattcaattaaaatcaggcaagcatcttgatgccgatattatcgtatctgcaacaggtttgcaggttcaaatcatgggcggtgtgcaggcaactattgatggggagccagttaaatcatctgaacacatgctttataacggcgtgatgctcagcgatgtaccaaacatggcgatgattattggctatgtaaatgcttcatggacattaaaagttgatattgcagcagattatatctgccgtttattaaactacatggataagaataattatgatgaagtcattccatctggtgataagagtgtgatggaagacgacacagtcatgggtagcttatcatctggttatattagtcgtgctgccgacgtgattcctaaacaaggtaaacaagctccatggcaggtaaccaataattatcttgaagaccgaaaatcattaaaaaatgcaaaatttgatgatggtgttctacgttttcataagcattcagaagtttctacacgtaaaccaaaattagtgtcttga

SEQ ID NO: 58 - protein, 496 aa, Proteus mirabilis
MEKQVDVLIIGAGISGIGVAAHLSKNSPQRQFEILERRESFGGTWDLFRYPGIRSDSDMSTFGFNFKPWRKANVLADGASIKGYLGEVIDEFKLKEKIHFGHRVLSANYDSASKKWHVIVEDNKKKQQTWVANFVVGCTGYYNYDQGYAPTFPNQEAFKGQLIHPQHWPENLDYKGKKVVIIGSGATAITLVPAMSKGGAGHVTMLQRSPTYIASVPSIDFIYEKTRRFMSEEAAYKFTRARNIGMQRAIYALSQKHPKTVRRLLLKAIEMQLKGKVDMKHFTPSYNPWDQRLCVVPDGDLFKILREGKASVETDQIEKFTETGIQLKSGKHLDADIIVSATGLQVQIMGGVQATIDGEPVKSSEHMLYNGVMLSDVPNMAMIIGYVNASWTLKVDIAADYICRLLNYMDKNNYDEVIPSGDKSVMEDDTVMGSLSSGYISRAADVIPKQGKQAPWQVTNNYLEDRKSLKNAKFDDGVLRFHKHSEVSTRKPKLVS

SEQ ID NO: 59 - DNA, 258 bp, Proteus mirabilis
atgtctgaagaaatgaccttggaagaacgtaaagtaatctatcgcgcacgtcgtggtttaaaggaaattgatgtctattttgacccttatgtgaaaaattattatttaaaggcagagccggcagaaaaagcgttgtttgctgagttggtagaacaggaagaccctgatttactcgattggtttatggaagtatcagaaccaccacgtaccgaattacgtgactttatctataaattaaaacactatgttcatggttaa

SEQ ID NO: 60 - protein, 85 aa, Proteus mirabilis
MSEEMTLEERKVIYRARRGLKEIDVYFDPYVKNYYLKAEPAEKALFAELVEQEDPDLLDWFMEVSEPPRTELRDFIYKLKHYVHG

SEQ ID NO: 61 - DNA, 453 bp, Acinetobacter baumannii
atgaaatctatcagtgaatggtttgatgaatatagtgaaagtcatcaaaacccgataaataagaaaattcactgggtatgtgttccagctattttattttcgattattggaattattgctcactttagtgccctactcaccgctttactcgtagtgcttacactcattttttatgctcggcttgatcttgtacttgcagtagcaatggctgctctacttgttgtgatggcatggcttatttatgttctgccagtaggtgtaggattttatattgctctttttgtgtttgcctggattggacaattttatggacataaagttgaaggaaaaaaaccttctttctttaaagatttgcaatttctcttgattggtccagtctggtgtatggatgcttatcttgcaaagatattacctcattggaaaagccgtcagaagaaactaattgctcaataa

SEQ ID NO: 62 - protein, 150 aa, Acinetobacter baumannii
MKSISEWFDEYSESHQNPINKKIHWVCVPAILFSIIGIIAHFSALLTALLVVLTLIFYARLDLVLAVAMAALLVVMAWLIYVLPVGVGFYIALFVFAWIGQFYGHKVEGKKPSFFKDLQFLLIGPVWCMDAYLAKILPHWKSRQKKLIAQ

SEQ ID NO: 63 - DNA, 744 bp, Acinetobacter baumannii
atggcgaagacaattttaattacaggtgcaagttctggattgggcgcaggtatggcgcatgaatttgcagccaaaggctataacttagcgatttgtgcacgccgtttagacagattagaaactttaaaaactgaacttgaaaatcagtatggtattaaagtaattgcaaaaagtctggacgtcaccaattacgatcaggtttttgaagtatttcgcgcctttaaacaggagtttggctatttagaccggattattgtaaatgcgggagtcggaaatggccgtcgtattggtaaaggtaattttgaaataaacagagccacggccgaaacaaactttatttctgctttagcacagtgtgaggcagcgattgaaatttttagagcgcaaaatgcaggtcatttggtggtcatgtcgtctatgagtgcgatgcgcggattaccaaaacatttatcgacttatgcggcaagtaaagctgcggtcgctcacttggcggaaggtattcgtgctgaattattggatacgccaattaaagtctcaacaattttcccaggttacatccgaactgaaatgaatgaaggtgctaaacatttaccttttgaagtcgacgcaaaaacaggatgtaaagctttagtcaaagctatagagaaacaacctgtaaaagcgtatgtaccacagtggccatggttaccaatgagtattgccatgaaggttttaccattaaagttggtcaataaattaggataa

SEQ ID NO: 64 - protein, 247 aa, Acinetobacter baumannii
MAKTILITGASSGLGAGMAHEFAAKGYNLAICARRLDRLETLKTELENQYGIKVIAKSLDVTNYDQVFEVFRAFKQEFGYLDRIIVNAGVGNGRRIGKGNFEINRATAETNFISALAQCEAAIEIFRAQNAGHLVVMSSMSAMRGLPKHLSTYAASKAAVAHLAEGIRAELLDTPIKVSTIFPGYIRTEMNEGAKHLPFEVDAKTGCKALVKAIEKQPVKAYVPQWPWLPMSIAMKVLPLKLVNKLG

SEQ ID NO: 65 - DNA, 2430 bp, Acinetobacter baumannii
atgtctgagtcagattctaagtttcatatcttattcaaaatatggtgttttattttaggtttagctttattggctactggtattttttatatcgtgggcggtggaaagctagtatctctcggtggttcttggtatttccttatctcaggactgtttataaccatttcagcaattagtattttccgaaaaaaagcgctgggcgtctggatttttgcggctgtttttgttggtacggtaatttggtcactcattgatgctggatgggaattttggccgttattttcgcggttaatgtttcctgctggtctttttgctgcgttgttatttaccttaccttcaattcgacgctaccaatttcaaactagtttggcatcttcagcctatgcagtaggtggcttagttgttgtgggaatgttgattgcgctctaccaaatgttccaaccgcatccaacagtagcaagctcaggtgaaaaactacctttagtaccagttgaccctgcaaaaaaacaggtgaattgggaaaattatggaaatgatgcgggtggtagtcgctttgttgctctcgaccaaattaaccgagataacgttcataaactaaaagaagcttggcgctttagaacaggtgattttacaacgggtagcggtaatggtgccgaagaccaaatgacgccgctacaagttggaaataaagtctttttatgtacgccacataacaacatttttgcaatagatgccgactcgggcaaacaactctggaaagctgaagtgaactctacagccgatgcttgggaacgctgccgtggtgttgcatacttcgattcaactaaaccactagtgcaaccaactttagctggtgcaactccggtcactactgttgctagcaacacagcctgtccacgccgtgtatataccaatacgccagatggtcgtttaattgcagtcaatgcagataatggtcagcgctgtgcggactttggtgtaaatggaacggttgatctactcgaaggcttaggcggtgggactaaggctccacgttttgaagtgacttctgcaccgactattgccggaacaactattgtggtgggtagccgtattgcagacaacgtggcagcagatatgccgggtggtgtaatacgtggttatgacgtgattacgggtaaacttcgctgggcatttgacccgcgtaatccagatcctaactatgttcttaaaccgggtgaaacctataaacgtagttcggcaaactcttgggctgcaatgtcatatgatccacaaatgaatacagtgttcctaccgatgggtagttcatctgtcgacatttggggggggaaccgtaatccgttagatcacaaatacaatacttctgttttggcacttgatgcgacaacgggtaaagaaaagtgggtatatcaaactgttcataatgacttatgggactttgacttaccaatgcaaccaagtctagtcgactttccattaaaagatggtacgactaagccagctgttgtgattggaaccaaatcaggccaattcttcgttcttgaccgcgtaacaggtaaaccactgactaaaataattgaacagccagtgaaagcggcaaatattccgggtgagcaatacagtttaactcaaccacgttctgttgaaatgcctcaaattggtaatcagactttaactgagtcagatatgtggggtgcgacgccgtttgatcagctcatgtgccgtattaactttaagtcaatgcgttacgaaggtttatttactgcaccgggtactgatgtttcattaagcttccctggttctttaggtggcatgaactggggtagtattgcttttgacccgacacatcgttacatgttcgtaaacgatatgcgtcttggtttatgggttcaactcattaaacaaacacctgaagacattaagattcaggcgagtggtggcgaaaaagtaaatacaggtatgggtgctgtaccaatgaaaggtacaccatataaagtgaataaaaaccgctttatgtctgctttaagtattccttgtcaaaaaccaccgtttggtaccatgacggcaattgacatgaaaactcgtcaggttgcatggcaagtaccacttggtacagttgaggacactggaccacttggtattaagatgggcttgaaagcaccgattggtatgccaactattggtgggccaatggcaactcaaggtggtttagttttctttgctgcaactcaagattattacttgcgtgcttttgattcatctacaggtaaagagctgtggaagtcacgtatgccagtaggtagtcaaggtacaccaatcagctatgtttcacctaaaacaggtaaacaatatgtagtaattaccgcgggtggtgcacgacagtccccagaccatggtgattatgtgatcgcatatagtttagagaaataa

SEQ ID NO: 66 - protein, 809 aa, Acinetobacter baumannii
MSESDSKFHILFKIWCFILGLALLATGIFYIVGGGKLVSLGGSWYFLISGLFITISAISIFRKKALGVWIFAAVFVGTVIWSLIDAGWEFWPLFSRLMFPAGLFAALLFTLPSIRRYQFQTSLASSAYAVGGLVVVGMLIALYQMFQPHPTVASSGEKLPLVPVDPAKKQVNWENYGNDAGGSRFVALDQINRDNVHKLKEAWRFRTGDFTTGSGNGAEDQMTPLQVGNKVFLCTPHNNIFAIDADSGKQLWKAEVNSTADAWERCRGVAYFDSTKPLVQPTLAGATPVTTVASNTACPRRVYTNTPDGRLIAVNADNGQRCADFGVNGTVDLLEGLGGGTKAPRFEVTSAPTIAGTTIVVGSRIADNVAADMPGGVIRGYDVITGKLRWAFDPRNPDPNYVLKPGETYKRSSANSWAAMSYDPQMNTVFLPMGSSSVDIWGGNRNPLDHKYNTSVLALDATTGKEKWVYQTVHNDLWDFDLPMQPSLVDFPLKDGTTKPAVVIGTKSGQFFVLDRVTGKPLTKIIEQPVKAANIPGEQYSLTQPRSVEMPQIGNQTLTESDMWGATPFDQLMCRINFKSMRYEGLFTAPGTDVSLSFPGSLGGMNWGSIAFDPTHRYMFVNDMRLGLWVQLIKQTPEDIKIQASGGEKVNTGMGAVPMKGTPYKVNKNRFMSALSIPCQKPPFGTMTAIDMKTRQVAWQVPLGTVEDTGPLGIKMGLKAPIGMPTIGGPMATQGGLVFFAATQDYYLRAFDSSTGKELWKSRMPVGSQGTPISYVSPKTGKQYVVITAGGARQSPDHGDYVIAYSLEK

SEQ ID NO: 67 - DNA, 672 bp, Acinetobacter baumannii
atgattgacaaaagtaagtcctcactaagcgaggttttatcgcagattaaagatggtgcaaccattctgattggtggttttggtaccgcaggacaacccgctgaactcattgacggtctgattgatcttggcgttaaggacctgaccattgtgagcaacaatgccggtaatggggattatggtctcgctaagctgctcaaagccggttcaattaaaaaggtgatttgctctttcccacgtcagtctgactcttatgtgtttgatgaactgtaccgtgccggaaaggttgcacttgaactggtaccgcaaggtaatctggcgtgccgtattcaggcagcaggtatgggccttggggcggtgtttaccccaacgggctttggaacacttttggccgaaggtaaagaaacccgtcatattaatggtaaagactatgtgcttgagtatccgatcaaggctgactttgccctgattaaagcctataagggcgaccgctggggcaatctggtttaccgtaaatctgcacgtaactttggtccgatcatggccatggctgctgatgtcaccattgctcaagtttctgaagtggttgagttaggtggattagatccggaacatatcattaccccaggtatctttgtacagcacgttgtacaagtacagcccgcccagtaa

SEQ ID NO: 68 - protein, 223 aa, Acinetobacter baumannii
MIDKSKSSLSEVLSQIKDGATILIGGFGTAGQPAELIDGLIDLGVKDLTIVSNNAGNGDYGLAKLLKAGSIKKVICSFPRQSDSYVFDELYRAGKVALELVPQGNLACRIQAAGMGLGAVFTPTGFGTLLAEGKETRHINGKDYVLEYPIKADFALIKAYKGDRWGNLVYRKSARNFGPIMAMAADVTIAQVSEVVELGGLDPEHIITPGIFVQHVVQVQPAQ

SEQ ID NO: 69 - DNA, 489 bp, Acinetobacter baumannii
atggcaaataaaaaacttttaatctgtgctgcaattgcggctggactattgttaaccgcatgcgttaaaaaagagacaccgaaagaagaagagcaagacaaggttgaaactgctgtttcagaacctcaaccacagaagcctgcaaaatttgaatctttagagagtgtagatactcaagaagctcaagttcaagagcaaccacaagttgaagttcatcgtgaagaaactgctaacacgacaactgaaattcgccgtgaaactcgtcctgcgcgttctgatgaatcttcacagacacaagttgctgaacaacctaaatctgagacaccaaaagtagaacctaaaccagaaaaaaaacctgagcctaaagctgaacctaaaccggaaaaagctcagtcaaaaccagctgctaaggcaactgaacctgcgaacacagaagatgatgccgttgctgctgctattgctgctgcaacaccagcacttaagaactaa

SEQ ID NO: 70 - protein, 162 aa, Acinetobacter baumannii
MANKKLLICAAIAAGLLLTACVKKETPKEEEQDKVETAVSEPQPQKPAKFESLESVDTQEAQVQEQPQVEVHREETANTTTEIRRETRPARSDESSQTQVAEQPKSETPKVEPKPEKKPEPKAEPKPEKAQSKPAAKATEPANTEDDAVAAAIAAATPALKN

SEQ ID NO: 71 - DNA, 894 bp, Acinetobacter baumannii
atgaatattaatcaagaacaacttctcatgttccaagccgttatggaaacaggttcattttcagcagcagcaaggaaactcggtaaagtcccctctgctgtgagtatgtcgattgctaatttagaaattgatctgaacctgactttatttgaacgtaaaggccgcgaacctactcctacagccgaagcacgagtgctatatgaaaaaacggcgcaactattgattgaaatgaatcaatggaaacagcacgcgcatgcattaagtactgggctggaacctaatcttactattgttgtggtgtctgagctgctacataccaattggaccgactatgtttgcctgctagaaagtcgctttcccgatctacaaattaatattgtgtctgcccctcaagaagatgcgcttcaaatgttgttagatggatctgcccaactggcccttatgtttgaacgtgagcatttagacaatagagaacagtttgttgaactcaaacgtgaagccttaattccagttatttcaaaaacccatccgctcgcaagccaagagcatgtctcatatgagcagattttgggtacaagacaaattgtggtggcaagtcgagatgaaacattaaaacccgaattattattttcaaaacattactggcgtacagacaaccaccactctgcttgcttaatgattttacgtaatttaggttggggcgtacttccgcaagagatgtttaaagaaaatcctgagttaaacaataagcttaaagcattagatgtatttgattttacgcctcgatttgaatattacgttgatttggtctggagccgcgaaagtgaactcggtgctgctgcacggtttttgattgactatattcgtaataagcgaatgcaaccagctccgtaa

SEQ ID NO: 72 - protein, 297 aa, Acinetobacter baumannii
MNINQEQLLMFQAVMETGSFSAAARKLGKVPSAVSMSIANLEIDLNLTLFERKGREPTPTAEARVLYEKTAQLLIEMNQWKQHAHALSTGLEPNLTIVVVSELLHTNWTDYVCLLESRFPDLQINIVSAPQEDALQMLLDGSAQLALMFEREHLDNREQFVELKREALIPVISKTHPLASQEHVSYEQILGTRQIVVASRDETLKPELLFSKHYWRTDNHHSACLMILRNLGWGVLPQEMFKENPELNNKLKALDVFDFTPRFEYYVDLVWSRESELGAAARFLIDYIRNKRMQPAP

SEQ ID NO: 73 - DNA, 390 bp, Acinetobacter baumannii
gtggtgcgtgaagatcaagctggaattttaaatcaattactttcttctctcgatgcaattcctgaagagattattgctttaacagcttatggcgttggcgctattattgccttgtggtgctggtggcgtttaatgcgccgcttacctaccactttgggcgcaataagctggttagttgtttttgctattttggtgacaccgactgtttcggaagggcctaatgcatctgtagcgccagctatttttggactactatttggtgttttaactaaagacagtcctttaatctggtcaaatttatccttaattctgtttgtaatcggtctaggtttggttattggctattgttggtcaaaatatataacaaacaaaagcatgcgttccatctaa

SEQ ID NO: 74 - protein, 129 aa, Acinetobacter baumannii
MVREDQAGILNQLLSSLDAIPEEIIALTAYGVGAIIALWCWWRLMRRLPTTLGAISWLVVFAILVTPTVSEGPNASVAPAIFGLLFGVLTKDSPLIWSNLSLILFVIGLGLVIGYCWSKYITNKSMRSI

SEQ ID NO: 75 - DNA, 897 bp, Acinetobacter baumannii
ttgtttgatctagacagtagattattaaatattttttatcatatttatcggttcaaaagtgtttcaatggctgcagatgccataggtttgacacagccgagcgttagtaatggtctaaacaaaatccgccaacattttaatgatcctttgtttattcgagtcggtaatgaaatgattccgactgaactggcaaagcaaatttttccactcattagcgaagttattgataaggttgaaagcattaataattttaatgtgaactttgatcccttgacctcagatcagttgtttacgattgcgatgactgatgtatctcatttggttttattgccgcaactgaccaattatttaaaagaaaaagcacctttgattcgtttaaatattaggccgattacaccagaaactagctatcaaatggcaaacggtgaaattgatctagccataggttttttaccgcagttagaagaaggtttttatcagcagaagttttttcgtcaacactatgtcgtaattagctcaaaaagccatccacgtttagacccaaataatttcactttagaggattatatgcgtgaatctcacatcgatattgatgcgggtattgggcattatcacattaaaaatgagctgcagaataaagggctggaccgaaatattttaattcgcttaccaagttatttaggggtgggattggtcgttcaggaaacagatgctattgccactgtaccatattatttaagtcaggttttattggttagagagaacttacagattttaccggcaccgcttgattttccaacttatgatgttaagcaacattggcatatgtcttgtcaccacaagagtagccataaatggttccgtcaaacctgttatgagctatttaaaactgcttaa

SEQ ID NO: 76 - protein, 298 aa, Acinetobacter baumannii
MFDLDSRLLNIFYHIYRFKSVSMAADAIGLTQPSVSNGLNKIRQHFNDPLFIRVGNEMIPTELAKQIFPLISEVIDKVESINNFNVNFDPLTSDQLFTIAMTDVSHLVLLPQLTNYLKEKAPLIRLNIRPITPETSYQMANGEIDLAIGFLPQLEEGFYQQKFFRQHYVVISSKSHPRLDPNNFTLEDYMRESHIDIDAGIGHYHIKNELQNKGLDRNILIRLPSYLGVGLVVQETDAIATVPYYLSQVLLVRENLQILPAPLDFPTYDVKQHWHMSCHHKSSHKWFRQTCYELFKTA

SEQ ID NO: 77 - DNA, 450 bp, Acinetobacter baumannii
atggctgtcttaagttcacaagttggttgtgcccaaaaaactgacaataaaacagaaatgagtattcaaaactctaactctattgttattcaacaattagaaaagtttaaaacacaagatcattttgcgggagatggacaactatatacaggggttcaaaatcctgcattacgtatgagtttaaatcaaaaggtggctgatgttgcacaagcttttattgtactttatcaacaaaagaatgagccaaccaaggcagaacttttacaagttcttgctcatggaattagtcaaatcgatcctgacaagttggatacagaagatcgagaacaagtggcaactacatttgaaagttttctagatattgtaggcctagaaagttcagaaggtattttaaataaatgggtatacggtgaagaaattagtaagttattggagcaagataaacattaa

SEQ ID NO: 78 - protein, 149 aa, Acinetobacter baumannii
MAVLSSQVGCAQKTDNKTEMSIQNSNSIVIQQLEKFKTQDHFAGDGQLYTGVQNPALRMSLNQKVADVAQAFIVLYQQKNEPTKAELLQVLAHGISQIDPDKLDTEDREQVATTFESFLDIVGLESSEGILNKWVYGEEISKLLEQDKH

SEQ ID NO: 79 - DNA, 1425 bp, Acinetobacter baumannii
atgaatgctgtcgttattgcgattgcagtgatgttcttattatcactggcgcgcgtttctgtcgtactgactttagtggtttctgccattgtgggcggcctcgtagcgggtttaagcctttctcaaactgttgaagcctttaacgctggtcttggtgatggtgctgaggttgcacttgcctatgcagtgttaggggcatttgctctggcactttcaaaatctggattacccgatttacttgcccataaactgattggtttattaggaatggaagcggggaaaagccgagaaactaaagtgaaatatttactcttaggtattttactgatcgcagctattttctctcaaaaccttattccagttcatattgcttttattccagtattggttccgcctctattacgggtaatgaaccatttaaaattagaccgccgcgccgcagcttgtgttcttactttaggcttggttgggacatatattttcttacctgttggctttggtgcgattttccttgaacagattttgatgggaaatatcaacaaaattggtgctgcttatggcttacatgtagaacgtggcatgatgcctattggtatggcaattccagttttgggaatggttctaggcaccttggttgcggtatttatcagttaccgtaagccacgaatttatgctgaccgtacgataagccctgtaactacaattgatctagataaacctcttcgtgcaactgcacaagatgaaacagcagacttaaaggcagacgcagaagaacttaaacatgaggcagagcaagggcctattattgctaaaaaaacaatttttatggctttactggctattgggctcactttagttgcgcagctttattccggctcaatgatcttgggtggtttagtgggctttgcagtgctttctacggcaggcatttttaaatggcaagatgcagatgatgtctttgtacaaggcatgagaatgatggctctagtcggctttattatgatctctgctgccggttttgcttcggttatgactcataccggagatattaaccagttggttaaaggtgtggtagaaatcattggtgataaccgtgcgcttgctgcatttttaatgctttgtattggcctatttgtcacgattggtataggttcatctttctcaagtgttcctgtattagctgttatttatgtacctttatgtgtccagttcggtttctcaccgttagcgacaattgcacttatcgggacagctgctgctttaggtgatgctggatctccggcttctgattctaccttaggaccaacagcaggtttaggtgtagatgggcaacatgaccatatttgggatactgtgataccaacatttattcactttaatattccgctattaatttttggttggattgcagccatggttttataa

SEQ ID NO: 80 - protein, 474 aa, Acinetobacter baumannii
MNAVVIAIAVMFLLSLARVSVVLTLVVSAIVGGLVAGLSLSQTVEAFNAGLGDGAEVALAYAVLGAFALALSKSGLPDLLAHKLIGLLGMEAGKSRETKVKYLLLGILLIAAIFSQNLIPVHIAFIPVLVPPLLRVMNHLKLDRRAAACVLTLGLVGTYIFLPVGFGAIFLEQILMGNINKIGAAYGLHVERGMMPIGMAIPVLGMVLGTLVAVFISYRKPRIYADRTISPVTTIDLDKPLRATAQDETADLKADAEELKHEAEQGPIIAKKTIFMALLAIGLTLVAQLYSGSMILGGLVGFAVLSTAGIFKWQDADDVFVQGMRMMALVGFIMISAAGFASVMTHTGDINQLVKGVVEIIGDNRALAAFLMLCIGLFVTIGIGSSFSSVPVLAVIYVPLCVQFGFSPLATIALIGTAAALGDAGSPASDSTLGPTAGLGVDGQHDHIWDTVIPTFIHFNIPLLIFGWIAAMVL

SEQ ID NO: 81 - DNA, 582 bp, Acinetobacter baumannii
gtgttcaaaaaagtattagttgttgcattaatgggggtgtcttcatttacttttgctggtaattggcaagtaaaatttgggggcagcgttattgctccatcggaagatacaacaactgctttaggtgtggtaaaggcggaccatgaatatgcatttactccatcagtagaatacttttttggtcaatctccattttcggcagaattattattagcaacacctattaatcatgatgttttattagatggtcagaaagtagcgcgtattaaacaattgccaccaacaattacagcaaaatatcattttaaaaactcgactcgttttacaccgtatattggtatcggggcaacagcatttattccttgggatgaacaaggcgtagctgacaaagtaaaagaagattttggtgtcgctggccaagttggttttaacttccaacctgctgatgctaaaaattggggagtatttgtagatgttcgttatgcagatattagtccagaagttactttaacaaatggtgctaaatttgacttagatattaacccgtttgtttacactttaggttatagctataaattctaa

SEQ ID NO: 82 - protein, 193 aa, Acinetobacter baumannii
MFKKVLVVALMGVSSFTFAGNWQVKFGGSVIAPSEDTTTALGVVKADHEYAFTPSVEYFFGQSPFSAELLLATPINHDVLLDGQKVARIKQLPPTITAKYHFKNSTRFTPYIGIGATAFIPWDEQGVADKVKEDFGVAGQVGFNFQPADAKNWGVFVDVRYADISPEVTLTNGAKFDLDINPFVYTLGYSYKF

SEQ ID NO: 83 - DNA, 357 bp, Acinetobacter baumannii
atgatgaatagaaaatttgccatggggctagcactttttagtggtttagcttttacgcatagtttgcaagctgctagtttctcttgcaatgctgcaaagacaaagactgaactcagtatttgtaaaaatcgttctttaaatgatgctgatgtaaaaatggcaacaacgtatcaaattgtcctgcatgctttacctatgggtggacgtgatagtcagaaagatgctcaatatcaatggctgaaaaagcgaaatgcttgtgcggctagcgtaagttgtatcagcaaagcttatcaacaacgccaaaaacagttagacacgatattgcaagatagggtgttaaaccacggtccgttttaa

SEQ ID NO: 84 - protein, 118 aa, Acinetobacter baumannii
MMNRKFAMGLALFSGLAFTHSLQAASFSCNAAKTKTELSICKNRSLNDADVKMATTYQIVLHALPMGGRDSQKDAQYQWLKKRNACAASVSCISKAYQQRQKQLDTILQDRVLNHGPF

SEQ ID NO: 85 - DNA, 366 bp, Acinetobacter baumannii
atgaacttagctaaagtttccgagctcacaaaagtaagcccacgtatgctgcggtattatgaaaatttagggcttatacagcctcatcgagcgagtaataattatcgaagttatacgcaaaaagatattgaaaatattaagaaaattaaaatattaaatgacgcaggtatgaacctgaaagacattcatgttttattgccatgttttgatttagatgaacgggtatttacgctgtgtccagtggttcaagaaaaactgcaaacagaacttaagcatgtgtccgatcagttaaacaaactgcaaacttctcaaagtttattacaatctttcttggcaaaaggaaaagctgagagcaccaatatttaa

SEQ ID NO: 86 - protein, 121 aa, Acinetobacter baumannii
MNLAKVSELTKVSPRMLRYYENLGLIQPHRASNNYRSYTQKDIENIKKIKILNDAGMNLKDIHVLLPCFDLDERVFTLCPVVQEKLQTELKHVSDQLNKLQTSQSLLQSFLAKGKAESTNI

SEQ ID NO: 87 - DNA, 627 bp, Acinetobacter baumannii
atgaataacgagcattttaagctgtatacagattcacaatttctaagtccctatgcatttacagtttttgtaggactacacgaaaaacaaattccatttgaaatagcaaccatcgacttaggtcagcaaggccagtttgaaacatcttttgtagaaaagtcattaactgccaaagtgcctgtacttgagcataacgattttgccttatcagaatcttctgccattttggaatatttagaagaactttatccagacacagctatttatccaaaagatattcaagctcgcgcaagagcaagacaaatacaggcattgctcagatcggacttagtggcactaagaactgagcgtccaaccgatgttatttttattcagcccacctccactccactttccgaacaaggccaaaaagcagccgagaaacttttctttgttgcagaaaaacttcttgcatctgatgccgaatttctttttggttcatggagcattgtagatgctgaacttgccctgatgttgcaacgccttattcaaaatggtgatgctgtaccacagcgtttaaaaacctatgcattacagcaatggcaacgtccgaccgtacaaaaatggcttgccttgcgacataaataa

SEQ ID NO: 88 - protein, 208 aa, Acinetobacter baumannii
MNNEHFKLYTDSQFLSPYAFTVFVGLHEKQIPFEIATIDLGQQGQFETSFVEKSLTAKVPVLEHNDFALSESSAILEYLEELYPDTAIYPKDIQARARARQIQALLRSDLVALRTERPTDVIFIQPTSTPLSEQGQKAAEKLFFVAEKLLASDAEFLFGSWSIVDAELALMLQRLIQNGDAVPQRLKTYALQQWQRPTVQKWLALRHK

SEQ ID NO: 89 - DNA, 906 bp, Acinetobacter baumannii
atgctttctctaaaatcattacagtgctttgttactctggttaaaactaaaagttttacccgtactgctgaagagttatatctgactcagcccaccattagtaaaatattacaacaactcgaagagcagcttcaggtacagcttttggttaaacccgatcatggacgaaaaagacaaattgaattaactgaaattggagagcgtatttatcaacatgcggtcgaacttcttcaggcagagcaaaacatctttcttgaaatagaaaactatcaacaattaaaaacaggtactttaaaacttggcgttccacctttaggttcccagctcctaacgactgccctatttgactttcatcgtcaatggccagatattgaattagcttttatggaagtgggttcacgcggtattgaacaggctttactcaataacgagctagacgttggtgttttattgcagccttttgatgagcaaacttttaatagcatcgaattatgtaactaccctttaatggtacttttacgccgtgatgccacttgggcaacccgcaaaaaaataaatctagaagagctacaacaccaatcatttttaatgtttcctgaaaatttctctttgaacagtattattctcgatgcttgtaagcagtatggtttttacccaaccattgcttgccgtaccagccaatggcatctcttggcagacatggtgttacaacgtatgggaattgcgcttctccctcaatattataccgacatgcttgacccgactttatttgcagcagtgccactcgaaaaaccaaatattcagtggcacttagtcatggcttggaaaaagaatcttcctgcctcaccagcggtacaagcttggcttagcattgttcgtcaacattttcagcacattaaaccctaa

SEQ ID NO: 90 - protein, 301 aa, Acinetobacter baumannii
MLSLKSLQCFVTLVKTKSFTRTAEELYLTQPTISKILQQLEEQLQVQLLVKPDHGRKRQIELTEIGERIYQHAVELLQAEQNIFLEIENYQQLKTGTLKLGVPPLGSQLLTTALFDFHRQWPDIELAFMEVGSRGIEQALLNNELDVGVLLQPFDEQTFNSIELCNYPLMVLLRRDATWATRKKINLEELQHQSFLMFPENFSLNSIILDACKQYGFYPTIACRTSQWHLLADMVLQRMGIALLPQYYTDMLDPTLFAAVPLEKPNIQWHLVMAWKKNLPASPAVQAWLSIVRQHFQHIKP

SEQ ID NO: 91 - DNA, 432 bp, Acinetobacter baumannii
atgagtactgaatctgcttctggaacaccctcacaaccatcactgttcgtgttagttaaacaaattctcattttggctggtttttggtgggtcggatatctcttacaccaaaaactcggtgtgcctgtctcggcaggtattttaggtatgtttttattgcttttatgcctgttctttaaaattatcaaaatggatcaggtagcaatgggagcaactgtggttttaggtgagctattactgttttttgtgcctgtagtcgttgccgttgtccagtataaaaccctgtttatgaccgaaggatggcaaatcgtcttaagcattggggttggaaccattttagtcatgttaagcacttcactgactattcattattacaatcgtttgaaggcttacttacaggctagaaaacgtcttcaacataagcatatctaa

SEQ ID NO: 92 - protein, 143 aa, Acinetobacter baumannii
MSTESASGTPSQPSLFVLVKQILILAGFWWVGYLLHQKLGVPVSAGILGMFLLLLCLFFKIIKMDQVAMGATVVLGELLLFFVPVVVAVVQYKTLFMTEGWQIVLSIGVGTILVMLSTSLTIHYYNRLKAYLQARKRLQHKHI

SEQ ID NO: 93 - DNA, 690 bp, Acinetobacter baumannii
atgaatatctggtcaattctttgtctcatctggactttggccgcctatgttgtggcaaagcgaatctatcaaaaacatccaaaactttggttatcacccgcaattagtgtgcctgtacttaccatcattttgatgacgatttttggaatttcataccaaacttattcagaagatacccagtggattgttaatttattaggtcctgcaacggtagctttcgctataccgatttatcgttatcgggaaacgattcgtaaaaacctcggagttcttacgattgcgattattgtgggcatgagtgtaggcgtgatgactgcttataaaatggcgcagtggttccactttagtcctgaagtcactaacagtttgatggcacgttctatttcaacaccttttgccatgattttagctgaagatattcatggttcggcagcattggtttccctatttaccgttattaccggtttggtcggtatgatttgtggcgatgcaattttggcaattactaaaatccgttctaatgtggcaaatggtgccgccttgggtaacgcagcgcatggttttggtacagtcagagcacagcaaagaaatagtgaagaaggggtgattgccagtttaactatggttattgctggtattttaatggtgctgattggaccatttgcgattcatctatggttgatgttgtaa

SEQ ID NO: 94 - protein, 229 aa, Acinetobacter baumannii
MNIWSILCLIWTLAAYVVAKRIYQKHPKLWLSPAISVPVLTIILMTIFGISYQTYSEDTQWIVNLLGPATVAFAIPIYRYRETIRKNLGVLTIAIIVGMSVGVMTAYKMAQWFHFSPEVTNSLMARSISTPFAMILAEDIHGSAALVSLFTVITGLVGMICGDAILAITKIRSNVANGAALGNAAHGFGTVRAQQRNSEEGVIASLTMVIAGILMVLIGPFAIHLWLML

SEQ ID NO: 95 - DNA, 522 bp, Proteus mirabilis
atgggtgccgtactacttactttagcaatcatttttactcagttgtctcttattgcatttggtggtgggaatacgattttgcccgaaatgcaacgccaagtagtcgatatccatcactggatgacggcgcaagaatttagtgctctgtttgccatggcacaagctgcacctggtccaaatatgatgattgtacctttggtagggtggcatgtagcagggttgtctggtttattggtgacgtctactgctaaatttttaccgtcatctcttattactgtatttgtgatgagaggctggtcaaaattcaaagataagaaatggcgccgtgttttacagcttgctttacaacctgtcactgtgggaacggtacttgccagtgcttggattatctctgaggcagcggcaataaatactttacttatcattatggtagtcattgcaactttattatctttaattaaaaaagttcatcctttgcatgttttgattgctggggctgtatttggtgtggtcttactctag

SEQ ID NO: 96 - protein, 173 aa, Proteus mirabilis
MGAVLLTLAIIFTQLSLIAFGGGNTILPEMQRQVVDIHHWMTAQEFSALFAMAQAAPGPNMMIVPLVGWHVAGLSGLLVTSTAKFLPSSLITVFVMRGWSKFKDKKWRRVLQLALQPVTVGTVLASAWIISEAAAINTLLIIMVVIATLLSLIKKVHPLHVLIAGAVFGVVLL

SEQ ID NO: 97 - DNA, 741 bp, Acinetobacter baumannii
atgaaggtgctaatttgtgatgacgaaccacttgcagtggaacgattgtcacgtttagtttcaaagatgggacatgaggttgtcgcaacagctcatcatggccaagatgccttggaacaggcacggcttcatcacccagatgtgattttacttgatatccagatgccgggtatgaatggtctcgtctgtgcggagcaattaagccaacttaatcctcgacctgccatagtgttttgcacagcttatgatcagcatgcattggaggcatttaagtcacaagcacaagcttatcttcttaagcccattgatcctcaagagctggagcagacatttaagcaattaacccagctaacgcaagcgcagctcagcgctttgcctaaacctgagcttttacaggatttaaaaacacaacgtcatcaaattgctgctaaaacctatcgtggggttgagctaattcctgttgaaaatatctattactttttagcagatcagaaatatgtcacggtacgtcataaaaatggcagcgtattgattgacgaaacacttaaagaacttgaaactgagttcgcagatcagttcatccgtattcaccgtaatgcattggtctcgattgcttatttagatggtttagagctagtaagttcgggccaatatcaggttcgcttacgtggcttagatgaaagactttccgtaagccgccgtcatttatctacccttagagaacggatacaccaactttaa

SEQ ID NO: 98 - protein, 246 aa, Acinetobacter baumannii
MKVLICDDEPLAVERLSRLVSKMGHEVVATAHHGQDALEQARLHHPDVILLDIQMPGMNGLVCAEQLSQLNPRPAIVFCTAYDQHALEAFKSQAQAYLLKPIDPQELEQTFKQLTQLTQAQLSALPKPELLQDLKTQRHQIAAKTYRGVELIPVENIYYFLADQKYVTVRHKNGSVLIDETLKELETEFADQFIRIHRNALVSIAYLDGLELVSSGQYQVRLRGLDERLSVSRRHLSTLRERIHQL

SEQ ID NO: 99 - DNA, 444 bp, Proteus mirabilis
atgaatattttcgaagcattaagagaaagccacgaaaatcaacgcaacctttctgaacaattaatccagacacatggtttaaccgaagaacgaaaagaattatttgatgcattaaaaaacgaactttatgctcactcagttgccgaagaccgttatttatatatccctttaatgtttgatgatgtcggtttggatattacgagacatgctttatctgaacaccatgaaatggatgagttggtcgagcaacttgaaaaaacggatatgagtagcccaagttggttggcaaccgctaaacagttgagcgaaaaagtccatcaccacttaaaagaagaagagcataaattttttcaacaagctggtaaaattcttaaagatagtgaaaaagaaacgctaggcaataaatatttaaaggaatataaaaagtataaaaaacagcaataa

SEQ ID NO: 100 - protein, 147 aa, Proteus mirabilis
MNIFEALRESHENQRNLSEQLIQTHGLTEERKELFDALKNELYAHSVAEDRYLYIPLMFDDVGLDITRHALSEHHEMDELVEQLEKTDMSSPSWLATAKQLSEKVHHHLKEEEHKFFQQAGKILKDSEKETLGNKYLKEYKKYKKQQ

SEQ ID NO: 101 - DNA, 315 bp, Acinetobacter baumannii
atgcttactattatcgcggaaattcgtactcaatcgggtggacagcaccgccaaaacgtattgaatgcatttcaaaaaatcattccaactgttttagcagaagatggttgccatggttatgaacctttagttgaccacatttcaaatgcgagcttccagaacaaagaccctgacattattgtgatgttagaaaaatgggaaagtgtagctcatcttgaagcacacttagctacacctcatatgcaagcgcatcatgaagcagtcaaagatgatgtagttgacgtcaaaattaaaattttagaaagtggcgtataa

SEQ ID NO: 102 - protein, 104 aa, Acinetobacter baumannii
MLTIIAEIRTQSGGQHRQNVLNAFQKIIPTVLAEDGCHGYEPLVDHISNASFQNKDPDIIVMLEKWESVAHLEAHLATPHMQAHHEAVKDDVVDVKIKILESGV

SEQ ID NO: 103 - DNA, 366 bp, Acinetobacter baumannii
atgaaaaagattggtttactcatgatgtgtaatttgttgattctgagtgcttgtacaccaaatacaaatccacctacacctcaagcgaacagtccgatacaagctgttttactcgatcaacctaatcttttaaataatgccagtaatttaagtatttcacagcaaatgaatgctttagaagatccttctaatgctcaagtcactattttgcagacagagccgagtgaagatgctgtttcgaaaacacgtactgagtatttattaaaaaaagatcagactgtttggaaaatcgtgaataaaaaacaaagttatcaatgtacaaaaggcgaggaaacagcagactttcaagttaatccttgtccttaa

SEQ ID NO: 104 - protein, 121 aa, Acinetobacter baumannii
MKKIGLLMMCNLLILSACTPNTNPPTPQANSPIQAVLLDQPNLLNNASNLSISQQMNALEDPSNAQVTILQTEPSEDAVSKTRTEYLLKKDQTVWKIVNKKQSYQCTKGEETADFQVNPCP

SEQ ID NO: 105 - DNA, 948 bp, Acinetobacter baumannii
atgagcaataataacgattacgatatttcggattcaaaggattgcgaaaaatttgccaatcaatttattcaggaatttccaattcgctctgccgaaattggacaggggacggtgattaagcgggctttacctagccgacaaaaacgaatgattggggcatggtgctttttagatcatgcaggaccagtaacgtttcctgccggcaatggtttagatgtaggacctcatccacatattggtttgcaaaccttcacttggatgattgaagggaccatgatgcataccgatagtttagggtcaaagcaattaattcgccctaaacaggtaaatttgatgacagcaggacatggtatttctcataccgaggttgcacctgatactgaaactcaaatgcatgctgcgcagctctggatcgccttaccggaccataagcgcaacatggatccgaaatttgaacattatcccgatcttcctgttgttgaaaaagacggtctggaatttactgtactagtgggtgaatatttagagacgacttctccagttgtggttcatacaccgttagtaggggttgatctcattgctacccaggatactaagacacgtattccactaaatcctgaatttgaatatggttttatggcattagatggcgtagctcatgtgaatggccatgaacttactgctgacaatatggttgtattagatacaggtttgaacgaaattgagattgaagtaaagaaagggaaccgtgtgctattaatcggtggtgaaccttttgaaactccgatcttattatggtggaatttcgttgcacgtacgatggacgatttaaaagaagcacgtgagcaatgggttaatcatgacgtgcgttttggtgaaattccagattatgtgggtgcccgcttagaagcaccagttcttccagatcaaatgagagcatcaaaatga

SEQ ID NO: 106 - protein, 315 aa, Acinetobacter baumannii
MSNNNDYDISDSKDCEKFANQFIQEFPIRSAEIGQGTVIKRALPSRQKRMIGAWCFLDHAGPVTFPAGNGLDVGPHPHIGLQTFTWMIEGTMMHTDSLGSKQLIRPKQVNLMTAGHGISHTEVAPDTETQMHAAQLWIALPDHKRNMDPKFEHYPDLPVVEKDGLEFTVLVGEYLETTSPVVVHTPLVGVDLIATQDTKTRIPLNPEFEYGFMALDGVAHVNGHELTADNMVVLDTGLNEIEIEVKKGNRVLLIGGEPFETPILLWWNFVARTMDDLKEAREQWVNHDVRFGEIPDYVGARLEAPVLPDQMRASK

SEQ ID NO: 107 - DNA, 741 bp, Proteus mirabilis
gtgtcaaatcaacaacagatggctgctcaaacagcaactttttggcaaggtgccaaagatagtcaagccatcgttctcacctacttaccagtttcttttgcctttggcgtttctgcatctcaatttggttttagcccatgggaagcattttttctttcttgttccatgtatgcaggtgcaagccaatttttagtggtcgcacttttagcaagtggttcttctatatggttaaccgccttaacagtcattgcacttgatatacgacatgtactttatgggcctgctctttataatttgattcccactaaattaaatttaaagaagacagccgtttgggcttggggtttaacggacgaagtttttgccagtggtatgatccaactttcacagcgcagacaacaatggtccgagtcttggatgttgggcttaagtctatttagctggatgtcttgggcaagtgggtcattattaggcgggttatttgcagatcaagtcgcacaccttccaaagtttttacaagcagctttagacttcttattacctgctttatttttaagttttttattagcggcatttgaacgaaagcatagccttgtagttgctgtatcgttagtggtttcagctttagcatgttattggattaacttatcagcagctatctttattggcattctttcaggcattttagcaggtctatttaaacattatgtgctgaaacaatttgatgaggttgaaacttaa

SEQ ID NO: 108 - protein, 246 aa, Proteus mirabilis
MSNQQQMAAQTATFWQGAKDSQAIVLTYLPVSFAFGVSASQFGFSPWEAFFLSCSMYAGASQFLVVALLASGSSIWLTALTVIALDIRHVLYGPALYNLIPTKLNLKKTAVWAWGLTDEVFASGMIQLSQRRQQWSESWMLGLSLFSWMSWASGSLLGGLFADQVAHLPKFLQAALDFLLPALFLSFLLAAFERKHSLVVAVSLVVSALACYWINLSAAIFIGILSGILAGLFKHYVLKQFDEVET

SEQ ID NO: 109 - DNA, 843 bp, Acinetobacter baumannii
atgtcagtcggctcactaaactggactatattctgtgcggagtctaatgaatatggtgtcgataaagccgcatgggcagaatcagtttgtaaggttattggtagttctagctacaatgcctatgctgaggcgcccacatggttacaaatgttaggttctggtgtctttactatggtttggactgccattgtagcctttcttatcgcatttttattaggttctctcctcggggtaattcgtactttacccaataaaccacttgcttttatcggcaactgctatgtcgaaatattccgtaatattccattaattgtacagttattcttctgggcttttgtttttccggagttcttaccggacagtttaagtgcaggaagtggagatgttgtagcagggggatggtggaaaaacattttaaatcaacaacccgctgttatcggtgtttttgctttaggcctttatactgcggcgcgtgtttcggagcatgtcagagccggaattaacacggtatctcgtggtcaaaagtttgcggcatcggctatgggatttaccaccgctcaaagttatcgttatgtgattttgccagttgcataccgtacggtatggccaacgattacatcagaagcaatgaacgtctttaaaaactcggcagttttatatgccttaagtgttttaaatttctttgcttataccaaaaccatgcgtgaagagacttcacaggacattatcattcttatcctgtctacacctgtctatttaatcattacatacaccattaaatttataatggcatggattgaaaaacgcatggctgtaccaggtttaggctcgggaggaaaataa

SEQ ID NO: 110 - protein, 280 aa, Acinetobacter baumannii
MSVGSLNWTIFCAESNEYGVDKAAWAESVCKVIGSSSYNAYAEAPTWLQMLGSGVFTMVWTAIVAFLIAFLLGSLLGVIRTLPNKPLAFIGNCYVEIFRNIPLIVQLFFWAFVFPEFLPDSLSAGSGDVVAGGWWKNILNQQPAVIGVFALGLYTAARVSEHVRAGINTVSRGQKFAASAMGFTTAQSYRYVILPVAYRTVWPTITSEAMNVFKNSAVLYALSVLNFFAYTKTMREETSQDIIILILSTPVYLIITYTIKFIMAWIEKRMAVPGLGSGGK

SEQ ID NO: 111 - DNA, 750 bp, Acinetobacter baumannii
atggcgggtcattctaaatgggccaatattaagcatcgtaaagcgaaacaagatgccagtcgcggtaaagtttttactaaatatattcgtgaaattgtcactgctgcaaaacttggtggtgcagatcctgccagtaaccctcgccttcgtgctgttgtcgaaaaagcgctttctgtcaacatgacacgagataccattaaccgtgcaattcaacgcggtgtgggtggtgaagataatgatgatttaaaagaagtaacctacgaaggttatggtgtaggtggtgttgctgttcttgttgaaacaatgacagacaacctgaaccgtacagttccagatgttcgccattgtttcagcaaaactaatggtaacttaggtaccgcaggttctgttgcttacctatttaccaaacgtggtgagattacttttgacgatatttctttagaagataagatcatggacgttgctttagaagctggtgcagaagatattgaagtttcagaagatgaaattttagtaatcacttctccagagacttttggtgaggttcaagatgctcttgcagctgctggtttaaaatcagacaatgctgaagtagtgatgagcccttctactaaagcagaaatcaccgatattgatcaagctaaacaagtgatgaaactcattgatatgcttgaagatctagacgatgtacaaaacgtttatacaaacgttgagtttagtgatgaagttttagcgcaacttgatgcctaa

SEQ ID NO: 112 - protein, 249 aa, Acinetobacter baumannii
MAGHSKWANIKHRKAKQDASRGKVFTKYIREIVTAAKLGGADPASNPRLRAVVEKALSVNMTRDTINRAIQRGVGGEDNDDLKEVTYEGYGVGGVAVLVETMTDNLNRTVPDVRHCFSKTNGNLGTAGSVAYLFTKRGEITFDDISLEDKIMDVALEAGAEDIEVSEDEILVITSPETFGEVQDALAAAGLKSDNAEVVMSPSTKAEITDIDQAKQVMKLIDMLEDLDDVQNVYTNVEFSDEVLAQLDA

SEQ ID NO: 113 - DNA, 816 bp, Acinetobacter baumannii
atgccttctctcgatgcttttctagagcacccgaactcgcatgagaaaattcgtcaagatgactacattgcaggattagcaaaaggcttggctttattggaagcttttggaacagatcggcaacggcttaatgtcactcaagtggcagaacgaacaggtattagtcgtacagcggcaaggcgttacctaaaaactttaaaatacttaggctatttagagacagatgaacattacttttggctcactcatcgcgtgctgcgcttttcaagttcttatttaagctctgctcatctgcctaaagttgctcagtcatttttaaatcttttgtgtgcgcagacatcacttactttttcaattgtggtgttagacgataacgaagtggtgccgattgcccgtagttatctaccacagcaagataatttgcgtgtcagcccttatggcatgcacttaggaaaccgtctccctgcccatgccacttccacgggtaaagtattgctggcagcactacctgaagaagcccaacatacgtgggtaaaaaattacggtttaaaacgcttaacgccttttaccatagtagatgagtcaaagttttttgaagtgcttaagggtatttcgttatcggattattgtctttctaaagaagaacatgaacttggtgtaattgcgattgccgtgcccgtttttaatgcacaaggtcaagcagtggcagcacttaactgcatgtctcaaaccaaccgtgtacaagaagattatttggttcagcaaattttgccattgctgcgtaacacggcaaatgaacttagaaatgtaatttaa

SEQ ID NO: 114 - protein, 271 aa, Acinetobacter baumannii
MPSLDAFLEHPNSHEKIRQDDYIAGLAKGLALLEAFGTDRQRLNVTQVAERTGISRTAARRYLKTLKYLGYLETDEHYFWLTHRVLRFSSSYLSSAHLPKVAQSFLNLLCAQTSLTFSIVVLDDNEVVPIARSYLPQQDNLRVSPYGMHLGNRLPAHATSTGKVLLAALPEEAQHTWVKNYGLKRLTPFTIVDESKFFEVLKGISLSDYCLSKEEHELGVIAIAVPVFNAQGQAVAALNCMSQTNRVQEDYLVQQILPLLRNTANELRNVI

SEQ ID NO: 115 - DNA, 846 bp, Acinetobacter baumannii
atggatctgaccaaacgtattcatcaatacacacgtggggcttggacattcgatgtcattgattcaggccctatagatggccctctcgtgattttattgcatggctttccagaaactgcccatagttgggagaagatttcggaattattgcatgagcatcaatttagaacatttgcgatccatcaacgtggttatagtctaaatgctagaccacaaagccgctttcattacgctttaagtgaactaactgaagatgtcgcagtttttattaagggacttggtcaaccagtttatttaattgggcacgattggggttctgtaattgcgtctagtgtagctatgaagtatccgcagtatattcaacatctcactttagtttccgtaccccatcaagctgcttttttaaaagcctgcttaagtagcaatcaactactaaaatcttattattttgcagtttttcagcttcctattttgcccgaacttttatttaagaaaatgcctaaagtaggacgtaagttccttaaatcatctggcatgaccgaacagcaaattgaaatattcgaaactgaatttataaaagaaaatagactggctacggcattaaactggtatcgtggctttttttgggaaaagcctgaaaatccttttaaagcaatagacgttcccactctttttatttggggtaagcatgatattgcagtaacagaaaaaagtgccaagttaaattcaggttattttaaaaataattataaggctatttttatggatgcctctcattggattccttatcaaaatgcacctgaactcgtacagtactttttagaatctatacatgatcaagcataa

SEQ ID NO: 116 - protein, 281 aa, Acinetobacter baumannii
MDLTKRIHQYTRGAWTFDVIDSGPIDGPLVILLHGFPETAHSWEKISELLHEHQFRTFAIHQRGYSLNARPQSRFHYALSELTEDVAVFIKGLGQPVYLIGHDWGSVIASSVAMKYPQYIQHLTLVSVPHQAAFLKACLSSNQLLKSYYFAVFQLPILPELLFKKMPKVGRKFLKSSGMTEQQIEIFETEFIKENRLATALNWYRGFFWEKPENPFKAIDVPTLFIWGKHDIAVTEKSAKLNSGYFKNNYKAIFMDASHWIPYQNAPELVQYFLESIHDQA

SEQ ID NO: 117 - DNA, 1518 bp, Proteus mirabilis
atgaaagtacaacctaatgattattcaaaaatatatgatcttgccgtaattggtggcggtattaatggtgttggtattgccaatgatgcagtagggcgcggattatcggtatttttatgtgaaaaagatgatttagccagccatacctcatctgctagcagcaaattaattcatggcggcctacgttatttagaatataaagaattcaggctggtcagagaagcattagcagagcgtgaagtattgctagctaaagcgccacatattattaaaccaatgcgttttattatgcctcatcgaccccatttacgccctgcatggctaattcgagcaggtctatttttttatgatcatttgggaaaacgagaaaaattattaggatcaaatctcatttatttcaaagaagacagccctttaaaaccagcgataacacgtggttttgaatattctgactgtactgtagatgatgcgcgtcttgtggtgttaaatgcactacaagctaaagagaaaggggcaaaagtcgttacacgtacacgttgtgttaaggcttatagacaacaggaattatggcatctggagttacaaagcggagctgagttctatcagatacgtgcacgagctttagtgaatgcggcgggaccttgggttgaagaaattattagtaaaaacataagtttaagttcaccttatcaaattaggcttatacaaggaagtcatattgttgtgccaaaattatatgactgccataaggcctttattatgcaaaacgaagatcgacggatcgtttttgcaattccttatttagaaaaatataccctcattggtacaacagatcaggaatacacaggtgacccacaaaaagtagagattactgatgtggaaattgattaccttttgacagtgacaaattcacattttaaaaagcagttgaagcgagctgatattgtaagtcagtactcgggtgtgcgtgctttatgtgatgatgagtcggataatccatctgcaattacacgcgactatactttggctctacaggcagaagataaaaccacaccattgctctcagtgtttgggggcaagattacaacttaccgaaagttagccgaggctgctttagagcatctggctccgttttttaatgacatggcagaggagtggactgcagatgagccattacctggcgccgaaaactggaccacactagagggtttaatcaatcagattaaaacacgtataagtggaatttctgactcacttgccaaccgttgggctcatgcatatggcacaagagtgtggaatatgcttaaagagcgaaatgctatagaacaattgggtcaacattttggccatgatttgtttgagtgtgaagtcagatatttgtgtgaatatgaatgggctcacacagcagaagatatactttggcgcagatctaaattaggtttggcatttgatgaaaaacaggtaaaagttttagaagcttatttatcagaacgtcgattaaaagatgatgccgcataa

SEQ ID NO: 118 - protein, 505 aa, Proteus mirabilis
MKVQPNDYSKIYDLAVIGGGINGVGIANDAVGRGLSVFLCEKDDLASHTSSASSKLIHGGLRYLEYKEFRLVREALAEREVLLAKAPHIIKPMRFIMPHRPHLRPAWLIRAGLFFYDHLGKREKLLGSNLIYFKEDSPLKPAITRGFEYSDCTVDDARLVVLNALQAKEKGAKVVTRTRCVKAYRQQELWHLELQSGAEFYQIRARALVNAAGPWVEEIISKNISLSSPYQIRLIQGSHIVVPKLYDCHKAFIMQNEDRRIVFAIPYLEKYTLIGTTDQEYTGDPQKVEITDVEIDYLLTVTNSHFKKQLKRADIVSQYSGVRALCDDESDNPSAITRDYTLALQAEDKTTPLLSVFGGKITTYRKLAEAALEHLAPFFNDMAEEWTADEPLPGAENWTTLEGLINQIKTRISGISDSLANRWAHAYGTRVWNMLKERNAIEQLGQHFGHDLFECEVRYLCEYEWAHTAEDILWRRSKLGLAFDEKQVKVLEAYLSERRLKDDAA

SEQ ID NO: 119 - DNA, 216 bp, Acinetobacter baumannii
atgccacaagttaagttgaaagaaggcgaaccagttgacgtagctatccgtcgtttcaaacgttcatgcgaaaaagctggtgttttagctgacgttcgtaaacgcgaattctacgaaaaaccaactcaagaacgtaagcgcaaaaaagctgctgcagttaaacgctaccaaaagaaattggctcgcgaatctgtacgtactactcgcctttactaa

SEQ ID NO: 120 - protein, 71 aa, Acinetobacter baumannii
MPQVKLKEGEPVDVAIRRFKRSCEKAGVLADVRKREFYEKPTQERKRKKAAAVKRYQKKLARESVRTTRLY

SEQ ID NO: 121 - DNA, 447 bp, Acinetobacter baumannii
atgactactttaaaaaaccaaattactgatgcattaaaaacttctatgcgtgccaaagatatggcaacagtgacggttttgcgtagtctacaagcagcaattaagcaaatcgaagtcgatgagcgcatagagcttgacgacgctcaggttcttgcggtcattgaaaagcaaattaaacaacgtaaagaatcgatcaaagccttcgaaggtgctggtcgtgatgatttagctagtaaagaacaagccgaagctgaggttttatctcagtttctaccagaagctatgactgaggaagagcttgattctctcattgagcaaacgattgctgctcaagaagcaactagcatgaaagatatgggtaaggtgatgaattctctacgtccgatcatagccgggcgtgccgatcctgctcaagtttcagcaaaaattaaagctaaattagcttaa

SEQ ID NO: 122 - protein, 148 aa, Acinetobacter baumannii
MTTLKNQITDALKTSMRAKDMATVTVLRSLQAAIKQIEVDERIELDDAQVLAVIEKQIKQRKESIKAFEGAGRDDLASKEQAEAEVLSQFLPEAMTEEELDSLIEQTIAAQEATSMKDMGKVMNSLRPIIAGRADPAQVSAKIKAKLA

SEQ ID NO: 123 - DNA, 252 bp, Acinetobacter baumannii
atgacagatatcaatgattatgaagatgcagaagattctgctgtagatgaagatgaagccaaagcggctgaaagtggcgcagctgatgaagaagcaggcaacttaactgatgccgatcttgcagaagcagaaacgcttactgtaactgcgaaacaaaaacaacgccaagcgttggaagatgaagtcgctgcgtttttagctcgtggcggaagaatcacagaagttccaccagatgaacatagcgatcgttaa

SEQ ID NO: 124 - protein, 83 aa, Acinetobacter baumannii
MTDINDYEDAEDSAVDEDEAKAAESGAADEEAGNLTDADLAEAETLTVTAKQKQRQALEDEVAAFLARGGRITEVPPDEHSDR

SEQ ID NO: 125 - DNA, 879 bp, Acinetobacter baumannii
atggaaaatacaacgaatcagtatccatcagaagttcctgcacaagttcaacctcatcaaccaggtgatcaggagaaaatgcatcctgaaccagaaattattaaagcatctcataaaggcagtgaaaaactaaaaggcaaagttgccgtcattagcggtggtgatagcggtataggccgttcagttgccgtactatttgcccgtgaaggtgccgatattgctgtactgtaccttgaagaagaccaagatgccgaaattactaaacagcttattgaaaaggaaggacaacaatgtcttttattaaaaggtgatatttccgatccagaccttgcaaaacaaaatattgataaggttctacagcattttggtaaaattaatattttagtaaataatgcgggtgtgcaatatcaacaaaaagaaattgaaagtattagtaatgaacaattagaaaaaacatttaaaacaaatatttttgccatgttttatttaaccaaagaagccattccttatatggaggaaggcgatagcattattaacaccaccagtattaccagttaccaaggtcatgatgagttgattgactatgcaagtactaaaggtgcaattacctcttttactcgtagtctatcgaacaatttaatgaagcagaaaaaaggtattcgtgtaaatggtgttgcaccaggcccaatctggactccccttattccaagtagtttcgatgccgagactgtcgaaaagtttggtaaagataccccaatgggtagaatgggtcagccaagtgaagtcgcccctgcttaccttttccttgcctcagatgatgcaagttatattactggtcaggttattcatgtaaatggcggccaaattgttaatggctaa

SEQ ID NO: 126 - protein, 292 aa, Acinetobacter baumannii
MENTTNQYPSEVPAQVQPHQPGDQEKMHPEPEIIKASHKGSEKLKGKVAVISGGDSGIGRSVAVLFAREGADIAVLYLEEDQDAEITKQLIEKEGQQCLLLKGDISDPDLAKQNIDKVLQHFGKINILVNNAGVQYQQKEIESISNEQLEKTFKTNIFAMFYLTKEAIPYMEEGDSIINTTSITSYQGHDELIDYASTKGAITSFTRSLSNNLMKQKKGIRVNGVAPGPIWTPLIPSSFDAETVEKFGKDTPMGRMGQPSEVAPAYLFLASDDASYITGQVIHVNGGQIVNG

SEQ ID NO: 127 - DNA, 2139 bp, Acinetobacter baumannii
atgaacgacaatactaaatcaaccaataaaacaagtgaaatggctggtgccgatgcagcaaataaagccaatactacccagaaaactgaacagttagacacagttagagatgatgcaactaatgaagctttaaccacaaatcagggggttaaaatagcggataaccaaaatagcttaagagcgggtattcgtggctcgactttattggaagatttcattttaagagaaaaaatcacccactttgaccatgagcgtatacctgagcgtattgtgcatgcgcgtggtgtaggggcacatggttattttcaggcatatgaaggaaacgaacgtttaaccaaagctggattcttgacagacccaactattcagacgcctatttttgtacgtttttcaacagtgcaagggcctcgtggttcagccgacactgttcgtgatatccgcggttttgccattaagttttatacccaagaaggtaacttcgacttggtaggaaataacgcacctgtcttttttgtgcaagacgggattaaatttccagactttgtacatgcggtaaaacctgaaccggacacagaaatcccaacaggtgcaactgcgcatgatactttctgggattttgtgtctttagtacccgagtcagcacatgctgtaatttgggcgatgtcagaccgtgcgattcctcgtaacttacgttcaatccaaggttttggtgttcatacattccgtttaattaatgctgaaggtaaatcacattttgtgaaatttcactggacaccaaaacaaggtttgagtgcgctggtatgggatgaagctcaaaaacttgcaggtaaagacccagatttccaccgtcgtgatctttatgaagcaattgagcaaggtttttatccagaatgggaactcggcgtgcagattgtcgaagaagaagatgaaatgaactttgacttcgatttgctggacccaacaaaaattattcccgaagaattagttcctgttacaccaattggccgatttgttttaaatagaaatgtagataacttctttgctgaaacagagcaggtagctttctgtccgggtcatgtagtacctggtattgattttactgatgacccacttttacaagcccgactattttcatacacagatacccagttaagccgtttaggcggaccaaacttccaccaaattccgattaacaaacctgtgtgtccattccataacaatcaacgtgatggtattcatcagcataccattcataaaggacaggctgcatatcaaccaaactcaattgatggaaattggccagcagaaacaccgccagcggcatcaaatggtggttttgaaagttatcctgaaaaaattagtggacataaacttcgtcaaagaagtgagacgttctctgattatttctctcaaccgcgactatattacaaaagccttgcaccgcatgaacaaaaacatgtggtcgatgcctatacttttgaattaagtaaagttcaaagaaagcatattcgtgagcgtcaagttcaacaaattttggcaaatatcgacctagatttggcacgtcaagtaggggcaaatttaggtattgaagtgcctgacttaaccctaaactataagaaaacagcagttgaaaaatctgccaagttatcttttttagctttcccacctgaagatattcaaggtagaaaagttgctgtacttatccataacatggtgaagtctgatgcattggaggctattaaaaactgggcaattaaagaaggcgtaatccttcacttactagcgccgagcttggctccagtcaaagatcataaagataacgttattgtggctgatggcatgcaaatgtctgagccttcaattgcctatgatgcggtaattattccggatggcgataacctaaatacggttatgcaagacggggtagctcgccattacttactcgaagcttataagcacttaaagccaatcgtatttttaggtaataaatctgatttgcttgaaccattaggtttagtggcggatgaaggaactttaattgaagatgagttccagcatgttacggaaaaatttaagaacctgattaaagcacaccgggtttggtcacgagaacaaatagccgcacatgtaccggcttaa

SEQ ID NO: 128 - protein, 712 aa, Acinetobacter baumannii
MNDNTKSTNKTSEMAGADAANKANTTQKTEQLDTVRDDATNEALTTNQGVKIADNQNSLRAGIRGSTLLEDFILREKITHFDHERIPERIVHARGVGAHGYFQAYEGNERLTKAGFLTDPTIQTPIFVRFSTVQGPRGSADTVRDIRGFAIKFYTQEGNFDLVGNNAPVFFVQDGIKFPDFVHAVKPEPDTEIPTGATAHDTFWDFVSLVPESAHAVIWAMSDRAIPRNLRSIQGFGVHTFRLINAEGKSHFVKFHWTPKQGLSALVWDEAQKLAGKDPDFHRRDLYEAIEQGFYPEWELGVQIVEEEDEMNFDFDLLDPTKIIPEELVPVTPIGRFVLNRNVDNFFAETEQVAFCPGHVVPGIDFTDDPLLQARLFSYTDTQLSRLGGPNFHQIPINKPVCPFHNNQRDGIHQHTIHKGQAAYQPNSIDGNWPAETPPAASNGGFESYPEKISGHKLRQRSETFSDYFSQPRLYYKSLAPHEQKHVVDAYTFELSKVQRKHIRERQVQQILANIDLDLARQVGANLGIEVPDLTLNYKKTAVEKSAKLSFLAFPPEDIQGRKVAVLIHNMVKSDALEAIKNWAIKEGVILHLLAPSLAPVKDHKDNVIVADGMQMSEPSIAYDAVIIPDGDNLNTVMQDGVARHYLLEAYKHLKPIVFLGNKSDLLEPLGLVADEGTLIEDEFQHVTEKFKNLIKAHRVWSREQIAAHVPA

SEQ ID NO: 129 - DNA, 1410 bp, Acinetobacter baumannii
atgcctgttgtagtgaaaaaacgattattagacttattacaagataatcaacaaaattattatgaattgtttgtttttttccttgatcctgatgtttctagctttgagaaagagaaaaaggctagagattttcttgttaaagagatagataaactagaaatgaaggaaatagattttccttcggatatcaatttgattaaggcatggtgtgaaaacgataataaaaaaaattgtcaggaatttcaggcatatttaaatcgtagacaatctggtcaagatagagagtattttaagaacgtcgctcaggcatttgagtttttaataaaggtgtctccaaccaaaaaagtagacggtgcatggctatatagctcagtgcattattggaatgatcctatttttcatgaattaattattacttatctcgaagagcttgggttaggtgagccaaaagcaaaccatgtctgtatctatgatgaccttttacgcagtctagggctagacagtttcgatctgcttttagaagacgaatattatcatcaagcagttgtgcagcttgctctgggttatgcgcctcctgagtttattcccgagattgtgggttttaatttaggctatgagcagttaccactgcatcttttaatttcgaattatgagcttgctgaactaggtattgattctaaatactttaatcttcatatcactatcgacaatattgacaatggtcatgcctataaagccattaaagttattgaagatatttataataaatatagagataaagaactcttcttgaccaagctaaaacgtggttttgcccttaataatcatggggtgtcctcttcaaacattataaaaaatttaaatactgaagactttgtccatagaattttcaaaagaaaggcgcttgtcggtcagttaatccataacgaaaccagacagtttgggtgcaagaccattaatcaatggttatcaaatcccgatgacattgcaggtttaatcactcatttaactgaacacaaatggattaagtttaataccgaccctgaacagagcgtattctggcgaatgattaatgaagaaaatggaaaaatgtttggggtgtttaaccctgtagagcgccaaattattcatgactggattgctggtagtggtcattcttctagcttcttggcatacagcagagaactaaagaatagccagcgtattcaggactatttatttagttatatctcggatggcgaacttgatgcactacaagagcgcgtccaacaatcaagtgaccttgccataaagatttgcaaacttactccgtttcttgccccagattctcatcataaaagtattggtctttggagtactcgtaaatacgtagaactcctttttccttatttaggtacgtttaaaaactag

SEQ ID NO: 130 - protein, 469 aa, Acinetobacter baumannii
MPVVVKKRLLDLLQDNQQNYYELFVFFLDPDVSSFEKEKKARDFLVKEIDKLEMKEIDFPSDINLIKAWCENDNKKNCQEFQAYLNRRQSGQDREYFKNVAQAFEFLIKVSPTKKVDGAWLYSSVHYWNDPIFHELIITYLEELGLGEPKANHVCIYDDLLRSLGLDSFDLLLEDEYYHQAVVQLALGYAPPEFIPEIVGFNLGYEQLPLHLLISNYELAELGIDSKYFNLHITIDNIDNGHAYKAIKVIEDIYNKYRDKELFLTKLKRGFALNNHGVSSSNIIKNLNTEDFVHRIFKRKALVGQLIHNETRQFGCKTINQWLSNPDDIAGLITHLTEHKWIKFNTDPEQSVFWRMINEENGKMFGVFNPVERQIIHDWIAGSGHSSSFLAYSRELKNSQRIQDYLFSYISDGELDALQERVQQSSDLAIKICKLTPFLAPDSHHKSIGLWSTRKYVELLFPYLGTFKN

SEQ ID NO: 131 - DNA, 318 bp, Acinetobacter calcoaceticus
atgacagatcaaaatacagatcatgctcaattggtagctggcgatcataactattctgactctcgctggcgcgaaagctatcttactcgaccttattatcaagaagcgcaattaactacaccagatctagattatgatcgtgatttctctgcagcttatgaacttggtcatcgagctcgttctgaatctaaagaaggaactcagtttgaagatatggaaggtagcttgcagcaaaaatgggaagagctaaaagctgagtcccgcctaaaatgggaacacgctaaacaagcgattaaagatgcgtgggatgatatgtaa

SEQ ID NO: 132 - protein, 105 aa, Acinetobacter calcoaceticus
MTDQNTDHAQLVAGDHNYSDSRWRESYLTRPYYQEAQLTTPDLDYDRDFSAAYELGHRARSESKEGTQFEDMEGSLQQKWEELKAESRLKWEHAKQAIKDAWDDM

SEQ ID NO: 133 - DNA, 2271 bp, Acinetobacter baumannii
atgggaaataagataaaaagtaataaactttttactaggaagtctgaagcaaaaaatatcattccacttctatcacttggtggagccatctttctctcaaattcggcctttgcagcctcgccttctgagacaacagatgctgaaaaaaaacctgaagcactccctacaattacaatcaccgcttcacgtgcagatgaactttctacatctgccaaacaagtgaccaagctagatgaaaaacaaattgaacttttaagaaatggttcatctggaaatattgcaactgttttagctaaagccgtaccgggcctgtctgactcaagccgaaccattaccgattatggtcaaactttacgtggtcgtaatgccctcatcttggtcgatggcgttccaatgaacctgacacgtgacacatcaagaggtctttcagctatcgaccctgaaagtattgctaatattgaagtcattcgcggtagtaacgcaatttatggtggtggcgcttctggcggtattatttcaattaccacgaaagcggctggtggcgaacctacagctaaaacagtcgttgggctacaaacacctttaacaaacttccgttctaatgctttaagtggcaatattcatcaatatttcacaggcagctttaacgcttttgactatgcactcgactttggttaccaacgtattggtagtccgtacgatgcaagtggtgaccgtgttgctccagaaccaagtcaaggagatttatatgattctgacggctatagcatcggcggtaagcttggttaccatattgatgacaaccaatatgttcagtttgctgcaaactactataatgccgagcaagattcagattatgcatctgacccaagtgtgaagaatgcccctgccggaaccgtaccagccaaagccattaaaggcttaaagctcaaagaccaaaataaaaacgaaaaccagatctacaatttaacctataaccataaagacttttttggcaataaggttgatgctcaaatttattaccgcgacttctttacccgtttttcaccatttgatgcacgtaaaaatccgaatcggggtggaaacgtagaccagatctatcaagaaaataacatactcggtagccgtttaactgttaccacaccgcttgagtttttaggtgacacctcactggtttggggtggtgactttagccgtgaaaaaagcgaaatgcctttagatactttcaatcctgatatttatgaccaatctggtggcctagagtttgtaaaaactggtaagctcatttatttacctgaacttaccacacaaagtgttggtggctttgtacagttaaaacatcgctttaatgaccaatggtcggctgaagcaggtacacgctatgaagatagctatgcccaaattgatagttttattccattatcacaatttgatcctaaaacacaatcatataagccaaacccttatgtatatcaaggtgggaaagtaaaagctgatgcatggttgtacaatgctaatgtaactttctctccaaatgaccagcactcgatttatgcatcgtttaaccaaggttttcaattacccgatgttggtgtaattattcgtaatgcagataatactgataagaaaaaaaattatgaattatcatcttcatttttagaacctgtaaaagttgataactatgagttgggctggaaagggaacttcaataacttttcatcaagcttagcagtcttccactctacttctgatctaggcgctgtgcagtctttcagcaatggtctggcacttactagaaccaaagaaaaagtcactggtgttgaagcaacttttgactatatggacgatgccaatgtttggggaactggtggtagtgttacgtggatgaaaggccgcgaaaaaccgcaagatggtgctgaacaagacatgacaggcttccgtattccgccattaaaactcacaggttatatttcttatagcccaacagaaacttggacaaaccgtttacaagctacttacttcggttcagaagattaccgcctaaacggcaagaatagttttggtcgctacgatgtaaaatcttatacaacagcagatttaatcagtagctttgcacttaataaaaaagacaccatgacgattggtttagagaatatgtttaaccgcaagtactatcctctatatagccaattattaagaacaagcgataataccagtcacttagttgcaaatggtgtgacgttaaaagtgacttatagccataagtggtaa

SEQ ID NO: 134 - protein, 756 aa, Acinetobacter baumannii
MGNKIKSNKLFTRKSEAKNIIPLLSLGGAIFLSNSAFAASPSETTDAEKKPEALPTITITASRADELSTSAKQVTKLDEKQIELLRNGSSGNIATVLAKAVPGLSDSSRTITDYGQTLRGRNALILVDGVPMNLTRDTSRGLSAIDPESIANIEVIRGSNAIYGGGASGGIISITTKAAGGEPTAKTVVGLQTPLTNFRSNALSGNIHQYFTGSFNAFDYALDFGYQRIGSPYDASGDRVAPEPSQGDLYDSDGYSIGGKLGYHIDDNQYVQFAANYYNAEQDSDYASDPSVKNAPAGTVPAKAIKGLKLKDQNKNENQIYNLTYNHKDFFGNKVDAQIYYRDFFTRFSPFDARKNPNRGGNVDQIYQENNILGSRLTVTTPLEFLGDTSLVWGGDFSREKSEMPLDTFNPDIYDQSGGLEFVKTGKLIYLPELTTQSVGGFVQLKHRFNDQWSAEAGTRYEDSYAQIDSFIPLSQFDPKTQSYKPNPYVYQGGKVKADAWLYNANVTFSPNDQHSIYASFNQGFQLPDVGVIIRNADNTDKKKNYELSSSFLEPVKVDNYELGWKGNFNNFSSSLAVFHSTSDLGAVQSFSNGLALTRTKEKVTGVEATFDYMDDANVWGTGGSVTWMKGREKPQDGAEQDMTGFRIPPLKLTGYISYSPTETWTNRLQATYFGSEDYRLNGKNSFGRYDVKSYTTADLISSFALNKKDTMTIGLENMFNRKYYPLYSQLLRTSDNTSHLVANGVTLKVTYSHKW

SEQ ID NO: 135 - DNA, 594 bp, Acinetobacter haemolyticus
atgcaaccttacattcttgtgctttattacagtaaatatggttcaactaaagaaatggcgcaccttattgcgaatggtgttgaatcggcaggtatgaatgtaaaaattcgcacagtacctaatattgcaacagtggtaacagaagctgagccaagcattcctgaagaaggtgatatttattgtactttagaggaactggccaattgtgctggcttagcgctagggtctccaactcgctttggaaatatggcaagcgaaatgaaatatttttgggatcagaccacaagcctttggttaaatggtgctttacataataagccagcatgcgtttttacttcttctggttcaatgcatggtgggcaagaaagtacgttattaacgatgttacctccattatttcatcacggtatgatgattttaggattaccaaactctattccggctttgtcgaatactaaaacaggtgggactccctatggcgcaagccacgtgagtggtccaagacatgatcaaagtttaagccaagatgaaaaaattttatgtgaagcacaagggaagcgcttaggcgaaatcgtaaaaaaacttcattcttaa

SEQ ID NO: 136 - protein, 197 aa, Acinetobacter haemolyticus
MQPYILVLYYSKYGSTKEMAHLIANGVESAGMNVKIRTVPNIATVVTEAEPSIPEEGDIYCTLEELANCAGLALGSPTRFGNMASEMKYFWDQTTSLWLNGALHNKPACVFTSSGSMHGGQESTLLTMLPPLFHHGMMILGLPNSIPALSNTKTGGTPYGASHVSGPRHDQSLSQDEKILCEAQGKRLGEIVKKLHS

SEQ ID NO: 137 - DNA, 906 bp, Acinetobacter baumannii
atgtcttattttgatatcaatcgttctggcgagttagcaatttttataagggtggtcgagcttggaagtttttcagcggtagcaagagcatgtaatatgacgccgtctgccgtaagcaagttaatttctcgtttagaaaaaagattgggtgtcaggttactcaatcgttcaacacgtcagtttcagcttaccagtgaaggatgccagttttatgagcaaggcattcaaatactcaatggcttggacgaactggaacaatcggttaccgcaaatcatataccgaaagggcgaattagaatccataccagtttttcatattggacacactttttattgccatgcattagtttgtttaatcaacgttaccaggaaattgaattagaagctcatttgagtgatgaagtaattaatttggttgaacaaagaattgatgttgcgattcgaacaggacctttgaaaagctccaatttggtggcccgctcgcttggcagtacttataaacagtatgtttgctctcctctatatattgaaaagtacggttgtcctgagcatccagatgaactacatgaacatcagcttttagatgtaagttatcaacgccagaacaaaacctggttattcaaaaaagcaactcaggaaatcagcctaaccccctctaaagttttaaaagtaaaccatggcgaagcaattttacagttggcactggcaggtgctggcattgctcaactaaatgaattccagattcgaaatgcgttacagcaaaaacaactcgtcaaaattcttgaagattggaatattcatgcttctgaagaatttcatgctgtctggattggccacgataagtatgttcctaatcgcgtacgtacattcttggattttttggtagagcatgcctctataaattag

SEQ ID NO: 138 - protein, 301 aa, Acinetobacter baumannii
MSYFDINRSGELAIFIRVVELGSFSAVARACNMTPSAVSKLISRLEKRLGVRLLNRSTRQFQLTSEGCQFYEQGIQILNGLDELEQSVTANHIPKGRIRIHTSFSYWTHFLLPCISLFNQRYQEIELEAHLSDEVINLVEQRIDVAIRTGPLKSSNLVARSLGSTYKQYVCSPLYIEKYGCPEHPDELHEHQLLDVSYQRQNKTWLFKKATQEISLTPSKVLKVNHGEAILQLALAGAGIAQLNEFQIRNALQQKQLVKILEDWNIHASEEFHAVWIGHDKYVPNRVRTFLDFLVEHASIN

SEQ ID NO: 139 - DNA, 1344 bp, Proteus mirabilis
atgactgataatgcaactatcttgcagcatgtaccagtaggcaaaaaagttgggattgccttctccggtggtctagacacttcagctgccttattgtggatgaaacaaaaaggcgctgagccttatgcatatactgcaaacttaggccagccagatgaagatgactacgatgcaattccaaagaaagcagaacaatatggcgctgtaaaagctcgcttgattgactgccgcttacaattggcgcttgaaggtattgctgcaattcagtgtggtgcattccatatcagtacaggtggtgttccttatttcaatacaactccactcggtcgtgcagtaacaggtactatgctcgttactgccatgaaagaagacgacgtaaacatctggggtgacggttcaacttataaaggtaacgatattgaacgtttctatcgttatggtttgttgactaacccaaatcttaaaatttataagccgtggttagatcaaaactttattgatgagcttggtggccgtgcagaaatgtcacagttcctcatcgacaacggttttgactacaaaatgtcaaaagaaaaagcgtactcaactgactcaaacatgttgggcgcaactcacgaagcaaaagatcttgaatacctaaatgcaggtatcaaaatcgttgacccaatcatgggcgttgctttctggaaagaagaagttgaaatcaaaccagaagaagtgactgtacgttttgaagaaggtgtacctgttgcattaaatggtcagcgttttgacaatccggttgagcttattcttgaagcaaaccgtatcggtggccgtcatggtttaggtatgtctgaccaaatcgaaaaccgtattatcgaagcgaaatctcgtggtatttatgaagcaccgggtatggcccttcttcatattgcttacgagcgtttggttactggtattcacaacgaagatacgatcgaacaataccgcattaacggtttacgtttaggccgtttactttaccaaggccgttggttcgactcacaagcgcttatgttgcgtgaaactgcacagcgttgggtagctaaagcgattactggtgaagtaacacttgaacttcgtcgtggtaatgactacaccatcatgaacactgaatctccaaacttaacgtacgaagctgaacgtttaacaatggaaaaaggtgattcaatgtttacgccaatggaccgtattggtcagttgactatgcgtaacctcgacattaccgatacacgtgcaaaactaggtatctatacagatgctggcttgctttcaatcggtcaaggttctgctgtacctcaattagataataagaaaaaataa

SEQ ID NO: 140 - protein, 447 aa, Proteus mirabilis
MTDNATILQHVPVGKKVGIAFSGGLDTSAALLWMKQKGAEPYAYTANLGQPDEDDYDAIPKKAEQYGAVKARLIDCRLQLALEGIAAIQCGAFHISTGGVPYFNTTPLGRAVTGTMLVTAMKEDDVNIWGDGSTYKGNDIERFYRYGLLTNPNLKIYKPWLDQNFIDELGGRAEMSQFLIDNGFDYKMSKEKAYSTDSNMLGATHEAKDLEYLNAGIKIVDPIMGVAFWKEEVEIKPEEVTVRFEEGVPVALNGQRFDNPVELILEANRIGGRHGLGMSDQIENRIIEAKSRGIYEAPGMALLHIAYERLVTGIHNEDTIEQYRINGLRLGRLLYQGRWFDSQALMLRETAQRWVAKAITGEVTLELRRGNDYTIMNTESPNLTYEAERLTMEKGDSMFTPMDRIGQLTMRNLDITDTRAKLGIYTDAGLLSIGQGSAVPQLDNKKK

SEQ ID NO: 141 - DNA, 876 bp, Acinetobacter baumannii
atgaaattatttaaattatccgcttctgtacttgctactgctacagtattaactatggctcagtcagcttttgctcaagatctgaaaattcagagttttctggctaaactagagcactttggtgtcacctcaaccttaatagaaggcgacaaagaagttttactggttaatgcacaattctcaaaatctgaagcattacgtattgctgcaaatattctcgatagcggtaaaacattaaaaactattttcgtaagctatggcgatccggactattatttcggcttagatgtatttaaacagtatttcccgaatgtacagatcattgctacgccggaaacagtaaagcatattcaggatactcaagcgcttaaagttaaatattgggggccacaaatgggtgcaaatgcacctagccaaattattgtgcctcaagcttacactgctaaaactttaaaacttgagaatgagtcaatcgagattaaaggtaaaaaagagcttacttatttatgggttccttctgcaaaagcagtcgtggggggtattccggtatcttcaggtattcatttatggatggcagatacacctaaaaccaaagatcgtatggaagtcattcaatctttagaaagcatcaaagcactacaacctaaaattgttgtacctgctcatatggttgagggagctccacaaggtttagatgctgttaacttttcaattaactatttaaatagttatgaaaaagcaactaaagcaactaaagcaactaaaaatgctactgagctgagcaagctcatgcagaagcaatacccaacgcttcaaagtgttgatagcttagagctcggcgctaaagtggtaaaaggtgaaatgcagtggccataa

SEQ ID NO: 142 - protein, 291 aa, Acinetobacter baumannii
MKLFKLSASVLATATVLTMAQSAFAQDLKIQSFLAKLEHFGVTSTLIEGDKEVLLVNAQFSKSEALRIAANILDSGKTLKTIFVSYGDPDYYFGLDVFKQYFPNVQIIATPETVKHIQDTQALKVKYWGPQMGANAPSQIIVPQAYTAKTLKLENESIEIKGKKELTYLWVPSAKAVVGGIPVSSGIHLWMADTPKTKDRMEVIQSLESIKALQPKIVVPAHMVEGAPQGLDAVNFSINYLNSYEKATKATKATKNATELSKLMQKQYPTLQSVDSLELGAKVVKGEMQWP

SEQ ID NO: 143 - DNA, 231 bp, Acinetobacter baumannii
atgaaaaaattaggtcttatctctgtagtacttgctggtgttgcatttacagctgttggttgtgcatcagaagctggtttaaacgcttctggttctgctcaaacaagtgctagcccatctggcgtacaagctggtgttggtgtagatgcaggtgtttctggtcaagctcaaccaggtcaagttgatgctggcgcttctggttcagtttcaggttctgcaactgctcagtaa

SEQ ID NO: 144 - protein, 76 aa, Acinetobacter baumannii
MKKLGLISVVLAGVAFTAVGCASEAGLNASGSAQTSASPSGVQAGVGVDAGVSGQAQPGQVDAGASGSVSGSATAQ

SEQ ID NO: 145 - DNA, 1071 bp, Acinetobacter baumannii
atgacagcatttaatcaaaaaattcaaacattgctagataaggggcaaggtcctgctgctcgagcacttgataggttacctagactagctcaagagtctctcgctaaaattttaggatactcttatcaatatccagatctcgattcatttacgaaatgcatgatggctgtgcaaattaaacaggggagagtgggatttattggttcagacccaattgaatcaagaagagcattcgatgcacaaatgcaggccatacgccaaaaaccaactgatattgagttagtagaagatattcgcttacccctacaaagcggaactatctttgctaggcattatcatcctgcccctaataaaaaactgcccttaatcgtgttttatcatggaggtggttttgttgtaggtggtttggatactcatgatgaggtttgtcgcttattagcaaaatatgcaaaagtacaagtgctcagtatcgactaccctttagcacctgaagtttcaccacaacatttaattcaatcgtgtgaagatgcattagcttgggtttatcaaaaccgcagacaattaaaaatattaaaaagtagaattgctgtcgcaggggatagcgctggcggaaatattagtactgttgtggcgcaaagatcagtaaataaagcttatgctccgcaggcacaattattgatttatcctacagtcgacttcaaaagtagacatccttcattttatgcttataacgaagggttagtcttaacaaatactgatattgactatgtcacacagtattatgcaactcatcataatgtagaacttgatgatccaataatttcacctacctatggcaatctaaagaaaaacccacccgcttttgtgattacagcggggcatgatgtcttacatgatgaagctaaaatatatagccataagttaagacaaaatggtgtgaaaatgcattatgaagaatttccggatcagactcatggctttattaacctgactccgatttctagaaaagcaaaacgttatacaatcgaaattagtaaaaactttagaaagttttgggataaaaatagttaa

SEQ ID NO: 146 - protein, 356 aa, Acinetobacter baumannii
MTAFNQKIQTLLDKGQGPAARALDRLPRLAQESLAKILGYSYQYPDLDSFTKCMMAVQIKQGRVGFIGSDPIESRRAFDAQMQAIRQKPTDIELVEDIRLPLQSGTIFARHYHPAPNKKLPLIVFYHGGGFVVGGLDTHDEVCRLLAKYAKVQVLSIDYPLAPEVSPQHLIQSCEDALAWVYQNRRQLKILKSRIAVAGDSAGGNISTVVAQRSVNKAYAPQAQLLIYPTVDFKSRHPSFYAYNEGLVLTNTDIDYVTQYYATHHNVELDDPIISPTYGNLKKNPPAFVITAGHDVLHDEAKIYSHKLRQNGVKMHYEEFPDQTHGFINLTPISRKAKRYTIEISKNFRKFWDKNS

SEQ ID NO: 147 - DNA, 441 bp, Acinetobacter baumannii
atggataaacttaatcaagtcaatgtcatggtaaaacatgagcagtcgttagcacctgctcaaccagtcagtaaacttgcccgttctatgtgggtgcgttgggtgtttattggtttggcttggttgtgtattgcgcttggcatattgggtatttttattccgggtttacccactgtcgactttatgattttggcggttttctttgccgctcgaggctctgaaaaacttcatcaatggtttcgaaatcatcgctatatcggcccactcattcgtgagtggcaagaacatcggcgtattcccaaaaaggcaaaatacatctcgaccttaagtatgagtttagctgcgggattgatgatttggaccattcctcacccgtggtttgtctatcctgcaattttatgtatggctggggtagtggcgtggatgtggcttaaaaaataa

SEQ ID NO: 148 - protein, 146 aa, Acinetobacter baumannii
MDKLNQVNVMVKHEQSLAPAQPVSKLARSMWVRWVFIGLAWLCIALGILGIFIPGLPTVDFMILAVFFAARGSEKLHQWFRNHRYIGPLIREWQEHRRIPKKAKYISTLSMSLAAGLMIWTIPHPWFVYPAILCMAGVVAWMWLKK

SEQ ID NO: 149 - DNA, 597 bp, Acinetobacter baumannii
atgaattcatctacagaacaaatcattagcaacagtttgtctttacgtttgaaacaagaaactgctgctgaacacgaacgtatgcatcaattaatgtcagaggcaaaggtgttttcaagtaaagaaaaatacgcgcaatttactttgtctcaatattactttcagcttgaaattgaacatctttttgagaaagaaggggtagcaggcctgattccagacttagacattcgtggccgctcaaaacaagcacttgccgatttaaatgatttagggattcaacccaacgggcagcaattacaaagtgaaaacgtacaactacccgaagctttaggctggatttatgtgtctgaaggttcaaccttaggagctgcatttttatttaaagaagctcaaaagcatttgggtttttctgaaacgtttgctgcacgtaatttagcggcctatcccgaagggcgcgcgaaagtctggaaacgttttgtacaagtactggatgaaacaggctttgaccaaacccagcaagaccgagtcgttcaaggagctttagatgcctttggatattttggtcaagcgcttgatcagcttgatgaattgaaatag

SEQ ID NO: 150 - protein, 198 aa, Acinetobacter baumannii
MNSSTEQIISNSLSLRLKQETAAEHERMHQLMSEAKVFSSKEKYAQFTLSQYYFQLEIEHLFEKEGVAGLIPDLDIRGRSKQALADLNDLGIQPNGQQLQSENVQLPEALGWIYVSEGSTLGAAFLFKEAQKHLGFSETFAARNLAAYPEGRAKVWKRFVQVLDETGFDQTQQDRVVQGALDAFGYFGQALDQLDELK

SEQ ID NO: 151 - DNA, 921 bp, Acinetobacter baumannii
atgaaatcaaaatcattattccctacccataagccgattgttatgttgcctttaccacaagggccgaagcatttttataagtttttaatcgtagtggtggtgattggactgcatgtgtttgctgtctggatgctgagtcatttaattgaaccttatacttttaaggcaacacccaaagtagatgcattaaaagtaagttttgtatcattggcacctgctaaaaagccatcggttgaaaagactgaaagccaacctaaaaatagtgtaacacctcaatctactttaaacagttcggtatctcatgcgcccgatcagccaaaatactcgcctacaaatgttcaaacattagcgtcaaaaactgcttctaaagaagttgtgcaaaataatttaaatgacaaacagcaagcacaaccaaaaatgactttaaataattcaacttcactccaaccagcgcagcgtacagaaatgctggtgactcataccgataaaaaactgagttcgacagactttgaacaaacgcaaactgagcagttgacacaaaacgccaatagtgaaattaaaagtggtggggtcaaaacacccgcaatgcagcaagaatattccaaagcccctagcactcaagttgaacacgatgacgttgttcaggtgagtagcgtggatgtgctgagttttggcgggcttgactatgataaccgtgagttaaaacaacaaaatcgtttggttgagcttcggattcgcattaatgaaaaagggcagcccatcaacattcaattacgtcaaagttcgggtattcaaagccttgatgaacgggtcatacaagctgcacgtaaatccagatttaaaccccacaaaattaacggtcgagccgtgaccattgttgtggattttccagtccaactcaaactcaatcggggccgttaa

SEQ ID NO: 152 - protein, 306 aa, Acinetobacter baumannii
MKSKSLFPTHKPIVMLPLPQGPKHFYKFLIVVVVIGLHVFAVWMLSHLIEPYTFKATPKVDALKVSFVSLAPAKKPSVEKTESQPKNSVTPQSTLNSSVSHAPDQPKYSPTNVQTLASKTASKEVVQNNLNDKQQAQPKMTLNNSTSLQPAQRTEMLVTHTDKKLSSTDFEQTQTEQLTQNANSEIKSGGVKTPAMQQEYSKAPSTQVEHDDVVQVSSVDVLSFGGLDYDNRELKQQNRLVELRIRINEKGQPINIQLRQSSGIQSLDERVIQAARKSRFKPHKINGRAVTIVVDFPVQLKLNRGR

SEQ ID NO: 153 - DNA, 1491 bp, Acinetobacter baumannii
atgaaacgaacgcttttgtgctgtctgacattgttgagttgtccatttttatatgccgacgaagacacacagcttcgtcttaatcaaagcttggaccaaacgcttttacaagaacagcgacagtttcacgaacagggaaccattcgtagtaccgagcaattacctaaacttcaaattaatggacaagaatatagtgttgagcaaaatccgaatgatcttgccaaggcgttatatttggcagtcatgcaaaaacagtggctcaaagccacggtttatttagaacattataaaaaatatgttggctacgatcgggctttaaccgactttgccgaaggggcagttgcacgttctcagggtcaactgaaattggctgaacaaaaatttcaaagcagcctaaaacaacaacctcataatttaatttgtgaacttgagttagcgcgcgtgctgtttgaacaacagaagaataaggaagcagcacgcctttttatttccattcaagaccaacttaaacaaagtgatcctgcggtaattccgtctggagttttaacaacagtaaatacttttgttcaggcactaaaaaagcgagactcttggcaaggctcggtttcagcgggttacacctatgtcagtaatttaaatagttcgtctgaacagagcaaaacatggacgctttatggcaaagatagtaaaggtaatattatcccaattgagcaagttactcgtgggacgcctaaagctgagtcggcaacgggtttagattatgaagccagtcttataaaacgctatgcgattaaggggcatcatggcgtggctttacgtgcgctggcgtttggacaatcctataacgaccacgcggcatttaatgaatctaccatcaacattaatacaggctacagctactttgacttaaaaaatcaaattggggtgagtccgctatttgaacataaacgttatggcaatgatggtctttacaatgcatggggggcgcgtgccgaatggatgcattttatctcggcagataaagctttcaagcttgaggctgagagtaaagatttaaattatcagaaatataaaaccctagatggggtagaaagctcagcttttgctactttctggaagatttttccagaccagtggactttttttggtggtctagatgtgctcgaccattcgacccaagaaaaatacatggctgcctaccaacagcaaggtgtgcgattgggcttaagcaaatcttggagtacaggatttaataccactttgctgagttcttatcgttggcgtgtgtttgataaatacgcagaaactttcttagctcgtcgtcatgatttcgaacagaactatacctttgttgtgcaaatgccgcgctttgatttttatggcatgacacccaatttaacctatcgctataaccataataaaagcaatgtcgattggctgtattcctacgataaacacaacattagcttcaagcttgagcatcgtttttag

SEQ ID NO: 154 - protein, 496 aa, Acinetobacter baumannii
MKRTLLCCLTLLSCPFLYADEDTQLRLNQSLDQTLLQEQRQFHEQGTIRSTEQLPKLQINGQEYSVEQNPNDLAKALYLAVMQKQWLKATVYLEHYKKYVGYDRALTDFAEGAVARSQGQLKLAEQKFQSSLKQQPHNLICELELARVLFEQQKNKEAARLFISIQDQLKQSDPAVIPSGVLTTVNTFVQALKKRDSWQGSVSAGYTYVSNLNSSSEQSKTWTLYGKDSKGNIIPIEQVTRGTPKAESATGLDYEASLIKRYAIKGHHGVALRALAFGQSYNDHAAFNESTININTGYSYFDLKNQIGVSPLFEHKRYGNDGLYNAWGARAEWMHFISADKAFKLEAESKDLNYQKYKTLDGVESSAFATFWKIFPDQWTFFGGLDVLDHSTQEKYMAAYQQQGVRLGLSKSWSTGFNTTLLSSYRWRVFDKYAETFLARRHDFEQNYTFVVQMPRFDFYGMTPNLTYRYNHNKSNVDWLYSYDKHNISFKLEHRF

SEQ ID NO: 155 - DNA, 792 bp, Acinetobacter baumannii
atgaaaatctctcaattgttcttgggtctcgttgcttgttcaactgcatttgcttatgcaggaattgatggtatttcgagtaatgaaagtaacatcaaaatcggtgctgctgccaatgcaagtcatccgggtggtgtagcagcggtgtcggttcaagctgcgggtgcgccatataacgcttttacaggttttagttcgttaaaaggtttggctcaggcttttgctgctcagggaacgagtaacaccaatgtaacggttggcagcaaaacctttaatatttcacatattccagtgtctgcaatgccaccttcacacagtgcattaggtaattttaactttggtcaggtgggcacacaggaagtctattttggtgaatggtggaaagcgggcgacacgccggcaagcgcgagccataccgtttactacgcgggtgataataccaataccactgttccaaccgcgggtactgcaacttataccgttgcagggattaacggctctggaagcaatctgttaagtggtacgttcacggcaaattatggcgcgggtacacttgaaggaacacttactggaactggtacggctgtttcatcattaagcctagatggtgtggcatttaacccgggtactgctgcgtttgcaggtttggcaacggctaacggtacggctggtatcgacaactctggtgtggtgcaaggtcaattctttggtgcaaatgcttcggctttagcgggtattgcccagtttgataacgtgtcttacaacactgcatttggcggtgctaaaaattaa

SEQ ID NO: 156 - protein, 263 aa, Acinetobacter baumannii
MKISQLFLGLVACSTAFAYAGIDGISSNESNIKIGAAANASHPGGVAAVSVQAAGAPYNAFTGFSSLKGLAQAFAAQGTSNTNVTVGSKTFNISHIPVSAMPPSHSALGNFNFGQVGTQEVYFGEWWKAGDTPASASHTVYYAGDNTNTTVPTAGTATYTVAGINGSGSNLLSGTFTANYGAGTLEGTLTGTGTAVSSLSLDGVAFNPGTAAFAGLATANGTAGIDNSGVVQGQFFGANASALAGIAQFDNVSYNTAFGGAKN

SEQ ID NO: 157 - DNA, 3174 bp, Acinetobacter baumannii
atgagaaaagcgggaacggggcaaaagcggaatcgatcgatttttcgattctcaacattggcatttgccatacatgctgtgtcgatgggtgggcttgttgtacttcctatgcagcaggcttatgcagaaacagccggagttaaaagctataacattcctgctggccgtcttgctaacgtactcaatcagtttgccgaacaatcgggtacttcaattgcaatggatgcacagcaacttcaaggggtacacagcctaggtttaaaaggtaactttgcagtcgaacaaggttttgagcagcttttaaaagcaaccgaatttaatgttgtaaaagttgggcagggctacacactcaccaagaaacctacgctgcgagtcactcccgctaaggttcaggccgctagtctgccgccaagtagtgctgtaattgaagaagatgcgtcgctacgacttacgccaattgtggtgtacggcaaagaagaccgtgacacagaaggctataacaaagtttatgacgcaaaccgttcttcggtctatgcgggcaaagactatgtcgaacgctttaaaggaaccaacccagccgatgttttacaaggtatggtgggagtctatagcggtgatgcccgtaacagtggcgcactcgacccaagtgtacgtggtgtgcagggtgttggtcgtgtgcctttaaccattgatggcaccgaacagtcgattgccgtgtggcgtggctacaacggggtaaataacagaaactatatcgaccccaatctgattgcaggcattgaagtcattaaaggcccatctttagagcgcaataccacaacttctgtaggtggtggcgtagtggttaaaacgctagaggccgatgacattgttcgtccgggtaagtcttttggtgccgagttaaaagtagaaggctcaactaactcaatcgatccatctttgccagatatgagtaaagtgggccaaaactacgatgacacaacgccttggatcgacatgaacgggtcaaaatatgaccccgatatttataaaaagaaccggactagaagtgataactctcatttttcgggcgatgacttagcgggccgactggcaattgccaccaagcaagacaaattcgatttactggctgtctatgcagtacgtgagcgcggcaactatttttctggcacacatggcgcgggctactataaacgagcgacgccagacagtagcctcgattttattccttactttgcctatgcctatcaaccgggagatgaagttcccaacacttcaagtcatatggagtcgtggttgttaaaagggacctatcgcccaacagatgatcagactcttaaactgacttaccgagataccaaaaatatttttggtgaaattatgccgtctcgaattgtttggggcattacgcctgacttgggtgttccgcagtggcctttaagcaatattcactctaaagcctatagcctcgaatataagtttaagcctgagaataatcgctggattgatttctatgccaacatttggcaaaccgacaccgaaagccagacatacacacgtggtgggtggccaaccacaatcgattttcgagataacacgattattaacacggcaataagccattctgacaatacgcgtaaaggcattacggtcagtaataaaacccgtttattagaccagcttgatttgacgctcggtggaagtttcttaaaagaaaaactaacgtctgacgatatatatggcgaatttggcccaagttattcgctctatcaggcgctgccacgggcagggcgccgtgaggaaaaaacgttcgactttaattttaattatcgacccgtgtcttggttaagttttgatgcgggcatgcgttatcgctcgtattgggctgttgatgactttttaaataagtctttgcagagcgagattgacccgagtttaaatccgctttttaccaaaaaaagtaggcttaaagaatatacctttgaatatcagaccatgcctgagagttacacctcgactcagcagcgtttaatcaatgttttaaaacagcgctatgccacaaaaaatcctgagtgggatgggcagctcgacactgtgcctgcatcagagagcacattgtataacatgatctggtcacagaaaaatacgctgagctggaaagcagatgcgaatggacaattgtcgcttgccgataatcctttaaatcagctcaatgcctctggacaaaagtacgtcgtaactggcgggaactttatgtcggtggtagaccaagttccggttgagtcggccgacaaagttaaagatagcggctgggcaccgcagttaggtgcctcaattcacctcacgccaaacagcagaatctatgcacgctatgcagaggaatatcgcttaccaagtttgtttgaaagcactgtcggtttttctgccatgttgccatatcaagcaatcaaacctgaacacgcttttaactacgaagtgggttatgtctatgacatgcgtgattggtttagcacagcacgcaatgccgacattaagctcgcctattactacaacaaaaccaaaaatgtgattgagcgtgatcaaaaccttatttttaccaatatggatgagcaaaagctatcaggtctagagttacaaagccgttttgataatggtggtttcttcacagacttgagcgtggcctataacttaaaaaatgaagtgtgtgataccaatagcgccattaacaaaatgattttaggcggtacggttcaaaccgagcagggccttgagttccgcgaaccgtatcagcgttgtgttgatgacggtttcccaaatggctacttggtgactatggccactcctgaactgagtttccacggtttgcttggcgcacgcttttttgatgaaaagttagagctcggtgcacgtgcaatattctataaagcttatgaaagcccgctacgcaaaaacaatgatgctagcgttaataaaggctattacctcaatgtgcctttggcttgggatgacacgtggatttttgatgcctatgcgcgttatcaggttgatgactacaacacagttgagtttgtaggcagtaatctttctaaccagttttatatcgatcctttaactcgtagtgccatggccgcacccggccgaacgatgaaaattagctggaccaccaaattttaa

SEQ ID NO: 158 - protein, 1057 aa, Acinetobacter baumannii
MRKAGTGQKRNRSIFRFSTLAFAIHAVSMGGLVVLPMQQAYAETAGVKSYNIPAGRLANVLNQFAEQSGTSIAMDAQQLQGVHSLGLKGNFAVEQGFEQLLKATEFNVVKVGQGYTLTKKPTLRVTPAKVQAASLPPSSAVIEEDASLRLTPIVVYGKEDRDTEGYNKVYDANRSSVYAGKDYVERFKGTNPADVLQGMVGVYSGDARNSGALDPSVRGVQGVGRVPLTIDGTEQSIAVWRGYNGVNNRNYIDPNLIAGIEVIKGPSLERNTTTSVGGGVVVKTLEADDIVRPGKSFGAELKVEGSTNSIDPSLPDMSKVGQNYDDTTPWIDMNGSKYDPDIYKKNRTRSDNSHFSGDDLAGRLAIATKQDKFDLLAVYAVRERGNYFSGTHGAGYYKRATPDSSLDFIPYFAYAYQPGDEVPNTSSHMESWLLKGTYRPTDDQTLKLTYRDTKNIFGEIMPSRIVWGITPDLGVPQWPLSNIHSKAYSLEYKFKPENNRWIDFYANIWQTDTESQTYTRGGWPTTIDFRDNTIINTAISHSDNTRKGITVSNKTRLLDQLDLTLGGSFLKEKLTSDDIYGEFGPSYSLYQALPRAGRREEKTFDFNFNYRPVSWLSFDAGMRYRSYWAVDDFLNKSLQSEIDPSLNPLFTKKSRLKEYTFEYQTMPESYTSTQQRLINVLKQRYATKNPEWDGQLDTVPASESTLYNMIWSQKNTLSWKADANGQLSLADNPLNQLNASGQKYVVTGGNFMSVVDQVPVESADKVKDSGWAPQLGASIHLTPNSRIYARYAEEYRLPSLFESTVGFSAMLPYQAIKPEHAFNYEVGYVYDMRDWFSTARNADIKLAYYYNKTKNVIERDQNLIFTNMDEQKLSGLELQSRFDNGGFFTDLSVAYNLKNEVCDTNSAINKMILGGTVQTEQGLEFREPYQRCVDDGFPNGYLVTMATPELSFHGLLGARFFDEKLELGARAIFYKAYESPLRKNNDASVNKGYYLNVPLAWDDTWIFDAYARYQVDDYNTVEFVGSNLSNQFYIDPLTRSAMAAPGRTMKISWTTKF

SEQ ID NO: 159 - DNA, 1017 bp, Acinetobacter baumannii
atggccatggataaaagcaagcatcaccaactggttgaagaagccgcgcattggattgttcaactgagttcggatgatgaaagctcacgaaaaaccgccaagcaaaaatttgaagagtggaaaaaaaccagtgagcaacatcgtcaagtggctgccgatattgaacagtgtatcggttcaattcaaaaactttcccaaaccagtggacataaaaaagtcactaaagttgctcttaaagctggcctaaactcaggcaaagcatataaacatttacgtgcaggaacagcttttgccgttgtgtttattgccatgagtggggcgttattttatttaactgacaccacagtggcctatgtgactgctgacattcaagggcaatcggggcagtggactacgcaaaccttaccagatggttcacgtttaattttgcgtggtaaaagcgcagtcaatcttgattttaaaaccaaccagcgagtggttgagttggtgcaaggtcaaatttatgtcgatgttgctaaagataagactagaccgtttttggtcaaaaccagtcatgggcaaattcaggcactcggcacagcttttagcgtcagttatgacccttcggcaaccgaactcaaaatgttgcactcaaaggtaaaagtagaagccacacaggttaaaaccacccaattgcatgcgactcgtcaggccattgttgaagcagggcaagccattaaaatggaccaaaatggcgtacaaaaattgcatgaactgaatgtttataacgaacaacaaaaatggcaaaagcatcagcttatggtagaaaacctgccgctgaatcaggtgctacaagagctagaccgcaactacaaaggcaaaattatttttaatgatgcggcactgcaacatgtgcgggtcaatgctgtgttgcctttagatcaaaccacagagtcgcttaagcttttggctacggtttttccagatctgaaaattaagcaaatcacgccgtttgtggtcatggtttctttaaaataa

SEQ ID NO: 160 - protein, 338 aa, Acinetobacter baumannii
MAMDKSKHHQLVEEAAHWIVQLSSDDESSRKTAKQKFEEWKKTSEQHRQVAADIEQCIGSIQKLSQTSGHKKVTKVALKAGLNSGKAYKHLRAGTAFAVVFIAMSGALFYLTDTTVAYVTADIQGQSGQWTTQTLPDGSRLILRGKSAVNLDFKTNQRVVELVQGQIYVDVAKDKTRPFLVKTSHGQIQALGTAFSVSYDPSATELKMLHSKVKVEATQVKTTQLHATRQAIVEAGQAIKMDQNGVQKLHELNVYNEQQKWQKHQLMVENLPLNQVLQELDRNYKGKIIFNDAALQHVRVNAVLPLDQTTESLKLLATVFPDLKIKQITPFVVMVSLK

SEQ ID NO: 161 - DNA, 570 bp, Acinetobacter baumannii
atgataattattatcatttgtaagttccttgttttgagtccaattgctgtgaacaaaacttctttgcttgtagatcagttatatagaagtcaccaaagctggcttcaccaatggttgagacaaaaattaggtaatactgatcaggccgcagatctggttcaggacacatttattaaactgttacaaacccgagacgagctattcggcattaaggaaccgcgcgcctatttgacgtcgattgctaaaaacctgctgattgaccaagtacgccgtaaacgcattgaacaagcctatttagatggcttgagtcaaatggaatatatgcttgaagcggtggcttcacccgaagagcaaatgcaaattattcaagcgattaaccagctttgcaaagcactagaaggggtttctgaaaaagcacagcaaacttttattttgcattacctcgaaggctatacccataaagaaattgccgagcgtttaaatgtgtcgaccaaaatgattcaaaaatatttggcgagctgtttaattcagtgctaccaaaacagacaagacatggacgcttacatttaa

SEQ ID NO: 162 - protein, 189 aa, Acinetobacter baumannii
MIIIIICKFLVLSPIAVNKTSLLVDQLYRSHQSWLHQWLRQKLGNTDQAADLVQDTFIKLLQTRDELFGIKEPRAYLTSIAKNLLIDQVRRKRIEQAYLDGLSQMEYMLEAVASPEEQMQIIQAINQLCKALEGVSEKAQQTFILHYLEGYTHKEIAERLNVSTKMIQKYLASCLIQCYQNRQDMDAYI

SEQ ID NO: 163 - DNA, 1803 bp, Acinetobacter baumannii
atgcctttatacaaagctccattacgtgatatgcaatttgtactgcatgaaatgcttcaaacagaacaaaactatcaaggtttaagcaaatatcaggaaagcgtaaatcgagaattaattgatcaatatttagaggcagcagcagatttttgtgaaaatgaattggcgcccataaatcaaaatggtgatcaggaaggctgtcatttaaatcaaggcgtagtcacaacgccgaaaggttttaaagaagcctaccaaaaatatgccgagcttgggtttacttcattaaccgccgatccggaatatggtgggcagggcttgccgacattgctgcggattgcgatttctgaaatgttatgtggttctaattgggcttgggcaatgtatccgggattgtctcatggcgcaatgagaacaattgagcatcatgggactgagcaacaaaaacaaaagtttttgactaaacttattagtggggcttggaccggaacgatgtgtttaaccgaatcacatgcaggctcagaccttgggttaattagaacgaaagcagaaccaaattctgacggtagctactccattacaggcgaaaagatttttatttcagcaggagagcatgatctttctgaaaatattattcatattgttttagcccgtttgcctcaggcacctgcagggactaaaggtatttctttatttattgtgcctaaatttaatgtgagtgatgatggtcaggtgctggaccgtaacaaagtcgtttgtagcgcgattgaacataaaatggggattcatggcaatgccacctgtgtacttaattttgatggtgccaaaggttatttgattggtccggaaaatcgcgggcttaattgtatgtttacctttatgaataccgcacgtattggaacagccgtacaagggcttgctgcttctgaaatctcatttcaaggcgcattaagttatgctaaagagcgtctcgctatgcgttcgttatctggtcctaaatatcctgacaaaaacgccgacccaattattgtgcatcccgctgtacgttcaatgttaatgacacaaaaagcgttttctgaaggtggccgtgcactggcttactttctagctcagcatgtcgatattgtcgaaagctcaaacgatcaggaacagcaaaaacactccgacgaattactggcttttttaacgccaattgctaaggcctttttaacagagtcgggtaatgagtctgcaaagcatggcgttcaagtatttggcggccacggctttattgttgagcatggtatggagcaaattgtacgtgatgcacgtatctcgacattgtatgaaggaacaacagagattcagtctttagatctgctggcacgtaaagtcctcaagtcggaaggcaaacttttaaagaacatgactgatttaattgatccgtttattagccagcaccaatccaatgaagtgctgaaaccttatctagaaaaattagctgagcttaagcagcaatggctgtcactgaccaaatcgattgcagagaaagccaagcacaaccctgaagaaataggagccgcttcagtagattatttttatttttccagttacgttgtgttcgcgtatttgtgggctcgaatggcacaagttgcccatgaaaaattagaatcgggtacacaagaggaagctttttataaagcaaaattaacgacagctaagtttttctatcaaaaacttttacatcgtacacagagccatgccgcttctattgagtctggagctgaatctgtgatggagctcgatcaagatgcttttgcattttag

SEQ ID NO: 164 - protein, 600 aa, Acinetobacter baumannii
MPLYKAPLRDMQFVLHEMLQTEQNYQGLSKYQESVNRELIDQYLEAAADFCENELAPINQNGDQEGCHLNQGVVTTPKGFKEAYQKYAELGFTSLTADPEYGGQGLPTLLRIAISEMLCGSNWAWAMYPGLSHGAMRTIEHHGTEQQKQKFLTKLISGAWTGTMCLTESHAGSDLGLIRTKAEPNSDGSYSITGEKIFISAGEHDLSENIIHIVLARLPQAPAGTKGISLFIVPKFNVSDDGQVLDRNKVVCSAIEHKMGIHGNATCVLNFDGAKGYLIGPENRGLNCMFTFMNTARIGTAVQGLAASEISFQGALSYAKERLAMRSLSGPKYPDKNADPIIVHPAVRSMLMTQKAFSEGGRALAYFLAQHVDIVESSNDQEQQKHSDELLAFLTPIAKAFLTESGNESAKHGVQVFGGHGFIVEHGMEQIVRDARISTLYEGTTEIQSLDLLARKVLKSEGKLLKNMTDLIDPFISQHQSNEVLKPYLEKLAELKQQWLSLTKSIAEKAKHNPEEIGAASVDYFYFSSYVVFAYLWARMAQVAHEKLESGTQEEAFYKAKLTTAKFFYQKLLHRTQSHAASIESGAESVMELDQDAFAF

SEQ ID NO: 165 - DNA, 828 bp, Acinetobacter baumannii
atgaaaaaatttatacttcctatattcagcatttctattctagtttctctcagtgcatgttcatctattaaaactaaatctgaagataattttcatatttcttctcagcaacatgaaaaagctattaaaagctattttgatgaagctcaaacacagggtgtaattattattaaagagggtaaaaatcttagcacctatggtaatgctcttgcacgagcaaataaagaatatgtccctgcatcaacatttaagatgctaaatgctttaatcgggctagaaaatcataaagcaacaacaaatgagattttcaaatgggatggtaaaaaaagaacttatcctatgtgggagaaagatatgactttaggtgaggcaatggcattgtcagcagttccagtatatcaagagcttgcaagacggactggcctagagctaatgcagaaagaagtaaagcgggttaattttggaaatacaaatattggaacacaggtcgataatttttggttagttggcccccttaaaattacaccagtacaagaagttaattttgccgatgaccttgcacataaccgattaccttttaaattagaaactcaagaagaagttaaaaaaatgcttctaattaaagaagtaaatggtagtaagatttatgcaaaaagtggatggggaatgggtgttactccacaggtaggttggttgactggttgggtggagcaagctaatggaaaaaaaatccccttttcgctcaacttagaaatgaaagaaggaatgtctggttctattcgtaatgaaattacttataagtcgctagaaaatcttggaatcatttaa

SEQ ID NO: 166 - protein, 275 aa, Acinetobacter baumannii
MKKFILPIFSISILVSLSACSSIKTKSEDNFHISSQQHEKAIKSYFDEAQTQGVIIIKEGKNLSTYGNALARANKEYVPASTFKMLNALIGLENHKATTNEIFKWDGKKRTYPMWEKDMTLGEAMALSAVPVYQELARRTGLELMQKEVKRVNFGNTNIGTQVDNFWLVGPLKITPVQEVNFADDLAHNRLPFKLETQEEVKKMLLIKEVNGSKIYAKSGWGMGVTPQVGWLTGWVEQANGKKIPFSLNLEMKEGMSGSIRNEITYKSLENLGII

SEQ ID NO: 167 - DNA, 324 bp, Acinetobacter baumannii
atgaaacacttaggatttgtaggaaaaagtacagaatatatcggctatacccatgtagaaattatcaatagttctctacgcctgtctttcaacgtgccattaacaaataatgttgaagaaacctttaaaaaaattgtagacaacaactatgatttattgatgtcgacatccgcagaaatgtcatttgaactagaaaatgaaacgcttgaaattcttgagaaagtaattagagaacaggggatcgagacggaagaatttatacagaatacgttgattaaattcatcaatcaaaatggattagatactactaaatctaatctttag

SEQ ID NO: 168 - protein, 107 aa, Acinetobacter baumannii
MKHLGFVGKSTEYIGYTHVEIINSSLRLSFNVPLTNNVEETFKKIVDNNYDLLMSTSAEMSFELENETLEILEKVIREQGIETEEFIQNTLIKFINQNGLDTTKSNL

SEQ ID NO: 169 - DNA, 762 bp, Acinetobacter baumannii
atgacttctataaatatctctacgccgattcatctattttgtgttccctctgcaggtagcagtgcgtcaatctacagtacgtggaatcaagctttcgatgaaaatattcgtgtgattgcacttgaataccctggtcatggacgaaagattcagcagccactcagtaacaatcctgatgagttagcaaaacaatttacacaagagattttgagctatggagatgtccctttcgtactttttgggcatagtgtcggtgcatcactcatttggaaaattgaggaaaaattacaacaagcaaacgcagatcaaaacttaattttaaaaatagtcagtgcacgaccgtcgccacgttttcaaagcatcattcatcgctatagtgagatttcagatgagcagattgttcaggaactcaaactgtataacaactttccagatgaaattttaaatcatcctagtgccttagaattcttcctcaaaattattaaaaatgattttattttaagtgacaatttactcaaaaaatcaattcaaaaatccataattccactcatggcgatttttggtgaagaagacccatacattaataatcatgacattatgcagagttggcaagacctaactgaagaatggtttggtgcatattcagttcgtggggatcatttttattttctaaaccctgaaattttgcaagaggtcgctgaactgattcaaaataaaattgaatatatcgcaaaaaaatctcttgcaaagcctgtggcttaa

SEQ ID NO: 170 - protein, 253 aa, Acinetobacter baumannii
MTSINISTPIHLFCVPSAGSSASIYSTWNQAFDENIRVIALEYPGHGRKIQQPLSNNPDELAKQFTQEILSYGDVPFVLFGHSVGASLIWKIEEKLQQANADQNLILKIVSARPSPRFQSIIHRYSEISDEQIVQELKLYNNFPDEILNHPSALEFFLKIIKNDFILSDNLLKKSIQKSIIPLMAIFGEEDPYINNHDIMQSWQDLTEEWFGAYSVRGDHFYFLNPEILQEVAELIQNKIEYIAKKSLAKPVA

SEQ ID NO: 171 - DNA, 870 bp, Acinetobacter baumannii
atgtgcaatacaaacactttaagacatgccgatgtaaacatcgcgaaacaatatgctcagcataaaaaactgatgtttaaagatgaatgtttagaatacagcattttggacattgaaccacaaagtattcatcaaattcgaatacttaatatgaatgaacaacgtcttcattgcttgtattcacaatataaaatattcatgccctttcacgtgactagagcaagtttaaaacgtaaaagtgaattttttattggccgcttagctgctcaatttgccttagcaacactcggagattacacaaactttattataaaaaaaggtgaacgtggtgaacctttatggccacgatatattcgtggaagcattagccacagtatgtcaaattgtacacatggtattgccattgcaactgctgcaaaacatcctacccagtttactgacggtattactcaatcaaattcacaatatgaaactcaaattttaggtgtggatgttgagatcaaacaaaatattgaaatatttaaagaaaatccaaacattctaaatagtttgatgagcgctcaagaacacaaacaattaatcccttttcttcctcaattcaattgccttcatttaattgtattttcagctaaagaaagccttataaaagcagtctacaacaaatatcagacgcttattttctttgaagccattcattgcattggcattcagccatcaacaaatactttaagtttttatattccccaaatctcatctgaactcagcactgggcaaataattgaagtgaattacctcgagtccgagcatgaaatcatcacctattgctgcttacccatttcctcaaaccaaagagtacacaacgatgcataa

SEQ ID NO: 172 - protein, 289 aa, Acinetobacter baumannii
MCNTNTLRHADVNIAKQYAQHKKLMFKDECLEYSILDIEPQSIHQIRILNMNEQRLHCLYSQYKIFMPFHVTRASLKRKSEFFIGRLAAQFALATLGDYTNFIIKKGERGEPLWPRYIRGSISHSMSNCTHGIAIATAAKHPTQFTDGITQSNSQYETQILGVDVEIKQNIEIFKENPNILNSLMSAQEHKQLIPFLPQFNCLHLIVFSAKESLIKAVYNKYQTLIFFEAIHCIGIQPSTNTLSFYIPQISSELSTGQIIEVNYLESEHEIITYCCLPISSNQRVHNDA

SEQ ID NO: 173 - DNA, 360 bp, Acinetobacter baumannii
atggcacgtactctcctcaccgatgatatttggcagcaaattcaagatacgatgcgattacacggttgttactgttcaaaaaacagtagaaatatcatggaagccatcttatggaaactacgtacgggtgcgacatggcgtgatattcctcaagaactttgcccttggcaaactgcttacaatctctttaatcgctgggcaagtaagggattatgggataaattttttttagattacgaggcattatggatcaggaatgggtattcattgatggaagctacatacgcgtgcatcaatatgcaagtggagctcggcatggtttcgaaagagcaattggacaatcacgcggtggacgaataa

SEQ ID NO: 174 - protein, 119 aa, Acinetobacter baumannii
MARTLLTDDIWQQIQDTMRLHGCYCSKNSRNIMEAILWKLRTGATWRDIPQELCPWQTAYNLFNRWASKGLWDKFFLDYEALWIRNGYSLMEATYACINMQVELGMVSKEQLDNHAVDE

SEQ ID NO: 175 - DNA, 627 bp, Acinetobacter baumannii
atgatgacaatatcaaaagcattaccgaatttttttgaatatgcagaacatcagacatcttatgccttgcgtgatgttattttacctaaagatttatctttattggtcaaatggatgcatcaaccgcatattataccgcagtggcaactcaataaacctgagttagaacttgccgtgtattttgaacgtatgctttgtgatgatcatcagcatttatatatcgtgcaaatagatggaaaagatgtcggttatttagaaatttatgaagccaaacgcgaccgtttagcgctttattatgatgctaaaaaagatgatttgggctggcatgtattactcagtgaagatgcagtgggtcaaggacattttcgggctgtgatgcgtatgctgagttttctcatttttgaacattccaatgccgaaaaagtggtgggtgaaccagatcaaaccatgtctgtttatgaaaagattcgagctgacattgcactagaaccccaaggcacaattcagcttcaggaaaaaacagcgatgttgtatcactgttatcgagaaaaattttatcagcagtgcggtcattattataaaacgtttaagcgaaaaaaagctgataaatgtctcgttgaaaattga

SEQ ID NO: 176 - protein, 208 aa, Acinetobacter baumannii
MMTISKALPNFFEYAEHQTSYALRDVILPKDLSLLVKWMHQPHIIPQWQLNKPELELAVYFERMLCDDHQHLYIVQIDGKDVGYLEIYEAKRDRLALYYDAKKDDLGWHVLLSEDAVGQGHFRAVMRMLSFLIFEHSNAEKVVGEPDQTMSVYEKIRADIALEPQGTIQLQEKTAMLYHCYREKFYQQCGHYYKTFKRKKADKCLVEN

SEQ ID NO: 177 - DNA, 1161 bp, Acinetobacter baumannii
atgaatttcccacactattttcaaagcaatattcaagagtatttggatgatttattgaaaaccaaagccacaccatttttggttttagatttaagcgttattgaaaaacattatttggaactgaaacagggctttcccaatgccgatatttattatgcgctgaaagccaatccagccaatgaagtgattgagcgtctatgtcgtataggttccagtttcgatttggcttcggtcaacgagctgaaaaaagttcaggcttttggtgtagatgcatcacgcttggcctttggcaataccattaaaaagcgtgcggatatccaatatttttatgaacaagggattcgtctatatgtgaccgattctgatgccgacttaaataatattgcgcaatatgcaccgggttcgaaagtgttttttagactgtcgattgatggttctgaaacagccgattggccactttctggcaagtttggttgtaatgcagaatgtgtaatccgactggcagtaaaagcgaaggaattgggtttaattccttatggaatttcatttcacgtaggttcgcaacaacgaaaaattgatttgtgggacagcgctttagcagaaacaaaagcgatttttgatgtgttggtgaatgaccatcagattcatttaaaaatgctcaatttaggcggtggtttacctgcgcaatatgtacaacaaaccgaagcttttgcgagctattcgaagcaaattaatgcagcacttgaaatgtttaaaccatatcaattggagcaaattattttagaacctggacgctctttggtaggtaatgctggcattttagtctcagaaattgtgctgatttcacagcgtccacaatcagggactaagcgttgggtctatactgatgtcggcgtttttaacggcttgattgaaacgttgggtgaggcgattcaataccccatcgtgtgtaaaaaaacaggacagagtgatgacattattttggcaggtccaacgtgcgacagtatggacattatgtatcagaacaaaaaatatgaattgccactgtctttagaaattggcgaccatttgtactggttatcgacaggagcatatactaccagttatagctctatcgaatttaatggttttccgccactgcaatattatgcattgaactga

SEQ ID NO: 178 - protein, 386 aa, Acinetobacter baumannii
MNFPHYFQSNIQEYLDDLLKTKATPFLVLDLSVIEKHYLELKQGFPNADIYYALKANPANEVIERLCRIGSSFDLASVNELKKVQAFGVDASRLAFGNTIKKRADIQYFYEQGIRLYVTDSDADLNNIAQYAPGSKVFFRLSIDGSETADWPLSGKFGCNAECVIRLAVKAKELGLIPYGISFHVGSQQRKIDLWDSALAETKAIFDVLVNDHQIHLKMLNLGGGLPAQYVQQTEAFASYSKQINAALEMFKPYQLEQIILEPGRSLVGNAGILVSEIVLISQRPQSGTKRWVYTDVGVFNGLIETLGEAIQYPIVCKKTGQSDDIILAGPTCDSMDIMYQNKKYELPLSLEIGDHLYWLSTGAYTTSYSSIEFNGFPPLQYYALN

SEQ ID NO: 179 - DNA, 1341 bp, Acinetobacter baumannii
atgaattcacaacatatttacgacatcgttggcattggcgttggtccgtttaatttaggactggcatgtttgactcaacccttgaatgaactcagtacaattttttttgatagtaaagatgaatttgattggcattcgggcattatgcctgaaggcagtactttgcaaattccatttattgccgatttggtcagttttgccgatccgaaaaataactattcgtttttaaattatttaaagttacacaatcgattgtatcagttctttattcgagaaagtttctttattttgcgtgccgaatacaacttgtattgcaaatgggcggctgagcaactggaaaatgtgcatttcaaaagctttgtcgagcggattgattatgatgaatctcgacagctctacaccgtacgtgtaaaacagcctcaaggtgaaatgaaggtggtgactaaaaatctagtcttgggcacaggaaccaccccaattacacctaaattctgtcagggttatcctgaacagattcagtccagtgcagattatttacgtcataaaaaagattatttaactaaaaagtcgatcaccattgtgggtggcggacaaagcggtgccgaaatttattatgacttgttgtcggaaattgatcagcatggctatcaactcaattggctgactaaagcaccgcatttcttttcgatggatttgggtaaattgacactggaatacacgtcacccgattacacctcgcatttttattcattggatgaagataaacgtgatcaagtgattggttctcagaatgccttatacaaaggtattgagctgagttttgtgaatcgtatttacgatctgctctatcaaaagtcgttacaccaacccattccaactcgcatgatgccaaattgtgctttagatgctgttgaacaacagagcaatcatttaaatctgacctttaaaaattcagacattaataagcgctttaaattggaaagtgaagtgctgatcctggcacttggttatgaatacaaaatccctgaatgtctgacaccaattcgcacgctaatcaattgggacagcaaaggtcgtattgcgctgaactggaactacagcattaacgatgacaacacgatttttgcgcagaacattggtatttattcgcatggttttaccgtcccagacttgggcatggggtgttatcgcaatgccatcatcattaacaccattttaggtcgtgaagtttatcctgtggaaaaacgtattgcctatcaggagtttgcacctacaactgaagaaatcgtgacacctgtaaaaacaacagcaaagtcacacagtactgaactctctttttag

SEQ ID NO: 180 - protein, 446 aa, Acinetobacter baumannii
MNSQHIYDIVGIGVGPFNLGLACLTQPLNELSTIFFDSKDEFDWHSGIMPEGSTLQIPFIADLVSFADPKNNYSFLNYLKLHNRLYQFFIRESFFILRAEYNLYCKWAAEQLENVHFKSFVERIDYDESRQLYTVRVKQPQGEMKVVTKNLVLGTGTTPITPKFCQGYPEQIQSSADYLRHKKDYLTKKSITIVGGGQSGAEIYYDLLSEIDQHGYQLNWLTKAPHFFSMDLGKLTLEYTSPDYTSHFYSLDEDKRDQVIGSQNALYKGIELSFVNRIYDLLYQKSLHQPIPTRMMPNCALDAVEQQSNHLNLTFKNSDINKRFKLESEVLILALGYEYKIPECLTPIRTLINWDSKGRIALNWNYSINDDNTIFAQNIGIYSHGFTVPDLGMGCYRNAIIINTILGREVYPVEKRIAYQEFAPTTEEIVTPVKTTAKSHSTELSF

SEQ ID NO: 181 - DNA, 948 bp, Acinetobacter baumannii
atgaagcctttatttgaacaacagagtagtatctccaccccgcagattcagccggctgtagcattatcttcatctccgactcgccttgctacagccggccaatttattgctgtcgtcattatttggtcgcttactcctctcgcagccgtctggacagtacaagaaattcactgggcatggggattatttattcgattcagtttggcaattccaattgccttgctgtgtctaaggttttttcgcttaaaactcatctttagtaaaaaagctgttttaagttattgtgcaggagctattggcttatttggttccatggctttttgctatatgggtgctgataaagttccctctgccattatttcaattatttacggtacttctccgttagtatctggactcatcagctcctttttattaggacgcgaacgtttttcaatgtggcaatggcttggactcgctattgctctggtcggaatgagttttactctaggcctgtcttcatcgggttttcagctcaaccgtatcgggattatgctagaactgattgcgatgctgttttatgtattgtcaacgtttgccgtaaaatctgtcggtgcccatattcacccaattatacaaatgacgggctctacccttgtctcatgggtaggttatgtatgcttgttgcctttcttttggtcacatcttccaattgaatttccaagcctgaaaatttttctagcagtcatctatagtgctgtattttcttctgtacttgccatgattttttattatcaactgatcaggaccctacaaccaacaactgtcctactcatcactattattaccccagttttagcaacattttggggaacatggtttaatcatgaacaccttagctcacatctcattttaggtttgacgatgttgtgtctaggactatttatgtattcacggcgccctatataa

SEQ ID NO: 182 - protein, 315 aa, Acinetobacter baumannii
MKPLFEQQSSISTPQIQPAVALSSSPTRLATAGQFIAVVIIWSLTPLAAVWTVQEIHWAWGLFIRFSLAIPIALLCLRFFRLKLIFSKKAVLSYCAGAIGLFGSMAFCYMGADKVPSAIISIIYGTSPLVSGLISSFLLGRERFSMWQWLGLAIALVGMSFTLGLSSSGFQLNRIGIMLELIAMLFYVLSTFAVKSVGAHIHPIIQMTGSTLVSWVGYVCLLPFFWSHLPIEFPSLKIFLAVIYSAVFSSVLAMIFYYQLIRTLQPTTVLLITIITPVLATFWGTWFNHEHLSSHLILGLTMLCLGLFMYSRRPI

SEQ ID NO: 183 - DNA, 291 bp, Acinetobacter baumannii
atgctattttacgtacgaaaagatgtgattttacctagccatttaactgagcaggaaattgaagatattaaagcaagagaacgtgcttactctcaagaaattcaaagacaaggtaaatgtcgccatttatggagaataacagggcagtacgcaaacattagtatttttgatgtcgaaagcaatgaagagctgcataacttattacaaggcttaccactttatccttacatgaaaattgaagtgatcgctttaaaccgacatccatcttctgtgagagaaggtgatttttaa

SEQ ID NO: 184 - protein, 96 aa, Acinetobacter baumannii
MLFYVRKDVILPSHLTEQEIEDIKARERAYSQEIQRQGKCRHLWRITGQYANISIFDVESNEELHNLLQGLPLYPYMKIEVIALNRHPSSVREGDF

SEQ ID NO: 185 - DNA, 933 bp, Acinetobacter baumannii
atgaacaaaaccttagctattttatctacagcaatattattagccacagcaacagttacggaagcaaaacaaacaaatatttcgccagcaacacatacgactgctgcttctaaattaagcacagtgccttatgagatggtgaagtatggtgatgtctctattcaagcctacgtacaaggcaaggggccaaccatcgtgattatgtcgtcactaggacgttctgtacgtgactatgatgtagttgcgcaagatttagttaaacaaggctttagagtgattcgacctgaagttcgtggaattggtttaagccgtggtccaatggaaaaactgcatattcaagactatggaaatgacgtagcagcagtgatcgaacattttaaagctggtcctgcaattgtagttggtcatgcatggggcaatttcccaacccgtatggtcgcaacacaacgtccagatttggttaaaggtgtggtgttagcaggtgcttccgcaggtaaagtgcctgaagggtataaaggtaaaccaattggtcctgaaattcgtgaggcgattgataatgctggaaatgaagagcttccagaagctaagcgtattgaatatttaaaacgtgcattctttgcgccaatgaatgatccgcgcgtatggctaacaggttggcaccacgaagcacacgatgcacaaggttatgcgcgtaataacactcctgtagatgactattttgctgctggtaaagcacctattttagatattcaaccagaatacgacacagttgcgcctaaacctttaagaggtgttttaaaaggagccttaggtgatcgagtgaccatagtcgaaattaaaaatgcaggtcacgccttggttccagagcaaccgaaagctttagccgatgccattggtaaatttgctaaacaacaattcgcgaaaaaatcatag

SEQ ID NO: 186 - protein, 310 aa, Acinetobacter baumannii
MNKTLAILSTAILLATATVTEAKQTNISPATHTTAASKLSTVPYEMVKYGDVSIQAYVQGKGPTIVIMSSLGRSVRDYDVVAQDLVKQGFRVIRPEVRGIGLSRGPMEKLHIQDYGNDVAAVIEHFKAGPAIVVGHAWGNFPTRMVATQRPDLVKGVVLAGASAGKVPEGYKGKPIGPEIREAIDNAGNEELPEAKRIEYLKRAFFAPMNDPRVWLTGWHHEAHDAQGYARNNTPVDDYFAAGKAPILDIQPEYDTVAPKPLRGVLKGALGDRVTIVEIKNAGHALVPEQPKALADAIGKFAKQQFAKKS

SEQ ID NO: 187 - DNA, 912 bp, Acinetobacter baumannii
atgaagaaatacttaactgcaattttatcgacatcgttgagcctgatgggttgctcaagtcttgatagagttgaatctaatatggatcaagcaaatttaatttcaaatttctctgttcataaaaagcagatccagcaaggtgatgtttcgatcgagttctatgtacaaggaatgggacctgtcattgtgttacttccttcgttaagtcgtggtgctagggactttgatgttgttgcagattatctcgcaaaatcgggctttaaagttatacgtcctgaacctagaggtattaatggcagtacaggacctttagagaatttaactctgcacgattttgctgctgacgttgctttagttttagatgcggaaaaaacaggttcagtggtcatcgttggtcatgcttgggggagtcagcctgcgcgtatgcttgctgctgacagaccagatctagttcgcggtattgtcatggctgctgcttcggcaggtaagttacctaaagattcaactgaaaagccttatgggcgtttacgagatgtgattgataacgcggggaattataagcttcctcaagaacaacggatcacatatctaaaacaagctttcttcgcacctatgaatgatccacatgtgtggttaaacggttggtatgaaaaaaaccatgctgctgaagcgcatgcacgaattgtgacgccaattgatgaatatttttcaggcggaaaaacggttccaatccttgatttacaaggagagtacgacgccgttgtcgtcaaaaatgtaatgaaagagtatttaccagaacgagttgttgagcaggtcatcaaaaatgcaggtcatgcgatggtgcctgaacaaccagaagcgatggcaaatgcgatagctcaattttccaaacaagtttattcagccaattag

SEQ ID NO: 188 - protein, 303 aa, Acinetobacter baumannii
MKKYLTAILSTSLSLMGCSSLDRVESNMDQANLISNFSVHKKQIQQGDVSIEFYVQGMGPVIVLLPSLSRGARDFDVVADYLAKSGFKVIRPEPRGINGSTGPLENLTLHDFAADVALVLDAEKTGSVVIVGHAWGSQPARMLAADRPDLVRGIVMAAASAGKLPKDSTEKPYGRLRDVIDNAGNYKLPQEQRITYLKQAFFAPMNDPHVWLNGWYEKNHAAEAHARIVTPIDEYFSGGKTVPILDLQGEYDAVVVKNVMKEYLPERVVEQVIKNAGHAMVPEQPEAMANAIAQFSKQVYSAN

SEQ ID NO: 189 - DNA, 774 bp, Acinetobacter baumannii
atgagtttaaaaaaactagtctcaggaatgggcttatcaattgctatggtcgtgccaacgcatgcagcgcaattaaatgttattgcctctggatcttttcatggtgcgatggacacccttattcccatgtatgaaaaattaacggggaatacggttcatattgaatgggggccatctgccggaaaatctcctgaatcattgccaatgcggattaaaaataatgaaaaaatggacttggcgattattttggacgatgcacttaaatcgaatgaattgagtcaaaattttgacttgactagtcgcactgaattggcaaattcaaaaattggtttggctgtgagtaaaggtactaaagtaccgcagttaaaaaatgaagcagacctaaaggcggctttattgtctgctcaaaaagttgcctactctcaaggttcaagtggtgtttatattcgttcaaccttattcaaaaaattgaatattgaacaggaaatgcaagcaaaggggcttgaggttccgggtaaaaaattggtcggagaagtgttagctgatcatcaggctgatgtaggcatgcaacagattagtgagcttaaacatactaaagggattacctttgtcgcacctttacctgaaagtttgcaatacgttagtaaattctcatcagtgatttccaaaaaagctgaacatcctgaaatcgcagctcaatttgtacaatttttaaagtctaaacaagcagcaagtattttgaccaagagcggtttggaaccactgagtcagtga

SEQ ID NO: 190 - protein, 257 aa, Acinetobacter baumannii
MSLKKLVSGMGLSIAMVVPTHAAQLNVIASGSFHGAMDTLIPMYEKLTGNTVHIEWGPSAGKSPESLPMRIKNNEKMDLAIILDDALKSNELSQNFDLTSRTELANSKIGLAVSKGTKVPQLKNEADLKAALLSAQKVAYSQGSSGVYIRSTLFKKLNIEQEMQAKGLEVPGKKLVGEVLADHQADVGMQQISELKHTKGITFVAPLPESLQYVSKFSSVISKKAEHPEIAAQFVQFLKSKQAASILTKSGLEPLSQ

SEQ ID NO: 191 - DNA, 840 bp, Acinetobacter baumannii
atgtcatttaatttgccaaaaggttcatgggattgccattttcatatatatgggccttttgatcgctttccgttgcctgaagatgctgcatatcgccctgaaccagcaacttttaagcagatgcttgatttgcacaaaagtttaggaattgaacacggtgtttttgttcaagccgtcgcctatggttcggataacgccatcatcttggatgcgattgaacaaagtaactttaattatcggggtgttgctttagtagatcacgatattacagatgagcaacttgttgaattaaagcaaggcggtatttgtggtattcgctttaacatgatggggcatttgccgggaagccgtgatccgcaagcattacgtagcttggttgagcgagttgcaaagcttggattgcatattcagatacacggcaaaattgaagatatcttacctgcgattgaagcttggcaagacatagatgtcgatattgtgattgatcacatggcgcgacctaatttgcttgactcgcaagatgcagaaaacactttcaataagttgcaacacgtcatgttgaatccgaagcattggctaaaaatttccggaattgatcgtgcaatgaatggacaacctgccaacacttgggatgcttccctgaattgggttcagaagttaatcaagcttgctccaaaccgagtggtgtggggaaccgattggcctcatccaaatgtaaaaggtgaggttcctcatgatgatgagcttttaaagtttgcattaaaagcactcggtacgcccgaattaatacaagccgtatttgttgataaccctcgaaatttatatttcaaagaaaattaa

SEQ ID NO: 192 - protein, 279 aa, Acinetobacter baumannii
MSFNLPKGSWDCHFHIYGPFDRFPLPEDAAYRPEPATFKQMLDLHKSLGIEHGVFVQAVAYGSDNAIILDAIEQSNFNYRGVALVDHDITDEQLVELKQGGICGIRFNMMGHLPGSRDPQALRSLVERVAKLGLHIQIHGKIEDILPAIEAWQDIDVDIVIDHMARPNLLDSQDAENTFNKLQHVMLNPKHWLKISGIDRAMNGQPANTWDASLNWVQKLIKLAPNRVVWGTDWPHPNVKGEVPHDDELLKFALKALGTPELIQAVFVDNPRNLYFKEN

SEQ ID NO: 193 - DNA, 819 bp, Acinetobacter baumannii
atgtttgatgaaattaatcctcaaggacgtttgcaagacaaagttgcaatcattacgggtgcaggttgtgttggtccggggtggggaaatggtcgcgcagcggcagtactttttgctaaagcaggagcaaaaatttttgctgtagatcgttcgattgatgccatgcaagaaactttaaatcgtattcaaaactttgagggtgaagtgacaccttttgcgtgtgatgtgactgacagcgaatcagttcaaaccatggttgaagcctgtgtagagaaatatggtcgtgtcgatattttagtaaataacgtagggggttctgccgctggtggagctgttgctttatctgaagaagcttggaacaaacagctcgacctaaatttaaaaagtgtgtttttaacttgtaagcacaccattccatatatggagcaacaaggcggtgggtcaattgtaaatacggcttcaacttctggaatccgttttacaggttccccgcaggttgcttatgcggcaagtaaagctgcgattattcaactatcaaaagtcacggccgtcgaatatgcccctaaaggaatacgcgtaaataccgtgctacctggtcaattgcataccccgatggttgaggtccgtttagcaggacaacgcacaggcggtgatgtggatcaattgctcgaaagccgtttaaagcgaattcccgcaggttttatgggagatggccgtgatacagcttttgctgctctgtttcttgcaagtgatgaagcacgttttattaccggaacagaaattgtggtcgatggcggaatgactgcacgttgtgattaa

SEQ ID NO: 194 - protein, 272 aa, Acinetobacter baumannii
MFDEINPQGRLQDKVAIITGAGCVGPGWGNGRAAAVLFAKAGAKIFAVDRSIDAMQETLNRIQNFEGEVTPFACDVTDSESVQTMVEACVEKYGRVDILVNNVGGSAAGGAVALSEEAWNKQLDLNLKSVFLTCKHTIPYMEQQGGGSIVNTASTSGIRFTGSPQVAYAASKAAIIQLSKVTAVEYAPKGIRVNTVLPGQLHTPMVEVRLAGQRTGGDVDQLLESRLKRIPAGFMGDGRDTAFAALFLASDEARFITGTEIVVDGGMTARCD

SEQ ID NO: 195 - DNA, 564 bp, Acinetobacter baumannii
atgcgtttaaaagcgatagacccagaacatttaactgctgaacaacaagttgtatttgatgcaattgcaagcggtccacgtaaaggtgtgcgaggtcctttagcgatctggttgcatcatccgaagttagccaatttggcacaaagtcttggtcaatattgtcgctatgacagttgcttggaaccacgtttgagtgagttagccatcttactgatgggtagacactggctcgctgaatatgaatgggctgctcataaaccatatgcaattgaggctggcctaagtacagacatcattgaagccattcgtttaggtgagcaacctgcatttattcataaggacgaacaattaatttatcagtttatttgtgagcttcacaaaaccaaaagggtttctgatcagacttatcaagaaatagagcaattacttgggacagatacattaatcgatttagtcgcgattgcaggctattacaccctgatttctatgacgattaatgttttcgaagttccaccaccagcaggtgtagctcctgaattaccaactccaaaagcaggaatttaa

SEQ ID NO: 196 - protein, 187 aa, Acinetobacter baumannii
MRLKAIDPEHLTAEQQVVFDAIASGPRKGVRGPLAIWLHHPKLANLAQSLGQYCRYDSCLEPRLSELAILLMGRHWLAEYEWAAHKPYAIEAGLSTDIIEAIRLGEQPAFIHKDEQLIYQFICELHKTKRVSDQTYQEIEQLLGTDTLIDLVAIAGYYTLISMTINVFEVPPPAGVAPELPTPKAGI

SEQ ID NO: 197 - DNA, 1323 bp, Acinetobacter baumannii
atgttaaaaaaactacatgtacaggtaattattgcaattattgctgccattattttgggtttggtctcccccgaatgggcaaaggcaatgaagccattaggtcaagcatttattgctttactcaaaatgcttttggctcctttgatctttcttaccttggttcatggtttaactcatattaaagatatgaaaaagctgggccgtttggggatcaaatcacttatttattttgaagtattaacaaccgtagcaatgctgattggctttgtatttgtcaatgtgttgcagcctggtttgggtttacatgcaaccgacttagccgaacctgatgcggcaaaaggttcagcaacactttcggcggttgatttcttcttaaatatgattccgcatacgatcgtagatgcttttgcgaccggaaacgtattgcaagtattggttgtttcgattttagcgggtatggctatcaatttatgttgtggcccagactctgtcattgttaaaggaattgatgaagcgcaaaccatcttgttcaagatgctgggctttattatgaaacttgctccgctcggtgcatttggcgcgatgtcggctgcaattggtagttatggcggtgaaacactcatttatttaatgaaattaattggtgttttctatgcagcgtgcttcttctttatggtgtttgcccttggtgcagtgacatggattattggtctaccttttctcaccattttaaaagtaattcgtgacgagatacttttggtattcggtacagcatctggtgaagttgcctttccaaaattaattgaaaaactcaaaaaaacgggttgtgacgaggcagttgtcgggttcgtattgcctacaggttatagctttaatttagatggcacagctttatatatggcaattgcggtgggctttattgcacaagcaactgacacacctttgagcttaatcgaccaactggttttattagcaatcttaagctttacctcgaaaggtggaactactgtcgctggtggtgcctttattaagttggcggcgaccttacagtctgtaaaaactttaccactcggtggtttgggactgttgtttggtgttgaccggattatggcaaccatcatggcaattaccaacattattggcaacacacttgcggtctatgcagtcgctcgttgggaaaatgctttcgatgctgatgcctttgaaaaacaaacaggtaagagacctaagcgtagtttgctacgggctaaagattctttggtagagacgccgttagcctctgattcaaatcactcaagtcaagttttagataaatctcattaa

SEQ ID NO: 198 - protein, 440 aa, Acinetobacter baumannii
MLKKLHVQVIIAIIAAIILGLVSPEWAKAMKPLGQAFIALLKMLLAPLIFLTLVHGLTHIKDMKKLGRLGIKSLIYFEVLTTVAMLIGFVFVNVLQPGLGLHATDLAEPDAAKGSATLSAVDFFLNMIPHTIVDAFATGNVLQVLVVSILAGMAINLCCGPDSVIVKGIDEAQTILFKMLGFIMKLAPLGAFGAMSAAIGSYGGETLIYLMKLIGVFYAACFFFMVFALGAVTWIIGLPFLTILKVIRDEILLVFGTASGEVAFPKLIEKLKKTGCDEAVVGFVLPTGYSFNLDGTALYMAIAVGFIAQATDTPLSLIDQLVLLAILSFTSKGGTTVAGGAFIKLAATLQSVKTLPLGGLGLLFGVDRIMATIMAITNIIGNTLAVYAVARWENAFDADAFEKQTGKRPKRSLLRAKDSLVETPLASDSNHSSQVLDKSH

SEQ ID NO: 199 - DNA, 912 bp, Acinetobacter baumannii
atgaatgatattaatatcgcacaaatcgacttaaaccttttaaagtgctttgaagtcttatatgaagagcaaaatgcttcacgtgcagcggaacgtttaggaattactcagtctgcggtcagtgcatctttacgacgtcttagggatatttatcaagatccactttttcagcggactggtcgaggccttgctcccaccactaaagcgcatgctttaaaaccattagtcagcaatgctttaagtatttttagggaaacattgttgtcactacccaataatgacaataacttacagcaaagaattatcacgattggtatgtcagatgattttgaaattgcatttgcacaagaaattatcgaacaggttaaattaaaatttccccactacagaatcgtaattaaacagacctatacacatatcattgctgaaatgctggtaaagcataatgttgatattggagtaacctctggcggaatctattaccattctttgtaccgagaattaatggttttaggtgattattcttgtttggtgactcatcccgaagatgcggttgaactaaccttagataagtttttaagttttgaacatttactaatttcaaatacgggtcaaatcgggattgttgacgaacatttaacgaaattaaataaaaccagacggatttttgcctctacttctcactttgctgctattccatggttattaaaaagaaaaggaacggtttgcacccttcccacccacgctgcaagaaagatctctgaaattgtacctgccctgatttatacaaaatgtccaatttcgataccgacctatccaatggtactttcatgtcgaaaaacatcgctaaaagacaaagcgattttggatgtacaagaagtcattaggtcaattattaatagttataaatag

SEQ ID NO: 200 - protein, 303 aa, Acinetobacter baumannii
MNDINIAQIDLNLLKCFEVLYEEQNASRAAERLGITQSAVSASLRRLRDIYQDPLFQRTGRGLAPTTKAHALKPLVSNALSIFRETLLSLPNNDNNLQQRIITIGMSDDFEIAFAQEIIEQVKLKFPHYRIVIKQTYTHIIAEMLVKHNVDIGVTSGGIYYHSLYRELMVLGDYSCLVTHPEDAVELTLDKFLSFEHLLISNTGQIGIVDEHLTKLNKTRRIFASTSHFAAIPWLLKRKGTVCTLPTHAARKISEIVPALIYTKCPISIPTYPMVLSCRKTSLKDKAILDVQEVIRSIINSYK

SEQ ID NO: 201 - DNA, 147 bp, Acinetobacter baumannii
atgtttaattggggaagccatataaattataattttcttaataatagtcaatatggtagttactataaaggtaatatgggatatgaccccgaattgtggacttctgggggattgtatcttgaaatatctaagcctgctcctaaataa

SEQ ID NO: 202 - protein, 48 aa, Acinetobacter baumannii
MFNWGSHINYNFLNNSQYGSYYKGNMGYDPELWTSGGLYLEISKPAPK

SEQ ID NO: 203 - DNA, 1167 bp, Acinetobacter baumannii
atgaaaattattactcatgatctgcttaccatttcaaatctctttatagattgtttatatcaaggggcacgaaatggtaatgcatcggatgatcctctacatcttttattacctgtcagtaatcaaggcggctttcgcatagttggtaaaaaaacagaacctaagttagtcgtccttacgacaagtatgaatgacccagattggcccgatgaggttgataaagaaacgggtatttttacttattttggagacaacaagaaacctggtcatgagcttcacgatacaccacgatatgggaatcttttattaaaaaatatgtttgcactagctcatggtagacttgaggatcgtttaaaagttccacctatattaatttttgccaaaggtggtggttggcgtgatgtagtttttataggtctagctgtgccaggtgctccacacctagactctaacaatgatttagttgctgtctggaaactacgtaatggtaatagatttcaaaattatcgtgctcaatttactatattaaatgaatctatggttagtagagagtggatttctgacattgtaaaaggtgatcctttaagctcagcatgcccttcaagttggaaaacatgggttgagcaagggctatatctacccttaaaagcccctagagcacttgaatatcgaacacgtgatgaacagttacctgaaacccaattaggtcaaattctgattaaaagaatacattctttttttaaagaagatccatataattttgagagatgtgcagggaaaatagctgaaatgatgttaccagctattgctggtaatatggactttacacgtcaatctcgagatggtggtagagatgcaattggttattatcgaattggagaaggtgcttccgcggttcttgtggaatttgcacttgaagctaaatgttacgctttggaatcatctgtgggagtaaaagagatttctaggctaatttcacgccttagatatcgtcagtttggtattttggtgaccacttcttttgtggcagctcaggcttataaagaaatcatggaagatcaacatccaatagttattatatgtgcctctgatattattaaattattaattaggcatggtattaatgacttagaaactcttgatagatggttgaaaagatttaagtaa

SEQ ID NO: 204 - protein, 388 aa, Acinetobacter baumannii
MKIITHDLLTISNLFIDCLYQGARNGNASDDPLHLLLPVSNQGGFRIVGKKTEPKLVVLTTSMNDPDWPDEVDKETGIFTYFGDNKKPGHELHDTPRYGNLLLKNMFALAHGRLEDRLKVPPILIFAKGGGWRDVVFIGLAVPGAPHLDSNNDLVAVWKLRNGNRFQNYRAQFTILNESMVSREWISDIVKGDPLSSACPSSWKTWVEQGLYLPLKAPRALEYRTRDEQLPETQLGQILIKRIHSFFKEDPYNFERCAGKIAEMMLPAIAGNMDFTRQSRDGGRDAIGYYRIGEGASAVLVEFALEAKCYALESSVGVKEISRLISRLRYRQFGILVTTSFVAAQAYKEIMEDQHPIVIICASDIIKLLIRHGINDLETLDRWLKRFK

SEQ ID NO: 205 - DNA, 489 bp, Acinetobacter baumannii
gtgttgaataatatgactttctttatagatgattttattgaagtaactgaaaaaaataatattcatttttatacactatcacaagaagaaagcaggcatatttttaggagactatttgataagtttttttcaaataaattatctatggaaaaacctcttgaaattcctctttggcaattcttaaataaagaaaattcaataggagtacatttgccgaatgctgctggacatagagaactatttctaaatcaattaccgaatataaaaaatgtatatttcttatttgatttagagttttctaataaaatattaaagttcaaattcttaagtgatttggtaattgttttagaagattcatataactttaatttctatatatttgatgagtcatttaattttttattgtcatggaataaagatgaaacattatttggttcgggtgatgcaaaagaatttgtattaaagattaaggaatcatggaatctatga

SEQ ID NO: 206 - protein, 162 aa, Acinetobacter baumannii
MLNNMTFFIDDFIEVTEKNNIHFYTLSQEESRHIFRRLFDKFFSNKLSMEKPLEIPLWQFLNKENSIGVHLPNAAGHRELFLNQLPNIKNVYFLFDLEFSNKILKFKFLSDLVIVLEDSYNFNFYIFDESFNFLLSWNKDETLFGSGDAKEFVLKIKESWNL

SEQ ID NO: 207 - DNA, 633 bp, Acinetobacter baumannii
atgttacgcagcagcaacgatgttacgcagcagggcagtcgccctaaaacaaagttaggcatcacaaagtacagcatcgtgaccaacagcaacgattccgtcacactgcgcctcatgactgagcatgaccttgcgatgctctatgagtggctaaatcgatctcatatcgtcgagtggtggggcggagaagaagcacgcccgacacttgctgacgtacaggaacagtacttgccaagcgttttagcgcaagagtccgtcactccatacattgcaatgctgaatggagagccgattgggtatgcccagtcgtacgttgctcttggaagcggggacggatggtgggaagaagaaaccgatccaggagtacgcggaatagaccagtcactggcgaatgcatcacaactgggcaaaggcttgggaaccaagctggttcgagctctggttgagttgctgttcaatgatcccgaggtcaccaagatccaaacggacccgtcgccgagcaacttgcgagcgatccgatgctacgagaaagcggggtttgagaggcaaggtaccgtaaccaccccagatggtccagccgtgtacatggttcaaacacgccaggcattcgagcgaacacgcagtgttgcctaa

SEQ ID NO: 208 - protein, 210 aa, Acinetobacter baumannii
MLRSSNDVTQQGSRPKTKLGITKYSIVTNSNDSVTLRLMTEHDLAMLYEWLNRSHIVEWWGGEEARPTLADVQEQYLPSVLAQESVTPYIAMLNGEPIGYAQSYVALGSGDGWWEEETDPGVRGIDQSLANASQLGKGLGTKLVRALVELLFNDPEVTKIQTDPSPSNLRAIRCYEKAGFERQGTVTTPDGPAVYMVQTRQAFERTRSVA

SEQ ID NO: 209 - DNA, 780 bp, Escherichia coli
gtgatcgccgaagtatcgactcaactatcagaggtagttggcgtcatcgagcgccatctcgaaccgacgttgctggccgtacatttgtacggctccgcagtggatggcggcctgaagccacacagtgatattgatttgctggttacggtgaccgtaaggcttgatgaaacaacgcggcgagctttgatcaacgaccttttggaaacttcggcttcccctggagagagcgagattctccgcgctgtagaagtcaccattgttgtgcacgacgacatcattccgtggcgttatccagctaagcgcgaactgcaatttggagaatggcagcgcaatgacattcttgcaggtatcttcgagccagccacgatcgacattgatctggctatcttgctgacaaaagcaagagaacatagcgttgccttggtaggtccagcggcggaggaactctttgatccggttcctgaacaggatctatttgaggcgctaaatgaaaccttaacgctatggaactcgccgcccgactgggctggcgatgagcgaaatgtagtgcttacgttgtcccgcatttggtacagcgcagtaaccggcaaaatcgcgccgaaggatgtcgctgccgactgggcaatggagcgcctgccggcccagtatcagcccgtcatacttgaagctagacaggcttatcttggacaagaagaagatcgcttggcctcccgcgcagatcagttggaagaatttgttcactacgtgaaaggcgagatcaccaaggtagtcggcaaataa

SEQ ID NO: 210 - protein, 259 aa, Escherichia coli
MIAEVSTQLSEVVGVIERHLEPTLLAVHLYGSAVDGGLKPHSDIDLLVTVTVRLDETTRRALINDLLETSASPGESEILRAVEVTIVVHDDIIPWRYPAKRELQFGEWQRNDILAGIFEPATIDIDLAILLTKAREHSVALVGPAAEELFDPVPEQDLFEALNETLTLWNSPPDWAGDERNVVLTLSRIWYSAVTGKIAPKDVAADWAMERLPAQYQPVILEARQAYLGQEEDRLASRADQLEEFVHYVKGEITKVVGK

SEQ ID NO: 211 - DNA, 348 bp, Acinetobacter baumannii
atgaaaggctggctttttcttgttatcgcaatagttggcgaagtaatcgcaacatccgcattaaaatctagcgagggctttactaagcttgccccttccgccgttgtcataatcggttatggcatcgcattttattttctttctctggttctgaaatccatccctgtcggtgttgcttatgcagtctggtcgggactcggcgtcgtcataattacagccattgcctggttgcttcatgggcaaaagcttgatgcgtggggctttgtaggtatggggctcataattgctgcctttttgctcgcccgatccccatcgtggaagtcgctgcggaggccgacgccatggtga

SEQ ID NO: 212 - protein, 115 aa, Acinetobacter baumannii
MKGWLFLVIAIVGEVIATSALKSSEGFTKLAPSAVVIIGYGIAFYFLSLVLKSIPVGVAYAVWSGLGVVIITAIAWLLHGQKLDAWGFVGMGLIIAAFLLARSPSWKSLRRPTPW

SEQ ID NO: 213 - DNA, 840 bp, Acinetobacter baumannii
atggtgacggtgttcggcattctgaatctcaccgaggactccttcttcgatgagagccggcggctagaccccgccggcgctgtcaccgcggcgatcgaaatgctgcgagtcggatcagacgtcgtggatgtcggaccggccgccagccatccggacgcgaggcctgtatcgccggccgatgagatcagacgtattgcgccgctcttagacgccctgtccgatcagatgcaccgtgtttcaatcgacagcttccaaccggaaacccagcgctatgcgctcaagcgcggcgtgggctacctgaacgatatccaaggatttcctgaccctgcgctctatcccgatattgctgaggcggactgcaggctggtggttatgcactcagcgcagcgggatggcatcgccacccgcaccggtcaccttcgacccgaagacgcgctcgacgagattgtgcggttcttcgaggcgcgggtttccgccttgcgacggagcggggtcgctgccgaccggctcatcctcgatccggggatgggatttttcttgagccccgcaccggaaacatcgctgcacgtgctgtcgaaccttcaaaagctgaagtcggcgttggggcttccgctattggtctcggtgtcgcggaaatccttcttgggcgccaccgttggccttcctgtaaaggatctgggtccagcgagccttgcggcggaacttcacgcgatcggcaatggcgctgactacgtccgcacccacgcgcctggagatctgcgaagcgcaatcaccttctcggaaaccctcgcgaaatttcgcagtcgcgacgccagagaccgagggttagatcatgcctag

SEQ ID NO: 214 - protein, 279 aa, Acinetobacter baumannii
MVTVFGILNLTEDSFFDESRRLDPAGAVTAAIEMLRVGSDVVDVGPAASHPDARPVSPADEIRRIAPLLDALSDQMHRVSIDSFQPETQRYALKRGVGYLNDIQGFPDPALYPDIAEADCRLVVMHSAQRDGIATRTGHLRPEDALDEIVRFFEARVSALRRSGVAADRLILDPGMGFFLSPAPETSLHVLSNLQKLKSALGLPLLVSVSRKSFLGATVGLPVKDLGPASLAAELHAIGNGADYVRTHAPGDLRSAITFSETLAKFRSRDARDRGLDHA

SEQ ID NO: 215 - DNA, 774 bp, Acinetobacter baumannii
atggataagaatgatgttgttaagaagatacttgaatcaaaaaagtacgaaaaccttgattcagatattgttgaaaaggttgtttccatttctgagaagaaatataaattaaaggaagttgagaattattctaaaaagaaattgcatcaaatatgggggtcttactattctgcctatcctaattgggataaattattaaaaaagtacaatcaggggcagttatcaatagaagatttactaaagattcattcttcgacgaatgaaagagtcgcaacattaaatgacttttacacttatgtatttggaaatatcaaacatgtctcatctattttagattttggttgtggcttcaatccattagctttataccaatggaatgaaaatgaaaaaataatatatcatgcatacgatattgatagagctgagatagcttttttgagtagcattattgggaagttaaagacgacgataaagtataggtttttgaataaagagagtgatgtctacaaaggtacttatgatgtagtattccttttaaagatgcttcctgtgctaaaacagcaagatgtaaatatcttggatttcctacagctttttcatactcaaaactttgtaatatcttttccaataaagtctttatctggaaaggagaagggaatggaagagaattaccagctatggtttgaatcttttacaaaaggttggataaaaatccttgattcgaaggttatagggaatgagttagtatatattactagtggatttcagaaataa

SEQ ID NO: 216 - protein, 257 aa, Acinetobacter baumannii
MDKNDVVKKILESKKYENLDSDIVEKVVSISEKKYKLKEVENYSKKKLHQIWGSYYSAYPNWDKLLKKYNQGQLSIEDLLKIHSSTNERVATLNDFYTYVFGNIKHVSSILDFGCGFNPLALYQWNENEKIIYHAYDIDRAEIAFLSSIIGKLKTTIKYRFLNKESDVYKGTYDVVFLLKMLPVLKQQDVNILDFLQLFHTQNFVISFPIKSLSGKEKGMEENYQLWFESFTKGWIKILDSKVIGNELVYITSGFQK

SEQ ID NO: 217 - DNA, 186 bp, Acinetobacter baumannii
atgttccccaatcaactaacattttattttaactacagaatttctggggatacctcaggtggtttgcaactctttggtttaattggtttgatttatgggccaattatttttgcgttaaccatggtgctgttacggctttatactattgagtttaaagattttctggaacgccaagacaatagctaa

SEQ ID NO: 218 - protein, 61 aa, Acinetobacter baumannii
MFPNQLTFYFNYRISGDTSGGLQLFGLIGLIYGPIIFALTMVLLRLYTIEFKDFLERQDNS

SEQ ID NO: 219 - DNA, 1476 bp, Acinetobacter baumannii
atgagtttaattattaaagcgagaaacatacgcttggattatgctgggcgtgatgttttggatattgatgaattggaaattcactcttatgaccgtattggtcttgtgggtgataacggagcaggaaagagtagtttactcaaagtacttaatggcgaaattgttttagccgaagcgacattacagcgttttggtgattttgcacatatcagccaactgggcggaatcgaaatagaaacggtcgaagaccgggcaatgttatctcgccttggtgtttccaatgtacaaaacgacacaatgagtggcggagaggaaactcgtgcaaaaattgctgccgcattttcccaacaagtacatggcattctagcggatgaaccaaccagccaccttgatctcaatggaatagatctacttattggtcaacttaaagcatttgatggagcattacttgttatcagtcatgaccgatattttcttgatatggttgtagacaagatatgggagttaaaagacggtaaaattacggaatattggggtggttactcggattacttgcgtcaaaaagaagaagagcgacaacaccaagccgtagaatatgagctgatgatgaaggaacgggagcgattagaatctgctgtgcaagaaaaacgccagcaagctaatcgattagacaataagaaaaaaggagaaaaatccaaaaactctaccgaaagtgctggacgacttgggcatgcaaaaatgactggcaccaagcaaagaaaactgtatcaggcagctaagagtatggaaaagcgtttggctgcattagaagatattcaagcaccagagcatttgcgttctattcgttttcgtcaaagttcagccctagaactgcacaataagttcccgattacggcagatggtctgagcttaaaatttggtagccgtactatctttgatgacgctaactttataataccgcttggcgctaaagtcgctataactggatcgaatggaacagggaaaacgtccttgttaaaaatgatatcagaacgtgctgatggattaaccatatctccaaaagctgaaattggctactttacacaaacaggatataaatttaacacgcataaatctgtgctctcctttatgcaggaagagtgcgagtacacagttgcggaaattcgtgcagtattggcttcaatggggatcggagcgaatgatattcaaaaaaacttatccgacttatcgggaggtgaaatcatcaaactgcttttatccaaaatgcttttaggaaaatataatattttgcttatggatgaaccaggaaactatcttgacctaaaaagtattgccgcattagaaacaatgatgaagtcctatgcaggaactattatcttcgtatctcatgacaagcaattggtcgataatattgctgacattatctacgagatcaaagaccacaaaatcatcaagacttttgagagagattgttaa

SEQ ID NO: 220 - protein, 491 aa, Acinetobacter baumannii
MSLIIKARNIRLDYAGRDVLDIDELEIHSYDRIGLVGDNGAGKSSLLKVLNGEIVLAEATLQRFGDFAHISQLGGIEIETVEDRAMLSRLGVSNVQNDTMSGGEETRAKIAAAFSQQVHGILADEPTSHLDLNGIDLLIGQLKAFDGALLVISHDRYFLDMVVDKIWELKDGKITEYWGGYSDYLRQKEEERQHQAVEYELMMKERERLESAVQEKRQQANRLDNKKKGEKSKNSTESAGRLGHAKMTGTKQRKLYQAAKSMEKRLAALEDIQAPEHLRSIRFRQSSALELHNKFPITADGLSLKFGSRTIFDDANFIIPLGAKVAITGSNGTGKTSLLKMISERADGLTISPKAEIGYFTQTGYKFNTHKSVLSFMQEECEYTVAEIRAVLASMGIGANDIQKNLSDLSGGEIIKLLLSKMLLGKYNILLMDEPGNYLDLKSIAALETMMKSYAGTIIFVSHDKQLVDNIADIIYEIKDHKIIKTFERDC

SEQ ID NO: 221 - DNA, 885 bp, Acinetobacter baumannii
atgacaattcaagatattcaatcacttgctgaagcacacggcttgttgcttacggacaaaatgaatttcaatgaaatgggcattgattttaaggtcgtttttgctcttgatacaaaggggcaacaatggttgctgcgtattcctcgtcgtgatggcatgagggaacaaatcaagaaagaaaaacgcattttagaattggtaaaaaaacatctttctgtagaggttcctgattggagaatttcatctacagaattagtggcttatcccatacttaaagataatcctgttttaaatttggatgctgaaacctatgaaataatttggaatatggacaaagatagcccgaaatacataacatctttggcaaaaaccttatttgaaatccatagtattcctgaaaaagaagttcgggaaaatgatttgaaaattatgaaaccttcagatttaagacctgaaatagcaaacaatttgcagttagtaaaatctgaaattggtataagtgagcaattggaaacccgctacagaaaatggttggataatgatgttctatgggcagatttcacccaatttatacatggcgatttatatgctgggcatgtactagcttcaaaggatggagctgtttcaggcgttattgattggtcaacagcccatatagatgacccagcgattgattttgctgggcatgtaactttgtttggagaagaaagcctcaaaactctaatcatcgagtatgaaaaactagggggtaaagtttggaataaactatatgaacagactttagaaagagcagcggcctctcctttgatgtatggtttatttgccttagaaactcaaaatgaaagccttatcgttggagcaaaagctcagttgggagttatataa

SEQ ID NO: 222 - protein, 294 aa, Acinetobacter baumannii
MTIQDIQSLAEAHGLLLTDKMNFNEMGIDFKVVFALDTKGQQWLLRIPRRDGMREQIKKEKRILELVKKHLSVEVPDWRISSTELVAYPILKDNPVLNLDAETYEIIWNMDKDSPKYITSLAKTLFEIHSIPEKEVRENDLKIMKPSDLRPEIANNLQLVKSEIGISEQLETRYRKWLDNDVLWADFTQFIHGDLYAGHVLASKDGAVSGVIDWSTAHIDDPAIDFAGHVTLFGEESLKTLIIEYEKLGGKVWNKLYEQTLERAAASPLMYGLFALETQNESLIVGAKAQLGVI

SEQ ID NO: 223 - DNA, 357 bp, Acinetobacter baumannii
atgaaaatgtttcttgatgtgccccaggtctatttgcataaacagccggtcgactttcgtaaatctattaatggtttatcgttgctagttgagcaagagatgcagctctcgccttttagtggcgcactgtttgtattttgcaatcagcagcgtacccggttaaaagtactgtactgggatagcacaggcttttgcttgtggtacaagcggcttgaaaaagacaagttccgctggccaaggcagatgcctggcaaaatcctgtctattagcgaacaacagtggcattggctgttgcaaggtgtcgatattcaaaaaatcaccgcccatcagccactgcattaccagagtgtgggctga

SEQ ID NO: 224 - protein, 118 aa, Acinetobacter baumannii
MKMFLDVPQVYLHKQPVDFRKSINGLSLLVEQEMQLSPFSGALFVFCNQQRTRLKVLYWDSTGFCLWYKRLEKDKFRWPRQMPGKILSISEQQWHWLLQGVDIQKITAHQPLHYQSVG

SEQ ID NO: 225 - DNA, 285 bp, Acinetobacter baumannii
atgcaccgcaccaaagaacaatggttcgctttattcgccgagcaagcccaaagtggcctcacccaaactgaatttgcaaaacgtcagggcatcattcctacatattttagttatcgcaagagacaattgttggcgtttcaggatgatgacggtggctttattgagctgacgccacagggcttgcagctgaataaatccattttactacgtaagcgtgatgtggaattgcagtttccagccggcactgatgtgctgtggttagcggccttgctcagagcgctctga

SEQ ID NO: 226 - protein, 94 aa, Acinetobacter baumannii
MHRTKEQWFALFAEQAQSGLTQTEFAKRQGIIPTYFSYRKRQLLAFQDDDGGFIELTPQGLQLNKSILLRKRDVELQFPAGTDVLWLAALLRAL

SEQ ID NO: 227 - DNA, 300 bp, Acinetobacter baumannii
gtggaacttacgcaaattaaagtaacaatagatcgagaatatgatctcttcgtaaattcgcacgaatttaagacgtatcagcacgataaagaaaagcaagctagatttttaggccatgcattaacaacattgaaatacccttatacgaacatcattactttaggtggtggtcgatataaagttgttggtcatcatgatttaaatgttgatatcgatctattccaagctccatctttcgtatcaaagcaagcatttaatacttggtttgctaatatcctatctcaacatttatattcttaa

SEQ ID NO: 228 - protein, 99 aa, Acinetobacter baumannii
MELTQIKVTIDREYDLFVNSHEFKTYQHDKEKQARFLGHALTTLKYPYTNIITLGGGRYKVVGHHDLNVDIDLFQAPSFVSKQAFNTWFANILSQHLYS

SEQ ID NO: 229 - DNA, 864 bp, Morganella morganii
atgagttatctatttttgtcgtgtacagagattattatagaagcccccatgaataaatcgctcatcattttcggcatcgtcaacataacctcggacagtttctccgatggaggccggtatctggcgccagacgcagccattgcgcaggcgcgtaagctgatggccgagggggcagatgtgatcgacctcggtccggcatccagcaatcccgacgccgcgcctgtttcgtccgacacagaaatcgcgcgtatcgcgccggtgctggacgcgctcaaggcagatggcattcccgtctcgctcgacagttatcaacccgcgacgcaagcctatgccttgtcgcgtggtgtggcctatctcaatgatattcgcggttttccagacgctgcgttctatccgcaattggcgaaatcatctgccaaactcgtcgttatgcattcggtgcaagacgggcaggcagatcggcgcgaggcacccgctggcgacatcatggatcacattgcggcgttctttgacgcgcgcatcgcggcgctgacgggtgccggtatcaaacgcaaccgccttgtccttgatcccggcatggggttttttctgggggctgctcccgaaacctcgctctcggtgctggcgcggttcgatgaattgcggctgcgcttcgatttgccggtgcttctgtctgtttcgcgcaaatcctttctgcgcgcgctcacaggccgtggtccgggggatgtcggggccgcgacactcgctgcagagcttgccgccgccgcaggtggagctgacttcatccgcacacacgagccgcgccccttgcgcgacgggctggcggtattggcggcgctgaaagaaaccgcaagaattcgttaa

SEQ ID NO: 230 - protein, 287 aa, Morganella morganii
MSYLFLSCTEIIIEAPMNKSLIIFGIVNITSDSFSDGGRYLAPDAAIAQARKLMAEGADVIDLGPASSNPDAAPVSSDTEIARIAPVLDALKADGIPVSLDSYQPATQAYALSRGVAYLNDIRGFPDAAFYPQLAKSSAKLVVMHSVQDGQADRREAPAGDIMDHIAAFFDARIAALTGAGIKRNRLVLDPGMGFFLGAAPETSLSVLARFDELRLRFDLPVLLSVSRKSFLRALTGRGPGDVGAATLAAELAAAAGGADFIRTHEPRPLRDGLAVLAALKETARIR

SEQ ID NO: 231 - DNA, 303 bp, Acinetobacter baumannii
atggtgcgcaaatatttcggcacagacggtattcgtggcaaagccaacgaaggcgcgatgacggcggaaaccgccttgcgcgtcggcatggcggctggccgtgtctttcgtcgcggtgaccaccgccatcgtgtcgtgatcggcaaggatacgcgcctgtcgggctatatgcttgaacccgcgctcacagccggtttcacctcgatgggcatggacgtattcctttttggcccgctgccgacaacgtataggaagaataaacgcccttttcacccaagtccaacagctttggaccgcagttga

SEQ ID NO: 232 - protein, 100 aa, Acinetobacter baumannii
MVRKYFGTDGIRGKANEGAMTAETALRVGMAAGRVFRRGDHRHRVVIGKDTRLSGYMLEPALTAGFTSMGMDVFLFGPLPTTYRKNKRPFHPSPTALDRS

SEQ ID NO: 233 - DNA, 219 bp, Acinetobacter baumannii
atgaataaatctaaatttagctatgctgttgacttcaataatgaaattgttggaactttatctgctaaagaatacttcagtattgtaaagaaggcttatacggatttagtttttttaaaaaaacatgtttggccattagtgatgcactttctgaatgcatttagtaaatgccttgttccttttaaaagggttaaagaaatacaaattttagtgagctga

SEQ ID NO: 234 - protein, 72 aa, Acinetobacter baumannii
MNKSKFSYAVDFNNEIVGTLSAKEYFSIVKKAYTDLVFLKKHVWPLVMHFLNAFSKCLVPFKRVKEIQILVS

SEQ ID NO: 235 - DNA, 822 bp, Acinetobacter baumannii
atgaataaatattttacttgctatgtggttgcttctctttttctttctggttgtacggttcagcataatttaataaatgaaaccccgagtcagattgttcaaggacataatcaggtgattcatcaatactttgatgaaaaaaacacctcaggtgtgctggttattcaaacagataaaaaaattaatctatatggtaatgctctaagccgcgcaaatacagaatatgtgccagcctctacatttaaaatgttgaatgccctgatcggattggagaaccagaaaacggatattaatgaaatatttaaatggaagggcgagaaaaggtcatttaccgcttgggaaaaagacatgacactaggagaagccatgaagctttctgcagtcccagtctatcaggaacttgcgcgacgtatcggtcttgatctcatgcaaaaagaagtaaaacgtattggtttcggtaatgctgaaattggacagcaggttgataatttctggttggtaggaccattaaaggttacgcctattcaagaggtagagtttgtttcccaattagcacatacacagcttccatttagtgaaaaagtgcaggctaatgtaaaaaatatgcttcttttagaagagagtaatggctacaaaatttttggaaagactggttgggcaatggatataaaaccacaagtgggctggttgaccggctgggttgagcagccagatggaaaaattgtcgcttttgcattaaatatggaaatgcggtcagaaatgccggcatctatacgtaatgaattattgatgaaatcattaaaacagctgaatattatttaa

SEQ ID NO: 236 - protein, 273 aa, Acinetobacter baumannii
MNKYFTCYVVASLFLSGCTVQHNLINETPSQIVQGHNQVIHQYFDEKNTSGVLVIQTDKKINLYGNALSRANTEYVPASTFKMLNALIGLENQKTDINEIFKWKGEKRSFTAWEKDMTLGEAMKLSAVPVYQELARRIGLDLMQKEVKRIGFGNAEIGQQVDNFWLVGPLKVTPIQEVEFVSQLAHTQLPFSEKVQANVKNMLLLEESNGYKIFGKTGWAMDIKPQVGWLTGWVEQPDGKIVAFALNMEMRSEMPASIRNELLMKSLKQLNII

SEQ ID NO: 237 - DNA, 465 bp, Acinetobacter baumannii
atgggcatcattcgcacatgtaggctcggccctgaccaagtcaaatccatgagggctgctcttgatcttttcggtcgtgagttcggagacgtagccacctactcccaacatcagccggactccgattacctcgggaacttgctccgtagtaagacattcatcgcgcttgctgccttcgaccaagaagcggttgttggcgctctcgcggcttacgttctgccaaagtttgagcaggcgcgtagtgagatctatatctatgatctcgcagtctccggcgagcaccggaggcaaggcattgccaccgcgctcatcaatctcctcaagcatgaggccaacgcgcttggtgcttatgtgatctacgtgcaagcagattacggtgacgatcccgcagtggctctctatacaaagttgggcatacgggaagaagtgatgcactttgatatcgacccaagtaccgccacctaa

SEQ ID NO: 238 - protein, 154 aa, Acinetobacter baumannii
MGIIRTCRLGPDQVKSMRAALDLFGREFGDVATYSQHQPDSDYLGNLLRSKTFIALAAFDQEAVVGALAAYVLPKFEQARSEIYIYDLAVSGEHRRQGIATALINLLKHEANALGAYVIYVQADYGDDPAVALYTKLGIREEVMHFDIDPSTAT

SEQ ID NO: 239 - DNA, 660 bp, Acinetobacter baumannii
ttgatatcgacccaagtaccgccacctaacaattcgttcaagccgagatcgcttcgcggccgcggagttgttcggaaaaattgtcacaacgccgcggccgcaaagcgctccggcttaactcaggcgttgggcaacaagaaaaccgatatgaacgtacgcacttgcactgaatctgacgtcgcctctatcgcagtcgtatttactgagtctattcatgtacttggagcgtctcactatgacgcttcgcaaaggaatgcgtgggcaccgcgtcccgcagatatagaggcttggtcagctcgcttatctggcctacagactcttctagcaattgagggagatgcggttatcgggttcatctcttacgagcttagcggccacatcgagtttctttacaccgcaccgggttccgagcgtcggggcgtcgcgtctgttctgtaccgtgaggttgagaaagccctcccaggtgtttcgctcttcacagaagccagtctggtcgccaagccctttttcctgcggcatggtttcagtgtagttgaggagcaaaatgtctcccgtggaggcgtcatgttccgtaggtatgcaatgcgcaaggcagttgtcgcccaacatggcgctcaagccgaccggccagccctgcgggctgtccgtcggcttagctag

SEQ ID NO: 240 - protein, 219 aa, Acinetobacter baumannii
MISTQVPPPNNSFKPRSLRGRGVVRKNCHNAAAAKRSGLTQALGNKKTDMNVRTCTESDVASIAVVFTESIHVLGASHYDASQRNAWAPRPADIEAWSARLSGLQTLLAIEGDAVIGFISYELSGHIEFLYTAPGSERRGVASVLYREVEKALPGVSLFTEASLVAKPFFLRHGFSVVEEQNVSRGGVMFRRYAMRKAVVAQHGAQADRPALRAVRRLS

SEQ ID NO: 241 - DNA, 534 bp, Acinetobacter baumannii
atggacacaacgcaggtcacattgatacacaaaattctagctgcggcagatgagcgaaatctgccgctctggatcggtgggggctgggcgatcgatgcacggctagggcgtgtaacacgcaagcacgatgatattgatctgacgtttcccggcgagaggcgcggcgagctcgaggcaatagttgaaatgctcggcgggcgcgtcatggaggagttggactatggattcttagcggagatcggggatgagttacttgactgcgaacctgcttggtgggcagacgaagcgtatgaaatcgcggaggctccgcagggctcgtgcccagaggcggctgagggcgtcatcgccgggcggccagtccgttgtaacagctgggaggcgatcatctgggattacttttactatgccgatgaagtaccaccagtggactggcctacaaagcacatagagtcctacaggctcgcatgcacctcactcggggcggaaaaggttgaggtcttgcgtgccgctttcaggtcgcgatatgcggcctaa

SEQ ID NO: 242 - protein, 177 aa, Acinetobacter baumannii
MDTTQVTLIHKILAAADERNLPLWIGGGWAIDARLGRVTRKHDDIDLTFPGERRGELEAIVEMLGGRVMEELDYGFLAEIGDELLDCEPAWWADEAYEIAEAPQGSCPEAAEGVIAGRPVRCNSWEAIIWDYFYYADEVPPVDWPTKHIESYRLACTSLGAEKVEVLRAAFRSRYAA

SEQ ID NO: 243 - DNA, 1014 bp, Acinetobacter baumannii
atgaaaaccgccactgcgccgttaccaccgctgcgttcggtcaaggttctggaccagttgcgtgagcgcatacgctacttgcattacagtttacgaaccgaacaggcttatgtcaactgggttcgtgccttcatccgtttccacggtgtgcgtcacccggcaaccttgggcagcagcgaagtcgaggcatttctgtcctggctggcgaacgagcgcaaggtttcggtctccacgcatcgtcaggcattggcggccttgctgttcttctacggcaaggtgctgtgcacggatctgccctggcttcaggagatcggaagacctcggccgtcgcggcgcttgccggtggtgctgaccccggatgaagtggttcgcatcctcggttttctggaaggcgagcatcgtttgttcgcccagcttctgtatggaacgggcatgcggatcagtgagggtttgcaactgcgggtcaaggatctggatttcgatcacggcacgatcatcgtgcgggagggcaagggctccaaggatcgggccttgatgttacccgagagcttggcacccagcctgcgcgagcagctgtcgcgtgcacgggcatggtggctgaaggaccaggccgagggccgcagcggcgttgcgcttcccgacgcccttgagcggaagtatccgcgcgccgggcattcctggccgtggttctgggtttttgcgcagcacacgcattcgaccgatccacggagcggtgtcgtgcgtcgccatcacatgtatgaccagacctttcagcgcgccttcaaacgtgccgtagaacaagcaggcatcacgaagcccgccacaccgcacaccctccgccactcgttcgcgacggccttgctccgcagcggttacgacattcgaaccgtgcaggatctgctcggccattccgacgtctctacgacgatgatttacacgcatgtgctgaaagttggcggtgccggagtgcgctcaccgcttgatgcgctgccgcccctcactagtgagaggtag

SEQ ID NO: 244 - protein, 337 aa, Acinetobacter baumannii
MKTATAPLPPLRSVKVLDQLRERIRYLHYSLRTEQAYVNWVRAFIRFHGVRHPATLGSSEVEAFLSWLANERKVSVSTHRQALAALLFFYGKVLCTDLPWLQEIGRPRPSRRLPVVLTPDEVVRILGFLEGEHRLFAQLLYGTGMRISEGLQLRVKDLDFDHGTIIVREGKGSKDRALMLPESLAPSLREQLSRARAWWLKDQAEGRSGVALPDALERKYPRAGHSWPWFWVFAQHTHSTDPRSGVVRRHHMYDQTFQRAFKRAVEQAGITKPATPHTLRHSFATALLRSGYDIRTVQDLLGHSDVSTTMIYTHVLKVGGAGVRSPLDALPPLTSER

SEQ ID NO: 245 - DNA, 633 bp, Enterobacter cloacae
atgcagcttggtgtcattgccgatgacttcaccggcgccacggatattgccagcttcctcgtgcgcaacggcatgccgacggtgcaactgaatggcgtgccgacccgcgatattccgctgaccagcgaggcggtggtcatcagcctgaaaacccgctcctgcccggcggaaatggccgtcagccagtcgctggcggccctgcgctggctgcaggcccagggctgtcagcagttttatttcaagtactgttccactttcgacagcaccgcgcagggcaacattggcccggtgctggatgccctgctggccgagctgggtgagacgcggacggtgatttccccggcgctgccggttaacggccgcacggtctatcagggatatctgttcgtcggcgagcaactgctgaatgagtccgggatgcgccaccatccggtgacgccgatggaggatgcgcacctgggccgcttaattgagcgccaagggcgcggaaaagccgcgctgattgcctggccgattgtcgcccggtcgccgccgcgctggcggcagtcaacgatccggcggtgcgctatgtggtgctcgacgccctcagcgaacaggatctgctcacccagggcgtggcgctgcgggagatga

SEQ ID NO: 246 - protein, 210 aa, Enterobacter cloacae
MQLGVIADDFTGATDIASFLVRNGMPTVQLNGVPTRDIPLTSEAVVISLKTRSCPAEMAVSQSLAALRWLQAQGCQQFYFKYCSTFDSTAQGNIGPVLDALLAELGETRTVISPALPVNGRTVYQGYLFVGEQLLNESGMRHHPVTPMEDAHLGRLIERQGRGKAALIAWPIVARSPPRWRQSTIRRCAMWCSTPSANRICSPRAWRCGR

SEQ ID NO: 247 - DNA, 741 bp, Acinetobacter baumannii
atgggcatgcttgaacagactgccgcccagtaccgtagcctgcgcatgacctccatcgccgcagagctcgcccagttactggccgaggccgaagccagtgaaatgtcgttcctgagctttgcacagcgactggctgaatacgaactccagcagcgtcaggccaaccgggtacagcgcaattacaagacggcaggctttcctgcgcacaagcatctggagggctttgactatcgccaccagaccaccatcagcaagcgccagatcaacagcctgctggacttccggttcatcgacgagcgcaacaacgtgatcttcatcggcccgccaggcgtgggcaagacccacctggccatcgggattggccacaaggccgtcgaggccggataccgggtattgtttcgcaccgcgctggagttggtggaagaactggagctggcagaaatgaagggcgagctgaaaaagaaaatcagccagctgagcaaggtcgacctcttgatcatcgatgagctgggctacctgcccatgacccggcaggcccgctacaacctgttccagctgatcaacagtctgtacgaataccggtctatcatcctgaccaccaacaaggacttcacctgctggggcgagttcttccacgacgacaacgtggcagtaccgatcatcgaccgaatcatccatcactcacacatctttatgctgggaggagagagctatcggctgaaacagaaaacaacgggttaa

SEQ ID NO: 248 - protein, 246 aa, Acinetobacter baumannii
MGMLEQTAAQYRSLRMTSIAAELAQLLAEAEASEMSFLSFAQRLAEYELQQRQANRVQRNYKTAGFPAHKHLEGFDYRHQTTISKRQINSLLDFRFIDERNNVIFIGPPGVGKTHLAIGIGHKAVEAGYRVLFRTALELVEELELAEMKGELKKKISQLSKVDLLIIDELGYLPMTRQARYNLFQLINSLYEYRSIILTTNKDFTCWGEFFHDDNVAVPIIDRIIHHSHIFMLGGESYRLKQKTTG

SEQ ID NO: 249 - DNA, 207 bp, Acinetobacter baumannii
atgagtaaatgccaacactgtgcagttgaagagttaataaattcttacggcggttttgcagaagttaagactctttgtgaaaaattacgaggccgatataaccggagtgggctatctaatactgattacaacgagttacttcaattagagaaggcacttgaccaagcgaagaagtttaatgcggagggcgcaaaaaatggacagtag

SEQ ID NO: 250 - protein, 68 aa, Acinetobacter baumannii
MSKCQHCAVEELINSYGGFAEVKTLCEKLRGRYNRSGLSNTDYNELLQLEKALDQAKKFNAEGAKNGQ

SEQ ID NO: 251 - DNA, 831 bp, Acinetobacter baumannii
atgaaaactcttattttgttgcctttacttagttgcttgagcctgacagcctgtagcttgcctgtttcaaattcgtcctctcaaatcacttcaactcaatctattcaaaccattgccaaattatttgatcaggcacaaagctctggcgttttagtaattcaacggggcccacatctacaggtctatggcaatgatttgagtcgtgcacataccgaatatattcctgcttcaacctttaaaatactcaatgccctgattggcctgcaacatggtaaagccacgaccaatgaaatctttaaatgggatggcaagaagcgcagttttgcagcctgggaaaaagacatgactctcggccaagccatgcaagcttctgctgtacccgtctatcaggaactggcacgtcgcattggtctggaactaatgcaacaggaagtgcaacgcattcgatttggtaatcagcagattggtcagcatatcgacaacttctggttagtcggacctttgaaaatcaccccggaacaagaagtcgaatttgcctctgcgcttgctcaagagcaacttgcctttgatcctcaagtccagcaacaagtcaaagccatgttactgttacaggagcgacaaggttatcgactatatgccaaatctggttggggtatggatgtggagccgcaagtcggctggctcaccggctggatcgaaacacctcaggacgaaatcgtggcattttcactgaatatgcagatgcaaagtaatatggatccggcgatccgtcttaaaattttgcagcaggccttggccgaattagcgctttatccgaaagctgaagggtaa

SEQ ID NO: 252 - protein, 276 aa, Acinetobacter baumannii
MKTLILLPLLSCLSLTACSLPVSNSSSQITSTQSIQTIAKLFDQAQSSGVLVIQRGPHLQVYGNDLSRAHTEYIPASTFKILNALIGLQHGKATTNEIFKWDGKKRSFAAWEKDMTLGQAMQASAVPVYQELARRIGLELMQQEVQRIRFGNQQIGQHIDNFWLVGPLKITPEQEVEFASALAQEQLAFDPQVQQQVKAMLLLQERQGYRLYAKSGWGMDVEPQVGWLTGWIETPQDEIVAFSLNMQMQSNMDPAIRLKILQQALAELALYPKAEG

SEQ ID NO: 253 - DNA, 501 bp, Acinetobacter baumannii
atgagtgaaattaacttaagcccagaggctaaaacggcaatttacaaaatggttcaccagtcacagggaattacgccgcaagagattgcaaacgtacttggtgattcatacaagagcgtactcaattacgcaaatccaaacatggaaacccatttaccaagcattaaaaagcttgaagcaatcattcagtttacccgcaacccggcattagttaaggcgtgggcacacatgcttggttttgtattggttcctgctaatcaagctgatgaaaaatcgcatgaagtgagcatcgttgaaaccttgctgcatatcaatatcaacaatggtcaagctaatcagcaagttcataacgttttagaagacggtgtggtaacgccatcggaattggcagatacggaagcaattttagaagaaatggaaaatcacattcatcaacttagacaagctcttaaggcggcagcttccaattacatttctaaatcacaaaaagaaaaagcttga

SEQ ID NO: 254 - protein, 166 aa, Acinetobacter baumannii
MSEINLSPEAKTAIYKMVHQSQGITPQEIANVLGDSYKSVLNYANPNMETHLPSIKKLEAIIQFTRNPALVKAWAHMLGFVLVPANQADEKSHEVSIVETLLHININNGQANQQVHNVLEDGVVTPSELADTEAILEEMENHIHQLRQALKAAASNYISKSQKEKA

SEQ ID NO: 255 - DNA, 642 bp, Acinetobacter baumannii
atgagtagagtcgaaaaaatatatgaaaatataaaagccaataatgaccatcttcaggatgaagttcatttatttttccatttagttatgaatagtgattttgaagaaattaccgaatcaagatttacttcagttttcctaataaaaatgttctatgcattctttaggggggctaatatagatatgatcttaagtgaaatgaggaacttagaaaatccagatataaattacaaaagaatgaaaccacctactctgtttaaatatatgccattgaagggtttgtggcacaaacactttgagcaaattggattaagctcaatgtctttaaatatcaaaagtcagatcaattcaaatcctaatttttttaaggattttataaatatttataatgatcctaatttaactttaaatgaaaaatcttcagagttggcttacttaagctctagtaagcaatatttagatcgtattgaaagcggaaagctaacaggtgaatggattatttatcatattcacaatcaaaaaaattattatcttaatatcggaaaacataatgatggtgattcaattctggcagaggaaattagagaaatagctttgtttgagtttccacaatttagaggcgaaataccactttttgaatag

SEQ ID NO: 256 - protein, 213 aa, Acinetobacter baumannii
MSRVEKIYENIKANNDHLQDEVHLFFHLVMNSDFEEITESRFTSVFLIKMFYAFFRGANIDMILSEMRNLENPDINYKRMKPPTLFKYMPLKGLWHKHFEQIGLSSMSLNIKSQINSNPNFFKDFINIYNDPNLTLNEKSSELAYLSSSKQYLDRIESGKLTGEWIIYHIHNQKNYYLNIGKHNDGDSILAEEIREIALFEFPQFRGEIPLFE

SEQ ID NO: 257 - DNA, 171 bp, Acinetobacter baumannii
atgacttggactgtatacgaatttcatgacagcgttcaggttatacctgaaaatgatttaaaacaccattcaacatttcattgcaaatgccatcccaaatatgaggatggcatttttattcataactcatttgatggtagagaagcgactgaaacgcctttaccgagttaa

SEQ ID NO: 258 - protein, 56 aa, Acinetobacter baumannii
MTWTVYEFHDSVQVIPENDLKHHSTFHCKCHPKYEDGIFIHNSFDGREATETPLPS

SEQ ID NO: 259 - DNA, 267 bp, Acinetobacter baumannii
atgagccttgaaaaaaaatctacgcatgtgcgtttatctcccgaaatccatgaacgagcaaaaatacttgctcatgttaaagaaaaggatctcgcggcctatctaggttttcttattgaaaaagagatagttggcgagtggcatgtattcaatatacaagcaaaatctttcgcgcgtttgggaatgtcggctttagtacgggagttaagtacagaagtcagcttttcagagggatcggaagggattaacgggaatttagacaaataa

SEQ ID NO: 260 - protein, 88 aa, Acinetobacter baumannii
MSLEKKSTHVRLSPEIHERAKILAHVKEKDLAAYLGFLIEKEIVGEWHVFNIQAKSFARLGMSALVRELSTEVSFSEGSEGINGNLDK

SEQ ID NO: 261 - DNA, 657 bp, Acinetobacter baumannii
atgaaaagattaaacgtactggttgcttgtgaatattctggacgtgttcgtgatgctttttcagctttaggtcacaacgctatgtctagtgacttactcccaacagaagcaccaggtaatcactatcaaggtgatgttcgtgatgtgttgtatggaggctgggatctcattgttgctcatcctccttgcacctttctatctgtagctggcaatcgttggtttaacgttgataggtatggggagaaagcaattacccggatgaaaaatcgcgagcaagcaattgcatttttcaatttgtttactgatctggagtgcgaaaaggtagcaattgagaatccaattggatgcatgagcaaaatctatcaaaagccttcacaagtaattcatccctacatgtttggtgatcctgagcgtaaagctacatgcttatggttaaagggattaccagctttacaagcaaccaatgtggttgagccaaatattgtgaagtacaaaaacggcaaagggacggatagtccttggcatttagacacgttaaagctgccagcagaagaacgcagaaaagcgagaagcttaacttttcaaggcattgcagatgctatggcaatgcaatggggtggagacgtgcgtcatttaggtttgagggaagcggtatga

SEQ ID NO: 262 - protein, 218 aa, Acinetobacter baumannii
MKRLNVLVACEYSGRVRDAFSALGHNAMSSDLLPTEAPGNHYQGDVRDVLYGGWDLIVAHPPCTFLSVAGNRWFNVDRYGEKAITRMKNREQAIAFFNLFTDLECEKVAIENPIGCMSKIYQKPSQVIHPYMFGDPERKATCLWLKGLPALQATNVVEPNIVKYKNGKGTDSPWHLDTLKLPAEERRKARSLTFQGIADAMAMQWGGDVRHLGLREAV

SEQ ID NO: 263 - DNA, 1221 bp, Acinetobacter baumannii
atggctaatggatttccaggtggaaactttagaatcgttaacaaagaaacaggtgcatgtatcgcaagcgcatacggtggacaaacccgtggtgtacacacagtatctagacgtggtgaaacggctaattttgaatattttcatacaaatgaccgactatttacggtacatgacaaggttaaaaacatagacgaagagctttggtattttgctcgtagtccaaatccccatagtcgtggacactataaactttataacaaagttagagatatccgttctagttgggtgcttggtgcttatgtaaagacaaaagtgattggatttaaactgaaagaccatgccttagaaaattttattagccttttaccaaagcaagatgaagaaacacttgcccacttaagaaccaatgatagtcttgatatcgctgatttattaagcgattttattcatattaatggtgaagaaacgattaaatcggaacttgttggtaaacttgatgggactaatctaaatgactttttaaatccagtcctcgctcataagtcaattcgtagcattgagcaaaagttctataaacttgcttccgttccgtttctaggtgtagaccttcctgaatttaaagatttgcctgataatcctttcgctctgcataatgaacaactctataagatcatttttgtctctgtccaattagatgtcttagatcaaaaagattggcaatcagattcagtgttccgattgtatttacgccgttacaatattaatgagcttctaaataaaattaaaaaagagcagcttgaggaattacaagtaaaagcatggacagagcttcaagatgtagaagaccctcaaaaagaagcagtaaaaattattttagagcttagaaaaactctagatttacatactgatgagaaaaatatggatacggccaaaaagattttacagacagcgttaaagtcaagtgagtcttttgaacaactgcaaaccgcattaaaaagtataaatgataaagagactgaagcagttcattggcatagtggcgatattttcttacaaggagctggtcgtgagtaccaaactaagtgggcatttgaagatggttatatctttgtagaaggccaaccagatgcggtactgacacatctctgggattcatatgcaactatcagtcaacgctctacaaatgatccgagacagcgctgggaacttaaaagtgcttaa

SEQ ID NO: 264 - protein, 406 aa, Acinetobacter baumannii
MANGFPGGNFRIVNKETGACIASAYGGQTRGVHTVSRRGETANFEYFHTNDRLFTVHDKVKNIDEELWYFARSPNPHSRGHYKLYNKVRDIRSSWVLGAYVKTKVIGFKLKDHALENFISLLPKQDEETLAHLRTNDSLDIADLLSDFIHINGEETIKSELVGKLDGTNLNDFLNPVLAHKSIRSIEQKFYKLASVPFLGVDLPEFKDLPDNPFALHNEQLYKIIFVSVQLDVLDQKDWQSDSVFRLYLRRYNINELLNKIKKEQLEELQVKAWTELQDVEDPQKEAVKIILELRKTLDLHTDEKNMDTAKKILQTALKSSESFEQLQTALKSINDKETEAVHWHSGDIFLQGAGREYQTKWAFEDGYIFVEGQPDAVLTHLWDSYATISQRSTNDPRQRWELKSA

SEQ ID NO: 265 - DNA, 447 bp, Acinetobacter baumannii
atgcatactctttttgaaccagaattaaacgatttagaatccttagctgaaatttttaatgcatatagggttttctaccatcaagaaccaaatatagatttagcacggaaatttattcatgagaggattactcaaaaggattcaaaaatttttataaagaaagatgaattcaataacattcttggttttatccaactttatcccacgttttcatccgtttcagcaggaaaagcttggattttaaatgatttatatgtacatgaagtgaatcgtcgacaaggtattgctgaagagttaatgcaacatgtaattcaatttggtcaaaatacgaatgctaaatatctcgctttagaaacacattttgataatgtagcagcacaaacactttataaaaatatgggatttatcgaacaagataaaacaaagctatttgaatactcttactaa

SEQ ID NO: 266 - protein, 148 aa, Acinetobacter baumannii
MHTLFEPELNDLESLAEIFNAYRVFYHQEPNIDLARKFIHERITQKDSKIFIKKDEFNNILGFIQLYPTFSSVSAGKAWILNDLYVHEVNRRQGIAEELMQHVIQFGQNTNAKYLALETHFDNVAAQTLYKNMGFIEQDKTKLFEYSY

SEQ ID NO: 267 - DNA, 207 bp, Acinetobacter baumannii
atgagtgagtttaaagaaaataaaggaatcgaaggcattttaaaggatgtggttgaacatggtcacggcttcgcaatggtgtcaattgaaggtgttgagcaggtatctattgctcaagtaattaagccatttccttgtgaagagcttggcgacgacttccccatagaaaaccgcatttcgccgaattgcaaagtggaggatgtttga

SEQ ID NO: 268 - protein, 68 aa, Acinetobacter baumannii
MSEFKENKGIEGILKDVVEHGHGFAMVSIEGVEQVSIAQVIKPFPCEELGDDFPIENRISPNCKVEDV

SEQ ID NO: 269 - DNA, 318 bp, Acinetobacter baumannii
atgtatgcgtacttctttaaagtagtttatgcaaactctaaagtttcatttgaaaatttcctcaattacaatttcgaacaagattttgttaaaaatagatttaccaaacgattagctaagaaaaatagtttcaatcaacttcccgatgatgaatatattcttcgtcctttagttaataagttctttggtcaaccaaggttagattctgtagatgcttatgaagctttatatagaaatattaggaatgctaaccaaacaataagtctgcgtccttttcttgatatgatttgctttagcacgtttttgagtttcacgtag

SEQ ID NO: 270 - protein, 105 aa, Acinetobacter baumannii
MYAYFFKVVYANSKVSFENFLNYNFEQDFVKNRFTKRLAKKNSFNQLPDDEYILRPLVNKFFGQPRLDSVDAYEALYRNIRNANQTISLRPFLDMICFSTFLSFT

SEQ ID NO: 271 - DNA, 582 bp, Acinetobacter baumannii
atgagaaatattattgcatgttgtttactgatatattgcccattcgttagcgcagaaataccttttggtcttaaagcaggaatgtctttaaatgagataaagaaatttgatgccaagccagtagagttgggtgatggaaattttattattaaaaatgttccaaagccatatgatggttttaaagattatgtcgtcaaagtttcaccaacgataggtttgtgcaaagtcgtaggctggggtaaacctgtaaaaacaagtgtatatggtgatggtctatcttctgaatttgattcagttaagagtggattaactacaaaatatggtgctccaaatggagattataacttcctgagagcaaaaagcatctggagtcaaccaaatgaatggatgatggggttatataaggaggagcgaattttagctgcaacatgggaaccaaaggaatctgatggtgttaagaacatcatgttaaaagcaaaagctaaaagtaccaatgaagggtatataacagttgcatatgagttctttaatacagaatcttgttataaagaaaaaaaagtaaaagacataagtggattataa

SEQ ID NO: 272 - protein, 193 aa, Acinetobacter baumannii
MRNIIACCLLIYCPFVSAEIPFGLKAGMSLNEIKKFDAKPVELGDGNFIIKNVPKPYDGFKDYVVKVSPTIGLCKVVGWGKPVKTSVYGDGLSSEFDSVKSGLTTKYGAPNGDYNFLRAKSIWSQPNEWMMGLYKEERILAATWEPKESDGVKNIMLKAKAKSTNEGYITVAYEFFNTESCYKEKKVKDISGL

SEQ ID NO: 273 - DNA, 387 bp, Acinetobacter baumannii
atgaaaacaaaaatgctatgtgtaggtcttgctgctgccctaatgtttgttggatgttcgcgtgatgcacaagtagcttctaagaatctttcttatgctgctgacaacttccagctagaccgaagaattgttttttataacggcattactggtgactacattcttacaatcgaaggtaaatgctcttttgatgcagtaagtgaaaagaaagtcgatgtaacttgtaagacaggtgattctgaatttaaaaaacattcattgggtatttctgacaatgttacttatttctctgagcagctaaccagtaagggtgtgagtacgtatcattacaaagtagcgtttaaacctcaatcaatcatccctgatattgatttgaaagttaattaa

SEQ ID NO: 274 - protein, 128 aa, Acinetobacter baumannii
MKTKMLCVGLAAALMFVGCSRDAQVASKNLSYAADNFQLDRRIVFYNGITGDYILTIEGKCSFDAVSEKKVDVTCKTGDSEFKKHSLGISDNVTYFSEQLTSKGVSTYHYKVAFKPQSIIPDIDLKVN

SEQ ID NO: 275 - DNA, 459 bp, Acinetobacter baumannii
atgaatgcagttacagcaagtcaaggtcgtaaacattttacagttgctattgattggaatgagcatccgattgaatggcatttggagcaatacgggtcatggttattgttagacggtaatggggaaacctatttaggttcaagaggcattcttggtcatgtcattgatgctgagaatggtgtgcaagttgaccgccgttttagagcgccgcctcgttgtaagattgatgtgtttcatgcgatggcagtagaggatctattaagtcacatgatggagacagaaaataaaaaggttaggcactggattaaatgcgtggttctttaccatgtagatttcaagaaggaagatgaaatagcaaaaaaacttggtgtttctgaatattcggtacaacgtgacaaaatgcttggtttggttcgcatggcatcacgttttaagttcacaagcaaattgatggggtaa

SEQ ID NO: 276 - protein, 152 aa, Acinetobacter baumannii
MNAVTASQGRKHFTVAIDWNEHPIEWHLEQYGSWLLLDGNGETYLGSRGILGHVIDAENGVQVDRRFRAPPRCKIDVFHAMAVEDLLSHMMETENKKVRHWIKCVVLYHVDFKKEDEIAKKLGVSEYSVQRDKMLGLVRMASRFKFTSKLMG

SEQ ID NO: 277 - DNA, 270 bp, Acinetobacter baumannii
atgacaatttttgaagcactagcattaaaggttttaatttcaattgcactaggtttagccattggtgtttggatacttgtgcgatatatcaaaaatcgcacaaaagcagaacaggaatttttaaaacgtcatgggattggttctcactttgtatggcaacgcaaatgggaatcagatttcttatatggcaataagagtaatgacaactctgtaccagaggcaattattgaagctactgaaaatcgccgaggtgaaaatgatcaagcctaa

SEQ ID NO: 278 - protein, 89 aa, Acinetobacter baumannii
MTIFEALALKVLISIALGLAIGVWILVRYIKNRTKAEQEFLKRHGIGSHFVWQRKWESDFLYGNKSNDNSVPEAIIEATENRRGENDQA

SEQ ID NO: 279 - DNA, 420 bp, Acinetobacter baumannii
atgaaagctgcaaaattaattagggataaaggctttaaatacgcaaaggaaattgttgattcagcaccagaaaacgcaaccgagtggaatgagggttatgagttccaatgtggtcaaagtgtagaagtcagcccagcagatcttgagaagtattttgtagatttggttgagcttaaacgtttggtggagtctttgggctatataagcagatggggcggcattgaacgatgcaaaaagctttacttcgaatcttcatttaaaagagaccagcacataaaagatttgaaacgatacattcgcgactacgaatcagtttatcaactcaaatgctcacatggttatgacgttgcatgccttatctgtggttttggaacagttaatggcgagcgtgtttatcacaataaaggaaaatcaaaatga

SEQ ID NO: 280 - protein, 139 aa, Acinetobacter baumannii
MKAAKLIRDKGFKYAKEIVDSAPENATEWNEGYEFQCGQSVEVSPADLEKYFVDLVELKRLVESLGYISRWGGIERCKKLYFESSFKRDQHIKDLKRYIRDYESVYQLKCSHGYDVACLICGFGTVNGERVYHNKGKSK

SEQ ID NO: 281 - DNA, 288 bp, Acinetobacter baumannii
atggatcttgaatggttagagaaacaacgaagagagctggagaagcgctttaatccagaacttcacaaactaaatgagtgggcaagaaaagtggagttagacgaactgcacaagcaactatcaactccgaaaatttgtaccgcagatattacaccaattaacaaaagagcattgccgcaagagctttggaaagaccgaaaaatcaaagagcttgaacaggagaataaagaacttagacgcaagttagcaatgcatgttttaacgtacagaaatggggaatcaatatga

SEQ ID NO: 282 - protein, 95 aa, Acinetobacter baumannii
MDLEWLEKQRRELEKRFNPELHKLNEWARKVELDELHKQLSTPKICTADITPINKRALPQELWKDRKIKELEQENKELRRKLAMHVLTYRNGESI

SEQ ID NO: 283 - DNA, 351 bp, Acinetobacter nosocomialis
atgtcagatacagaaagttatggtatccgcttagaaaaaaaggtggatgatattcggcaagaagttaagtcgctatctgaaagtttaattcagataaaaaccattaatgaacaccagaaagcccaaagtgaagaaaacgcaagaaagattgagaagctagagtcaggtgctcaaaaaacagaaggtgctattacttttctcaagttctttggcgggtttgcgctgactgggatgatcaccttttgcacttggattgtttcaaataaccaagctattcaccaacgcatttcagataccaatcaaaaggttgctgtcattgaatcgaaaattgcttttaggggcactccatga

SEQ ID NO: 284 - protein, 116 aa, Acinetobacter nosocomialis
MSDTESYGIRLEKKVDDIRQEVKSLSESLIQIKTINEHQKAQSEENARKIEKLESGAQKTEGAITFLKFFGGFALTGMITFCTWIVSNNQAIHQRISDTNQKVAVIESKIAFRGTP

SEQ ID NO: 285 - DNA, 192 bp, Acinetobacter baumannii
atgagtgatatcagcgtaaaaaaagtcaataaattaattgaagagtttgaacaagaaggaaataaggtagaccgattggagataggttacaaaacatatgcagccttgatgttagataagaaatttgctgataaagtcacaaaatcaaatgaagaccctaaagagcgtctttataaacaaataaaaatttag

SEQ ID NO: 286 - protein, 63 aa, Acinetobacter baumannii
MSDISVKKVNKLIEEFEQEGNKVDRLEIGYKTYAALMLDKKFADKVTKSNEDPKERLYKQIKI

SEQ ID NO: 287 - DNA, 1713 bp, Acinetobacter baumannii
ttgtctttacccatatctttgaccgcttgtggcagtgatgaggatgcttcagatcaagctcaggcacatcctaaagtcgcttttaaacatggggtggccagtggtgatcccttacaggatcggataattctatggacacgcttaagtccggaagatgaaaacctgcgttatcaggtgcagtgggaaattgctgccgatcaggattttcgccagataatcaatacaggacaagttgaaaccagtcggtcgcaagatttcacggttaaagtcgatgcggatcgtctatcggcagggcaaacttatttttaccgttttaagtgtgcatcggtatattcatctgtcggtcaaaccaaaactttagccacgcaaagcaagctggtgcaatttgccgtttgttcatgttccaattatccagccggatattttcatatctatcaggaaattgcccagcaagacctagatgtggtgattcatttaggggattacatttatgagtacgggatgggtggttatgcgactgaacaggctgcagcattaggccgaagtctggctgcagataatgctgaggaaatcattaaactggaagactaccgcaagcgttatgccttgtatcgaactgatgcggacttacaagcagcacatcagcgtcatccatttattgtggtctgggatgatcatgagctgaccaatgatacctgggagcagggtgcggaaaatcatgatgtttcagaaggtgatttttttgcacgtaagctggctgctttgcaggcctattttgaatggatgccgattcgtccagtgtctgaaacagatcatttgaatatttatcgccagtttaattttggtgatctggttcagctgaatatgctggatactcgtattttggcgcgtaacaagcaattgcaatatgctgactatcttaccgcgacaggactagatgccaataaatttcagacagatttgctcaatccgacgcgtaccttgttaggacatacacaacgtgaatggatactgaaacaactcagccaatcgaatgccgtctggaatgtgctgggtcagcaggtgctgatgagcaagatgctaattccggccgaaattctggctgttttggggcagatcaccagtggtcaggccactgcagatgtgttgctacaagtgcgtcagatgctgacagaactggtaggcctaaaaatacgctatctgcaaaatgatccaactttgacaaaggcagaattagccagaatactgactgttgtgccttataatcttgatgcctgggatgggtacgtcgtggagcgtgaggtgatttatacggcttgtaaacagctgaataaaaaactgattgtacttgcaggagatacccataatgcctggaactccactttgagagatcaagccggcagtacagtcggggtagaactagcgaccagttcagtttcatcaccgggtatggagaagtatttgcagattcccttagcccagttacaggaatttgaaatggcatttactacgctaattgatgagctgaattattgtaatttgaatcaacgcggatacttgagtgttgcatttaccccggatcaggtacaggcgaactggatttttatcgatagcatccagaatcgtagttatcaggttgatcaaagccgtgcgtatcagcttcaattagatcatgaattaaatgaaatcaaaccgttaaagcaaactgcctaa

SEQ ID NO: 288 - protein, 570 aa, Acinetobacter baumannii
MSLPISLTACGSDEDASDQAQAHPKVAFKHGVASGDPLQDRIILWTRLSPEDENLRYQVQWEIAADQDFRQIINTGQVETSRSQDFTVKVDADRLSAGQTYFYRFKCASVYSSVGQTKTLATQSKLVQFAVCSCSNYPAGYFHIYQEIAQQDLDVVIHLGDYIYEYGMGGYATEQAAALGRSLAADNAEEIIKLEDYRKRYALYRTDADLQAAHQRHPFIVVWDDHELTNDTWEQGAENHDVSEGDFFARKLAALQAYFEWMPIRPVSETDHLNIYRQFNFGDLVQLNMLDTRILARNKQLQYADYLTATGLDANKFQTDLLNPTRTLLGHTQREWILKQLSQSNAVWNVLGQQVLMSKMLIPAEILAVLGQITSGQATADVLLQVRQMLTELVGLKIRYLQNDPTLTKAELARILTVVPYNLDAWDGYVVEREVIYTACKQLNKKLIVLAGDTHNAWNSTLRDQAGSTVGVELATSSVSSPGMEKYLQIPLAQLQEFEMAFTTLIDELNYCNLNQRGYLSVAFTPDQVQANWIFIDSIQNRSYQVDQSRAYQLQLDHELNEIKPLKQTA

SEQ ID NO: 289 - DNA, 2079 bp, Acinetobacter baumannii
atgactaccttaaatgtgtcttcaaactcttcatcacatccgttaaaaaagtatataaatagagagctctcactatttgagtttcataagcgggtgttggcacaggcgaaagatactgaataccctttacttgaacgattaaattttttaattattttttcaagtaatctggatgagttttttgaaatacgagttgccagtttaatgcaacaaattgaactttcagatcatgctagagctcgtccagataactcactcctctcagatatagtcaccaccatttccaaacttgcacacgaagctgtcgaagaacagtataaaatacttaattataatctcttaccacaactgcaaggacatggtgttcatttcattcagtatggtgacatcctcgaaaaacataaagaatggattaaggactatttccataatgaagttcgacctgtggtcacacctatcagtttagatccagcccacccctttcctcggctagtgaataaaagtctaaatttcattgtaaccctagaaggtaaagatgcatttggacgaaaaattgatttggcgattgttcccgcaccacgatcattacctagattagtaaagttacctaatagtatttctggcgaggatgaacactacattctactttcagccattattcagcaacatcttcatgagttatttccaggggtaaccaccactggatgttatcaatttcgggtcacacgtaatgcagatttaactatctcagaagatgttgaagacttagcaattgccttaaaagatgaactatcctcacggcgctttggtcgggctgtaagacttgaggtgactaaaaattgccctgaaaatattattgattatttacttggacaatttgatcttaagcaagagcaactctatcgtattgacggcccgcttaatctggcgcgctttatatcgaacttcaatttgccagagttacgttttcctccccatgtacaaaaattaccgaaagtgttgtatgggaaaaaatccatatttgaggtattaaaaaccggagatgttttattacatcacccttttcactctttcgctccggtcattaagctactgaaagaggcagcccatgatccacatgtgttagccataaaacaaaccctttatcggagtggtgtacattctgaaattgtgcaagtccttgctgaagcggcacgaaatggtaaggaagtcacagcagtgattgaattacgtgctcgctttgatgaagagtcaaatatcgaagttgccaatctattacaagaagctggggcggttgttgtatatgggatcgttggctataaaacccacgccaaaatgattctgatcgtgcgtcgtgaaatagacaaaattaaacgttatgttcatttaggcacaggtaactatcatgcaatgaatgccaaaatctatactgattatggactactgaccagtgatgctgatatttgtgaagatgtccataaagtctttcaggagctcacaggcatggggaaaatggtcaaattgaaaaaactttttcatgcaccatttactctgcattctcaattgattgaactcatcgaaactgaaactgaaaatagcaaagcaggcaaaaaagcgcagattattattaaagtaaatgccttaactgaacctcaactaattgatgccctatatagggcatctaaagcgggcgttcaaatcgatttgattgtccgttcaatttgctgcttacgcccacaagtgaaagggctttctgaaaatattcgagtccgctcaattgtgggacgttttttagaacatacccgggtttattatttttaccatcagggcgaaaacaagctttattgcgccagtgcagattggatggggcgtaatttattctctcgcatcgagacctgtttcccaatcgaagataaaaaacttcgtaaacaaattctgcaagatggcttaatgaattatcttcaagataaccgccatgcatgggagcttcaagcagatggaacatggattcaatgtacaccaagtttggataagcccatgtatatcgcacaacagcacttattaaaccatacatcttaa

SEQ ID NO: 290 - protein, 692 aa, Acinetobacter baumannii
MTTLNVSSNSSSHPLKKYINRELSLFEFHKRVLAQAKDTEYPLLERLNFLIIFSSNLDEFFEIRVASLMQQIELSDHARARPDNSLLSDIVTTISKLAHEAVEEQYKILNYNLLPQLQGHGVHFIQYGDILEKHKEWIKDYFHNEVRPVVTPISLDPAHPFPRLVNKSLNFIVTLEGKDAFGRKIDLAIVPAPRSLPRLVKLPNSISGEDEHYILLSAIIQQHLHELFPGVTTTGCYQFRVTRNADLTISEDVEDLAIALKDELSSRRFGRAVRLEVTKNCPENIIDYLLGQFDLKQEQLYRIDGPLNLARFISNFNLPELRFPPHVQKLPKVLYGKKSIFEVLKTGDVLLHHPFHSFAPVIKLLKEAAHDPHVLAIKQTLYRSGVHSEIVQVLAEAARNGKEVTAVIELRARFDEESNIEVANLLQEAGAVVVYGIVGYKTHAKMILIVRREIDKIKRYVHLGTGNYHAMNAKIYTDYGLLTSDADICEDVHKVFQELTGMGKMVKLKKLFHAPFTLHSQLIELIETETENSKAGKKAQIIIKVNALTEPQLIDALYRASKAGVQIDLIVRSICCLRPQVKGLSENIRVRSIVGRFLEHTRVYYFYHQGENKLYCASADWMGRNLFSRIETCFPIEDKKLRKQILQDGLMNYLQDNRHAWELQADGTWIQCTPSLDKPMYIAQQHLLNHTS

SEQ ID NO: 291 - DNA, 2418 bp, Acinetobacter baumannii
atggggtgctcgttttctgcacatgcacaattaatgtttagtcagtatatagatggtacatctaataaaaagggtttggaaatctataaccctgacagtttaacagtgaacttagctgattatgagattcaacaatttactaatggttcaaccacgaaatctgcgacttttcaattagaaggttcattggcaagtaaagcaaaatacattattggtcgaacagagttgcaggcagtaattggtaataaagtcaatcaagtggcaggacttgcatttaatggagatgataccttggtcctgttttataaaggtactccaatagaccgttttggtcgtgtgggagaggatccaggtactggttggggagtgggttttagtagttatcaaaatagtttgtcacgtactaaaacttcaaataatgtaacttcaattgatcctgcaacagcatttgagttagaaagcgaatggtctaaatggtctgatcgaaatgagttttcccagtatttagatacaagcgcgcctataacctcccccgttactcctatcagttgtaatacagcagatacggcgattgcggacctacaatctgccgcagaaaatcaaccatatgttgttcgtggtgttattaccgcagactaccgttatgacaatggtttttctggtttttatatacaaacgcccgatagtaaagccaaatccaatttaagtaatgctatttttgtctatcttcctgcaagtagtaaaatcactggaggaaaagtaggtgaagaggttattttaaaaggtcgtttaacctcatatcaaaaccaactccaaatagatcaacttgatcaaaatattcaaacctgtcatacacaagcatccaatacagtcacggcacaggcacttaatttaccgtttaccagtttgacggagatagcaggaaatgtacctaaacgctatcaagggatgctggttaaaatcccacaaactttaacgataagtgaaaattacaattacggtcgttatggtgagctatctttaagtttaggtcgcttgtatattccaactaatctatatcctgcaaaatctgctgaagcagttgcattagcccagcaaaatctgctttctaaaattatcttggatgatggctataataatcaaaatagaacaccattacttccgcaaaacttcaatgccataaatacattaagaacaggttctgaactgaaaaatgttgaggggattttagaatatcgttttaatgcatggcgaattcaaccgatacaggggaaggtacaacctgaaattatcaaggatactaatttacgtccttcaacggtgattccaaaagatgttaaacaaattcgcgctgcggcttttaatgtcttaaattatgataatggttcagaaaaaggtttcccaacagaacgtggtgcaagctcagaaactgagtttaagaagcaacatcaaaaaattgtcagtgctttaaaaacaattgatgccgatgtgtatgggttaatggaaatcgcaaataatggttttgatgataaaagtgcagtggcatacttatcgcaagccttaggtgcagactggaaatatgtcattccaacccaaatgacaaaattaggtacagatgcaattgcagttgcgattatctataacagtaagcgcgtaaaacctgtaggtgagcctgcagtttatgatgatcagactgaaaagaaccgtgtcaccatggcgcaaagtttccaatctgtaaatggtggaaaaatatttacgatagtacccaatcacttaaagtcgaaaggcagttgtcctaccgataaaactctggccgatgctgatcagggtgatggtcaaggttgctggaatgcaacacgtttaactgcagtacaagaacttatgcagtggattgcaaaaaatccaacacaagtggctaaaccaaattatttgctggtcggtgatatgaatagttatgctaaagaagatccgattttagcattagaaaaagccaattataaagtcttgctcaatgacgaaaaaattggacaaggtaaaacagcctatagttatgtatttggtgttgcaagtgatgccaatggcaatgggggcgcaggaaacctagaccatgcaattgctgatgcagacttatatccaatggtgaaacgcgcttttgcttggcacatcaatgctgatgagccgacggccttagactataacgaagaatataaaacagatgagcaaattgcagcattctatagcgatgatgcattccgttcttccgatcatgatcctgtaattgttgatatggatttaaacgaaaatatatcgagtaatcctgatacaggaaaaataagcggtggcagcatggggatctggtcaatgttaaccttaacgggcctcgttttagtttccatgatacgcagacgtaaattttga

SEQ ID NO: 292 - protein, 805 aa, Acinetobacter baumannii
MGCSFSAHAQLMFSQYIDGTSNKKGLEIYNPDSLTVNLADYEIQQFTNGSTTKSATFQLEGSLASKAKYIIGRTELQAVIGNKVNQVAGLAFNGDDTLVLFYKGTPIDRFGRVGEDPGTGWGVGFSSYQNSLSRTKTSNNVTSIDPATAFELESEWSKWSDRNEFSQYLDTSAPITSPVTPISCNTADTAIADLQSAAENQPYVVRGVITADYRYDNGFSGFYIQTPDSKAKSNLSNAIFVYLPASSKITGGKVGEEVILKGRLTSYQNQLQIDQLDQNIQTCHTQASNTVTAQALNLPFTSLTEIAGNVPKRYQGMLVKIPQTLTISENYNYGRYGELSLSLGRLYIPTNLYPAKSAEAVALAQQNLLSKIILDDGYNNQNRTPLLPQNFNAINTLRTGSELKNVEGILEYRFNAWRIQPIQGKVQPEIIKDTNLRPSTVIPKDVKQIRAAAFNVLNYDNGSEKGFPTERGASSETEFKKQHQKIVSALKTIDADVYGLMEIANNGFDDKSAVAYLSQALGADWKYVIPTQMTKLGTDAIAVAIIYNSKRVKPVGEPAVYDDQTEKNRVTMAQSFQSVNGGKIFTIVPNHLKSKGSCPTDKTLADADQGDGQGCWNATRLTAVQELMQWIAKNPTQVAKPNYLLVGDMNSYAKEDPILALEKANYKVLLNDEKIGQGKTAYSYVFGVASDANGNGGAGNLDHAIADADLYPMVKRAFAWHINADEPTALDYNEEYKTDEQIAAFYSDDAFRSSDHDPVIVDMDLNENISSNPDTGKISGGSMGIWSMLTLTGLVLVSMIRRRKF

SEQ ID NO: 293 - DNA, 1911 bp, Acinetobacter baumannii
atgtcttttaataataaactaactaggtattcgggttttacatgcagtttattagtttctagtatgtttttaactgggtgtaataatgatagtaaagaaaatacgaatataacgcctgttattcctcctaaaccgctggaagtcaatttagtacatattaatgacagtcattcacatttggatgaggaaagtactatattaatgcttgaaacttcgatgggtaaacgtgaagaaatacaagtctctaatggtggttttgcacgcgttgctgcgttgatgaatactttggcaagcactgagaagaatccaataaaaattcattcaggtgatgccattactggggacctctattttactttgaaagaaggtgaagcagaggcagatctcatgaatagtgtttgtttcgatacgttaacgctaggtaatcatgaattcgataatacggatgatggcttaaaaaaatttattggattcttaaatgataaaggtaattgtgaaaataaaacccaagtcttgagtgcaaatgtcgagtttggaaaaacttcagcactataccaaactaaccttgttaaaccttatacagttatggaaaaagaagggcagaaaattgctttaattggtttaacgattgccaataaaactaaaaatgcttctcgaccaaatcaagatactgtatttaatgatgaagtagttactgcacaaaaatatattgatgagctaaaacagcaaggcatcaataaaattattgttcaatctcatttagggtacgggttagaaaaagatttagccactaaattgtcaggcgttgatgtcattgttggcggagattctcataccttgctggcagatgcgaaacttaaaagttacggtataagcccagagggtgactatcccactgtattaaaaaataaagatggtgatcaggtctgtgttgtacaggcatggcaatatagttatgtcgtcggacaactcaaagtcaactttgatgccgatggtaaaattgaagcatgtgcaggaaaagccaatgtattgattggcgatgattttaaacgtacagctaaagatgctccagcattgatgagtacggaactagattctattaagcgagatattgaaaatagtaactccttacgtattgtacagcctgatgctatagctttaagtattttagaaccgtataaagtcgctaaaaacttattaggcaaagaaaaagttgccattgctaatgataatttatgcttacgtcgtgttccaggaatgaccaaagatacatcacgttctagtttaggtgatgtctgcaataaagcagattttattaatcagcatgggggtgatgtacagcagctggttgccgaagcatttctacagcaaggtaaaaaatattttaatgcagatatttcaatccaaaacggaggaggggtaagggtagatctgcctcaaggtgatattacggtagagaaaatttatacagtgctgccattcaaaaataccttagtacaattaaatgcaactggccaagaaattaaagcagtgctggaagatgccatggatgctgttacgagtaataacacaggcagttatccatatgcgggtggactacaatgggatgtagatttaactaaggcaaagggtcagcgtttatccaatttaaaggttcgaaatgcacaaggtcaatatcagccattaaatatgaatcagacctatcaagtaattaccatcaactttctggctgatggtcaggacttttacacaagctttaaagacattactggtgagcgtcgtatagatgtgggattagattatgcagaagcatttttgcagtatgtagaagggttacctggtgaaaaagggcaaaaggccttgtcccgattgccagttgagcaatacagcacgcaaaattataaagaataa

SEQ ID NO: 294 - protein, 636 aa, Acinetobacter baumannii
MSFNNKLTRYSGFTCSLLVSSMFLTGCNNDSKENTNITPVIPPKPLEVNLVHINDSHSHLDEESTILMLETSMGKREEIQVSNGGFARVAALMNTLASTEKNPIKIHSGDAITGDLYFTLKEGEAEADLMNSVCFDTLTLGNHEFDNTDDGLKKFIGFLNDKGNCENKTQVLSANVEFGKTSALYQTNLVKPYTVMEKEGQKIALIGLTIANKTKNASRPNQDTVFNDEVVTAQKYIDELKQQGINKIIVQSHLGYGLEKDLATKLSGVDVIVGGDSHTLLADAKLKSYGISPEGDYPTVLKNKDGDQVCVVQAWQYSYVVGQLKVNFDADGKIEACAGKANVLIGDDFKRTAKDAPALMSTELDSIKRDIENSNSLRIVQPDAIALSILEPYKVAKNLLGKEKVAIANDNLCLRRVPGMTKDTSRSSLGDVCNKADFINQHGGDVQQLVAEAFLQQGKKYFNADISIQNGGGVRVDLPQGDITVEKIYTVLPFKNTLVQLNATGQEIKAVLEDAMDAVTSNNTGSYPYAGGLQWDVDLTKAKGQRLSNLKVRNAQGQYQPLNMNQTYQVITINFLADGQDFYTSFKDITGERRIDVGLDYAEAFLQYVEGLPGEKGQKALSRLPVEQYSTQNYKE

SEQ ID NO: 295 - DNA, 405 bp, Acinetobacter baumannii
atggtggcgaaacgaaagagggttagcagactgatagccaaaggatcagcacacccgaaggtgtccccctcccgttccgccgcagagggggcacgcagggtcgcccaccaaaaagatatactttttagtgtgctttggctgaacggtctgctaaaaccgactgacgatgtaggtcagcagttgaatgataaaattaaggtttcgctgagtcaatcaagtgatatgaaaaaacaaataaaatcaaaggtagaaaatgcattttatgtgaggttaggggtttatttaacaatgacaataaatgatcgatttatattgaatgcttgtgcaggcttgaggttggtcattgctggagacatttatatcattgattatggaagtaaagcagaatccaagagcgctgattga

SEQ ID NO: 296 - protein, 134 aa, Acinetobacter baumannii
MVAKRKRVSRLIAKGSAHPKVSPSRSAAEGARRVAHQKDILFSVLWLNGLLKPTDDVGQQLNDKIKVSLSQSSDMKKQIKSKVENAFYVRLGVYLTMTINDRFILNACAGLRLVIAGDIYIIDYGSKAESKSAD

SEQ ID NO: 297 - DNA, 225 bp, Acinetobacter baumannii
atgaattcaaatattaaaacaggtttgattagtgtctatttgataattggtttcttctttgccatctatcaacacttttgggggcagtataactacaagtcttttgcctacaacattggtcaaggcttagtttggcctgcggtaatgtttccaacagtggggaaaatcgttggtggaattttgattctatgtttggtcggctttctgaccatgcgttctaagtaa

SEQ ID NO: 298 - protein, 74 aa, Acinetobacter baumannii
MNSNIKTGLISVYLIIGFFFAIYQHFWGQYNYKSFAYNIGQGLVWPAVMFPTVGKIVGGILILCLVGFLTMRSK

SEQ ID NO: 299 - DNA, 219 bp, Acinetobacter baumannii
atgcaacaatatttagatttagacggtgattctggcatttttgcatatgaaattggtgatacatatataagggtaaagtttgataaaacctttaaaatttatcagtacagctattataaagcaggtcaacttcatgtcgaaaaaatgaaaatactggctaagagtggtaatggattaaactcttatatcatgagaaatgtaaaaaacttatacgattaa

SEQ ID NO: 300 - protein, 72 aa, Acinetobacter baumannii
MQQYLDLDGDSGIFAYEIGDTYIRVKFDKTFKIYQYSYYKAGQLHVEKMKILAKSGNGLNSYIMRNVKNLYD

SEQ ID NO: 301 - DNA, 669 bp, Acinetobacter baumannii
gtggaattgtcaaatgatgcagtgcttaagatagagcaggctttatctataccacgcttatctaagtatgaaaatttctataaagataaaggtgaaccatatgaaaaatctgatgtattgatgctttatgaacgtaatttaataatttccaataagtttttttacttattaaattattttgaagttgttctgagaaatgctgttgttcaggcaatagaaatatcttttaggtgtaatgaaacaaatagttggcatgaaaatgaagcttttattcgaagccttagccgtagagggaggtatagccctaaaagtatgtttgatagtgctaaagagaagttcccagattcgcctagtaaaatgatccctgagcttaaatttgtattctggcaaaagatgcttatggctaattatgaagaacgtatttggcagggatgttttaattctatttttcctaatgcaacagttgaaaacaggcaaattttttacgattggacagatcaattacgtgaattaagaaacaggattgctcatcatgaaccgattatttttaaccgtaatctagaaaatgatttagaggttttaacaaaatttatttactgtcgttgtattaatacatacgattttatcgagcaatctgcattagatctaaaagaatatttagatttttaa

SEQ ID NO: 302 - protein, 222 aa, Acinetobacter baumannii
MELSNDAVLKIEQALSIPRLSKYENFYKDKGEPYEKSDVLMLYERNLIISNKFFYLLNYFEVVLRNAVVQAIEISFRCNETNSWHENEAFIRSLSRRGRYSPKSMFDSAKEKFPDSPSKMIPELKFVFWQKMLMANYEERIWQGCFNSIFPNATVENRQIFYDWTDQLRELRNRIAHHEPIIFNRNLENDLEVLTKFIYCRCINTYDFIEQSALDLKEYLDF

SEQ ID NO: 303 - DNA, 546 bp, Acinetobacter baumannii
atgtttaaatttagctatattgaatgtagtataggcttgtttatatattttggtggtgttatgaataataactgtgtagtagtactaactgctcgtggaaagactagaattttaaaagaaggtggtagtcagtcttggagactaaatgctcataatgcaggaaagtgcgattatctagtttgtgtgcaaaataggaaacaatcttggggagaaccagaggctgatcatcacactgcatttttagttggcaaaatatctagtatcagccaatctcaagaagaagatgcagatggtagatggataataaatatctccgaatatgctgatatatctattcccaatatgtgggatggtaatcggaatccagtttcttatagttcattagaagagatgaatatcgatttgaatgagctgaaatttaccaaattaaatgaagataattcttctaaaacactggataaaatatctattcctgaagctaagagactattagctaattattttgatgtccctcaagaaaatatttcaattacaatcaatatgtaa

SEQ ID NO: 304 - protein, 181 aa, Acinetobacter baumannii
MFKFSYIECSIGLFIYFGGVMNNNCVVVLTARGKTRILKEGGSQSWRLNAHNAGKCDYLVCVQNRKQSWGEPEADHHTAFLVGKISSISQSQEEDADGRWIINISEYADISIPNMWDGNRNPVSYSSLEEMNIDLNELKFTKLNEDNSSKTLDKISIPEAKRLLANYFDVPQENISITINM

SEQ ID NO: 305 - DNA, 687 bp, Acinetobacter baumannii
atgtcaaaacttcctagatttcataacaagcacatcgaaaaacgtaagtattcaaatagcctcctagccaaatctatttcttctaaagtacgtttctctaataaaacattttttaatgttaatttgagaggatcccgcctacgatcatgttcattcaaaaatataaaaattgttttatctgatttttcaggagtaatcttaaataagaataggtttacgaatgttcacttcaaaaagtgcgtattttatgctgctatttttagagattgtcgctttaaaaattgcacatttgaaaaatgcatttttattaatacaaatacagaaagcctaaatcactcgatattagactgttctaaaaaatataatttttacgaaatgaaaattcctgatgacttaaaagatcaactaacagaatatagaaatattccaatactgcaaaaaaaccgtttacttcatctaaaagggggaagaatcaataccgcaaccttattcattctcctatccaaaatatccaaatacaagctgctaaatggtcttaaaaaaatttatattgaggaacaaagtaaagtaaaaatacttagcactttcaaactccttgaagaaataaagaacctagttgacactaacaccgcattcaaacagaataatggtgctctgccccatccaatcgaaaggttggatagttaa

SEQ ID NO: 306 - protein, 228 aa, Acinetobacter baumannii
MSKLPRFHNKHIEKRKYSNSLLAKSISSKVRFSNKTFFNVNLRGSRLRSCSFKNIKIVLSDFSGVILNKNRFTNVHFKKCVFYAAIFRDCRFKNCTFEKCIFINTNTESLNHSILDCSKKYNFYEMKIPDDLKDQLTEYRNIPILQKNRLLHLKGGRINTATLFILLSKISKYKLLNGLKKIYIEEQSKVKILSTFKLLEEIKNLVDTNTAFKQNNGALPHPIERLDS

SEQ ID NO: 307 - DNA, 207 bp, Acinetobacter baumannii
atgaaagaacgttgtgaatggatagttagagttcaaagtacaccaggcttttacgcccagtatgaaggcaatgtaaaagtttgggctgacgaagattcagatgaagaaaccctctttcgtgcagcagtaaaagaacttggccgaggcgctttttttgatcgtaagcacctaagtttttggaaattagtttcagttaaaaaaggataa

SEQ ID NO: 308 - protein, 68 aa, Acinetobacter baumannii
MKERCEWIVRVQSTPGFYAQYEGNVKVWADEDSDEETLFRAAVKELGRGAFFDRKHLSFWKLVSVKKG

SEQ ID NO: 309 - DNA, 420 bp, Acinetobacter baumannii
atgtcggaatcgaagtggatcgagcattaccgggccggagcgtggacggtcggcgaagtaatcgcggcgggcgcggcgtggatcgaggcgatggacccggaccattaccggctgcgcttctttccgcaccgggacgcggagacgttcaccgttggcattgatgccgagtggaccgacgagcagcccggcgaactggcgaactacacgccgagctatgagagcggcagcagcgattgccagcccggcgaggtgacgatttccgatgacggcctgttgtccgtcatgccccggcagcggtcggcctcccatgtcgtgatccgcaccggctggacggcccagcttccccccgaggcggtcgagccgatccggcgcgctatcgcgctggccgaagcgaaattgtcgcgggaggcccaagcatga

SEQ ID NO: 310 - protein, 139 aa, Acinetobacter baumannii
MSESKWIEHYRAGAWTVGEVIAAGAAWIEAMDPDHYRLRFFPHRDAETFTVGIDAEWTDEQPGELANYTPSYESGSSDCQPGEVTISDDGLLSVMPRQRSASHVVIRTGWTAQLPPEAVEPIRRAIALAEAKLSREAQA

SEQ ID NO: 311 - DNA, 354 bp, Acinetobacter baumannii
atgaacaaattgattttcacgggccgggccgcagcagcgccggaattgaacgcctacggcgacacgaaggtggcgcgcttccggctgatccgtaacgactatgccgggaaggacgagaacggcgagcgcagggagaagcaggtaactatcccgttcaccgcctttggtgggatggccgaaacgctcgccaagaacgtgatgaccggcgaccaactcgtgatcgaggcgaagatttccaacaacaattacaccgatggcgagggcaaagaacggtacgactacaactttgaagtcgtggccttcgattacggagcgccgggagccgagaagcgcaagaagctggccgagggctaa

SEQ ID NO: 312 - protein, 117 aa, Acinetobacter baumannii
MNKLIFTGRAAAAPELNAYGDTKVARFRLIRNDYAGKDENGERREKQVTIPFTAFGGMAETLAKNVMTGDQLVIEAKISNNNYTDGEGKERYDYNFEVVAFDYGAPGAEKRKKLAEG

SEQ ID NO: 313 - DNA, 2019 bp, Acinetobacter baumannii
atgaccacattggtaatcgtagaatcgccgggcaaggtgaagaagatcagcgccttgctgggagcgggctacaaggttgtggcgagcgttggacacgtccgcgacttgccgccgaaggaactagggatagagccgccggacttccgcccgcactatcaaccgaccgagcgcgggcgcgacgtgttagcccggctgaaaaaggacgtggccgccgccgaccgtattttgctggcgaccgaccccgaccgtgaaggcgaggcaatcgcgtggcacttggccgacgcgctcaagctgcgcgatccgcagcgcatcacctttacggccatcacgaaagataaggttcaagccgccgtcgccgcgccgcgtcgcatcgacatgaaccgcgtgcggtcgcaagaggctcgccgtgcgctcgaccgcatcgtgggctaccgggtaagcccggccctgtcagatcgggccggacagccgctttcagcggggcgcgtgcagtctccggcggtgcgccttgtggtggaccgcgagcgcgagattgcgagcttcaaagtcaccgagcattacggcgcggaactgacattcgacaacggcgacggcacggcatggcgggccgtttgggacaccaaaccacacatggccgagggcgaaagctacatcatggacgacgcgcttgcgctgcgcgtggcggcagtgcgccacgtcacggtcgccgaggtcgccgacaccgagaagggccgcgcaccggctgcgccgttcacaacgtccacgttgcagcaggccgccgggcagcggttgaagctgcgaccgaaaaagacgatggagcttgcgcaacgcctctatgaacaaggcgcaatcacctatcaccgcaccgacgcgcccaacatggacgacgccggtatggaggacattgcagcctatgcccgcagcgcgggcttgccgctggccgagaagccccggcgctggaaagccaaggaaggcgcgcaggagggccacgaagcgatacggcccacccacgcggcggaccttgaggcgggggaaacagacgatgaaaaggcgctctatcgccttatctggcaacgtgccgtcgcctcgcagcttgccgacgcgatttatgccgtgcgatccgtgcgcctcgccggggatgcggaagggctggccgtggcgttcacggcgacaggccgcaccctgcaatcgccgggatggatggccgtctatgcggcggatgccgacgacagcgacgacgagggcgaagcgtcgaataacccgattccggcactggccgagggcgcgggcttaaccgcatcgagcgggcgacttttgacgaagcacacgaagccgcccacgcgctttaccgaggcaacgcttgtcaaggaaatggagcggctaggcatcggacggcccagcacctacgcggcgatcatcgagaacatcacgggtcgcggctacgtcatagaagggcagaaaggctatctcacgccgtcacccatcggcgagacgatccgcgatgcgcttgtaggccggttccgcttcgccgaactcgattacacgcggggccttgaggacgagctagaccaaatcgcggaggcgaaggccgactatcagggagtcatttccgccgcatggtccgcgctcgacgacgagctaggcaagctggacagcgccggaatcgccgccgcccatccttgcccggcgtgcggcaaggccctgcatcgccggaaggggcaatatggcttcttttggtcctgcaccggctatcccgagtgcaagacctcgctccccgacgacaagggcaagcccggccagcggaaggccccgccgccgtctaccggcttccagtgcccgaagtgcggcaaagagcttgcccgccgtcagggcgtcagcaagccgaagaagaagggcatgaaggggcggccctacgatttctatagctgcacgggctacccgaagtgtgacgccagctatcagaccgggccggacggaaagccggtttttgagggggcaggacagcaagccgccgagtag

SEQ ID NO: 314 - protein, 672 aa, Acinetobacter baumannii
MTTLVIVESPGKVKKISALLGAGYKVVASVGHVRDLPPKELGIEPPDFRPHYQPTERGRDVLARLKKDVAAADRILLATDPDREGEAIAWHLADALKLRDPQRITFTAITKDKVQAAVAAPRRIDMNRVRSQEARRALDRIVGYRVSPALSDRAGQPLSAGRVQSPAVRLVVDREREIASFKVTEHYGAELTFDNGDGTAWRAVWDTKPHMAEGESYIMDDALALRVAAVRHVTVAEVADTEKGRAPAAPFTTSTLQQAAGQRLKLRPKKTMELAQRLYEQGAITYHRTDAPNMDDAGMEDIAAYARSAGLPLAEKPRRWKAKEGAQEGHEAIRPTHAADLEAGETDDEKALYRLIWQRAVASQLADAIYAVRSVRLAGDAEGLAVAFTATGRTLQSPGWMAVYAADADDSDDEGEASNNPIPALAEGAGLTASSGRLLTKHTKPPTRFTEATLVKEMERLGIGRPSTYAAIIENITGRGYVIEGQKGYLTPSPIGETIRDALVGRFRFAELDYTRGLEDELDQIAEAKADYQGVISAAWSALDDELGKLDSAGIAAAHPCPACGKALHRRKGQYGFFWSCTGYPECKTSLPDDKGKPGQRKAPPPSTGFQCPKCGKELARRQGVSKPKKKGMKGRPYDFYSCTGYPKCDASYQTGPDGKPVFEGAGQQAAE

SEQ ID NO: 315 - DNA, 675 bp, Acinetobacter baumannii
ttggatgcggtcgcgcgcggcttgcgcgaacgctggccggatcggttgctattgattgcagcggacaatgaccaccgggccgagaaggagctacggccagacggcaagccccgcgaaaatgttggcttgaagaaggcacaagaggcggcggccaaccataagggtgtggcactggtgccgcccttcgccgatggggacaagggttccgattggaacgactacgcccagcagcacggcgacgaggcggcgcgtaaagagcttgagcggcaggtggcgcaggcaagaaccgaagcggccatgaacgccgagcgcatgatggtgattgcgcgcgagcgtgaagccgaggcccgcaacgaccccacgacgagcgccgacgacgcccttgtggcacaggaaagggccgctgcgaatgatctaatggcccgcgccgtagcaggtggcctcaaggcccgcgccgaggctagggacgcccttgtggcaaacgccacaggcgcgccgcgtcccgtggccgctgtcaatgccacgatgggccgcaccaaagccgagcaggccgacgaattgaaggagcagcggataacggttttcgacggacaaaacgtgtccacgaaaccggagcagcagaaggcctcacagccgcgccgtgctcgagcgcggggatatgacgcagacctttaa

SEQ ID NO: 316 - protein, 224 aa, Acinetobacter baumannii
MDAVARGLRERWPDRLLLIAADNDHRAEKELRPDGKPRENVGLKKAQEAAANHKGVALVPPFADGDKGSDWNDYAQQHGDEAARKELERQVAQARTEAAMNAERMMVIAREREAEARNDPTTSADDALVAQERAAANDLMARAVAGGLKARAEARDALVANATGAPRPVAAVNATMGRTKAEQADELKEQRITVFDGQNVSTKPEQQKASQPRRARARGYDADL

SEQ ID NO: 317 - DNA, 204 bp, Acinetobacter baumannii
atgatgacggggtgtaccaaatcaacagtcttattgaggccaaacattccggctaatttaatgcagccatgtcagacttttaataagcttgagggtggtaccggtaaagttattgccctgtgggcggtaaatacagttgctaaaggtagcgaatgtgcagcaaaagtagatgcatggatagaaataggaaaagccctcagttga

SEQ ID NO: 318 - protein, 67 aa, Acinetobacter baumannii
MMTGCTKSTVLLRPNIPANLMQPCQTFNKLEGGTGKVIALWAVNTVAKGSECAAKVDAWIEIGKALS

SEQ ID NO: 319 - DNA, 201 bp, Acinetobacter baumannii
atgatatttgaaggttacttaattgaattatatttcagtactttaaattttaaaaatgcttataaattaggtttcttaattaatgaaaatgagatatttattccctatgtaaatattctttctcagaaggaaattgtagaaaccttaaaagaaggtggaaaacttgttgaaaaaatgtttaacggaattagtccacaatga

SEQ ID NO: 320 - protein, 66 aa, Acinetobacter baumannii
MIFEGYLIELYFSTLNFKNAYKLGFLINENEIFIPYVNILSQKEIVETLKEGGKLVEKMFNGISPQ

SEQ ID NO: 321 - DNA, 357 bp, Acinetobacter baumannii
gtgtataactataatgctttagagttacttcacaaagttgataatcttttagcaaaagattctttaatttatcttgaccctccctattacgttaaagggcaaggattatatcgaaacttttacaaacatgatgatcatgttttaatacgcaatgcattagatcaggttaaaacgaaatggatcgtttcttatgacaattgtcaagaaataaaagatatttatcaaggttatagacaagatgaatatgatttaaattatagtgcttattttaaaatgaaaggcacagaagtaatgatttattgcaactcaattaaacctgtaaatgtttcagctaagcaagcagagttagaattatag

SEQ ID NO: 322 - protein, 118 aa, Acinetobacter baumannii
MYNYNALELLHKVDNLLAKDSLIYLDPPYYVKGQGLYRNFYKHDDHVLIRNALDQVKTKWIVSYDNCQEIKDIYQGYRQDEYDLNYSAYFKMKGTEVMIYCNSIKPVNVSAKQAELEL

SEQ ID NO: 323 - DNA, 213 bp, Acinetobacter baumannii
atgccaattactagaaaaatttaccgtaagggtgagcagcctatgccattgaccgctgaacagttggcagaaatcaatgcgctcaagggtttgaatgacgcggacattgaccacagtgatgatcaggcgaccaaagcaggttggatacaggcgagtcttgagaagattaagagtacgccttttgcgctagagcctaagcacctgacacactag

SEQ ID NO: 324 - protein, 70 aa, Acinetobacter baumannii
MPITRKIYRKGEQPMPLTAEQLAEINALKGLNDADIDHSDDQATKAGWIQASLEKIKSTPFALEPKHLTH

SEQ ID NO: 325 - DNA, 858 bp, Acinetobacter baumannii
ttgatcaatcttgaacgcgtagttacttttctggctgtcgtgaatcggggtggctttcgtgaagcagccaagcacacagggctctcacagtcagctgtgactcagcatgttaggcgcctagaagagtcgctgggtgtcaatctgattgtgcgaaacaacgcaggtagtacgctcacagaggaaggcaaagtgtttttgccttatgcggaaaacctagtgcgcaccggatccagagcgtgcgcattattcgacacaaatcgtcttgtaataggcgcgagctcgaatatcggcatctatgtattgccaccgcacttgaggcggttcaaggaaacagcaacttgcaattttgatgtagtcattggcgataatcttaccattgtgaaaaaactggaaaactttgaagtcgatgtggccattatggaatggtgggatcaacgagagggatttgatgcatgcgtttggcgaagtgaagcactagctgtgattgtgccggtggagcatccgtgggccaaattggcgagtattccattagattggctgaagggagagaaattgctggggggagaaacaagtagcggcacagggcgtctgttacagcattttttcggaagcgtggcagattctattggtgtatctatgcagcttggaagcacagaggcggttaaacgggcagtacaggcaggcttgggtatttcattggtgatctcttcgtctgtggtcgatgagtgcgagagtggtcgactaagaagcgttaaaattgaagggatcaccccctacaaaaatctttacgttatttgtcgtggcaatatgcttgaaaatacaccatcggcacatttcaaaaaatttctacttcagtag

SEQ ID NO: 326 - protein, 285 aa, Acinetobacter baumannii
MINLERVVTFLAVVNRGGFREAAKHTGLSQSAVTQHVRRLEESLGVNLIVRNNAGSTLTEEGKVFLPYAENLVRTGSRACALFDTNRLVIGASSNIGIYVLPPHLRRFKETATCNFDVVIGDNLTIVKKLENFEVDVAIMEWWDQREGFDACVWRSEALAVIVPVEHPWAKLASIPLDWLKGEKLLGGETSSGTGRLLQHFFGSVADSIGVSMQLGSTEAVKRAVQAGLGISLVISSSVVDECESGRLRSVKIEGITPYKNLYVICRGNMLENTPSAHFKKFLLQ

SEQ ID NO: 327 - DNA, 1008 bp, Acinetobacter baumannii
atgaaacaaaaaatagttcttacccactgggttcatcctgaaattatcgattatttacaatctgttgcggatgtcgttcccaacatgacccgcgatactatgtcgcgcgcagaattgctggagagagcaaaggatgctgacgcactgatggtattcatgcctgacagtatcgatgatgattttcttgcgtcctgccctaaattgaagattgtaagtgcagcactcaaaggctatgacaactttgatgtcgatgcttgtacccgccgtggtatttggttcagcatcgtgccggaccttctgaccatcccaacggcggagctgacaattggattgcttcttggcctgactcgccatctggccgagggggatcgccgtatccgaactcacggatttaacgggtggagaccggaactatacggaacgggtttaacaggacgcacactcggaatcatcggtatgggtgcggtcgggcgagcgattgcgaagcgcttatcgagttttgatatgcgggtgctttattgcgatgacatcgccttgaatcaagagcaggaaaaggcctggaatgcacgacaggtgagtctcgatgaattattaagtagcagtgactttgttgtacctatgctgccaatgacgccgcaaactttgcacttattgaatgcagaaacaattggcacaatgcgcacaggaagctacttgatcaatgcgtgtcgtggttcagttgtcgatgaattagctgttgccgaagcacttgaatctggaaaattggcgggttatgcggcagatgttttcgaattggaagagtggatccgtgttgataggccaacagctattccgcaggagttactgaccaatacagcgcaaacatttttcaccccacatttggggtctgcggtcgacgacgtgcgtttcgaaatcgagcaactagcagccaataatatcttacaggcactgaccggccaaaggccatccgatgctatcaataatccaattttggaaggcgttaattga

SEQ ID NO: 328 - protein, 335 aa, Acinetobacter baumannii
MKQKIVLTHWVHPEIIDYLQSVADVVPNMTRDTMSRAELLERAKDADALMVFMPDSIDDDFLASCPKLKIVSAALKGYDNFDVDACTRRGIWFSIVPDLLTIPTAELTIGLLLGLTRHLAEGDRRIRTHGFNGWRPELYGTGLTGRTLGIIGMGAVGRAIAKRLSSFDMRVLYCDDIALNQEQEKAWNARQVSLDELLSSSDFVVPMLPMTPQTLHLLNAETIGTMRTGSYLINACRGSVVDELAVAEALESGKLAGYAADVFELEEWIRVDRPTAIPQELLTNTAQTFFTPHLGSAVDDVRFEIEQLAANNILQALTGQRPSDAINNPILEGVN

SEQ ID NO: 329 - DNA, 798 bp, Acinetobacter baumannii
atgaatacgaacttcgaagccatattgtcagagcagcgccaaagctggaatcgagtagttaggtatgtgatattgattttagctattgtcgtcggatgttggtattacgttggtctatttgatggtgagcgtttaggcgaaggcgtgccaagtcttgttagtctcattggtgagatgttccctcccaactttagtgagtggagagcatgggtcaagccagtgctcgataccttagccatgagtattgctggaaccgccatcgctgtgcttttgtccgtgcccttgggtattttggctgcacgcaataccagtccacatccagcggtctatcaggctgcgcgtgctctgttaaatgtgttgagatctgttcctgagcttattatgggtatagttttcgtggcagctgtcggctttggtgcactgccgggtgtgttggcattaggcctgcactcaatcggcatgatcgctaagttttttgcggaagcgattgagcatacagatcaagcaccagttgaagctgcgcaggccgcaggttgcagcccgctacaagtgatatttcatggcatttttccgcaagtattaccgcaaatggccgacaccgcgatttatcggtgggaatacaattttcgcgcctcaacggtgatgggaatggtcggtgccggcggtataggtttcgagttgataggatcgctgcgtcttatgcaataccaagaagtatccgcgatattgctggtcattcttgggatggtgacgctagttgatacattcagttcattcttgcgtcgcaagttcaagtag

SEQ ID NO: 330 - protein, 265 aa, Acinetobacter baumannii
MNTNFEAILSEQRQSWNRVVRYVILILAIVVGCWYYVGLFDGERLGEGVPSLVSLIGEMFPPNFSEWRAWVKPVLDTLAMSIAGTAIAVLLSVPLGILAARNTSPHPAVYQAARALLNVLRSVPELIMGIVFVAAVGFGALPGVLALGLHSIGMIAKFFAEAIEHTDQAPVEAAQAAGCSPLQVIFHGIFPQVLPQMADTAIYRWEYNFRASTVMGMVGAGGIGFELIGSLRLMQYQEVSAILLVILGMVTLVDTFSSFLRRKFK

SEQ ID NO: 331 - DNA, 873 bp, Acinetobacter baumannii
atgaaaaagctattcgaaaagctattcgctgtactggctctaatatcgtttagcctcttaggtagtgtcacatatgccgcacctaatcctgaccccggcacattaaaagttgctctcttgcctgatgaaaatgcatcaaccgtcattaaaaataataagcctctagagatgtatcttgaaaaagctctgggcaaaaagattgagcttattgttaccactgactattcatcaatgattgaaggaatgcggttcggtcgtattgatcttgcatattttgggcccttgtcttatgtattggccaaacagaaaagtaagattgaaccatttgcagcaatgcaacaaaaaggcacaacaacttatcagtcagtgctaattgtgaataaggcggcgggcatcaacaacatcacagatatcaagaaaaaagccgttgcctggggtgacaaggcctctacatccagccacctgatccccaaatcaatgcttgctgataaaggattatttgccggaaaggattacaaggagcatttcgtaggcgctcacgatgcagtggcgatggcagttcagaatggacacgcgcaggccggtggtctgagcaagcccattttcaaatcgctcgttcagagcggcttgatcgatctaaacaaagtgaaggtcttagtggagtcaaaaccgtttcctcagtacccatggactatgcgctctaacttaaaaccagagctaaaagtaaaaattcgtgctgccttcctcgatttgaaagatccgaacgtgttgaaaccattcaaggctgatggattcgggcctgtaacagataaggattacgatgtcgtgcgtgatttaggtagtttgctaaagctagatttttccaagttctaa

SEQ ID NO: 332 - protein, 290 aa, Acinetobacter baumannii
MKKLFEKLFAVLALISFSLLGSVTYAAPNPDPGTLKVALLPDENASTVIKNNKPLEMYLEKALGKKIELIVTTDYSSMIEGMRFGRIDLAYFGPLSYVLAKQKSKIEPFAAMQQKGTTTYQSVLIVNKAAGINNITDIKKKAVAWGDKASTSSHLIPKSMLADKGLFAGKDYKEHFVGAHDAVAMAVQNGHAQAGGLSKPIFKSLVQSGLIDLNKVKVLVESKPFPQYPWTMRSNLKPELKVKIRAAFLDLKDPNVLKPFKADGFGPVTDKDYDVVRDLGSLLKLDFSKF

SEQ ID NO: 333 - DNA, 141 bp, Acinetobacter baumannii
atgtttttagcagtagcagcatcaccattggctgaaattgtccagcctgcattcgctgctgtacctgcatcagtgactgctttatcaagtgctgttaaagcatcaccaacattgtttgcacttgtacctgcaacattataa

SEQ ID NO: 334 - protein, 46 aa, Acinetobacter baumannii
MFLAVAASPLAEIVQPAFAAVPASVTALSSAVKASPTLFALVPATL

SEQ ID NO: 335 - DNA, 756 bp, Acinetobacter nosocomialis
atggaaattggttcaggatttgtagtgactgcaaatgggctaattagtactcagtgtgacattatcatatatgataagacagtgacgcccttaataaagaatgaaaaaaatcagaggtttttcccaatagagtcggttgtagccattggggaagttaaatcaaaattaactttatcagatttgaaggatgctttattaaagttagctaaatcaaaaggtttaagagatgttttatattctccagcttatgtatatagtataagaaataaaaaatctactgatgattacaaacctgaaaatgatgagtttgatcaaattgttacatttttaatttgtgagaaatttttgtttcctatagaagatacacctttaactaatattatacggtgctatggtgattctttacctcataggccattttgtcatagacataatatggttttaagtattgaagatggtttattaacgtatgttttagatggatatactatatatccatttccatctaaattaacatcaatctttaaatttgatgaggaaaataatataactgaagagattaaaaaggttgagcgtcttaattacagatttattaagcctattaataaagaatcaattgaacatattcgtcatttcacaagcatattacatacaggactgattagtgtttctgttttatttccagacttagcaagatatattccagatgaggaagatgtacaaatgtttgactgtgttcaaaattataagttttaa

SEQ ID NO: 336 - protein, 251 aa, Acinetobacter nosocomialis
MEIGSGFVVTANGLISTQCDIIIYDKTVTPLIKNEKNQRFFPIESVVAIGEVKSKLTLSDLKDALLKLAKSKGLRDVLYSPAYVYSIRNKKSTDDYKPENDEFDQIVTFLICEKFLFPIEDTPLTNIIRCYGDSLPHRPFCHRHNMVLSIEDGLLTYVLDGYTIYPFPSKLTSIFKFDEENNITEEIKKVERLNYRFIKPINKESIEHIRHFTSILHTGLISVSVLFPDLARYIPDEEDVQMFDCVQNYKF

SEQ ID NO: 337 - DNA, 765 bp, Acinetobacter nosocomialis
atgactacatcaatccgtgcagaagatattatcagccctattactgatactataaaagcgaataaaaactcaccaaaagaagcaaaaaatctaggtttatttgcttacgataaaccaaccccagaaaatacagttttattacttattgatcatcaagttggtttaatggcgagcgttcgtgatatgtcgagcctcgctgaattaaaaagtaatgttcttgggttagctcgtacggctaaagctcttaatattccaacactgattacatcatcaaacgcacaatggcaaaacggcgatactctcccagaaattaagtcattgttccctaataattcaatttatcgacgtacagggatcattaatgcatatgaagatccgacttttcgtaaagcacttattaatttgctagaagcaacaggtcgcacccatattattattgctggcgtaaccattggtacttgctgtactttcccgacactatcgctattaaatgatggatataaagtctacccagtcattgatgcatgtggcgcatggaatcaatacgaagttcaggccgctacattacgcatggcaaatgcaggtgcagaaccagtaacaacctttagtctagcttgtgaattacaggctgactggaaaaagccttcagcagatcaaatgcttgagcctttcaaagaaaacttatcggaatatggatttgtactacaaaacttctgggataatgtcggcaccccagcagttgaagatccttttaaaatcaaataa

SEQ ID NO: 338 - protein, 254 aa, Acinetobacter nosocomialis
MTTSIRAEDIISPITDTIKANKNSPKEAKNLGLFAYDKPTPENTVLLLIDHQVGLMASVRDMSSLAELKSNVLGLARTAKALNIPTLITSSNAQWQNGDTLPEIKSLFPNNSIYRRTGIINAYEDPTFRKALINLLEATGRTHIIIAGVTIGTCCTFPTLSLLNDGYKVYPVIDACGAWNQYEVQAATLRMANAGAEPVTTFSLACELQADWKKPSADQMLEPFKENLSEYGFVLQNFWDNVGTPAVEDPFKIK

SEQ ID NO: 339 - DNA, 600 bp, Acinetobacter nosocomialis
atgaaagatctatttataattttattacacggcgtaggtagtaatggtgaagacttagaagcagttggagaattttttaaagccaatcattctaatgtgaattttgtcgcacccaatgctccttttagctttatgaacagtaaagaggcctatcagtggtttagcatcgctggggttaatgatgagaatcgctttagtcggattaaagaagccagagctcattttgaccagaaaatccaagaaatcattaccaaaaaccaattggaaaaccacctagataaagtcgttttcttaggattttctcaaggttcaataatggctttagatgcagtcgtttcagggcgttggcctattgcggggctgattagcatcgctggaagattagcaagtccaatcaataatgaaattaataaaaacacgaaaattttattaattcatggtgaatcagacgccgttatttctccaactgaaagccaaagtacatatcaacaaatgcgtgcagcaaacttaaatgttgagttgaatattttacccgctacgggacataccatttcgcattcagcgcttcagttaagccttgattttttaaacactatttaa

SEQ ID NO: 340 - protein, 199 aa, Acinetobacter nosocomialis
MKDLFIILLHGVGSNGEDLEAVGEFFKANHSNVNFVAPNAPFSFMNSKEAYQWFSIAGVNDENRFSRIKEARAHFDQKIQEIITKNQLENHLDKVVFLGFSQGSIMALDAVVSGRWPIAGLISIAGRLASPINNEINKNTKILLIHGESDAVISPTESQSTYQQMRAANLNVELNILPATGHTISHSALQLSLDFLNTI

SEQ ID NO: 341 - DNA, 405 bp, Acinetobacter nosocomialis
atgaatacatcaaacacagctccttatgcggcattactactccgtataaccctagcactttatttctttgcccatgctggtctcaaactgtttgtatttacaccagcaggtacagcacaatttttccaatctgttggagttccgggatggatggcatatgtgactattctctgggagattttaggagcaatattattattcgttggttttaaacctcgaattgttgcggttgcgctgattccagtcttattaggtgcgatatttactgtacatggtgctgctggtttcttttttacaaaccctaatggtggctgggaattcccatttatgtggattatttctttagttgctctcgcactcattggtgatggaccgttttctctaagtcaatcttttaaaaactaa

SEQ ID NO: 342 - protein, 134 aa, Acinetobacter nosocomialis
MNTSNTAPYAALLLRITLALYFFAHAGLKLFVFTPAGTAQFFQSVGVPGWMAYVTILWEILGAILLFVGFKPRIVAVALIPVLLGAIFTVHGAAGFFFTNPNGGWEFPFMWIISLVALALIGDGPFSLSQSFKN

SEQ ID NO: 343 - DNA, 918 bp, Acinetobacter baumannii
atgaatagacttgaatgtaatcgcatgtttatttcgatcattgagcaaggtagttttgttaaagctgccgaaaatttaaatacaagcgtcgcacaagcatccaagcttatttcaaaactagagaatgaattaggcgtacagctgctaaagagatcgacacgctcattaaaacccacagaactcggattagcttattaccaccgaattaagcaacttatggcagagtttgatgaaattgaaattagtattaaaaatcaatctcgcgccccagtaggtaaactaaaaataagtgctcctaactcttttggaaccgtgcaattaagcaaaaccctggttaactttgcccagaaatatagtcaaattgaattagacgtgagttttaccgaccgtacggtgaatgtcattgaagaaggatttgatattgccattcgaattggagagcttaaagataataatttaattgcgactccattatctcaaattagatttgtattggtcgcatctcccctttatttagaaaaatttggctatcctcaaagcctacaagacctagaatctcattcctgcatcatcgatacaaactttaaagatccatatgaatgggctttttttgaaaaatcaccttcgaatgtattacataccattaatgtgaatggtcggattcattttgctaatacagaagcctgtttagcggcaaccatagccggactcggcatcgccagattacccatgtttattttgaaagatgcacttatcgacaaaaagattattcctattttagaaaactatgaattaccgcgaagaggtctctatgcggtctacccaccagcaaaacacctagccaacaaggtgagaaccctaattgattatttaaaagagcaatatgcatatcctgccgaatgggaaatttacgagtaa

SEQ ID NO: 344 - protein, 305 aa, Acinetobacter baumannii
MNRLECNRMFISIIEQGSFVKAAENLNTSVAQASKLISKLENELGVQLLKRSTRSLKPTELGLAYYHRIKQLMAEFDEIEISIKNQSRAPVGKLKISAPNSFGTVQLSKTLVNFAQKYSQIELDVSFTDRTVNVIEEGFDIAIRIGELKDNNLIATPLSQIRFVLVASPLYLEKFGYPQSLQDLESHSCIIDTNFKDPYEWAFFEKSPSNVLHTINVNGRIHFANTEACLAATIAGLGIARLPMFILKDALIDKKIIPILENYELPRRGLYAVYPPAKHLANKVRTLIDYLKEQYAYPAEWEIYE

SEQ ID NO: 345 - DNA, 183 bp, Acinetobacter baumannii
gtggctatttcaactggttatgaaggaaaagctaaagcctcaggaggtagtgcaattgtcctaactcatcgaaactcagatggcgaaattcttcacattcgagcttcaaaagttggtgaaaacggcattaaggcagacacatggtatcagcttgatgctaatggtcagtttgtggaggcttaa

SEQ ID NO: 346 - protein, 60 aa, Acinetobacter baumannii
MAISTGYEGKAKASGGSAIVLTHRNSDGEILHIRASKVGENGIKADTWYQLDANGQFVEA

SEQ ID NO: 347 - DNA, 228 bp, Acinetobacter baumannii
atggataaacctaactgggccgaactaattaaacaacttattgagcgtggatatacggaagagagcattgctgatgcagtagatgcaactcaaccagcaatccactacttgaagactgggaagactcaggaaacgaaatacagcacaggtgcaggaattattcgcctgtgcacattaaatggtatttcaatcaaccacaaaaaagccccagttacggcaaataactag

SEQ ID NO: 348 - protein, 75 aa, Acinetobacter baumannii
MDKPNWAELIKQLIERGYTEESIADAVDATQPAIHYLKTGKTQETKYSTGAGIIRLCTLNGISINHKKAPVTANN

SEQ ID NO: 349 - DNA, 750 bp, Acinetobacter baumannii
atgttgctagattataagggtgtttatatttcgatgggcttattcatggttggcttaacagttggagatcgcgtccgtcaatgcaggaagttaaagcggtggtctcaagaaaaattggcgaaggaagcgcaattaacacaagctactatttcacatgttgagaacaacattagtgatcagtcaaaatacttgccacaaatagctaaagctttaaacgtatcaagtgaataccttctaagcggccaagaatacatagataaacaaaaaggaacgttcgatgactttgtaatcattgggggtgacaaagctggtgaagttccttctaaggaggaatatgtattgatcccaaagtttgatgtggctgggtcttgtggctctggctctatcattgaccacgtggatgttaaaggcggtttggtatttagcgaagattggatactatctcaaggacttaagaaagataaattagtagttattcatgcaattggggacagtatgtaccctactattgaagatggtcaggttttactggtggatacatcagacatcacacctagaaactcaaaaatttactttatgtgtatagataatgagtattacattaagcgcttagttaatatgctaactcattgggtaatccgttctgacaatccagataaaaatgatcatcctgatatcgagataagccaagagactatgaataaccttcaaattgaaggtcgtgtagtttggaaaggtggattgctataa

SEQ ID NO: 350 - protein, 249 aa, Acinetobacter baumannii
MLLDYKGVYISMGLFMVGLTVGDRVRQCRKLKRWSQEKLAKEAQLTQATISHVENNISDQSKYLPQIAKALNVSSEYLLSGQEYIDKQKGTFDDFVIIGGDKAGEVPSKEEYVLIPKFDVAGSCGSGSIIDHVDVKGGLVFSEDWILSQGLKKDKLVVIHAIGDSMYPTIEDGQVLLVDTSDITPRNSKIYFMCIDNEYYIKRLVNMLTHWVIRSDNPDKNDHPDIEISQETMNNLQIEGRVVWKGGLL

SEQ ID NO: 351 - DNA, 456 bp, Acinetobacter baumannii
atgaacaaaattctattatttagtttgattcttattagtggtattgctggatgttcaaatgaacccgaaattatattgccaaaagtctctcaagtcggtgtggaaaaagccgaaaacatcataaaagaagcagctctccaacctataaaaacaattgatagtactgatagtcgtgataatacaatgaaaatatatcagtttgatggtgttcatacacaactagagtttagtgaaaattatattctgatttcctggcatcaacatgataaagcaagcatagataaagcagtccgtttaggaatggcaacacttggtgatgatgctggctattttattcataaagtagatatgcagggagaacatactgaatattcaattcaagggtataagttagtccaaaatttatgtgtctctgaattgtgctcaataaaactggaaagaaaacctcttatataa

SEQ ID NO: 352 - protein, 151 aa, Acinetobacter baumannii
MNKILLFSLILISGIAGCSNEPEIILPKVSQVGVEKAENIIKEAALQPIKTIDSTDSRDNTMKIYQFDGVHTQLEFSENYILISWHQHDKASIDKAVRLGMATLGDDAGYFIHKVDMQGEHTEYSIQGYKLVQNLCVSELCSIKLERKPLI

SEQ ID NO: 353 - DNA, 801 bp, Acinetobacter baumannii
atgaatgcaatttctaattttacttttcataatgattataatgttcgcgttcagttaattgatgctgagccgtggttttgtcttgctgatgtctgctgtgttttatcagttgatcgtacttctcgtttattacgtgatttggatgaaaaggggttggcagattgccacacccctacaaatggtggaaatcaaaagattaaatttgttaatgagccaaatctttatcggatcatctttcgttcaaataaaccagaagcaaaacaattccaagattgggtatttaacgaagttttgccaaccatccgcaaaacaggcaaatacgaagcaccaaaacccgttgagaaacgtaattaccttaacaatagtgacatgaacaatattaaacgtttgatatggacatgcgctgatcatttcggtcacaaaggatcctttaatcaagcaatttgggcttgtttgcgagatgtgactggtgtgcctagtccagcaaagtttgaagtggagcacttgccagtgttggcggaggaatttaaacgtattttaaatattgttcagccgtttcttgatatgcagtatgaatgccagactcttttaattaaaagggtgattcgtgggcgtgccgatcatacggtattgcaagctttactagataatatgcgtaatgctgccaatcaatctgataatcagttcaaggaagcattacaaaagcagttgcctgcaatgtttaatcaggagtgtttgaatttgattaatcgcagacctaatcactatgaccactatgaatacaatgaacgattgatttga

SEQ ID NO: 354 - protein, 266 aa, Acinetobacter baumannii
MNAISNFTFHNDYNVRVQLIDAEPWFCLADVCCVLSVDRTSRLLRDLDEKGLADCHTPTNGGNQKIKFVNEPNLYRIIFRSNKPEAKQFQDWVFNEVLPTIRKTGKYEAPKPVEKRNYLNNSDMNNIKRLIWTCADHFGHKGSFNQAIWACLRDVTGVPSPAKFEVEHLPVLAEEFKRILNIVQPFLDMQYECQTLLIKRVIRGRADHTVLQALLDNMRNAANQSDNQFKEALQKQLPAMFNQECLNLINRRPNHYDHYEYNERLI

SEQ ID NO: 355 - DNA, 258 bp, Acinetobacter baumannii
atgattctaaacttaacagttaatagtgctaaacaggtcagcaattttctaaaaagacatcgaggttgggtttcttataaagagcacgactttcaatgcgaggttttagagtgcttagaggaaagcaaaacatcaatgtcagcagattataaatttaatctgtcgagatgcattagttgctatgaaaaaggtaaagagtgcaaaaccgatgacattttctttgagtttgtacaggaaatagaaaaagcgggaacctaa

SEQ ID NO: 356 - protein, 85 aa, Acinetobacter baumannii
MILNLTVNSAKQVSNFLKRHRGWVSYKEHDFQCEVLECLEESKTSMSADYKFNLSRCISCYEKGKECKTDDIFFEFVQEIEKAGT

SEQ ID NO: 357 - DNA, 354 bp, Acinetobacter baumannii
ttgaaagatgatgcacagataaattttcaggttgactcagtgcaaggaaaccaaattgattatcctgttgcgtctgatgaaattaagacagctagaattataggtaaaattaccaaagaaattggaacgggcgatgatgcgaagcattcaattatttggactactattagatggtgttttattattgcttcagctataagtttaatattatttatatttttaggatttgcttacaacaataataatcaaagtgaaattgtagagttaaagaaatttatttttagtatatggtctattttcacgcccataattactcttgctttaggttatgcttttggtaaggattataaataa

SEQ ID NO: 358 - protein, 117 aa, Acinetobacter baumannii
MKDDAQINFQVDSVQGNQIDYPVASDEIKTARIIGKITKEIGTGDDAKHSIIWTTIRWCFIIASAISLILFIFLGFAYNNNNQSEIVELKKFIFSIWSIFTPIITLALGYAFGKDYK

SEQ ID NO: 359 - DNA, 417 bp, Citrobacter freundii
atggatcggcaacctgacggttctggaaccctatcgcccgatcttcatcggcgcagcgctggtcgcgttgttctttgcctggcggcgcatctatcgcccggcgcaagcctgcaaaccgggggacgtgtgcgcgattccccaagtgcgggctacttacaagctcattttctggatcgtggccgcgctggtcctggtcgcgctcggatttccctacgtcatgctatttttctattaatcacaggagttcatcatgaaaaaactgtttgccgccctcgccctcgccctcgctgccgttgttgcccccgtgtgggccgccacccagaccgtcacgctgtccgtaccgggcatgacctgctccgcctgcccgatcaccgtcaagaaggcgatttccaaggtcgaaggcgtcagcaaaattga

SEQ ID NO: 360 - protein, 138 aa, Citrobacter freundii
MDRQPDGSGTLSPDLHRRSAGRVVLCLAAHLSPGASLQTGGRVRDSPSAGYLQAHFLDRGRAGPGRARISLRHAIFLLITGVHHEKTVCRPRPRPRCRCCPRVGRHPDRHAVRTGHDLLRLPDHRQEGDFQGRRRQQN

SEQ ID NO: 361 - DNA, 408 bp, Acinetobacter baumannii
atgggactgatgacacgcattgccgacaaggcgggcgcgcttggcagcgttgtttccgcgatgggatgcgctgcctgtttcccggctaccgccagcctgggcgcggccatcggcctaggctttctacaggaatacgaagggttgtttatctccaagctgctgccgctgttcgcagtcgtggctttgctggcgaatgcactgggctggctgagtcatcggcaatggcaccgcagcctgctcgggatggtcggcccagccatcgtgctggcggccatgctcttgttttttggcaattggtggacggcgaacctcctctatgtcggtctggccttgatggtcggggtgtcgatctgggatctgctctcaccggccaaccgccgctgcgaactaccacccaaacacggctaa

SEQ ID NO: 362 - protein, 135 aa, Acinetobacter baumannii
MGLMTRIADKAGALGSVVSAMGCAACFPATASLGAAIGLGFLQEYEGLFISKLLPLFAVVALLANALGWLSHRQWHRSLLGMVGPAIVLAAMLLFFGNWWTANLLYVGLALMVGVSIWDLLSPANRRCELPPKHG

SEQ ID NO: 363 - DNA, 552 bp, Acinetobacter baumannii
ttgaactattcaatatgcgatatagctgaatcaaatgaattaatccttgaagcagcaaagatgcttaagaaaagctttcttgatgctggaaatgaatcatggggagatattaaaaatgctattgaagaagttgaagaatgtatagaacatccaaatatatgcttgggaatatgtctggatgataaactgattggatggaccggattaaggccgatgtacgataagacctgggaacttcatcccatggttataaaaactgaatatcaaggcaagggttttgggaaagtactactaagagaactagagacgagagcgaagagtaggggaattatcggaatagctcttggaactgatgacgaatatcagaaaactagtttgtctatgattgatataaacgaacgaaatatcttcgatgaaatcgggaatataaagaacgttaataatcatccatatgagttttataagaaatgtggttatatgatcgttggaataatccctaatgctaatggaaaaagaaaaccagatatatggatgtggaaagatattagctag

SEQ ID NO: 364 - protein, 183 aa, Acinetobacter baumannii
MNYSICDIAESNELILEAAKMLKKSFLDAGNESWGDIKNAIEEVEECIEHPNICLGICLDDKLIGWTGLRPMYDKTWELHPMVIKTEYQGKGFGKVLLRELETRAKSRGIIGIALGTDDEYQKTSLSMIDINERNIFDEIGNIKNVNNHPYEFYKKCGYMIVGIIPNANGKRKPDIWMWKDIS

SEQ ID NO: 365 - DNA, 801 bp, Enterobacter cloacae
ttgataatccgatttctagcactgcttttctcagctgttgtacttgtctctcttggtcatgcacaagaaaaaacgcatgagagctctaattgggggaaatactttagtgatttcaacgctaaaggtacaatagttgtagtagatgaacgcacaaacggtaattccacatcggtttataatgaatcccgggctcagcagcgctattcgcctgcgtccacattcaagattccgcataccctttttgcgctggatgcaggggcggttcgcgatgagtttcatgtttttcgatgggacggcgctaaaagaagctttgcaggtcacaatcaagaccaaaacctacgatcggcaatgcgcaattctaccgtttgggtctatcaactattcgcaaaagaaataggcgaaaacaaagcacgaagctacctagaaaaattaaactacggcaatgcagacccctcgaccaagagcggtgactactggatagatggaaatcttgcaatttcagcaaatgaacaaatttccatcctaaagaagctttatcgaaatgagcttccttttagggtagagcaccaacgcttggttaaagacttgatgattgtcgaagccaaacgtgattggatactacgtgccaaaacaggctgggatggtcaaatgggttggtgggtcggttgggtagagtggcctacaggcccagtattttttgcgttaaatatcgacacgccaaacaggatggaagaccttcataaacgagaggcaattgcgcgtgctattcttcaatccgtcaatgctttgccacccaactag

SEQ ID NO: 366 - protein, 266 aa, Enterobacter cloacae
MIIRFLALLFSAVVLVSLGHAQEKTHESSNWGKYFSDFNAKGTIVVVDERTNGNSTSVYNESRAQQRYSPASTFKIPHTLFALDAGAVRDEFHVFRWDGAKRSFAGHNQDQNLRSAMRNSTVWVYQLFAKEIGENKARSYLEKLNYGNADPSTKSGDYWIDGNLAISANEQISILKKLYRNELPFRVEHQRLVKDLMIVEAKRDWILRAKTGWDGQMGWWVGWVEWPTGPVFFALNIDTPNRMEDLHKREAIARAILQSVNALPPN

SEQ ID NO: 367 - DNA, 390 bp, Enterobacter cloacae
atgagcatcttcgatactccacgctacaaagaaaacccaagcgacattttcttcgaccacttcgtgatggatgttattggacttttgcctcccggcatgtcggaaaatctggatgccgctatatcaacgagcggcggcgcctggaggcaaaagaccaaacagctgatcaatctctcagacactatcgagattgcaatacttgatctgtggtacagaaattctgcaattttagagtcacgcggagaactttatgatccgtatcactttgcagtaaatttcgtagatgcttattttgcggaaaatagccaagtagatcagtggccaggtaatgcgctagaggttgctaagagccatattcgtgaagctcagcaacgcaaggcaaatgcctaa

SEQ ID NO: 368 - protein, 129 aa, Enterobacter cloacae
MSIFDTPRYKENPSDIFFDHFVMDVIGLLPPGMSENLDAAISTSGGAWRQKTKQLINLSDTIEIAILDLWYRNSAILESRGELYDPYHFAVNFVDAYFAENSQVDQWPGNALEVAKSHIREAQQRKANA

SEQ ID NO: 369 - DNA, 900 bp, Acinetobacter baumannii
atgatttacaacattgtttcagtttccggtggtaaagactcaactgctactttgcttctagcaatggcgtggggtgtagagaaccttcaggctgtatttgcagacacagggcatgaacacccagcgacctatgaatatgttgattacttggaacgaattttagaaatccaaattcaaagagttaaggcagattttagttttgaaattgcccgaaaacgtgagtatgtcagcactgtatggcgtgaagagggagtttctgaatctgtcatagaaaatgctttagctgttcttaaacctacaggtaatccctttttagatttgtgtctttggaaaggtagatttccttctacccgtagacgcttttgcacttctgaattgaaagttaagccgatccaacaaatgttttaccccattttggatgatggcaacatgattttgtcatggcaaggagtccgtgcagatgagtctttggatcgtaaatttttgcctgaatgcaatgaaattattgaaggtctttacaactacagaccaattttgaagtggacggcaaaagacgttttccaagctcatgcagacatgggaataaatccaaaccctttatacaaacaaggcatggggcgggttggttgtatgccatgtattaactgcaataaagatgagctgaaggaaatagcaaaacgttttcctgaggaaattgaacgggtagctgagtgggagcgaattgtaggattagtttcaaagcgccaatcggcaacattcttcacttctgattatcgagggcatggcattcaccagctggtggaatggtccaaaactgtgagaggtggaaaacaatacgatttagttgagcaaatgataggcatcgaagcttgttcatctgcatatggtttatgtgagtag

SEQ ID NO: 370 - protein, 299 aa, Acinetobacter baumannii
MIYNIVSVSGGKDSTATLLLAMAWGVENLQAVFADTGHEHPATYEYVDYLERILEIQIQRVKADFSFEIARKREYVSTVWREEGVSESVIENALAVLKPTGNPFLDLCLWKGRFPSTRRRFCTSELKVKPIQQMFYPILDDGNMILSWQGVRADESLDRKFLPECNEIIEGLYNYRPILKWTAKDVFQAHADMGINPNPLYKQGMGRVGCMPCINCNKDELKEIAKRFPEEIERVAEWERIVGLVSKRQSATFFTSDYRGHGIHQLVEWSKTVRGGKQYDLVEQMIGIEACSSAYGLCE

SEQ ID NO: 371 - DNA, 285 bp, Acinetobacter baumannii
atggtgtctgatatttataaagaaggtatcaaatataaaaaatgcggtgtcatattaacagggttagaacctaaagttggtcatacctatgacctattaaccgatttcgaagtcatagagaagaaagaacaattgatgaaagcactagataacgtgcacaacaaatttggaaagaaaaaactaggcgttggtccttgttatatacctggtcgaacctggtcgatgtcgagagataaactcactaaaaacccattcatgtgggatcagctaacaattgttaagtaa

SEQ ID NO: 372 - protein, 94 aa, Acinetobacter baumannii
MVSDIYKEGIKYKKCGVILTGLEPKVGHTYDLLTDFEVIEKKEQLMKALDNVHNKFGKKKLGVGPCYIPGRTWSMSRDKLTKNPFMWDQLTIVK

SEQ ID NO: 373 - DNA, 501 bp, Acinetobacter baumannii
atgcaagagatgacattaagccgagatgcacaaatagctctctggcaaatgataaacaaaactcccaattgcacagctaaggaaattgctcaggctataggggattcacataacactgtttgcaattacggcaaccagaacatgccaagttatttgcctagcatgaaaaagcttgaagcaatgatcttctttactcaaaaccctgcgttactcaaagtttgggcacatgagctgggctttgctttggttccagtcgcatgtggcagttcaaaacatcatgagttatctatttttgaagcaatgatgcagcacaacattaaaaacggtaaagcaaaccgtgtcgtatatgacgcatatgaagacggaattattacaccgttggaatatgaagaaattcatcaactgactcagaacttaattgaactcatcacagcagttgatcaagcagcattaaagcaaatgaagaaatgcacagcacagttaggaaatgaaaaagcctga

SEQ ID NO: 374 - protein, 166 aa, Acinetobacter baumannii
MQEMTLSRDAQIALWQMINKTPNCTAKEIAQAIGDSHNTVCNYGNQNMPSYLPSMKKLEAMIFFTQNPALLKVWAHELGFALVPVACGSSKHHELSIFEAMMQHNIKNGKANRVVYDAYEDGIITPLEYEEIHQLTQNLIELITAVDQAALKQMKKCTAQLGNEKA

SEQ ID NO: 375 - DNA, 243 bp, Acinetobacter baumannii
atgaatccaattcaattagcagtcgaagctgtaggagggcgaaccaatgcatctcttttacttggtatttcctataacgctgtaagaaagatggaagagaaaggggtattacctcgaacagattacacagaggaaacttcatattccaaaattctagctgataacagcaatggaaaaattactaaggaatggttgcttgataaagccaaccctaaacatcttcagacaaataaaccttcctaa

SEQ ID NO: 376 - protein, 80 aa, Acinetobacter baumannii
MNPIQLAVEAVGGRTNASLLLGISYNAVRKMEEKGVLPRTDYTEETSYSKILADNSNGKITKEWLLDKANPKHLQTNKPS

SEQ ID NO: 377 - DNA, 747 bp, Acinetobacter baumannii
atgattgctatgagtacaatggtcgagcgcattcaggaatcgctgaaaaaaaagaagttgtcatggtcaaaagccgcaacttccattggtttatcgcctcaagctccagctaagtggaaaaaaggccaaataggtaaagagactctggataagcttgcagcattacttgaagttgatgcgggttggcttttgaatggagggaatccaacaaaattaaatcacttaaacattgatgatttcatggccaaacatgggttaaataaaaaagaagatgcatcttttgatactgaagacattcttgaacctgatgtggttcagtttgaaatagcaaatggatacatatgggtagatgtagtggaagcaagtttttcgtgcggtactggggaatcgattgaatttcattttgatgtaattaatggaaaataccctttcccgccatctttttttcagaagaagcaagttgatccttcatgctttcgtttgattaaagcaaaaggcgatagtatggaagaatatatctataacgatgatttagtaggaattgatatttctcaaactaatattattgatggtgaaatctatgcagtctattttgaaggagaaggcatgattaaaaaaatctttaaggaagaaggaggtacgttgatacttcatagtttaaatgagaaatatcgagatcggaaagttacagaacaaaatggcgtgaatttcaaagtcatgggtcgtcaagtttggcgcgcaggttaa

SEQ ID NO: 378 - protein, 248 aa, Acinetobacter baumannii
MIAMSTMVERIQESLKKKKLSWSKAATSIGLSPQAPAKWKKGQIGKETLDKLAALLEVDAGWLLNGGNPTKLNHLNIDDFMAKHGLNKKEDASFDTEDILEPDVVQFEIANGYIWVDVVEASFSCGTGESIEFHFDVINGKYPFPPSFFQKKQVDPSCFRLIKAKGDSMEEYIYNDDLVGIDISQTNIIDGEIYAVYFEGEGMIKKIFKEEGGTLILHSLNEKYRDRKVTEQNGVNFKVMGRQVWRAG

SEQ ID NO: 379 - DNA, 138 bp, Acinetobacter baumannii
atgttacgtgaacatcaaatgcataaaaagattattgaaaaaatacctaatttaaaactgtgggaaagtgaattattttataaacttaaaattcatatcgaaaagcaatcatcctacaaaaaactaccaacatcttaa

SEQ ID NO: 380 - protein, 45 aa, Acinetobacter baumannii
MLREHQMHKKIIEKIPNLKLWESELFYKLKIHIEKQSSYKKLPTS

SEQ ID NO: 381 - DNA, 222 bp, Acinetobacter baumannii
atgagtgagtttaaagtcggggataaaattacaactctcgcatgtagagatattttgacagttactgcaattggcagtggtcactttcttaaggctaagggctttaattgccatggtatgaaggatggagagtgcagtgtccttgattttcaagtaaagcatgccaccactaaagaactaatagtgggtcaccgtattgattgccaatcaaaggatgtttga

SEQ ID NO: 382 - protein, 73 aa, Acinetobacter baumannii
MSEFKVGDKITTLACRDILTVTAIGSGHFLKAKGFNCHGMKDGECSVLDFQVKHATTKELIVGHRIDCQSKDV

SEQ ID NO: 383 - DNA, 354 bp, Acinetobacter baumannii
atgagcgaaggatataagacactgccagaggtcattgaggttctggaatgtagaaagaaaagagatctcagtatatttgaacatgggttcttgcatggctgtgattatgcgtatgagcaccagcaagagaatgtggaggatgcaaacgcgaaagcgcaaatgtgccgagacgaaaagaatcatgcaattaatcgatggtcagcagtttgtaatgaacgtgacgagctgcaaaagcggataaacaaagctaaagaaattgcagatgaattaatgcaaagcattgaaaattacaaattgggtgagttgttggagaaaatacttaaaggtgatttagatgaagtcagtaaatcttaa

SEQ ID NO: 384 - protein, 117 aa, Acinetobacter baumannii
MSEGYKTLPEVIEVLECRKKRDLSIFEHGFLHGCDYAYEHQQENVEDANAKAQMCRDEKNHAINRWSAVCNERDELQKRINKAKEIADELMQSIENYKLGELLEKILKGDLDEVSKS

SEQ ID NO: 385 - DNA, 525 bp, Acinetobacter baumannii
gtgaacgcatttgttgatatgaaaaaatcggaatacgcattagttgcttactcaaacgttgcagctaaatcaaaagagcgtaaagctttagaaaaagcagtgaaaaaatggttgaaacatccaggtaataaaattcaaccagttcaatctaagcagtcagaatctatggctcatggaaatcagcgagcttataaacgcatgggttgccgctgtgaagtttgtgttacttgggccatttcatcaggttttgtaaaaacgaagccgaagtctgaaataaaacgtggtccagatgagcgtcaattgcgtatacaggcacaaaaagagggtttagataggtttgctcaggtatttaaagaagattggcaattactagcatttgagatcggttatgcaattacagcatttcaacttgaaagggtttatcaaggtaagtctgaaattgatcaatatttcacatggaagtatgtgaaaaaagttgctgatcaattagttgctgaaaagttaaaagttaatgggggaatgtga

SEQ ID NO: 386 - protein, 174 aa, Acinetobacter baumannii
MNAFVDMKKSEYALVAYSNVAAKSKERKALEKAVKKWLKHPGNKIQPVQSKQSESMAHGNQRAYKRMGCRCEVCVTWAISSGFVKTKPKSEIKRGPDERQLRIQAQKEGLDRFAQVFKEDWQLLAFEIGYAITAFQLERVYQGKSEIDQYFTWKYVKKVADQLVAEKLKVNGGM

SEQ ID NO: 387 - DNA, 621 bp, Acinetobacter pittii
atgatcgcaatgaacatgtcgatgacagaaagaataaaagcaggcaagctatttaccgatatgtgcgaaggcttacctgaaaaaagacttcgtggaaaaacgttaatgtatgagtttaatcactcgcatccatcagaatttgaaaaaagggaaagtctgattaaagaaatgtttgccacggtaggggaaaacgcctgggtagaaccccccgtctatttctcttacggttccaacatccatataggccgcaatttttatgcaaatttcaatttaaccattgtcgacgactacacggtaacgatcggtgataacgtactgattgcacccaacgttactctttccgttgcgggacacccggtacaccatgaattgagaaaaaacggagaaatgtactcttttccgataacgattggcaataacgtctggatcggaagtcatgtggttattaatccaggcgtcaccatcggggataattctgttattggcgcgggtagtgtcgtcacaaaagacattccaccaaacgtcgtggctgctggcgttccttgtcggattattcgcgaaataaacgaccgggataagcaatattatttcaaagattttaaagttgagtcttcagtttaa

SEQ ID NO: 388 - protein, 206 aa, Acinetobacter pittii
MIAMNMSMTERIKAGKLFTDMCEGLPEKRLRGKTLMYEFNHSHPSEFEKRESLIKEMFATVGENAWVEPPVYFSYGSNIHIGRNFYANFNLTIVDDYTVTIGDNVLIAPNVTLSVAGHPVHHELRKNGEMYSFPITIGNNVWIGSHVVINPGVTIGDNSVIGAGSVVTKDIPPNVVAAGVPCRIIREINDRDKQYYFKDFKVESSV

SEQ ID NO: 389 - DNA, 819 bp, Citrobacter koseri
atggctcgtctggcagcatttgatatggatggcactttattgatgcctgaccatcatttaggtgagaaaaccctctctactttggcgcgactgcgtgaacgcgacattaccctcacttttgccacggggcgtcatgcgctggagatgcagcatattctcggggcgctatcgctggatgcatatttgattactggcaacggaacgcgcgtgcattctctggaaggtgaacttttacatcgtgatgatttacctgcggatgtcgcggagctggtgctgtatcagcaatgggatacccgagcaagcatgcatatcttcaatgacgatggttggtttaccgggaaagagatccctgcgttgttgcaggcatttgtctatagcggttttcgttatcagataatcgatgtcaaaaaaatgccactcggcagcgtcaccaagatctgcttctgtggcgatcacgacgatcttacacgcttgcagatccagctatacgaagcattaggcgagcgtgcacatttatgtttttccgccacggattgcctcgaagtgctgccggtgggctgcaataaaggcgctgcattgacggtgctgacccaacatttaggtttatcgttacgcgattgcatggcctttggtgatgcgatgaacgatcgcgaaatgttaggcagtgtcggtagcggatttattatgggcaatgcgatgccgcaactgcgcgcggagctcccgcatttaccggtgattggacattgccgaaatcaggctgtctctcactatttgacgcactggctggactatccacatctaccttattcccccgaataa

SEQ ID NO: 390 - protein, 272 aa, Citrobacter koseri
MARLAAFDMDGTLLMPDHHLGEKTLSTLARLRERDITLTFATGRHALEMQHILGALSLDAYLITGNGTRVHSLEGELLHRDDLPADVAELVLYQQWDTRASMHIFNDDGWFTGKEIPALLQAFVYSGFRYQIIDVKKMPLGSVTKICFCGDHDDLTRLQIQLYEALGERAHLCFSATDCLEVLPVGCNKGAALTVLTQHLGLSLRDCMAFGDAMNDREMLGSVGSGFIMGNAMPQLRAELPHLPVIGHCRNQAVSHYLTHWLDYPHLPYSPE

SEQ ID NO: 391 - DNA, 1773 bp, Escherichia coli
gtgcgattatttgctcaattaagctggtatttccgtcgggaatggcgtcgctatctcggggctgtcgccttgcttgtcattatcgcgatgctgcaactggttccgccaaaagtggttggtattgttgttgatggcgtgacagaacaacactttactaccgggcagatcctgatgtggatcgccaccatggtgctgattgccgttgtggtttatctcctgcgttacgtctggcgcgtattgctgtttggtgcgtcttatcaactggctgttgaactgcgtgaagattattaccgccagctaagccggcagcatcctgagttttacctgcgtcatcgcacgggtgacctcatggctcgtgcgaccaatgacgtcgatcgcgtcgtgtttgccgccggagaaggggtgctgacgctggtggattcactggtaatgggctgcgctgtgttgattatgatgtctacgcaaattagctggcagttgaccttatttgccctgttgccgatgccagtgatggcgatcatgatcaagcgcaacggcgatgccttgcatgaacgctttaagctggcacaggcggcgttttccagtcttaatgaccgcacccaggaaagcctcaccagtatccgcatgatcaaagcctttggtctggaagatcgtcagtcggcgttatttgccgcggatgccgaagataccggcaaaaaaaacatgcgggtggcgcgtattgatgctcgtttcgacccgaccatctatatcgcgattggtatggcgaacttgctggcgattggcggcggtagttggatggtggtgcagggcagtttaacgctgggccagctcaccagttttatgatgtatttaggtctgatgatttggccaatgctggcgctggcatggatgtttaacattgtggaacgtggcagcgcggcgtatagccgaattcgtaccatgctggccgaagcgccagtcgttattgatggtagtgataaggtgccagaaggtcgtggtgaactggatgtgaatattcgccagtttacgtatccgcagactgaccatcctgcgctggaaaacgtcaatttcgccctgaaaccctgtcagatgctgggtatctgcgggccgactggttccggcaaaagtaccctgttgtcgctcattcagcgtcatttcgacgtcagcgagggggatatccgctttcatgatattcctctgacgaagttacaactcgatagctggcgtagccgcctggcggtagttagccagacaccgttccttttttccgacaccgtagcgaacaacatcgcgttgggttgcccgaatgccacccagcaagagattgagcatgtcgcgcggttagccagcgtgcatgacgatattttgcgtttaccgcaaggtttcgatacagaagtgggcgagcgcggcgtgatgctttccggtgggcaaaaacagcgtatctccattgctcgtgcgttattagtcaacgcggaaatcctcatccttgatgatgcgctttcagcggtggacggacgcacagagcaccagatcctgcataacctgcgtcagtgggggcagggaagaacggtaatcatcagtgcccatcgcctttctgcactgacggaagccagtgaaattattgtgatgcagcacggacatatcgcccagcgtggcaatcatgatgagctggcgcaacaaagtggctggtatcgcgatatgtatcgctatcaacaactggaggcggcgctcgacgacgctccggaaattcgcgaggaggccatcgatgcgtag

SEQ ID NO: 392 - protein, 590 aa, Escherichia coli
MRLFAQLSWYFRREWRRYLGAVALLVIIAMLQLVPPKVVGIVVDGVTEQHFTTGQILMWIATMVLIAVVVYLLRYVWRVLLFGASYQLAVELREDYYRQLSRQHPEFYLRHRTGDLMARATNDVDRVVFAAGEGVLTLVDSLVMGCAVLIMMSTQISWQLTLFALLPMPVMAIMIKRNGDALHERFKLAQAAFSSLNDRTQESLTSIRMIKAFGLEDRQSALFAADAEDTGKKNMRVARIDARFDPTIYIAIGMANLLAIGGGSWMVVQGSLTLGQLTSFMMYLGLMIWPMLALAWMFNIVERGSAAYSRIRTMLAEAPVVIDGSDKVPEGRGELDVNIRQFTYPQTDHPALENVNFALKPCQMLGICGPTGSGKSTLLSLIQRHFDVSEGDIRFHDIPLTKLQLDSWRSRLAVVSQTPFLFSDTVANNIALGCPNATQQEIEHVARLASVHDDILRLPQGFDTEVGERGVMLSGGQKQRISIARALLVNAEILILDDALSAVDGRTEHQILHNLRQWGQGRTVIISAHRLSALTEASEIIVMQHGHIAQRGNHDELAQQSGWYRDMYRYQQLEAALDDAPEIREEAIDA

SEQ ID NO: 393 - DNA, 1782 bp, Escherichia coli
atgcgtagttttagccaactgtggccgactctcaagcgcctgttagcgtacggttcaccgtggcgtaaaccgttggggattgcggtcctgatgatgtgggttgcggcggcggcagaagtcagtgggccgctgcttatcagctattttatcgacaatatggtagcgaaaaataacctgccgttgaaagtggttgcagggctggcggcggcgtatgttgggctgcaactgtttgcagccgggctacattacgcgcagtcgctgctgtttaatcgggcggcagtaggcgtagtgcaacagttgcgtaccgacgtgatggatgctgcgttacgccagccattaagcgagtttgatacccaacccgtcgggcaggtgatttcccgcgtcactaatgacactgaagtgatccgcgatctctacgttaccgtagtggcaactgtcctgcgtagcgccgcactggtgggcgcgatgctggtggcgatgttcagcctcgactggcgaatggcgctggtggcgataatgattttcccggtggtgctggtggtaatggtgatatatcagcgttacagcacgccgattgtccgtcgtgtgcgcgcttatctggcggatatcaacgacggctttaacgaaatcatcaatggcatgagcgttatccagcagttccgtcagcaggcgcgatttggcgaacgtatgggtgaggccagtcgttcacactatatggcgaggatgcaaaccctgcgcctcgacggttttctgctgcgtccgctgctgagtctgttttcatcgctcattctttgtggcttgttgatgctgtttggcttctccgccagcggcaccattgaagtgggcgtgttgtatgcgttcatcagttatttggggcgacttaacgaacccttaatcgaactgaccacgcagcaggcgatgctgcaacaggctgttgttgctggtgagcgcgtttttgagctgatggacggaccgcgccagcaatatggcaatgatgatcgcccgttgcagagcggcaccatcgaagtcgataacgtgtcatttgcttatcgcgatgacaatctggtgctaaagaacattaatctctctgtgccttcgcgcaactttgtggcgctggtcgggcataccggcagtggcaaaagcaccctcgccagtttattgatgggctattacccgctaacggaaggtgagattcgccttgatggtcgtccattaagtacgctaagtcacagcgcgctgcgccagggcgtggcaatggtgcagcaagatccggtggtgctggcggataccttcctcgccaacgtgacgctgggacgtgatatctctgaagaacgcgtctggcaggcgctggaaaccgtgcagctggcggagctggcgcgtagcatgagtgatggtatttacacgccgcttggcgagcaggggaataatctctcagtcgggcaaaagcaactgctggcactggcgcgcgtgctggtggagacgccgcaaatcctgatccttgatgaggcaaccgccagcattgactccgggactgaacaggcgattcaacatgctctggcggcggtgcgtgaacatactacgcttgtggtgattgctcaccgcttatcgactattgttgatgccgacaccattctggtgcttcatcgtgggcaagccgtggagcagggcactcaccagcaactgctggcggcccagggacgatactggcagatgtatcaactgcaacttgtgggcgaagagctggcagccagcgtgcgtgaagaggaatcattgagcgcctga

SEQ ID NO: 394 - protein, 593 aa, Escherichia coli
MRSFSQLWPTLKRLLAYGSPWRKPLGIAVLMMWVAAAAEVSGPLLISYFIDNMVAKNNLPLKVVAGLAAAYVGLQLFAAGLHYAQSLLFNRAAVGVVQQLRTDVMDAALRQPLSEFDTQPVGQVISRVTNDTEVIRDLYVTVVATVLRSAALVGAMLVAMFSLDWRMALVAIMIFPVVLVVMVIYQRYSTPIVRRVRAYLADINDGFNEIINGMSVIQQFRQQARFGERMGEASRSHYMARMQTLRLDGFLLRPLLSLFSSLILCGLLMLFGFSASGTIEVGVLYAFISYLGRLNEPLIELTTQQAMLQQAVVAGERVFELMDGPRQQYGNDDRPLQSGTIEVDNVSFAYRDDNLVLKNINLSVPSRNFVALVGHTGSGKSTLASLLMGYYPLTEGEIRLDGRPLSTLSHSALRQGVAMVQQDPVVLADTFLANVTLGRDISEERVWQALETVQLAELARSMSDGIYTPLGEQGNNLSVGQKQLLALARVLVETPQILILDEATASIDSGTEQAIQHALAAVREHTTLVVIAHRLSTIVDADTILVLHRGQAVEQGTHQQLLAAQGRYWQMYQLQLVGEELAASVREEESLSA

SEQ ID NO: 395 - DNA, 1146 bp, Citrobacter koseri
atgaagattgtcattgcgccagactcttttaaagagagcttaagtgcagaaaaatgttgtcaggcaattaaagccgggttttcgaccctctttcccgatgcgcactatatctgtttgccgatagcggatggcggcgaagggacggtggaggcgatggtcgccgcgacggacggtaacatcgtgaagcttgaagtctgcgggccgatgggcgaaaaagtgaaagctttttatggcattaccggcgacgggaaaacggcggtgattgagatggcggcagcaagtggcctgatgctggtcgcgcctgaaaagcgtaatccgttgctggcctccagttttggtacgggggagttaattcgccatgcgctggataacggcattcgccatattattctcggcattggcggcagtgcgacggtcgacggcggtatgggcatggcgcaggcgctcggtgtgcgtttccttgatgctgacggtcaggtgctggcggctaacggcggcaatttagcgcgcgtggcaagcattgagatggatgaatgcgatccgcgtctggcgaactgccatattgaagtagcatgtgatgttgataacccgctggtaggggcacgcggcgcggcggcggtgtttggtccgcaaaaaggggcaacgccggaaatggtcgaagaactggaacaggggctgcaaaattacgcccgtgttttacaacagcaaactgaaattaatgtctgccagatggcgggcggcggcgctgcgggcggtatgggcattgcggcggcggtattcctcaatgcggatattaaaccgggtattgagattgtgttgaatgcggtcaatctggcgcaggcggtgcagggtgcagcactggtgatcaccggggaagggcgcatcgactcgcaaacggcaggcggtaaagctccgctgggcgtggcgtcggtggcgaagcagtttaatgtcccggtgattgggattgctggcgtattgggtgatggcgtggaagtggtgcaccagtacggcattgatgcggtattcagcattttgccacgtctggcacctttagccgaagtgctcgccagcggtgaaaccaatctcttcaacagtgcgcgaaatattgcctgcgccattaaaataggtcagggaattaaaaactga

SEQ ID NO: 396 - protein, 381 aa, Citrobacter koseri
MKIVIAPDSFKESLSAEKCCQAIKAGFSTLFPDAHYICLPIADGGEGTVEAMVAATDGNIVKLEVCGPMGEKVKAFYGITGDGKTAVIEMAAASGLMLVAPEKRNPLLASSFGTGELIRHALDNGIRHIILGIGGSATVDGGMGMAQALGVRFLDADGQVLAANGGNLARVASIEMDECDPRLANCHIEVACDVDNPLVGARGAAAVFGPQKGATPEMVEELEQGLQNYARVLQQQTEINVCQMAGGGAAGGMGIAAAVFLNADIKPGIEIVLNAVNLAQAVQGAALVITGEGRIDSQTAGGKAPLGVASVAKQFNVPVIGIAGVLGDGVEVVHQYGIDAVFSILPRLAPLAEVLASGETNLFNSARNIACAIKIGQGIKN

SEQ ID NO: 397 - DNA, 333 bp, Citrobacter koseri
atgaaaaaaacactgcaagtcgcaatgttcagtctgtttaccgttattggctttaatgcccaggctaacgaacatcatcatgaaaccatgagcgaagcacaaccaaaggttattagcgccactggcgtggtaaaaggtgttgatctggaaagcaaaaaaatcaccatccatcacgatccgattgctgccgtgaactggccggagatgactatgcgctttaccatcaccccgcagacgaaaatgagcgaaattaaaaccggcgacaaagtggcgtttaattttgtccagcagggcagcctttctttattacaggatattaaagtcagccagtaa

SEQ ID NO: 398 - protein, 110 aa, Citrobacter koseri
MKKTLQVAMFSLFTVIGFNAQANEHHHETMSEAQPKVISATGVVKGVDLESKKITIHHDPIAAVNWPEMTMRFTITPQTKMSEIKTGDKVAFNFVQQGSLSLLQDIKVSQ

SEQ ID NO: 399 - DNA, 879 bp, Citrobacter koseri
atgtcgatgcctgcaacgtcaactaaaaccacaaagcttgcgacgtcattaatcgatgagtacgccctgctgggctggcgcgccatgctgactgaagtcaacctgtcaccgaaaccaggcctcgtggatcgcattaactgcggtgcgcacaaagatatggcgctggaagatttccaccgcagcgcgctggcgattcagggctggttaccccgtttcattgaatttggtgcctgtagtgcagaaatggcaccggaagcggtactcaacggattacgcccaattggtatggcttgcgaaggtgatatgttccgcgccactgcgggcgtaaacacgcataaaggcagcattttttctttagggctactgtgtgcggcaattggccgtttgcttcagctcaaccagccggtaacgccaacaaccgtttgttctacggcggcaagtttctgccgtggcctgaccgatcgcgaactgcgtaccaataattcacgactgacggcaggtcaacggttgtaccagcagcttggccttaccggcgcacgcggtgaagccgaagcgggttatccactggtgatcaaccacgccttgccgcattacctcactctgctggatcaggggttagatcctgagctggcattgctcgataccttgctcctactgatggctaccaacggcgataccaacgttgcatcgcgcggtggcgaggggggcctgcgctggctacagcgcgaggcgcaaacattattgcaaaaagggggcattcgaacccccgccgatctcgattatctccggcagttcgacagggagtgtatcgaacgaaatctcagtccaggcggcagtgccgacctgctgatccttacctggtttttagcacagatttaa

SEQ ID NO: 400 - protein, 292 aa, Citrobacter koseri
MSMPATSTKTTKLATSLIDEYALLGWRAMLTEVNLSPKPGLVDRINCGAHKDMALEDFHRSALAIQGWLPRFIEFGACSAEMAPEAVLNGLRPIGMACEGDMFRATAGVNTHKGSIFSLGLLCAAIGRLLQLNQPVTPTTVCSTAASFCRGLTDRELRTNNSRLTAGQRLYQQLGLTGARGEAEAGYPLVINHALPHYLTLLDQGLDPELALLDTLLLLMATNGDTNVASRGGEGGLRWLQREAQTLLQKGGIRTPADLDYLRQFDRECIERNLSPGGSADLLILTWFLAQI

SEQ ID NO: 401 - DNA, 1386 bp, Klebsiella oxytoca
atgctgacattcattgaactccttattggggttgtggttattgtgggtgtagctcgctacatcattaaagggtattctgccactggcgtgttatttgtcggtggcctgttattgctgattatcagtgccattatggggcacaaagtgttaccgtccagccaggcttcaacaggctacagcgccacggatatcgttgaatacgttaaaatattgctaatgagccgcggtggcgacctcggcatgatgattatgatgctgtgtggctttgccgcttacatgacccatatcggcgcgaatgatatggtggtcaagctggcgtcaaaaccattgcagtatattaactccccttaccttctgatgattgccgcctattttgttgcctgtctgatgtcactggccgtctcttccgcaaccggtctgggtgttttgctgatggcaaccctgtttccggtgatggtaaacgttggtatcagtcgtggcgcagctgctgccatttgtgcctccccggcggcgattattctcgcaccgacttcaggggatgtggtgctggcggcgcaggcttccgaaatgtcgctgattgacttcgccttcaaaacaacgctgcctatctcaattgctgcaattatcggcatggcgatcgcccacttcttctggcaacgttatctggataaaaaagagcacatctctcatgaaatgttagatgtcagtgaaatcaccaccactgcccctgcgttttatgccattttgccgttcacgccgatcatcggagtactgatttttgacggcaaatggggtccgcaattacacatcatcactattctggtgatttgtatgctaattgcctccattctggagttcatccgcagctttaatacccagaaagttttctctggtctggaagtggcttatcgcgggatggcagatgcatttgctaacgtggtgatgctgctggttgccgctggggtattcgctcaggggcttagcaccatcggctttattcaaagtctgatttctatcgctacctcgtttggttcggcgagtatcatcctgatgctggtattggtgatcctgacaatgctggcggcagtcacgaccggttcaggcaatgcgccgttttatgcgtttgttgagatgatcccgaaactggcgcactcctccggcattaacccggcgtatttgactatcccgatgctgcaggcgtcaaacctgggtcgtaccctatcacccgtttctggcgtagtcgttgcggttgccgggatggcgaagatctcgccgtttgaagtcgtaaaacgcacctcggtgccggtgcttgttggtttggtgattgttatcgttgctacagagctgatggtgccaggaacggcagcagcggtcacaggcaagtaa

SEQ ID NO: 402 - protein, 461 aa, Klebsiella oxytoca
MLTFIELLIGVVVIVGVARYIIKGYSATGVLFVGGLLLLIISAIMGHKVLPSSQASTGYSATDIVEYVKILLMSRGGDLGMMIMMLCGFAAYMTHIGANDMVVKLASKPLQYINSPYLLMIAAYFVACLMSLAVSSATGLGVLLMATLFPVMVNVGISRGAAAAICASPAAIILAPTSGDVVLAAQASEMSLIDFAFKTTLPISIAAIIGMAIAHFFWQRYLDKKEHISHEMLDVSEITTTAPAFYAILPFTPIIGVLIFDGKWGPQLHIITILVICMLIASILEFIRSFNTQKVFSGLEVAYRGMADAFANVVMLLVAAGVFAQGLSTIGFIQSLISIATSFGSASIILMLVLVILTMLAAVTTGSGNAPFYAFVEMIPKLAHSSGINPAYLTIPMLQASNLGRTLSPVSGVVVAVAGMAKISPFEVVKRTSVPVLVGLVIVIVATELMVPGTAAAVTGK

SEQ ID NO: 403 - DNA, 1599 bp, Escherichia coli
atgcaggtgttacccccgagcagcacaggcggcccgtcgcgcctgtttattatgcgtcctgtcgccaccacgctgctgatggtggcgatcttactcgccgggattatcggttatcgcgccctgcccgtttcggcgctgccggaagtggactatccaaccattcaggtggtcacgctttatccaggtgcgagcccggatgtcatgacctctgccgttaccgcgccgctcgaacgccagttcgggcagatgtctggcctgaaacagatgtcgtcgcaaagttccggcggtgcgtcagttatcactttacagttccagctaacattgccgctggatgtcgccgagcaggaagtgcaggccgcgattaacgctgcgaccaacctgctaccgagcgatctgcctaacccgccggtttacagcaaagtgaacccggcagatccaccgatcatgacgctcgctgtcacctcaaccgccatgccgatgacgcaggtggaagatatggtggaaacccgcgtcgcgcagaaaatctcgcagatttccggcgtagggctggtgacactttccggcgggcagcgtccggcggtacgcgtaaaactcaacgctcaggcaattgccgctctcggcctgaccagcgaaagtgtgcgcaccgctattactggcgcgaacgttaactcagcgaaagggagccttgacggcccttctcgcgcggtcacgctttccgcgaacgaccagatgcaatcggcagaagagtatcgtcagctaatcatcgcctaccagaacggcgcaccaattcgtcttggcgatgtcgcaaccgtagagcaaggagcagaaaacagctggctcggcgcgtgggcgaacaaagaacaggccattgtgatgaatgttcagcgccagcccggtgctaacattatctccaccgccgacagcatccggcagatgctaccacagctcaccgagagtctgccgaaatcggtgaaggtgacggtactttctgaccgtaccaccaatatccgcgcatcggtcgacgatacccagtttgagctgatgatggctatcgcgctggtagtcatgattatctacctgtttttgcgcaatattccggcgaccatcattcccggtgttgctgtaccgctgtcgttaatcggcacctttgcggtcatggtgtttctcgatttttcaatcaataacctgacgttgatggcgttaactatcgccaccggattcgtggtcgatgacgccatcgtggtgatcgaaaacatttcccgctatatcgaaaaaggcgaaaaaccgttggcggcggcgctcaaaggcgcgggtgaaatcggctttaccattatctcgctgaccttctcgctgattgcggtgttgatccccctgctgtttatgggcgatatcgtcgggcgactgttccgcgaatttgctattaccctggcagtcgcgattttgatctcggcggtggtgtcgctgaccctgacaccgatgatgtgcgcgcggatgctcagccaggagtcgctgcgtaaacagaaccgcttctcccgtgcctcggagaaaatgttcgacaggataatcgccgcctatggtcgtggactgcgaaagtgctga

SEQ ID NO: 404 - protein, 532 aa, Escherichia coli
MQVLPPSSTGGPSRLFIMRPVATTLLMVAILLAGIIGYRALPVSALPEVDYPTIQVVTLYPGASPDVMTSAVTAPLERQFGQMSGLKQMSSQSSGGASVITLQFQLTLPLDVAEQEVQAAINAATNLLPSDLPNPPVYSKVNPADPPIMTLAVTSTAMPMTQVEDMVETRVAQKISQISGVGLVTLSGGQRPAVRVKLNAQAIAALGLTSESVRTAITGANVNSAKGSLDGPSRAVTLSANDQMQSAEEYRQLIIAYQNGAPIRLGDVATVEQGAENSWLGAWANKEQAIVMNVQRQPGANIISTADSIRQMLPQLTESLPKSVKVTVLSDRTTNIRASVDDTQFELMMAIALVVMIIYLFLRNIPATIIPGVAVPLSLIGTFAVMVFLDFSINNLTLMALTIATGFVVDDAIVVIENISRYIEKGEKPLAAALKGAGEIGFTIISLTFSLIAVLIPLLFMGDIVGRLFREFAITLAVAILISAVVSLTLTPMMCARMLSQESLRKQNRFSRASEKMFDRIIAAYGRGLRKC

SEQ ID NO: 405 - DNA, 318 bp, Citrobacter koseri
gtgaaaaagatagctgctatatcattaattagtgtttttcttatgtctggttgtgctgtgcataatgatgagacaagtatcggtaaatttggccttgcatataaaagtaatattcagcgtaaactcgataaccaatactacaccgaagccgaagcttctttagccaggggtagaatatctggtgcagaaaatatagtaaaaaatgatgcaactcatttctgtgttactcagggcaaaaaaatgcagatagttgacctgaagacagaaggtgcaggattacatggcgtcgctcgtctgacattcaaatgtggagagtga

SEQ ID NO: 406 - protein, 105 aa, Citrobacter koseri
MKKIAAISLISVFLMSGCAVHNDETSIGKFGLAYKSNIQRKLDNQYYTEAEASLARGRISGAENIVKNDATHFCVTQGKKMQIVDLKTEGAGLHGVARLTFKCGE

SEQ ID NO: 407 - DNA, 1137 bp, Shigella sonnei
atgtctgaactgaacgatcttctgaccacccgtgagctacaacgctggcgattaattcttggcgaagcggcagaaacgacgctttgtgggctggatgacaacgcccggcagatagaccacgcgctggagtggctgtatgggcgcgatcctgaacggctccagcgtggtgaacgttacggtggattaggtcgttcaaatctcaccacccctgagtggatcaacagcattcacacgctgtttccgcaacgggtgatcgagcggctggaaagcgatgccgtgctgcgctacggcattgaagatgtggtgacgaatctcgacgtgctggaacgtatgcagccttctgaaagcctgctacgcgccgttttgcacaccaaacatctgatgaatcccgaagtactggctgccgcccgccggatagtacgccaggttgttgaagaaattatggctcgactggcaaaggaagttcgtcaggctttttctggtgtccgcgatcgccgtcgccgctcatttattccactggcgcgaaactttgatttcaaaagtactctgcgcgccaacctgcaacactggcacccgcaacacggcaagttgtatatcgaatccccccgctttaacagccgcattaaacgccaaagcgaacaatggcaactggtcttactggttgatcaaagcggatcaatggtggactcggtgatccactccgcggtgatggcggcctgtttatggcagttacccggtattcgtacccatctggtggcgtttgacaccagcgtggttgatctcacggcagacgttgccgatccggtagagttattaatgaaagtgcaattaggcggcggaaccaatatcgccagtgccatggaatatggtcggcaacttattgaacaaccagcgaaaagcgtcattatcctcgtgagcgatttttacgaagggggttcatcatcattactgacgcatcaggtgaaaaagtgtgtccagagcggcatcaaagtgctgggactggcggcgctcgatagcaccgcaacaccttgctatgaccacgatacggcccaggcgctggtaaatgtcggcgcacaaatagccgccatgacaccgggcgagctggcatcatggcttgcggagaatcttcagtcatga

SEQ ID NO: 408 - protein, 378 aa, Shigella sonnei
MSELNDLLTTRELQRWRLILGEAAETTLCGLDDNARQIDHALEWLYGRDPERLQRGERYGGLGRSNLTTPEWINSIHTLFPQRVIERLESDAVLRYGIEDVVTNLDVLERMQPSESLLRAVLHTKHLMNPEVLAAARRIVRQVVEEIMARLAKEVRQAFSGVRDRRRRSFIPLARNFDFKSTLRANLQHWHPQHGKLYIESPRFNSRIKRQSEQWQLVLLVDQSGSMVDSVIHSAVMAACLWQLPGIRTHLVAFDTSVVDLTADVADPVELLMKVQLGGGTNIASAMEYGRQLIEQPAKSVIILVSDFYEGGSSSLLTHQVKKCVQSGIKVLGLAALDSTATPCYDHDTAQALVNVGAQIAAMTPGELASWLAENLQS

SEQ ID NO: 409 - DNA, 720 bp, Enterobacter cloacae
atgttaaagcgcgtgttcctcagcctgttagtcctgatcggcttgctgctgttgactgtgctcggcctcgatcgctggatgagctggaaaaccgcgccttatatctacgacgaattgcaggatctcccctaccgccaggtcggtgtggtgctcggcacagcaaaatattatcggactggcgtaattaatcagtattatcgctaccgcattcaaggagcgattaatgcctataacagcggtaaggtaaattatctattactgagcggcgataacgcattgcaaagttataatgagccgatgaccatgcgcaaagatttaatcgcagctggtgtcgacccatcagatattgttctcgattacgcaggctttcgtacgctggattccatcgtgcgtacacgcaaagttttcgatactaatgatttcattattatcacccaacgtttccactgtgagcgggcattatttattgcgctgcatatggggattcaggctcagtgttatgccgtaccgtcaccgaaagatatgctgtcagtacgtattcgcgaatttgccgcccgtttcggtgcgctggctgacctttatatttttaaacgtgaaccgcgttttttagggccgctggtccctattccggctatgcaccaggtgccggaagatgcgcaggggtatcccgccgtcacacccgaacagttacttgaattacaaaagaaacaaggaaagtag

SEQ ID NO: 410 - protein, 239 aa, Enterobacter cloacae
MLKRVFLSLLVLIGLLLLTVLGLDRWMSWKTAPYIYDELQDLPYRQVGVVLGTAKYYRTGVINQYYRYRIQGAINAYNSGKVNYLLLSGDNALQSYNEPMTMRKDLIAAGVDPSDIVLDYAGFRTLDSIVRTRKVFDTNDFIIITQRFHCERALFIALHMGIQAQCYAVPSPKDMLSVRIREFAARFGALADLYIFKREPRFLGPLVPIPAMHQVPEDAQGYPAVTPEQLLELQKKQGK

SEQ ID NO: 411 - DNA, 663 bp, Salmonella enterica
atgatgttctggcgcattttccgtcttgagctgcgcgtagcgtttcgccatagcgccgaaatcgccaacccgctgtggttcttcctgattgtaattaccctttttccgctcagtatcggtccggagccgcaactgctggcgcgtattgcgccgggcattatctgggttgccgcgctgctttcatccttgctggcactcgagcgactgttccgtgacgatttgcaggacggcagtcttgaacaattgatgttgttgccgttacccttgcccgccgctgtgttggcgaaggtgatggcgcactggatggtaaccggtctgccgttactcatcctttcgcccctggtagcaatgctactgggaatggatgtttatggctggcaagtgatggcgttaacgctactgctgggaacccctacgcttggctttcttggtgcgccgggcgtggcgctgacagtgggacttaagcgcggtggtgtgctgctcagcatactggtgttaccgctgactatcccattactcatctttgccaccgccgcgatggacgcggcttctatgcatttgcccgttgatgggtatctggcaattttaggcgcgttgctggcaggcaccgcgacattaagtccttttgcgacggcggcagcgttacgaatcagcattcaataa

SEQ ID NO: 412 - protein, 220 aa, Salmonella enterica
MMFWRIFRLELRVAFRHSAEIANPLWFFLIVITLFPLSIGPEPQLLARIAPGIIWVAALLSSLLALERLFRDDLQDGSLEQLMLLPLPLPAAVLAKVMAHWMVTGLPLLILSPLVAMLLGMDVYGWQVMALTLLLGTPTLGFLGAPGVALTVGLKRGGVLLSILVLPLTIPLLIFATAAMDAASMHLPVDGYLAILGALLAGTATLSPFATAAALRISIQ

SEQ ID NO: 413 - DNA, 1647 bp, Acinetobacter pittii
atgaaaaaagtgactgccatgctcttctcgatggccgtggggcttaatgccgtttcgatggcggcaaaagcgaaagcgtccgaggagcaggaaactgatgtactgttgattggcggcggcattatgagcgccacgttggggacctatttacgcgagctggagcctgaatggtcgatgaccatggtggagcgcctggaaggtgtcgcgcaggagagttcgaacggctggaacaacgccggaaccgggcattctgcactgatggaactcaattacaccccgcaaaatgccgacggcagcatcagtattgaaaaagcagtcgccattaacgaagcatttcagatttcccgccagttctgggcgcaccaggtcgagcgcggcgtgctgcgtacaccgcgttcatttatcaataccgttccgcatatgagctttgtctggggcgaggataatgttaatttcctgcgagcccgttacgccgcgttgcaacaaagctcgctgtttcgcggtatgcgttactctgaagatcacgcgcagatcaaagagtgggcaccgttagtgatggaagggcgcgatccgcaacagaaagtggcagccacgcgtacggaaattggcactgatgtgaactatggcgagatcacccgccagttgatcgcctccttacagaagaaatctaacttctcgctgcaactcagcagcgaagtccgcgccctaaagcgtaatgacgataacagctggaccgtcaccgttgccgatctgaaaaacggcactgcacagaacatccgcgccaaatttgtctttatcggcgcgggcggtgcggcgctgaaactgttacaggaatcggggattccggaggcgaaagactacgccggtttcccggtgggcggacagttccttgtttcggaaaacccggacgtggttaatcaccatctggcgaaggtttacggtaaagcatccgttggcgcaccaccgatgtcggttccgcatatcgatacccgtgttcttgacggtaaacgcgtagtgctgtttgggccatttgccaccttctcaaccaaattcctcaaaaacggttcattatgggatctgatgagttccaccaccacctctaacgtgatgccgatgatgcacgttgggctggataatttcgatctggtgaaatatctggtgagtcaggtgatgttgagtgaagaggatcgttttgaagcgttgaaagagtactatccgcaggcgaaaaaagaggactggcgtttgtggcaagcggggcagcgcgtgcagattatcaagcgtgatgccgataaaggtggcgtactgcgtctgggtactgaagtcgtcagtgaccagcaagggaccattgccgcgctcctgggggcatcgccaggggcgtcaaccgccgcgccgattatgttgaatctgctggaaaaagtatttggcgatcgcgtttccagcccgcaatggcaggctacgttgaaagcgatcgttccgtcttatggacgcaagctgaacggtgatgtagcggcaacagaacgcgagttgcagtacaccagcgaagtgctggggctgaaatacgacaagccgcaggcagcagatagtacgccgaaaccgcagttgaaaccgcaacccgttcaaaaagaagtggcggatattgcgttgtaa

SEQ ID NO: 414 - protein, 548 aa, Acinetobacter pittii
MKKVTAMLFSMAVGLNAVSMAAKAKASEEQETDVLLIGGGIMSATLGTYLRELEPEWSMTMVERLEGVAQESSNGWNNAGTGHSALMELNYTPQNADGSISIEKAVAINEAFQISRQFWAHQVERGVLRTPRSFINTVPHMSFVWGEDNVNFLRARYAALQQSSLFRGMRYSEDHAQIKEWAPLVMEGRDPQQKVAATRTEIGTDVNYGEITRQLIASLQKKSNFSLQLSSEVRALKRNDDNSWTVTVADLKNGTAQNIRAKFVFIGAGGAALKLLQESGIPEAKDYAGFPVGGQFLVSENPDVVNHHLAKVYGKASVGAPPMSVPHIDTRVLDGKRVVLFGPFATFSTKFLKNGSLWDLMSSTTTSNVMPMMHVGLDNFDLVKYLVSQVMLSEEDRFEALKEYYPQAKKEDWRLWQAGQRVQIIKRDADKGGVLRLGTEVVSDQQGTIAALLGASPGASTAAPIMLNLLEKVFGDRVSSPQWQATLKAIVPSYGRKLNGDVAATERELQYTSEVLGLKYDKPQAADSTPKPQLKPQPVQKEVADIAL

SEQ ID NO: 415 - DNA, 1329 bp, Citrobacter koseri
atgtccagaatcaataaattcgtacttacagtcagtctgctgatttttatcatgatttcagcagttgcctgcgggatctacactcaaatggtaaaggaacgggtgtatggcctgaaacagtccgttattgatactgcttttgcggtggcaaatattgctgaatatcggcgtagtgtggcaattgatctcatcaacacgctaaatcctacggaggaacagctgttggttggcttacgcacagcttacgccgactcggtttcaccctcttatttgtacgatgtcggtccttatctgatttccagtgacgaatgtattcaggtaaaggagttcgagaaaaattattgtgcagatattatgcaggttgttaagtatcgacatgtcaaaaatacagggtttatctcttttgatggtaaaaccttcgtctattacctctatccggtaactcacaatcgtagtctgatatttttgcttggtctggaacgtttttctttactgtcaaaatcgctggcgatggatagcgagaacctgatgttctccctgttcaagaacggtaaatcggtgaccggtgatgaatataacgctaaaaacgccatcttcaccgtttcggaagcaatggagcacttctcctatttgccgaccgggttgtacgtatttgcttataaaaaagacgtttattttcaggtatgtacattgattattttctttgccgcattggtggcagtgatatcgggtgccagttgcctctatctggtacgcagagtgattaatcgtggtattgtggagaaagaagccattattaataaccattttgaacgcgtactggatggcgggcttttcttttcggctgccgatgtcaaaaaactctacagtatgtataactcggcattcctggacgatctgaccaaagcgatgggcagaaaatcttttgacgaagatttaaaagcgctgccggaaaaaggcggttatttgtgcctgtttgacgtcgataaattcaaaaacattaacgacaccttcggtcatttgctgggcgatgaagtgttgatgaaagtggtgaaaatccttaaatcacagatcccggtagataaaggtaaagtttaccgcttcggaggtgacgaatttgcggtgatttatactggcggcacgctggaagagttgctatcgattctaaaagaaatcgttcatttccaggtgggaagcattaatttaagcaccagtatcggtgtagcgcattcaaatgaatgtactaccgttgaacgtttgaaaatgctggcggatgagcggctgtataagagtaagaaaaacggcagggcgcagattagctggcagtaa

SEQ ID NO: 416 - protein, 442 aa, Citrobacter koseri
MSRINKFVLTVSLLIFIMISAVACGIYTQMVKERVYGLKQSVIDTAFAVANIAEYRRSVAIDLINTLNPTEEQLLVGLRTAYADSVSPSYLYDVGPYLISSDECIQVKEFEKNYCADIMQVVKYRHVKNTGFISFDGKTFVYYLYPVTHNRSLIFLLGLERFSLLSKSLAMDSENLMFSLFKNGKSVTGDEYNAKNAIFTVSEAMEHFSYLPTGLYVFAYKKDVYFQVCTLIIFFAALVAVISGASCLYLVRRVINRGIVEKEAIINNHFERVLDGGLFFSAADVKKLYSMYNSAFLDDLTKAMGRKSFDEDLKALPEKGGYLCLFDVDKFKNINDTFGHLLGDEVLMKVVKILKSQIPVDKGKVYRFGGDEFAVIYTGGTLEELLSILKEIVHFQVGSINLSTSIGVAHSNECTTVERLKMLADERLYKSKKNGRAQISWQ

SEQ ID NO: 417 - DNA, 1326 bp, Kluyvera intermedia
atgagcaaagtaactccccagccgaaaatcggctttgtttcccttggctgtccgaaaaaccttgtcgattcagagcgtattctcaccgaactacgcactgaaggttatgacgtggtaccgagctatgatgatgcggacatggtgatcgtcaacacctgcggctttattgacagcgcggtacaagaatcactggaagccattggtgaagcgttgaatgaaaacggcaaggtaattgtgaccggttgtctgggggcaaaagaagatcagatccgcgaagtccacccgaaagtgctggaaatcaccgggcctcatagctatgagcaggttctggagcacgttcatcactacgtgccaaaaccgaaacacaacccattcctgagcctggtgccagaacaaggtgtgaaactgacgccgcgtcattatgcctatctgaaaatttctgaaggctgtaatcaccgctgcaccttctgcattattccgtctatgcgcggcgatctggtgagccgtccgattggcgaagtgttaagtgaagcgaaacgtctggttgatgcgggcgttaaagaaattctggtgatctcgcaggatacttccgcgtatggcgtcgatgttaaacatcgtactggcttccacaacggcgagccggtaaaaaccagcatggtcagcctgtgcgaacagttatcgaaactggggatctggacacgtctgcactacgtttacccttatccgcatgtggacgacgtcatcccactgatggcagagggcaaaatcctgccgtatctggacattccgttgcagcacgccagcccgcgcattctcaaactgatgaaacgtccgggttctgtagatcgccaactggcgcgcatcaaacagtggcgcgaaatctgcccggaactgaccctacgctcaacctttattgttggcttccctggcgagacggaagaagatttccagatgctactcgacttcctgaaagaagcacgtctggatcgcgttggctgctttaaatacagcccggttgaaggtgcagacgccaatgccctgcctgaccaggttccggaagaagtgaaagaagaacgctggaaccgtttcatgcagttgcagcagcaaatttccgccgagcgcctgcaagagaaagtgggccgtgaaattctggtgattatcgacgaagtggacgaagaaggcgcgattggtcgcagcatggcagatgcaccggaaatcgacggcgcggtttatctcaatggtgaaaccaacgttaagccgggtgatatcctgcgagtgaaagtcgagcacgccgatgagtacgatttgtggggtagccgggtttaa

SEQ ID NO: 418 - protein, 441 aa, Kluyvera intermedia
MSKVTPQPKIGFVSLGCPKNLVDSERILTELRTEGYDVVPSYDDADMVIVNTCGFIDSAVQESLEAIGEALNENGKVIVTGCLGAKEDQIREVHPKVLEITGPHSYEQVLEHVHHYVPKPKHNPFLSLVPEQGVKLTPRHYAYLKISEGCNHRCTFCIIPSMRGDLVSRPIGEVLSEAKRLVDAGVKEILVISQDTSAYGVDVKHRTGFHNGEPVKTSMVSLCEQLSKLGIWTRLHYVYPYPHVDDVIPLMAEGKILPYLDIPLQHASPRILKLMKRPGSVDRQLARIKQWREICPELTLRSTFIVGFPGETEEDFQMLLDFLKEARLDRVGCFKYSPVEGADANALPDQVPEEVKEERWNRFMQLQQQISAERLQEKVGREILVIIDEVDEEGAIGRSMADAPEIDGAVYLNGETNVKPGDILRVKVEHADEYDLWGSRV

SEQ ID NO: 419 - DNA, 1164 bp, Citrobacter amalonaticus
atgaacaactttaatctgcacaccccaacccgcattctgtttggtaaaggcgcaatcgctggtttacgcgaacaaattcctcacgatgctcgcatattgattacctacggcggcggcagcgtgaaaaaaaccggcgttctcgatcaagttctggatgccctgaaaggcatggacgtgctggaatttggcggtattgaaccaaacccggcttatgaaacgctgatgaacgccgtgaaactggttcgcgaacaaaaagtgacttttctgctggcggttggcggcggttctgtactggacggcaccaaatttatcgccgcagcggctaactatccggaaaatatcgatccgtggcacattctgcaaacgggcggcaaagagattaaaagcgccatcccgatgggctgtgtgctgacgctgccagcaaccggttcagaatccaacgcaggcgcggtgatctcccgtaaaaccacaggcgacaagcaggcgttccattctgcccatgttcagcccgtatttgccgtgctcgatccggtttatacctacaccctgccgtcgcgtcaggtggctaacggcgtagtggacgcctttgtacacaccgtggaacagtatgttaccaaaccggttgatgccaaaattcaggaccgtttcgcagaaggcattttgctgacgctgatcgaagatggtccgaaagccctgaaagagccagaaaactacgatgtgcgcgccaacgtcatgtgggcggcgactcaggcgctgaacggtttgatcggcgctggcgtaccgcaggactgggcaacgcatatgctgggccacgaactgactgcgatgcacggtctggatcacgcgcaaacactggctatcgtcctgcctgcactgtggaatgaaaaacgcgataccaagcgcgctaagctgctgcaatatgctgaacgcgtctggaacatcactgaaggttcagacgatgagcgtattgacgccgcgattgccgcaacccgcaatttctttgagcaattaggcgtgccgacccacctctccgactacggtctggacggcagctccatcccggctttgctgaaaaaactggaagagcacggcatgacccaactgggcgaaaatcatgacattacgctggatgtcagccgccgtatatacgaagccgcccgctaa

SEQ ID NO: 420 - protein, 387 aa, Citrobacter amalonaticus
MNNFNLHTPTRILFGKGAIAGLREQIPHDARILITYGGGSVKKTGVLDQVLDALKGMDVLEFGGIEPNPAYETLMNAVKLVREQKVTFLLAVGGGSVLDGTKFIAAAANYPENIDPWHILQTGGKEIKSAIPMGCVLTLPATGSESNAGAVISRKTTGDKQAFHSAHVQPVFAVLDPVYTYTLPSRQVANGVVDAFVHTVEQYVTKPVDAKIQDRFAEGILLTLIEDGPKALKEPENYDVRANVMWAATQALNGLIGAGVPQDWATHMLGHELTAMHGLDHAQTLAIVLPALWNEKRDTKRAKLLQYAERVWNITEGSDDERIDAAIAATRNFFEQLGVPTHLSDYGLDGSSIPALLKKLEEHGMTQLGENHDITLDVSRRIYEAAR

SEQ ID NO: 421 - DNA, 678 bp, Citrobacter koseri
atgttgcaacattattcagtgtcatggaaaaaaggactggctgcactctgcttactggctgttgctgggcttagcggctgcgatcaaaaagagaatgcggcggcaaaagtggaatacgacggactttcgaacagccaaccgctgcgtgtcgatgccaataaccatacggtaaccatgctggtgcaaattaatggtcgtttcctcaccgacgacactcgtcacggtattgtgtttaaagatggctccaacggacataaatcgctgtttatgggttatgcgaccccgaaagcattttatgaagccctgaaagaggcaggtggtacgccgggcgaaaacatgacgatggataataaagaaacgactcatgtcacaggcagcaaactggatatttcggtcaactggcaaggggcggcaaaagcgtattccttcgatgaagtgattgttgacagtaatggcaagaaactggacatgcgctttggcggtaatttaacggcagcagaagagaagaaaacgggttgcctggtgtgtctggatagctgcccggtcggcatcgtcagcaatgcaacatacacttatggtgcggtggaaaaacgcggcgaagtgaaattcaaaggcaatgcctcagttcttccggcggataacacgctggcaacggttacctttaaaatcaccgaataa

SEQ ID NO: 422 - protein, 225 aa, Citrobacter koseri
MLQHYSVSWKKGLAALCLLAVAGLSGCDQKENAAAKVEYDGLSNSQPLRVDANNHTVTMLVQINGRFLTDDTRHGIVFKDGSNGHKSLFMGYATPKAFYEALKEAGGTPGENMTMDNKETTHVTGSKLDISVNWQGAAKAYSFDEVIVDSNGKKLDMRFGGNLTAAEEKKTGCLVCLDSCPVGIVSNATYTYGAVEKRGEVKFKGNASVLPADNTLATVTFKITE

SEQ ID NO: 423 - DNA, 705 bp, Citrobacter koseri
atgaagatgcaatcgcgtaaaatctggtactaccgtataaccctcatcatcctgttgttcgctgtgctgctggcatgggcgctgcttcccggcgtccatgagtttatcaatcgcagcgttgcggcgtttgccgccgtggaccaacagggtatagaacgctttattcagtcttacggcgcactagcggcagttgtctcgttcttgttgatgattttacaggccattgctgcaccgctacctgcgtttttgatcacctttgccaatgcgtcgctgtttggtgcgttctggggcggcttactgtcgtggaccagttcgatggccggcgcggcactgtgcttttttatcgccagagtgatgggccgcgaagtggtggaaaaattaaccggcaaaaccgtacttgacagtatggacggctttttcactcgttacggcaaacacaccatcctggtatgtcggttattgccttttgtccctttcgatccaatcagctatgctgccggtttgacttcaatacgttttcgctcgttttttatcgccaccgggcttggtcaattaccggcgactattgtttattcctgggcgggcagcatgttaacaggcggtactttctggtttgtcaccggactgtttattctgtttgccctgaccgtggtgatttttatggcgaagaaaatatggcttgagcgccagaagaggaatgcctga

SEQ ID NO: 424 - protein, 234 aa, Citrobacter koseri
MKMQSRKIWYYRITLIILLFAVLLAWALLPGVHEFINRSVAAFAAVDQQGIERFIQSYGALAAVVSFLLMILQAIAAPLPAFLITFANASLFGAFWGGLLSWTSSMAGAALCFFIARVMGREVVEKLTGKTVLDSMDGFFTRYGKHTILVCRLLPFVPFDPISYAAGLTSIRFRSFFIATGLGQLPATIVYSWAGSMLTGGTFWFVTGLFILFALTVVIFMAKKIWLERQKRNA

SEQ ID NO: 425 - DNA, 429 bp, Shigella dysenteriae
atgagctatagcaatattcttgtcgccgttgcggttacaccggaaagtcagcaactgctggcaaaagcggtatctatcgccaggccagtaaagggacacatcagtttaattactctcgcttccgacccggaaatgtacaatcaattagctgcgccgatgcttgaagatttacgcagcgtgatgcaggaagaaacgcaaagctttcttgataagttaattcaggatgcggggtatcccgttgacaagacgtttattgcctacggtgagttaagcgaacatattctggaagtttgtcgcaaacatcatttcgatttggtgatttgcggtaatcacaatcacagtttcttttcgcgagcatcctgctcggcgaaaagagtgattacctcaagtgaggtcgatgtgctgttagttccacttacgggagattaa

SEQ ID NO: 426 - protein, 142 aa, Shigella dysenteriae
MSYSNILVAVAVTPESQQLLAKAVSIARPVKGHISLITLASDPEMYNQLAAPMLEDLRSVMQEETQSFLDKLIQDAGYPVDKTFIAYGELSEHILEVCRKHHFDLVICGNHNHSFFSRASCSAKRVITSSEVDVLLVPLTGD

SEQ ID NO: 427 - DNA, 1650 bp, Acinetobacter pittii
atgctcaatcagaaaattcaaaaccctaatccagacgaactgatgatcgaggtcgatctctgctatgagctggacccgtatgaattaaaactggatgagatgatcgaggcagaaccggaacccgagatgattgaagggctgcccgcctctgatgcgctgacgcctgccgatcgctatctcgaactgttcgagcatgttcagtcggcgaaaattttccccgacagtaaaacctttcccgactgcgcacccaaaatggacccgctggatattttaatccgctaccgtaaagtgcgccgtcatcgtgattttgacttgcgcaagtttgttgaaaaccacttctggctgccggaggtctactccagcgagtatgtatcggacccgcaaaattccctgaaagagcatatcgaccagctgtggccggtgctaacccgtgaaccacaggatcacattccgtggtcttctctgctggcgctgccgcagtcatatattgtcccgggcggccgttttagcgaaacctactattgggattcctatttcaccatgctggggctggcggaaagtggtcgggaagatttgctgaaatgcatggccgataacttcgcctggatgatcgaaaactacggccatatccccaacggcaaccgcacctattatttgagccgctcgcaaccaccggtttttgcgctgatggtggagttgtttgaagaagatggtgtacgcggcgcgcgccgctatctcgaccacctgaaaatggaatatgccttctggatggacggtgcagaatcgttgatccctaatcaggcctatcgccatgttgtgcggatgccggacggctcgctgctcaaccgttactgggacgatcgcgacacgccgcgtgacgaatcctggcttgaggacgttgaaaccgcgaaacattctggtcgcccgcctaacgaggtgtaccgcgatttacgtgcgggggcggcctccggttgggattactcttcccgttggctgcgtgatactggtcgtctggcgagcattcgtaccacccagttcatccccatcgatctgaatgccttcctgtttaaactggagagcgccatcgccaacatctcggcgctgaaaggcgagaaagagacagaagcactgttccgccagaaggccagtgcccgtcgcgatgcggtaaaccgttacctctgggatgatgaaaacggcatctaccgcgattacgactggcgacgcgagcaactggcgctgttttccgctgccgccattgtgccgctctatgtcggtatggcgaaccatgaacaggccgatcgtctggcaaacgccgtgcgcagccggttactgacacctggcgggattctggcaagcgagtacgaaaccggtgaacagtgggataaacccaacggctgggcaccgttacaatggatggcaattcagggatttaagatgtacggcgatgaccttctgggtgatgaaatcgcgcgcaactggctgaagacggtgaatcagttctatctggaacagcacaaactgatcgagaaataccatattgccgatggtgttcctcgcgaaggcggcggtggcgagtatccgttgcaggatgggtttggctggactaacggtgtggtacgccgtttaattggtttgtacggcgaaccataa

SEQ ID NO: 428 - protein, 549 aa, Acinetobacter pittii
MLNQKIQNPNPDELMIEVDLCYELDPYELKLDEMIEAEPEPEMIEGLPASDALTPADRYLELFEHVQSAKIFPDSKTFPDCAPKMDPLDILIRYRKVRRHRDFDLRKFVENHFWLPEVYSSEYVSDPQNSLKEHIDQLWPVLTREPQDHIPWSSLLALPQSYIVPGGRFSETYYWDSYFTMLGLAESGREDLLKCMADNFAWMIENYGHIPNGNRTYYLSRSQPPVFALMVELFEEDGVRGARRYLDHLKMEYAFWMDGAESLIPNQAYRHVVRMPDGSLLNRYWDDRDTPRDESWLEDVETAKHSGRPPNEVYRDLRAGAASGWDYSSRWLRDTGRLASIRTTQFIPIDLNAFLFKLESAIANISALKGEKETEALFRQKASARRDAVNRYLWDDENGIYRDYDWRREQLALFSAAAIVPLYVGMANHEQADRLANAVRSRLLTPGGILASEYETGEQWDKPNGWAPLQWMAIQGFKMYGDDLLGDEIARNWLKTVNQFYLEQHKLIEKYHIADGVPREGGGGEYPLQDGFGWTNGVVRRLIGLYGEP

SEQ ID NO: 429 - DNA, 213 bp, Citrobacter koseri
atgcatagacaccataaggttagcctcttactcgttggaaatcaacacagggggctgggaatgccgcagaaatatagattactttctttaatagtgatttgtttcacgcttttatttttcacctggatgataagagattcactgtgtgaattgcatattaaacaggagagttatgagctggcggcgtttttagcctgcaaattgaaagagtaa

SEQ ID NO: 430 - protein, 70 aa, Citrobacter koseri
MHRHHKVSLLLVGNQHRGLGMPQKYRLLSLIVICFTLLFFTWMIRDSLCELHIKQESYELAAFLACKLKE

SEQ ID NO: 431 - DNA, 342 bp, Acinetobacter pittii
atgaaaacctcaaagactgtggcaaaactattatttgttgtcggggcgctggtttatctggttgggctatggatctcatgcccattgttaagtggaaaaggttattttcttggcgtgttaatgacggcaacttttggcaactatgcatatcttcgcgcagaaaaacttgggcaactggatgatttttttatccacgtctgtcagttggtagcgttaatcactatcggtctcttgtttatcggtgttttaaacgcacctatcaatgcttatgaaatggtgatctatcccatcgccttttttgtctgcttgtttggtcaaatgcgtttgtttcgctcggcatga

SEQ ID NO: 432 - protein, 113 aa, Acinetobacter pittii
MKTSKTVAKLLFVVGALVYLVGLWISCPLLSGKGYFLGVLMTATFGNYAYLRAEKLGQLDDFFIHVCQLVALITIGLLFIGVLNAPINAYEMVIYPIAFFVCLFGQMRLFRSA

SEQ ID NO: 433 - DNA, 993 bp, Citrobacter braakii
atgaaaataaagaacattctactcaccctttgcacctcacttctgcttaccaacgttgcggcacacgccaaagaagtcaaaataggtatggcgattgatgatctccgtcttgaacgctggcaaaaagatcgagacatttttgtgaaaaaggcagaatctctcggcgcgaaagtatttgtacagtctgcaaatggcaatgaagaaacacaaatgtcgcagattgaaaacatgattaaccggggtgtcgatgttcttgtcattattccttataacggtcaggtattaagtaacgttgtaaaagaagccaaacaagaaggtattaaagtattagcttacgaccgtatgattaacgatgcggatatcgatttttatatttctttcgataacgaaaaagtcggtgaactgcaggcaaaagccctggtcgatattgttccgcaaggtaattacttcctgatgggcggctcgccggtagataacaacgccaagctgttccgcgccgggcaaatgaaagtattaaaaccttatgttgactccggaaaaattaaagtcgttggtgaccaatgggttgatggctggttaccggaaaacgcattgaaaattatggaaaacgcgctaaccgccaataataacaaaattgatgctgtagttgcctcaaacgatgccaccgcaggaggggcaattcaggcattaagcgcgcaaggtttatcagggaaagtagcaatttccggccaggatgcggatcttgcaggtattaaacgtattgctgccggtacgcaaactatgacggtgtataaacctattacattgttggcaaatactgccgcagaaattgccgttgagttgggcaatggtcaggagccaaaagcggataccacactgaataatggcctgaaagatgttccctcccgcctgctgacaccgatcgatgtgaataaaaacaacatcaaagatacggtagttaaagacggattccacaaagagagcgagctgtaa

SEQ ID NO: 434 - protein, 330 aa, Citrobacter braakii
MKIKNILLTLCTSLLLTNVAAHAKEVKIGMAIDDLRLERWQKDRDIFVKKAESLGAKVFVQSANGNEETQMSQIENMINRGVDVLVIIPYNGQVLSNVVKEAKQEGIKVLAYDRMINDADIDFYISFDNEKVGELQAKALVDIVPQGNYFLMGGSPVDNNAKLFRAGQMKVLKPYVDSGKIKVVGDQWVDGWLPENALKIMENALTANNNKIDAVVASNDATAGGAIQALSAQGLSGKVAISGQDADLAGIKRIAAGTQTMTVYKPITLLANTAAEIAVELGNGQEPKADTTLNNGLKDVPSRLLTPIDVNKNNIKDTVVKDGFHKESEL

SEQ ID NO: 435 - DNA, 1542 bp, Citrobacter braakii
atgccttatctacttgaaatgaagaacattaccaaaaccttcggcagtgtgaaggcgattgataacgtcagcttgcggttgaatgctggcgaaatcgtctcactctgtggggaaaatgggtcaggtaaatcaacgctgatgaaagtgctgtgtggtatttatccccatggttcctacgaaggcgaaattatttttgcgggagaagagattcaggcgagtcacatccgcgataccgaacgcaaaggtatcgccattattcaccaggaattggcgctggtgaaagaactgaccgtgctggaaaatatcttcctgggtaacgaaataacccataatggcattatggattatgacctgatgacgctacgctgtcagaagctgctcgcacaggtcagtttatccatttcacctgatacccgcgttggcgatttaggacttgggcaacaacaactggttgaaattgccaaggcacttaataaacaggtgcgtttgttaattctcgatgagccgacagcctcattaactgagcaggaaacgtcggttttactggatattattcgcgatctacaacagcacggtatcgcctgtatttatatttcgcacaaactcaacgaagtcaaagcgatttccgatacgatttgcgttattcgcgacggtcagcacattggcacgcgtgatgctgctggaatgagtgaagacgatattatcaccatgatggtcgggcgagagttaaccgcgctttaccctaatgaaccacataccaccggagatgaaatattacgtattgaacatctgacggcatggcatccggttaatcgtcatattaaacgagttaatgatgtctcgttttccctgaaacgtggcgaaatactgggtatcgccggactcgttggtgccggacgtaccgagactattcagtgcctgtttggtgtgtggcccggacaatgggaagggaaaatttatattgacggcaaacaggtagatattcgtaactgtcagcaagccatcgcccaggggattgcgatggtacccgaagacagaaagcgcgacggcatcgttccggtaatggcggttggtaaaaatattaccctcgccgcactcaaaaaatttaccggtagtattagccagcttgatgacgcggcagagcaaaaatgtattctggaatcaatccagcaactcaaagttaaaacgtcgtcccccgaccttgctattggacgtttgagcggcggcaatcaacaaaaagcgatcctcgctcgctgtctgttacttaacccgcgcattctcattcttgatgaacccaccaggggtatcgatattggcgcgaaatacgagatctacaaattaattaaccaactcgtccagcagggtattgccgttattgtcatctcttccgaattacctgaagtgctcggccttagcgatcgtgtactggtgatgcatgaagggaaactaaaagccaacctgataaatcataacctgactcaggagcaggtgatggaagccgcattgaggagcgaacatcatgtcgaaaagcaatccgtctga

SEQ ID NO: 436 - protein, 513 aa, Citrobacter braakii
MPYLLEMKNITKTFGSVKAIDNVSLRLNAGEIVSLCGENGSGKSTLMKVLCGIYPHGSYEGEIIFAGEEIQASHIRDTERKGIAIIHQELALVKELTVLENIFLGNEITHNGIMDYDLMTLRCQKLLAQVSLSISPDTRVGDLGLGQQQLVEIAKALNKQVRLLILDEPTASLTEQETSVLLDIIRDLQQHGIACIYISHKLNEVKAISDTICVIRDGQHIGTRDAAGMSEDDIITMMVGRELTALYPNEPHTTGDEILRIEHLTAWHPVNRHIKRVNDVSFSLKRGEILGIAGLVGAGRTETIQCLFGVWPGQWEGKIYIDGKQVDIRNCQQAIAQGIAMVPEDRKRDGIVPVMAVGKNITLAALKKFTGSISQLDDAAEQKCILESIQQLKVKTSSPDLAIGRLSGGNQQKAILARCLLLNPRILILDEPTRGIDIGAKYEIYKLINQLVQQGIAVIVISSELPEVLGLSDRVLVMHEGKLKANLINHNLTQEQVMEAALRSEHHVEKQSV

SEQ ID NO: 437 - DNA, 1185 bp, Acinetobacter pittii
atggaacagacctggcgctggtacggcccaaacgatccggtttctttagctgatgtccgtcaggcgggcgcaactggcgtggttaccgcgctgcaccatatcccgaacggcgaagtatggtccgttgaagagatcctcaaacgcaaggcgatcgttgaagacgcaggcctggtatggtctgtcgtagaaagcgtaccaattcacgaagatatcaaaacccacactggcaactatgagcagtggattgctaactatcagcagaccctgcgcaacctggcgcagtgcggcattcgcaccgtgtgctacaacttcatgccggtgctcgactggacccgtactgacctcgaatacgtgctgccagacggctccaaagctctgcgcttcgaccagatcgaattcgctgcattcgaaatgcatatcctgaagcgtccaggcgcggaagcggattacaccgaagaagaaattgctcaggccgctgaacgcttcgccactatgagcgacgaagacaaagcgcgtctgacccgtaacatcattgccggtctgccaggtgcggaagaagggtataccctcgaccagttccgtaagcacctggagctgtacaaagatatcgacaaagccaaactgcgcgaaaactttgctgtcttcctgaaagcgattattccagttgctgaagaagttggcgtgcgtatggcggttcacccggacgatccgccgcgtccgatcctcggcctgccgcgcattgtttccaccattgaagatatgcagtggatggttgataccgtaaacagcatggcgaacggtttcaccatgtgcaccggttcctacggcgtgcgtgctgacaacgatctggttgatatgatcaagcagttcggtccgcgtatttacttcacccatctgcgctccaccatgcgtgaagataacccgaaaaccttccacgaagcggcgcacctgaacggtgacgttgatatgtacgaagtggtgaaagcgattgttgaagaagaacaccgtcgtaaagcggaaggcaaagaagacctgatcccgatgcgtccggaccacggtcatcagatgctggacgacctgaagaagaaaaccaacccaggttactccgcaattggtcgtctgaaaggcctggccgaagttcgcggtgtcgaactggcgatccagcgcgctttctttagccgttaa

SEQ ID NO: 438 - protein, 394 aa, Acinetobacter pittii
MEQTWRWYGPNDPVSLADVRQAGATGVVTALHHIPNGEVWSVEEILKRKAIVEDAGLVWSVVESVPIHEDIKTHTGNYEQWIANYQQTLRNLAQCGIRTVCYNFMPVLDWTRTDLEYVLPDGSKALRFDQIEFAAFEMHILKRPGAEADYTEEEIAQAAERFATMSDEDKARLTRNIIAGLPGAEEGYTLDQFRKHLELYKDIDKAKLRENFAVFLKAIIPVAEEVGVRMAVHPDDPPRPILGLPRIVSTIEDMQWMVDTVNSMANGFTMCTGSYGVRADNDLVDMIKQFGPRIYFTHLRSTMREDNPKTFHEAAHLNGDVDMYEVVKAIVEEEHRRKAEGKEDLIPMRPDHGHQMLDDLKKKTNPGYSAIGRLKGLAEVRGVELAIQRAFFSR

SEQ ID NO: 439 - DNA, 1632 bp, Klebsiella michiganensis
gtgctaactttgcttcacctgctttctgccgtcgccctgctggtctgggggactcatattgttcgaacaggcgtaatgcgcgtcttcggcgcgcgtctgcgtactgtccttagccggagcgtcgaaaaaaagccgctcgccttttgcgcggggatcggcgttaccgcactggtgcagagcagtaatgccaccaccatgctggtgacctcgttcgtcgctcaggatctggttgctctcgcgcctgcgctggtgattgtgctgggtgcagatgtcgggacggcgctgatggcgcgtattctcaccttcgatttatcctggctgtcaccgttacttatttttatcggcgtgatttttttcctcggacgcaaacagtcacgcgccgggcaactgggccgcgtcggtattggtcttgggctgattttactggcgctggagttgattgtgcaggccgtaacgccgatcactcaggcaaacggcgttcaggtgatctttgcctcgctgactggcgacattttgctggatgcgctgattggtgcgatgttcgccattatcagctactccagccttgccgcggtactgctgaccgcgactctgaccgccgcaggcattatctctttcccagtggcgctttgtctggtgattggtgcaaacctcggttccggcctgctggcgatgctcaacaacagtgccgccaatgccgcagcccgccgtgtcgcgctgggtagcctgctgtttaagctggtgggtagcctgattatcctgccgtttgttcatttgctggcagagacaatggggaagttgccattgccaaaagcggaattggtgatctatttccacgtcttctacaaccttgtacgctgcctggtcatgttgccattcgttgacccgatggcacggttttgcaaaacgattattcgcgatgaaccggaactggatacccagctacggcctaaacatctggatgtcagcgcgctggatacgcccacgcttgctctggcgaacgctgcccgcgaaaccctgcgcattggcgacgccatggaacagatgatggaagggttgaataaagtgatgcacggcgagccacggcaggagaaagagctgcgtaagctggctgatgacatcaacgttctctataccgccattaagctgtatctggcgcggatgccaaaagaggaactggcagaagaagagtcgcgccgctgggcggagatcatcgaaatgtcgctcaaccttgaacaggcctccgatatcgtcgagcgcatggggagtgaaattgccgacaaatcgctggcagcaaggcgagcattttcgcttgatggcttgaaggaactggatgcgctctatgagcaattgctcagtaatttaaaactggcaatgtcggttttcttctctggcgatgttaccagcgcccgtcgtttgcgccgcagcaaacatcgttttcgcattcttaatcgccgctattcccacgcccacgtcgatcgcctgcaccagcaaaacgtgcagagtattgaaaccagttcgctacatttaggcttactgggagatatgcagcgtctgaactcgctgttttgttcggtggcttacagtgtgctggaacagccggatgaagatgaaggacgggacgagtattaa

SEQ ID NO: 440 - protein, 543 aa, Klebsiella michiganensis
MLTLLHLLSAVALLVWGTHIVRTGVMRVFGARLRTVLSRSVEKKPLAFCAGIGVTALVQSSNATTMLVTSFVAQDLVALAPALVIVLGADVGTALMARILTFDLSWLSPLLIFIGVIFFLGRKQSRAGQLGRVGIGLGLILLALELIVQAVTPITQANGVQVIFASLTGDILLDALIGAMFAIISYSSLAAVLLTATLTAAGIISFPVALCLVIGANLGSGLLAMLNNSAANAAARRVALGSLLFKLVGSLIILPFVHLLAETMGKLPLPKAELVIYFHVFYNLVRCLVMLPFVDPMARFCKTIIRDEPELDTQLRPKHLDVSALDTPTLALANAARETLRIGDAMEQMMEGLNKVMHGEPRQEKELRKLADDINVLYTAIKLYLARMPKEELAEEESRRWAEIIEMSLNLEQASDIVERMGSEIADKSLAARRAFSLDGLKELDALYEQLLSNLKLAMSVFFSGDVTSARRLRRSKHRFRILNRRYSHAHVDRLHQQNVQSIETSSLHLGLLGDMQRLNSLFCSVAYSVLEQPDEDEGRDEY

SEQ ID NO: 441 - DNA, 1554 bp, Escherichia coli
atgagtcatcgtgcacgacaccaattactggcgtttccgggcattatctttttagttctctttcccatcattctgtcgctatggattgccttcttttgggcaaaatcagaagtgaataatcagctccgaacctttgctcagctggcgttggataaatctgagctggtcattcgtcaggcagatttagtgagcgatgcagctgaacgctatcaggggcaagtttgcactccagcccatcaaaagcgaatgttgaatattattcgtggctatctttatattaatgaattgatttatgctcgtgataaccattttttatgctcatcgctgatagcgtctgtaaatggctatacgattgcaccggccgattataagcgtgaacctaacgtttctatctattattaccgtgatacgccttttttctctggctataaaatgacctacatgcagcggggaaattatgtggcggttatcaaccctctcttctggagtgaagtgatgtctgatgatccgacattgcaatggggtgtgtatgatacggtgacgaaaacctttttctcgttaagcaacgaggcctcggcagcaacgttttctccgctgattcatttgaatgatttaaccgtacaacgaaatggctatttatatgcgacagtttattcgacaaaacgcccaattgcagccattgttgcgacttcatatcaacgtcttataactcatttttataatcatcttatttttgcgttgcccgccggtattttggggagtcttgttctgctattactctggctacgtattcgacaaaactatttgtctcccaaacgcaaattgcaacgcgccctcgaaaaacatcaactttgcctttattaccagccaataatcgatatcaaaacagaaaaatgtatcggcgctgaagcgttgttacgttggcctggtgagcaggggcaagtaatgaatccggcagagtttattccgctggcagaaaaggaggggatgatcgaacaggtaactgattatgttattgataatgtcttccgtgatttgggcgcgtatctggcaacacataccgatcgctatgtttctattaacctgtcagcctccgattttcatacctcacggttgatagcgcgaaccaatcagaaaacagagcaacatgcggtgcgcccgcagcaaattaaatttgaagtgactgaacatgcatttcttgatgtcgacaaaatgacgccgattattctggctttccgcaaggccggttacgaagtggcaattgatgattttggtattggctactctaacttgcataaccttaaatcattgaatgtcgatattttgaaaatcgataaatcgtttgttgagacgctgaccacccacaaaaccagtcatttgattgcggaacacatcatcgagctggcgcacagtctgggattaaaaacgatcgctgaaggtgtcgaaactgaggcgcaggttaactggctgcgcaaacacggcgtgcgctattgccagggatggttttttgcgaaggcgatgccgccgcaggtgtttatgcaatggatggggtaa

SEQ ID NO: 442 - protein, 517 aa, Escherichia coli
MSHRARHQLLAFPGIIFLVLFPIILSLWIAFFWAKSEVNNQLRTFAQLALDKSELVIRQADLVSDAAERYQGQVCTPAHQKRMLNIIRGYLYINELIYARDNHFLCSSLIASVNGYTIAPADYKREPNVSIYYYRDTPFFSGYKMTYMQRGNYVAVINPLFWSEVMSDDPTLQWGVYDTVTKTFFSLSNEASAATFSPLIHLNDLTVQRNGYLYATVYSTKRPIAAIVATSYQRLITHFYNHLIFALPAGILGSLVLLLLWLRIRQNYLSPKRKLQRALEKHQLCLYYQPIIDIKTEKCIGAEALLRWPGEQGQVMNPAEFIPLAEKEGMIEQVTDYVIDNVFRDLGAYLATHTDRYVSINLSASDFHTSRLIARTNQKTEQHAVRPQQIKFEVTEHAFLDVDKMTPIILAFRKAGYEVAIDDFGIGYSNLHNLKSLNVDILKIDKSFVETLTTHKTSHLIAEHIIELAHSLGLKTIAEGVETEAQVNWLRKHGVRYCQGWFFAKAMPPQVFMQWMG

SEQ ID NO: 443 - DNA, 324 bp, Escherichia coli
atgtcccatcagaaaattattcaggatcttatcgcatggattgacgagcatattgaccagccgcttaacattgatgtcgtcgcaaaaaaatctggctattcaaagtggtacttgcaacggatgttccgcacggtgacgcatcagacgcttggcgattacattcgccagcgccgtctgttactggccgccgttgagttgcgcaccaccgagcgtccgatttttgatatcgcaatggacctgggttatgtctctcagcagaccttctcccgcgttttccgtcggcagtttgatcgcactcccagcgattatcgccaccgcctgtag

SEQ ID NO: 444 - protein, 107 aa, Escherichia coli
MSHQKIIQDLIAWIDEHIDQPLNIDVVAKKSGYSKWYLQRMFRTVTHQTLGDYIRQRRLLLAAVELRTTERPIFDIAMDLGYVSQQTFSRVFRRQFDRTPSDYRHRL

SEQ ID NO: 445 - DNA, 330 bp, Acinetobacter pittii
atgaaacgctttccgctatttcttttattcaccctgctcacgctgtccaccgttccggcccaggccgatattatcgacgacaccattggcaatattcagcaggcgattaacgacgcttataaccctgaccgtgggcgagactatgaagattcgcgcgacgacggttggcaacgccaggtgagcgacgatcgtcgcaagcaatataacgatcgccgccgccagtttgaagatcgccgcaggcagctggacgatcgccagcgccagcttgatcaggagcgtcggcaactggaagatgaagagcggagaatggaagatgagtatgggcgttga

SEQ ID NO: 446 - protein, 109 aa, Acinetobacter pittii
MKRFPLFLLFTLLTLSTVPAQADIIDDTIGNIQQAINDAYNPDRGRDYEDSRDDGWQRQVSDDRRKQYNDRRRQFEDRRRQLDDRQRQLDQERRQLEDEERRMEDEYGR

SEQ ID NO: 447 - DNA, 759 bp, Citrobacter koseri
atgagcctgaccctcacgctcaccggcaccggcggcgcacagggcgttccggcatggggctgcgagtgcgcggcctgcgccagagcacgacgctcgccgcagtatcgccgccagccatgcagcggcgtagtgaagtttaacgaggcgatcaccctgatcgacgccgggcttcacgatctcgccgatcgctggtctcccggatcgttccagcagtttttgctgacgcattatcatatggatcacgtccaggggctgtttccgctgcgctggggcgtgggcgatcagatcccggtctacggcccgccggatgaacagggctgcgacgatctgtttaaacatccgggcctgcttgatttcagccacacgatggaaccgtttgtggtgtttgatttacaggggttacaggtcacgcccctgccgctcaaccactcaaaactgaccttcggttatctgctggaaacggcgcacagccgggtggcgtggctatctgacaccgcaggcctgccggaaaaaacgctgaaatttttacgcaataatcagccgcaggtaatggtgattgattgcagccacccgccgcgcgaggatgcaccgcgtaatcactgtgatttaaataccgtgcttgcgctgaatcaggttatccgctcgccgcgggttattctgacccatatcagccatcagtttgatgcgtggctgatggaaaacgcgctaccatcggggtttgaggcggggtttgatgggatggagattgaggtggcgtga

SEQ ID NO: 448 - protein, 252 aa, Citrobacter koseri
MSLTLTLTGTGGAQGVPAWGCECAACARARRSPQYRRQPCSGVVKFNEAITLIDAGLHDLADRWSPGSFQQFLLTHYHMDHVQGLFPLRWGVGDQIPVYGPPDEQGCDDLFKHPGLLDFSHTMEPFVVFDLQGLQVTPLPLNHSKLTFGYLLETAHSRVAWLSDTAGLPEKTLKFLRNNQPQVMVIDCSHPPREDAPRNHCDLNTVLALNQVIRSPRVILTHISHQFDAWLMENALPSGFEAGFDGMEIEVA

SEQ ID NO: 449 - DNA, 435 bp, Citrobacter koseri
atgcctgcttgtgagcttcgcccggctacgcagtacgacaccgacgcagtttacgcgctgatttgtgagctaaaacaggcggagtttgaccaccaggcgtttcgcgtgggctttaacgccaacctgcgtgacccgaatatgcgctaccatctggcgctgttggatggcgaggttgtcggcatgatcggcctgcatttgcagtttcatctgcatcatgtcaactggatcggcgaaattcaggaactggtggtgatgccgcaggcacgcggtctgaacgtcggcagtaaattactggcatgggcagaagaagaagcccgccaggctggggccgaaatgaccgagctttccaccaacgtgaagcgccacgacgcgcaccgtttttacctgcgtgaaggctacgagcagagccacttccgcttcaccaaggcgctgtaa

SEQ ID NO: 450 - protein, 144 aa, Citrobacter koseri
MPACELRPATQYDTDAVYALICELKQAEFDHQAFRVGFNANLRDPNMRYHLALLDGEVVGMIGLHLQFHLHHVNWIGEIQELVVMPQARGLNVGSKLLAWAEEEARQAGAEMTELSTNVKRHDAHRFYLREGYEQSHFRFTKAL

SEQ ID NO: 451 - DNA, 2229 bp, Citrobacter koseri
atgtacacacagaccctgtatgagttaagtcaggaggctgaacgcctgttacagctttctcgccaacagttgcagttactggaaaaaatgcctctctctgtacccggagacgatgcgccacaactggctttaccctggagtcagcctaatatcgccgaacgtcacgcgatgctgaataatgagttgcgtaaaatttcccgactggaaatggtgctggcgattgtcggtactatgaaagcagggaaatcaaccaccattaatgccattgttggtacggaggttctgcctaatcgcaatcgcccaatgactgcgctgccgacgcttattcgccatacgcccgggcaaaaagaaccggtactgcatttttcacatgtcgcgccaatcgattgtttaattcaaaaattacaacagcgcctgcgtgattgcgatattaagcatctgaccgatgtgctggaaatagataaagatatgcgtgcgcttatgcagcggatcgaaaatggcgtcgctttcgaaaaatattatctgggtgcccagcctatttttcattgtctgaaaagtttgaatgatttggtgcgactggcgaaggcgctggacgtcgattttcctttttctgcttacgccgccattgagcatattcccgtgattgaagtggagtttgtccatctggcggggctggagagttatcccggtcaattgacgttactggatacccccgggccaaatgaagccgggcaaccgcatcttcaaaaaatgcttaaccagcagctggcacgcgcctcggcggtactggcggtgctggattatacgcaactgaaatcgatctccgatgaagaggtccgtgaggcgattttggcggtggggcaatcggtgccgctgtatgtgctggtcaataagttcgatcaacaggatcgtaacagtgacgacgctgaccaggtgcgggcactgatttccggaacgctgatgaaaggctgtattacgccacagcagatatttccggtgtcgtcgatgtggggctacctggcgaatcgggcgcgccatgagttagccaacaacggtaagttacccgcgccagagcaacaacgctgggtggaagattttgcccatgccgcgctcggcaggcgctggcgtcatgccgatctggcggacctcgaacatattcgccatgctgccgatcagttgtgggaagattcgctgttcgcccagccaattcaggcgttgctttatgccgcttacgctaacgcctcgttgtatgctctgcgatctgccgcgcataaactgttgaattacgcgcagcaggcgcgggaatacctggattttcgtgcgcacgggttaaacgtcgcttgtgaacaattgcagcaaaatatccatcaggtcgaagaaagtttgcagctattgcaactcaatcaggcgcaggtgagcggcgagattaaacatgaaatcgagttggccctgacctccaccaaccactttctgcgtcaacagcaagatgcggtgaatgcgcagttagccgcgttgtttcaggataattcggagtcgttaagtgagatgcgtacccgctgtgagacactgttacagacggcgcagaacaccatcagtcgcgactttacgctgcgctttgccgagcttgagtccaccctttgccgggtgttaaccgatgttattcgccccattgagcaacaagtcaaaatggaattgagtgagtctgggtttcgtcctgggtttcattttcctgtttttcacggcgtagttccccacttcaacacccgccagctgttcagtgaagtcatttcgcgccaggcagcaacggacgagcagagcacgcgtttaggcgttgtgcgtgagattttttcgcgctggttgaatcagcccgactggggacggggaaatgagaaattcccgacagagacggttgattacagtgtgttgcaacgagcattaagcgcagaagtcgatctttattgccaacaaatggctaaagttatggcagagcaggtcgatgaatctgttacggcaggcatgaatacttttttcgctgagttcgcttcatgtttgacggaattacagacgcgtttacgcgaaagtatggctctgcgtcaacaaaatgaatcggtggtcaggctgatgcaacagcaattgcagcagactgtgatgactcacggctggatttacaccgacgctcagctgttacgcgatgatattcaaacacttttcacggcagaacgatattga

SEQ ID NO: 452 - protein, 742 aa, Citrobacter koseri
MYTQTLYELSQEAERLLQLSRQQLQLLEKMPLSVPGDDAPQLALPWSQPNIAERHAMLNNELRKISRLEMVLAIVGTMKAGKSTTINAIVGTEVLPNRNRPMTALPTLIRHTPGQKEPVLHFSHVAPIDCLIQKLQQRLRDCDIKHLTDVLEIDKDMRALMQRIENGVAFEKYYLGAQPIFHCLKSLNDLVRLAKALDVDFPFSAYAAIEHIPVIEVEFVHLAGLESYPGQLTLLDTPGPNEAGQPHLQKMLNQQLARASAVLAVLDYTQLKSISDEEVREAILAVGQSVPLYVLVNKFDQQDRNSDDADQVRALISGTLMKGCITPQQIFPVSSMWGYLANRARHELANNGKLPAPEQQRWVEDFAHAALGRRWRHADLADLEHIRHAADQLWEDSLFAQPIQALLYAAYANASLYALRSAAHKLLNYAQQAREYLDFRAHGLNVACEQLQQNIHQVEESLQLLQLNQAQVSGEIKHEIELALTSTNHFLRQQQDAVNAQLAALFQDNSESLSEMRTRCETLLQTAQNTISRDFTLRFAELESTLCRVLTDVIRPIEQQVKMELSESGFRPGFHFPVFHGVVPHFNTRQLFSEVISRQAATDEQSTRLGVVREIFSRWLNQPDWGRGNEKFPTETVDYSVLQRALSAEVDLYCQQMAKVMAEQVDESVTAGMNTFFAEFASCLTELQTRLRESMALRQQNESVVRLMQQQLQQTVMTHGWIYTDAQLLRDDIQTLFTAERY

SEQ ID NO: 453 - DNA, 825 bp, Escherichia coli
atgcaaccactacatggtaattgtctaattgcgtacgcaagacataaatatattctcaccatggttaatggtgaatatcgctattttaatggcggtgatctggtttttgcggatgcaagccaaattcaagtggataagtgtgttgagaatttcgtattagtttcaagagacacgctttcattatttctcccgatgctcaaggaggaggcattaaaacttcatgcacataaaaaagttccttcattactcgttcatcactgtaccagagatattcctgtttttcaggaagttgcgcaactatcgcagaataagaatcttcgctatgcagaaatgctacgtaaaagggcattaatctttgcgttgttatctgtttttcttgaggatacgcaatttataccgttacttctgaacgtgttgcaaccgaatatgcgaacacgagtttgtacggtcatcaataataatatcgcccatgagtggacattagcccgaatcgctagcgaattgttgatgagtccaagcctgttaaagaaaaaattgcgcgaagaaggtacgtcatattcacagttgcttactgagtgtaggatgcagcgtgctttacaacttattgttatatatggggtttcaattaagcgagttgcagtatcctgtggatatcacagcgtgtcgtatttcatttacgtttttcgaaattattatgggatgacgcccacagagtatcaggagcgatcggcgcaggaattaccgaactgtggcccggcggcaagtatggctgcgcaagggattttttacggtactgaccgttctgcggaaggaataagattatag

SEQ ID NO: 454 - protein, 274 aa, Escherichia coli
MQPLHGNCLIAYARHKYILTMVNGEYRYFNGGDLVFADASQIQVDKCVENFVLVSRDTLSLFLPMLKEEALKLHAHKKVPSLLVHHCTRDIPVFQEVAQLSQNKNLRYAEMLRKRALIFALLSVFLEDTQFIPLLLNVLQPNMRTRVCTVINNNIAHEWTLARIASELLMSPSLLKKKLREEGTSYSQLLTECRMQRALQLIVIYGVSIKRVAVSCGYHSVSYFIYVFRNYYGMTPTEYQERSAQELPNCGPAASMAAQGIFYGTDRSAEGIRL

SEQ ID NO: 455 - DNA, 153 bp, Shigella sonnei
atgtcccacgccgtggacggtacttacattaaggcacaacaggacaaaatggtcaattcttcgttatgtaaaaaagcgtcagttgatacatattttaatgttatgaaagttaatttaattatttacaatgatgatgtaataatgatgagttaa

SEQ ID NO: 456 - protein, 50 aa, Shigella sonnei
MSHAVDGTYIKAQQDKMVNSSLCKKASVDTYFNVMKVNLIIYNDDVIMMS

SEQ ID NO: 457 - DNA, 153 bp, Citrobacter koseri
atgaagcagcataagccgatgattgtcgccctgatcgtcatctgtatcaccgccgtagtggcggcgctggtaacgagaaaagacctctgtgaggttcacatccgaactggccagacggaggttgctgttttcacggcttacgaatccgagtaa

SEQ ID NO: 458 - protein, 50 aa, Citrobacter koseri
MKQHKPMIVALIVICITAVVAALVTRKDLCEVHIRTGQTEVAVFTAYESE

SEQ ID NO: 459 - DNA, 162 bp, Citrobacter koseri
atgtttcgttggggcatcatatttctggttatcgcgttaatcgccgccgcacttgggtttggtggtctggccggtactgctgcaggcgcagctaaaattgtctttgtcgtcgggattattctgttcctggtgagtttgttcatgggccgaaaacgaccctag

SEQ ID NO: 460 - protein, 53 aa, Citrobacter koseri
MFRWGIIFLVIALIAAALGFGGLAGTAAGAAKIVFVVGIILFLVSLFMGRKRP

SEQ ID NO: 461 - DNA, 1071 bp, Shigella sonnei
atgaaaaaattgatcaatgatgtgcaagacgtactggacgaacaactggcaggactagcgaaggcgcatccatcgctgacactgcatcaggatccggtgtatgtcacccgagctgatgcccccgttgcagggaaagtcgccctgctgtcgggtggcggcagcggacacgagccgatgcactgtggctatatcggtcaggggatgctttcgggagcctgtccgggcgaaattttcacctcaccgacgcccgataaaatctttgaatgcgccatgcaaattgatggcggcgaaggtgtactgttgattatcaaaaattacaccggcgatattcttaacttcgaaacagcaaccgagttactgcacgatagcggcgtaaaagtgaccactgtggtcattgatgacgacgttgcagtaaaagacagtctttataccgccgggcggcgcggcgttgccaacaccgtattaattgaaaaactcgtaggtgcagcggcggagcgtggcgactcactggacgcctgtgcggaactggggcgtaagttgaataatcaaggccattcaataggtatcgctctcggtgcctgtaccgttcctgccgcgggcaaaccttcttttaccctggcggataatgagatggagtttggcgtcggcattcatggtgagccaggtattgaccgccgccccttctcttcccttgatcaaaccgtcgatgaaatgttcgacaccctgctggaaaatggctcataccatcgcactttgcgtttctgggattatcaacaaggcagctggcaggaagaaccacaaaccaaacaaccgctccagtctggcgatcgggtgattgcgctggttaacaatcttggcgcaactccgctttctgagctgtacggcgtctataaccgcctgaccacacgttgccagcaagcgggattgactatcgaacgtaatttaattggcgcgtactgcacctcactggatatgaccggtttctcaatcaccttactgaaagttgatgacgaaacgctggcactctgggacgcccctgtccacaccccggcccttaactggggtaaataa

SEQ ID NO: 462 - protein, 356 aa, Shigella sonnei
MKKLINDVQDVLDEQLAGLAKAHPSLTLHQDPVYVTRADAPVAGKVALLSGGGSGHEPMHCGYIGQGMLSGACPGEIFTSPTPDKIFECAMQIDGGEGVLLIIKNYTGDILNFETATELLHDSGVKVTTVVIDDDVAVKDSLYTAGRRGVANTVLIEKLVGAAAERGDSLDACAELGRKLNNQGHSIGIALGACTVPAAGKPSFTLADNEMEFGVGIHGEPGIDRRPFSSLDQTVDEMFDTLLENGSYHRTLRFWDYQQGSWQEEPQTKQPLQSGDRVIALVNNLGATPLSELYGVYNRLTTRCQQAGLTIERNLIGAYCTSLDMTGFSITLLKVDDETLALWDAPVHTPALNWGK

SEQ ID NO: 463 - DNA, 633 bp, Acinetobacter pittii
atgtcactgagcagaactcaaattgttaactggctcactcgttgtggcgatattttcagcaccgagagcgagtatcttactggactggatcgcgagattggcgacgctgaccacgggctaaatatgaatcgaggctttagcaaagtggtggaaaaactccctgctatcgcagataaagatatcggtttcattctcaagaataccggcatgacgctactttccagcgtcggaggtgccagtggtccgctgttcggtaccttctttatccgcgccgcacagacaacccaggcacggcaaagcctgacgctggaagagctttatcagatgttccgcgatggcgcggacggcgtaatcagtcgcgggaaagccgaacctggcgataaaaccatgtgtgatgtgtgggtgccggtggtggaatcgttacgtcagtcctgcgagcaaaatctccctgttccggcggcgctcgacgctgccagtagcatcgccgaatccgctgcacaaagtacgattacgatgcaagcccgcaaaggccgcgccagttatctcggtgaacgcagtattggtcaccaggatcccggcgcgacctcggtgatgtttatgatgcaaatgttggcgttagccgcaaaagagtaa

SEQ ID NO: 464 - protein, 210 aa, Acinetobacter pittii
MSLSRTQIVNWLTRCGDIFSTESEYLTGLDREIGDADHGLNMNRGFSKVVEKLPAIADKDIGFILKNTGMTLLSSVGGASGPLFGTFFIRAAQTTQARQSLTLEELYQMFRDGADGVISRGKAEPGDKTMCDVWVPVVESLRQSCEQNLPVPAALDAASSIAESAAQSTITMQARKGRASYLGERSIGHQDPGATSVMFMMQMLALAAKE

SEQ ID NO: 465 - DNA, 1419 bp, Acinetobacter pittii
atggtaaacctggtcatagtttcacatagcagccgactgggagaaggtgtcggtgaattagcccgtcagatgttaatgagtgatagttgtaaaatcgccattgccgcgggaattgacgatccacataatcccattggtaccgatgccgtcaaagtgatggaggccatcgaatctgttgccgatgccgaccatgtgctggtcatgatggatatgggtagcgcattattgagtgctgaaactgcgctggaattgctggctcccgagatcgccgcaaaagtacgtttgtgtgctgcgccgttggtcgaaggtacactggcagcaacggtcagcgcggcctcgggagcggatatcgacaaagttatctttgacgccatgcatgcgctggaagccaaacgtgaacaactgggtttaccgtcctccgacactgaaatctctgacacatgtcctccgtacgatgaagaagcccgttctctgtcggtggtcataaaaaaccgtaacggcctgcatgtacgtccggcctcccggctggtttataccttatcgacatttaatgccgatatgttgctggagaaaaacggcaaatgcgttacaccggagagtattaaccagattgcgttactacaagttcgctataacgatacgctgcgcctgattgcgaaaggaccagaagctgaagaggcactgatcgctttccgtcagctggctgaagataactttggtgaaacggaggaagttgctccacctactctgcgtcccgttccgcctgtttcgggtaaagccttttattatcaacctgttttatgtacggtacaggcaaaatcaaccctgaccgtggaagaagaacaagaacgattacgccaggccattgacttcacgttattagatctgatgacgttaacagcgaaagcagaaaccagtgggcttgacgatattgccgcaatcttttctggtcaccatacactgttagatgatccggaactgcaggcggcggcaagcgaactccttcagcatgaacattgcacggcggaatatgcctggcagcaagttcttaaagaacttagccagcaataccaacagctggatgatgaatatctacaggctcgctatatcgatgtggacgatcttctgcatcgcaccctggtccacctgacccaaacgaaagaagaactcccgcagtttaactcgccaactattctactggcggagaacatttatccctccacagtactgcaactggatccagcggttgtaaaaggtatctgccttagcgccggaagtccgctatcccacagtgccctaatcgcccgtgaactgggaattggctggatttgccagcagggtgagaaactgtatgcgatacaaccagaagaaacgctaacgctggacgttaaaacgcaacgtttcaaccgtcagggttaa

SEQ ID NO: 466 - protein, 472 aa, Acinetobacter pittii
MVNLVIVSHSSRLGEGVGELARQMLMSDSCKIAIAAGIDDPHNPIGTDAVKVMEAIESVADADHVLVMMDMGSALLSAETALELLAPEIAAKVRLCAAPLVEGTLAATVSAASGADIDKVIFDAMHALEAKREQLGLPSSDTEISDTCPPYDEEARSLSVVIKNRNGLHVRPASRLVYTLSTFNADMLLEKNGKCVTPESINQIALLQVRYNDTLRLIAKGPEAEEALIAFRQLAEDNFGETEEVAPPTLRPVPPVSGKAFYYQPVLCTVQAKSTLTVEEEQERLRQAIDFTLLDLMTLTAKAETSGLDDIAAIFSGHHTLLDDPELQAAASELLQHEHCTAEYAWQQVLKELSQQYQQLDDEYLQARYIDVDDLLHRTLVHLTQTKEELPQFNSPTILLAENIYPSTVLQLDPAVVKGICLSAGSPLSHSALIARELGIGWICQQGEKLYAIQPEETLTLDVKTQRFNRQG

SEQ ID NO: 467 - DNA, 1698 bp, Citrobacter koseri
atgaaatcccccgcaccttctcgcccgcaaaaaatggcgttaattccagcctgcatctttttgtgtttcgctgcgctatcggtgcaggcagaagaaacatcggtaacaccacaaccgcctgatattttattagggccgctgtttaatgatgtgcaaaacgccaaactttttccggaccaaaaaacctttgccgatgccgtgccgaacagcgatccgctgatgatccttgctgattatcggatgcagcaaaaccagagcggatttgatctacgccatttcgttaacgtcaatttcaccctgccgaaagagggcgagaaatatgttccgccagaggggcaatcactgcgcgaacatattgacggactttggccggtattaacgcgttctaccgaaaacaccgaaaaatgggattctctattaccgctgccaaaaccttatgtcgtgcccggcggacgttttcgcgaggtatattactgggacagttacttcaccatgttaggacttgccgaaagcggtcactgggataaagtcgcggatatggtagccaattttgctcatgaaatagacacttacggtcatattcccaacggcaaccgcagttactatttaagccgctcgcagccgcccttctttgccctgatggtagagttactggcgcagcatgaaggcgacgccgcgttgaaacaatacctgccgcaaatgcaaaaagaatatgcttactggatggacggtgttgaaaacctgcaagccggacaacaggaaaaacgcgttgtaaaacttcaggatggtacccttctcaaccgctactgggacgatcgcgatacgccacgaccagagtcatgggtggaagatattgccactgccaaaagcaatccgaatcgacctgccactgaaatttaccgcgacctgcgctctgccgctgcgtctggctgggatttcagctcgcgctggatggacaatccgcagcagttaaacaccttacgcacaaccagcatcgtaccggtcgatctgaacagcttgatgttcaaaatggaaaaaatcctctcccgcgccagcaaagctgccggagataacgcgatggcaaaccagtacgaaacgctggcaaatgcccgtcaaaaagggatcgaaaaatacctgtggaacgatcaacaaggctggtatgccgattacgacctgaaaagtcataaagtgcgcaatcagttaaccgcggccgccctgttcccgctgtacgtcaatgcggcagcgaaagatcgcgccagcaaaatggcgacggcgacgaaaacacatctgctgcaacccggcggcctgaacaccacgtcggtgaaaagtgggcaacaatgggatgcgccaaacggctgggcaccgttgcagtgggtcgcgacagaaggattacaaaactacgggcaaaaagaggtagcgatggacattagctggcacttcctgaccaatgttcagcacacctatgaccgggagaaaaagctggtggaaaaatatgatgtcagcaccaccggaacagggggcggcggtggcgaatatccattacaggatggctttggctggaccaatggcgtgacgctgaaaatgctggatttgatctgcccgaaagagcaaccgtgtgacaatgttccgacgacgcgtccactcagtgaatcaacaacacagccgctaaaacaaaaagaggcggaacctacgccttaa

SEQ ID NO: 468 - protein, 565 aa, Citrobacter koseri
MKSPAPSRPQKMALIPACIFLCFAALSVQAEETSVTPQPPDILLGPLFNDVQNAKLFPDQKTFADAVPNSDPLMILADYRMQQNQSGFDLRHFVNVNFTLPKEGEKYVPPEGQSLREHIDGLWPVLTRSTENTEKWDSLLPLPKPYVVPGGRFREVYYWDSYFTMLGLAESGHWDKVADMVANFAHEIDTYGHIPNGNRSYYLSRSQPPFFALMVELLAQHEGDAALKQYLPQMQKEYAYWMDGVENLQAGQQEKRVVKLQDGTLLNRYWDDRDTPRPESWVEDIATAKSNPNRPATEIYRDLRSAAASGWDFSSRWMDNPQQLNTLRTTSIVPVDLNSLMFKMEKILSRASKAAGDNAMANQYETLANARQKGIEKYLWNDQQGWYADYDLKSHKVRNQLTAAALFPLYVNAAAKDRASKMATATKTHLLQPGGLNTTSVKSGQQWDAPNGWAPLQWVATEGLQNYGQKEVAMDISWHFLTNVQHTYDREKKLVEKYDVSTTGTGGGGGEYPLQDGFGWTNGVTLKMLDLICPKEQPCDNVPTTRPLSESTTQPLKQKEAEPTP

SEQ ID NO: 469 - DNA, 588 bp, Klebsiella oxytoca
atgcaggtcagcagaaggcagttctttaagatctgcgctggcggtatggcaggcaccacggcagcggcactgggttttgcacccagcgtagcactcgcggaaacccggcagtataaactgctgcgcacccgcgaaacccgtaatacctgcacctattgttccgtaggctgtgggctgttgatgtacagcctcggtgacggagcaaaaaacgccaaagcatctatcttccatatcgaaggtgacccggatcacccggtcaaccgcggagcactttgtccgaaaggcgctggcctggtggatttcatccactccgaaagccgtctgaagtttccggaataccgtgcgccaggttctgataaatggcaacaaatcagttgggaagaggcgtttgatcgcatcgccaaactgatgaaagaagaccgcgatgcgaactacattgcgcaaaacgccgaaggcgtgactgttaaccgctggctctccaccgggatgctgtgtgcttccgcgtcgagtaacgaaaccggctatttaacgcaaaaattctcccgcgcgctgggtatgctcgcggtcgacaaccaggcgcgtgtctga

SEQ ID NO: 470 - protein, 195 aa, Klebsiella oxytoca
MQVSRRQFFKICAGGMAGTTAAALGFAPSVALAETRQYKLLRTRETRNTCTYCSVGCGLLMYSLGDGAKNAKASIFHIEGDPDHPVNRGALCPKGAGLVDFIHSESRLKFPEYRAPGSDKWQQISWEEAFDRIAKLMKEDRDANYIAQNAEGVTVNRWLSTGMLCASASSNETGYLTQKFSRALGMLAVDNQARV

SEQ ID NO: 471 - DNA, 327 bp, Shigella boydii
atgattaaaacaacgttactattttttgctactgcgctgtgtgaaattattggatgctttttgccctggctgtggttgaagcgaaacgccagtatctggctgttgcttccggcggggatttcactggcgctgtttgtctggttgttaacgttgcatcctgcggcgagtgggcgtgtttacgcggcttatggtggcgtttatgtctgcacggcgttgatttggctgcgcgttgtggatggcgtgaaactgactctttatgactggacgggggcgttaattgcgctttgcggcatgttgatcattgttgcgggctgggggcgcacgtag

SEQ ID NO: 472 - protein, 108 aa, Shigella boydii
MIKTTLLFFATALCEIIGCFLPWLWLKRNASIWLLLPAGISLALFVWLLTLHPAASGRVYAAYGGVYVCTALIWLRVVDGVKLTLYDWTGALIALCGMLIIVAGWGRT

SEQ ID NO: 473 - DNA, 615 bp, Acinetobacter pittii
atgacccatttttcacagcaagataatttttctgtcgcggcgcgcgtgttgggcgcgctgttttattacgctccagagagtgcggaagccgcacctctggttgcggtactcaccaatgacagctgggaaactcagtggcctctaccagaagcgtcattagcgccgctggtgactgcttttcagacacagagtgaagagactcacgcccaggcctggcagcgtttgtttgtcggcccgtgggcactgccgtcaccgccgtggggatcggtctggctggatcgcgaatctgtgctgtttggcgattcaacattggcacttcgtcagtggatgcgcgagaaaggcattcagttcgaaatgaagcaaaacgaaccggaagatcattttggttcactgctgctgatggctgcgtggttggcggagaatggtcgccagacagaatgcgaagaattgctggcatggcacctttttccgtggtcaacacgttttcttgacgtttttatcgaaaaagcagaacaccctttctaccgtgcactgggtgaactcgctcgcttaacgctggcgcaatggcaatcacaactgttgattcctgtcgcggttaaaccgctgtttcgatag

SEQ ID NO: 474 - protein, 204 aa, Acinetobacter pittii
MTHFSQQDNFSVAARVLGALFYYAPESAEAAPLVAVLTNDSWETQWPLPEASLAPLVTAFQTQSEETHAQAWQRLFVGPWALPSPPWGSVWLDRESVLFGDSTLALRQWMREKGIQFEMKQNEPEDHFGSLLLMAAWLAENGRQTECEELLAWHLFPWSTRFLDVFIEKAEHPFYRALGELARLTLAQWQSQLLIPVAVKPLFR

SEQ ID NO: 475 - DNA, 606 bp, Acinetobacter pittii
atgaaattgttctacaaaccgggcgcctgctctctcgcttcccatatcaccctgcgtgagagcggaaaggattttacgctcgtcagtgtggatttaatgaaaaaacgtctcgaaaacggtgacgattactttgccgttaaccctaagggacaggtacctgcattgctgctggacgatggtactttgctgacggaaggcgtagcgattatgcagtatcttgccgacagcgtccccgaccgccagttgctggcaccggtaaacagtatttcccgctataaaaccatcgaatggctgaattacatcgccaccgagctgcataaaggtttcacacctctgtttcgccctgatacaccggaagagtacaaatcgacagttcgcgcgcagctggagaagaagctgcaatatgtgaacgaggcactgaaggatgagcattggatctgcgggcaacgatttacaattgctgatgcctatctgtttacggttctgcgctgggcatacgcggtgaaactgaatctggaagggttagagcacattgcggcatttatgcaacgtatggctgaacgtccggaagtacaagacgcgctgtcagcggaaggcttaaagtaa

SEQ ID NO: 476 - protein, 201 aa, Acinetobacter pittii
MKLFYKPGACSLASHITLRESGKDFTLVSVDLMKKRLENGDDYFAVNPKGQVPALLLDDGTLLTEGVAIMQYLADSVPDRQLLAPVNSISRYKTIEWLNYIATELHKGFTPLFRPDTPEEYKSTVRAQLEKKLQYVNEALKDEHWICGQRFTIADAYLFTVLRWAYAVKLNLEGLEHIAAFMQRMAERPEVQDALSAEGLK

SEQ ID NO: 477 - DNA, 564 bp, Escherichia coli
atgaaccttgacgacaaatcgctgtttcttgacgccatggaagatgtccagccgctgaaacgtgctacagatgtccactggcatccagcgcgtaaccaacgtgcgccgcagcgtatcgacacgctgcaacttgataatttcctcaccaccggatttctcgacatcatcccgctaagtcagccgctggagtttcggcgggaagggttgcaacatggggtgctggataagctgcgcagtggtaaatatccgcaacaggcgagcctgaatcttttgcgccagccggtggaagagtgccgcaaaatgatgttcagtttcattcaacaagccctggcggatggtttgcgtaacgtgctgattattcatggcaaaggacgggatgataaatcgcatgccaatattgtccgcagctatgtggcgcgctggctgaccgaatttgatgatgttcaggcatattgcactgcgctaccgcatcatggcggcagcggggcgtgttacgtcgcactacgtaaaacagcgcaggcgaagcaagaaaactgggagcgccacgctaagcgcagtcgttga

SEQ ID NO: 478 - protein, 187 aa, Escherichia coli
MNLDDKSLFLDAMEDVQPLKRATDVHWHPARNQRAPQRIDTLQLDNFLTTGFLDIIPLSQPLEFRREGLQHGVLDKLRSGKYPQQASLNLLRQPVEECRKMMFSFIQQALADGLRNVLIIHGKGRDDKSHANIVRSYVARWLTEFDDVQAYCTALPHHGGSGACYVALRKTAQAKQENWERHAKRSR

SEQ ID NO: 479 - DNA, 1233 bp, Citrobacter koseri
atgattacacacaacttcaatactctggacttactcaccagtcctgtctggatcgtttcgccctttgaggaacagttaatttatgccaacagcgaggcacgactgttgatgcaagacctcacgtttagtcagctacgaaccggtccctattccgtctcctcacaaaaagaactgccgaaatacctctccgatctgcaaaatcaacacgatattatcgaaatcctcaccgttcagcgcaatgaagaggaaacagcattgagctgtcgacttgttttgcgaaagctgacagaagcagaaccggtgattattttcgaaggtatcgaagcgccggcaacgctgggtttaaaagccagtcgctcggcaaattatcagcgcaaaaaacaaggtttttatgcgcgcttttttctgactaactctgcaccaatgttgttgattgacccctcacgagatggccaaatcgtcgatgctaacctcgccgcgctcaatttctatggttataaccatgaaacgatgtgccagaaacatacctgggaaattaatatgctcgggcgtcgcgtcatgcctatcatgcatgaaatctcgcatttacccggtggtcataagcctttgaattttattcataaactggcggatggttcgactcgtcatgtgcagacctatgccgggccgattgaaatttatggcgacaagctcatgttatgtattgtgcatgatattactgagcaaaaacggctggaggagcagctggaacatgcagcccaccatgatgcgatgaccggattactgaatcggcgacagttttatcacattaccgagccaggccaaatgcagcacctcgctatcgctcaggattacagcttgttgctcatcgacaccgatcgttttaaacacattaacgatctctatgggcattctaaaggtgatgaggtgttatgcgcccttgcccgcactctcgaaagttgcgctcgcaaaggcgatttggtgtttcgttggggaggcgaagagtttgtcttattgctaccaagaaccccactggataccgcgctttcgctggctgaaactatccgcgtaagcgtggcaaaagtgagtatttcgagcttaccacgctttactgtcagcattggtgtggcgcatcacgaaggaaatgaaagcatcgatgaactgtttaaacgcgttgatgatgctttgtatcgagcgaaaaatgatggacgcaaccgcgtgctggcggcataa

SEQ ID NO: 480 - protein, 410 aa, Citrobacter koseri
MITHNFNTLDLLTSPVWIVSPFEEQLIYANSEARLLMQDLTFSQLRTGPYSVSSQKELPKYLSDLQNQHDIIEILTVQRNEEETALSCRLVLRKLTEAEPVIIFEGIEAPATLGLKASRSANYQRKKQGFYARFFLTNSAPMLLIDPSRDGQIVDANLAALNFYGYNHETMCQKHTWEINMLGRRVMPIMHEISHLPGGHKPLNFIHKLADGSTRHVQTYAGPIEIYGDKLMLCIVHDITEQKRLEEQLEHAAHHDAMTGLLNRRQFYHITEPGQMQHLAIAQDYSLLLIDTDRFKHINDLYGHSKGDEVLCALARTLESCARKGDLVFRWGGEEFVLLLPRTPLDTALSLAETIRVSVAKVSISSLPRFTVSIGVAHHEGNESIDELFKRVDDALYRAKNDGRNRVLAA

SEQ ID NO: 481 - DNA, 750 bp, Citrobacter koseri
atgtcaaaaaaatatcagccattgcttataactcattatatttcaacatgggtcactataacggaagcagttgagatcactaccaaagccataaaacaaaaaattactcctagcgatatttatcgtcatgccttgagtggcaacatcctactatcggtctatttccagtctcctgtgatacttaagaagatacaaacttttaatggaaaaataaaattcaggcagtttgtgggagacctacttgataaactatgcatgcttgacagggacggttttatttatggtcaaaatttaagactctgtacagaagccagatatgtttgtcctgtgcaacaaattatagatacccccctgttacgcaaactcaaccagtttcgtacgtttgttcgtaatgtccgcccgggtgatgaactggatgtcccggcacaagttagtgaaaaaaatttaaccccgccgccgggtaacagcagtggcaaccttgagcaacagatagccagtacttcacagctaattggatctctgctcgccgaagatatgaacagcgagcaagcggcaaacatagcacgtggatgggcctcttctcaggcttcagggataatgacagactggttaagccgcttcggtaccgcaagaatcacgctgggcgtggatgaagatttcagcctgaaaaactcccgtgacggcaaccctcgaaaatggcgattcgatgcaacaaacagtgaactatgtgccgaacgtcacgaatgctga

SEQ ID NO: 482 - protein, 249 aa, Citrobacter koseri
MSKKYQPLLITHYISTWVTITEAVEITTKAIKQKITPSDIYRHALSGNILLSVYFQSPVILKKIQTFNGKIKFRQFVGDLLDKLCMLDRDGFIYGQNLRLCTEARYVCPVQQIIDTPLLRKLNQFRTFVRNVRPGDELDVPAQVSEKNLTPPPGNSSGNLEQQIASTSQLIGSLLAEDMNSEQAANIARGWASSQASGIMTDWLSRFGTARITLGVDEDFSLKNSRDGNPRKWRFDATNSELCAERHEC

SEQ ID NO: 483 - DNA, 951 bp, Citrobacter pasteurii
gtgaatttccaacaactaaagataatccgcgaggctgcacgtcaggattacaacctgacagaggttgcgaatatgctttttacctcacagtcaggcgttagccgtcatattcgggaactggaggatgaacttggcatcgaaatatttgttcgacgaggtaagcgactgctgggcatgactgaaccgggcaaagcattactggtcattgcagaacgtattctgaatgaagccagtaatgttcgtcggcttgcagacctgtttaccaacgatacgtctggtgttctcactattgcaacgacgcatactcaggcatgttatagcttgccagaggtcattaaagcttttcgcgaacttttcccggaggttcggctcgagctaatccagggtacgccacaggaaattgcgacgttgttgcaaaatggcgaagctgatattggtatcgccagcgagcgtttgagtaatgacccgcagctcgtcgccttcccgtggtttcgctggcaccatagtttgcttgttccactcgatcatcccttaacgcaaattacaccattgacgctggaatcaatagcgaagtggccgttaattacttaccgacagggaattacggggcgctcacgcattgatgacgcatttgcccgcaaaggtttgccggcagatattgtattaagtgcacaggattctgatgtcattaaaacctatgttgctcttgggcttgggatcggattagttgccgaacaatccagcggcgaacaagaggaaaagaatttaatccgcctggatacgcggcatcttttcgatgctaatactgtctggttgggactgaagcgagggcaacttcagcgtaactatgtctggcgctttctggaactttgtaatgcaggactgtcagttgaggatatcaagcgccaggtgatggaaaacagtgaagaggaaattgattatcagatatag

SEQ ID NO: 484 - protein, 316 aa, Citrobacter pasteurii
MNFQQLKIIREAARQDYNLTEVANMLFTSQSGVSRHIRELEDELGIEIFVRRGKRLLGMTEPGKALLVIAERILNEASNVRRLADLFTNDTSGVLTIATTHTQACYSLPEVIKAFRELFPEVRLELIQGTPQEIATLLQNGEADIGIASERLSNDPQLVAFPWFRWHHSLLVPLDHPLTQITPLTLESIAKWPLITYRQGITGRSRIDDAFARKGLPADIVLSAQDSDVIKTYVALGLGIGLVAEQSSGEQEEKNLIRLDTRHLFDANTVWLGLKRGQLQRNYVWRFLELCNAGLSVEDIKRQVMENSEEEIDYQI

SEQ ID NO: 485 - DNA, 918 bp, Acinetobacter pittii
atgaacttcagacgcctgaaatacttcgtaaaaattgtagatattggtagcctgacccaggctgctgaagtattgcatatcgcacaaccagcgctcagccagcaggttgccacactggaaggtgagttaaatcaacagcttttgattcgcacaaaacggggcgttacgccaacagacgccggaaaaattctctatacccatgcacgggccattttacgtcagtgtgagcaggcccaactggcggtgcataacgttggtcagtcattatcggggcaagtctcgattggctttgcgccaggaaccgctgcgtcatccatcaccatgcccttattacaggcggttcgcgctgaattcccggaggtcgttatctatcttcatgaaaatagtggtgcagtgcttaacgaaaaactgataaatcaccaactcgatatggcggttatttatgagcattcccctgtggctggggtatccagtcaggctttgctgaaagaagatcttttcctggtaggaactcaagattgcccggggcaaagcgttgatgttaatgctattgcgcaaatgaacctctttctccccagtgattacagtgctattagacttcgtgttgatgaggctttttccctacggcgactcacggcaaaagtcattggtgaaattgagtctattgccacgcttaccgcagcgattgccagcggcatgggcgttgcagtattacccgaatcggccgcgcgttcgttatgtggcgcagtaaacggatggatgtcacgcattaccacaccttcaatgagtctctctttgtcattaaatttacccgccagagcgaacttatcaccacaggcgcaagcagtgaaagagttgttaatgtcagtgatgagttctccagtgatggaaaaaaggcagtggcaattggtgagctaa

SEQ ID NO: 486 - protein, 305 aa, Acinetobacter pittii
MNFRRLKYFVKIVDIGSLTQAAEVLHIAQPALSQQVATLEGELNQQLLIRTKRGVTPTDAGKILYTHARAILRQCEQAQLAVHNVGQSLSGQVSIGFAPGTAASSITMPLLQAVRAEFPEVVIYLHENSGAVLNEKLINHQLDMAVIYEHSPVAGVSSQALLKEDLFLVGTQDCPGQSVDVNAIAQMNLFLPSDYSAIRLRVDEAFSLRRLTAKVIGEIESIATLTAAIASGMGVAVLPESAARSLCGAVNGWMSRITTPSMSLSLSLNLPARANLSPQAQAVKELLMSVMSSPVMEKRQWQLVS

SEQ ID NO: 487 - DNA, 1080 bp, Shigella boydii
atgcaaatacttgccgatttactgaatacgatcccagccatcgatcctgccgctatgtcgcgtgcacaacggcatattgacgggttactcaaacctgttggtagcctgggaaagctggaggcgcttgccatacaactggcaggaatgccggggttgaatggcataccgcatgtgggcaaaaaagcggtactggttatgtgtgccgatcacggcgtctgggaggaaggggtcgctatttctccaaaagaagtgacagccatacaggctgaaaatatgacccgtggaacaaccggcgtgtgtgtgctggcagcacaagcgggcgctaacgtccacgtaattgatgttggtattgatactgctgagcctatccccgggcttatcaacatgcgtgtcgcacgaggtagtggcaatattgcttcagctccggcaatgagtcgccgtcaggctgaaaagttgcttttggacgtcatatgttatacgcgggagctggcaaaaaacggtgtcacgctgtttggtgtaggtgaactggggatggcaaacacgacaccggcagcggcaatagtcagcacaatcactggccgggatcctgaagaagtggttgggattggcgcaaacctgccgacagataaactggctaataaaattgatgttgtgcgtcgggcgattacgttgaatcaaccaaatcctcgggatggtgttgatgtcctggcaaaagtgggtggatttgatttggtcggaatagctggagtgatgttaggtgctgcttcctgcggtttacccgtgttgctggatggatttctttcttatgctgctgcgctcgcagcctgccagatgtctcctgcaatcaaaccgtatctcattccttctcacttgtcggcagaaaaaggcgcgcgtatagcgctgtcgcatttggggctggagccttatctcaatatggatatgcgtttaggtgaggggagtggtgcagctctggcgatgcccatcatcgaagctgcttgtgcgatatacaacaatatgggcgaacttgctgccagtaatattgttctaccggggaatacgacttctgatttgaacagctaa

SEQ ID NO: 488 - protein, 359 aa, Shigella boydii
MQILADLLNTIPAIDPAAMSRAQRHIDGLLKPVGSLGKLEALAIQLAGMPGLNGIPHVGKKAVLVMCADHGVWEEGVAISPKEVTAIQAENMTRGTTGVCVLAAQAGANVHVIDVGIDTAEPIPGLINMRVARGSGNIASAPAMSRRQAEKLLLDVICYTRELAKNGVTLFGVGELGMANTTPAAAIVSTITGRDPEEVVGIGANLPTDKLANKIDVVRRAITLNQPNPRDGVDVLAKVGGFDLVGIAGVMLGAASCGLPVLLDGFLSYAAALAACQMSPAIKPYLIPSHLSAEKGARIALSHLGLEPYLNMDMRLGEGSGAALAMPIIEAACAIYNNMGELAASNIVLPGNTTSDLNS

SEQ ID NO: 489 - DNA, 978 bp, Citrobacter koseri
atgagagtagaaaataataatgtttctgggcaaaaccatgacccggaacagattgatttgattgatttactagtgcagttgtggcgtggcaagatgacaattatcatttccgtcattgtggctattgccctggctattggttatttggcagtagcgaaggagaaatggacgtcaacagcaattatcactcagcccgacgtggggcaaattgctggctataacaatgccatgaatgttatctatggtcaggctgcaccgaaagtatcggatttgcaggagacgttaattggtcgcttcagttctgccttctctgcattagcagaaacgctggataatcaggaagagccagaaaaacttaccatcgaaccttctgttaagaaccagcaattaccattgactgtttcttatgttgggcaaactgcagagggcgcacaaatgaagttggcccaatacattcagcaagttgatgataaagtgaatcaagagctagaaaaggatctcaaggacaacattgctctgggacggaaaaacttgcaggactctttaagaacccaggaagtggtcgcgcaggagcagaaagatctgcgtatccgtcagattcaggaagcgttgcagtatgcgaatcaggcgcaggtgacaaagccgcagattcaacagacacaggacgtaacccaggatactatgtttcttttggggagcgaagcgctggagtcgatgattaagcacgaagcgacccgtccgttggtgttctcatcaaactactatcagactcgtcaaaacctgctggatattgacaatcttgacgttgataaacttgatattcatgcttaccgctatgtaatgaaaccgacgttacctattcgtcgcgatagcccgaagaaagcaattaccttgattctggctgtgctgctgggcggcatggttggcgcggggattgtgcttgggcgtaacgcgctgcgtaattacaacgcgaaataa

SEQ ID NO: 490 - protein, 325 aa, Citrobacter koseri
MRVENNNVSGQNHDPEQIDLIDLLVQLWRGKMTIIISVIVAIALAIGYLAVAKEKWTSTAIITQPDVGQIAGYNNAMNVIYGQAAPKVSDLQETLIGRFSSAFSALAETLDNQEEPEKLTIEPSVKNQQLPLTVSYVGQTAEGAQMKLAQYIQQVDDKVNQELEKDLKDNIALGRKNLQDSLRTQEVVAQEQKDLRIRQIQEALQYANQAQVTKPQIQQTQDVTQDTMFLLGSEALESMIKHEATRPLVFSSNYYQTRQNLLDIDNLDVDKLDIHAYRYVMKPTLPIRRDSPKKAITLILAVLLGGMVGAGIVLGRNALRNYNAK

SEQ ID NO: 491 - DNA, 480 bp, Citrobacter koseri
atgacagtggcgtatattgccataggcagcaatctggcctctccgctggagcaggtcaatgctgccctgaaagcattaggcgatattccagaaagccgcattcttgctgtttcttcgttttaccgcaccccaccgctggggccgcaagatcaacccgattacttaaatgccgccgtcgcgctgaaaaccactcttgcccctgaagagctactcaatcacacacagcgtatcgaattgcagcaaggtcgcgtccgtaaagctgaacgctggggaccgcgcacgctggatctcgacatcatgctgtttggtaatgaagtaataaataccgaacgtctgaccgttccgcactacgatatgaaaaatcgtggctttatgctgtggccactgtttgaaattgcgccgggactggtatttcctgatggcttatcattagttgaagctctacaggcaaaaggctttaatgaattagataagtggtaa

SEQ ID NO: 492 - protein, 159 aa, Citrobacter koseri
MTVAYIAIGSNLASPLEQVNAALKALGDIPESRILAVSSFYRTPPLGPQDQPDYLNAAVALKTTLAPEELLNHTQRIELQQGRVRKAERWGPRTLDLDIMLFGNEVINTERLTVPHYDMKNRGFMLWPLFEIAPGLVFPDGLSLVEALQAKGFNELDKW

SEQ ID NO: 493 - DNA, 1230 bp, Escherichia coli
atgtacaaacaagctgttattctcctactgatgctgtttaccgcaagcgtcagtgccgcattacctgctcattatatgcaaaccatcgaaaatgctgcggtctgggcgcaaattggcgacaaaatggtgacggtagggaatattcgggccgggcaaatcattgccgtggagcccactgccgcaagttattacgtatttaattttggctttggtaaagggtttatcgataaaggccatctcgagccggttcaggggcgacaaaaagttgaagatggtttgggtgacctcaacaagccgctgagtaatcagaacttaataacctggaaagatacgccggtttataacgcgccgagtgtgggcagtgcgccatttggagtactggcggacaatttgcgctacccgattttgcataaactgaaagacaggttaaatcaaacctggtatcagatccgcattggcgatcgactggcctatatcagcgcgctggatgcccaacccgataatggcttgccggtgctaacctatcaccatattttgcgcgacgaagaaaacacccgttttcgccatacttcgacgaccacctcggtacgcgctttcaataaccagatggcctggctgcgcgacaggggatacgcgacactgagcatggcgcagctggaaggttacgtgaagaataagatcaatctccctgcgcgagcggtggtaattacctttgatgatggcctcaagtcggtgagccgctatgcgtatcctgtgttgaaacaatatggtatgaaggcgacggcgtttattgttacctcgcgcatcaaacgtcacccgcagaaatggaacccaaaatcgctgcaatttatgagcgtttctgaacttaacgaaattcgcgatgtatttgatttccagtcacatactcattttttgcatcggatagatggttatcggcggcctatattgctgagccgtagtgagcacaatattctgtttgattttgcacgttcacgccgcgctctggcgcaatttaatccacatgttttgtatctttcttatccatttggcggatttaatgacaaagccgtgaaggcagcaaaagaagccggatttcacctggcggtgacgaccatgaaaggcaaagtaaaaccgggggataatccgttgttactaaaacgactttatatcttaagaacggattcgctggagacgatgtcgcggctggtgagtaaccagccgcagggataa

SEQ ID NO: 494 - protein, 409 aa, Escherichia coli
MYKQAVILLLMLFTASVSAALPAHYMQTIENAAVWAQIGDKMVTVGNIRAGQIIAVEPTAASYYVFNFGFGKGFIDKGHLEPVQGRQKVEDGLGDLNKPLSNQNLITWKDTPVYNAPSVGSAPFGVLADNLRYPILHKLKDRLNQTWYQIRIGDRLAYISALDAQPDNGLPVLTYHHILRDEENTRFRHTSTTTSVRAFNNQMAWLRDRGYATLSMAQLEGYVKNKINLPARAVVITFDDGLKSVSRYAYPVLKQYGMKATAFIVTSRIKRHPQKWNPKSLQFMSVSELNEIRDVFDFQSHTHFLHRIDGYRRPILLSRSEHNILFDFARSRRALAQFNPHVLYLSYPFGGFNDKAVKAAKEAGFHLAVTTMKGKVKPGDNPLLLKRLYILRTDSLETMSRLVSNQPQG

SEQ ID NO: 495 - DNA, 231 bp, Citrobacter freundii
atgacaataagtattgtttcaccttccgcagcggctgtaaagccccgccgtcatccccgtttcagacgcgaagacatccccgcgccggaaattgaccccgtgctgaaagccttcgggcgacacattgcccggagttttcaccgggggcgtggtgtacacatccccgccatgaaaaacacggccttcgggcaggtgctccgcacactcgaactgaaacgcgcttttaactga

SEQ ID NO: 496 - protein, 76 aa, Citrobacter freundii
MTISIVSPSAAAVKPRRHPRFRREDIPAPEIDPVLKAFGRHIARSFHRGRGVHIPAMKNTAFGQVLRTLELKRAFN

SEQ ID NO: 497 - DNA, 804 bp, Escherichia coli
atgaagtatgacaatctgaaaatctgtcacacttcacatgggcctgtcatggtggaaatagcggttataaaccataaaaaacgtaaaaatagcccgcggattgtccagtcaaatgagctgactgaggcggcatatagtctttctagggatcaaaagcgtatgctgtatctgttcgttgaccagatcagaaaatccgacggttccctgcaagaacctgatggcatctgcgaaattcacgttgctaaatacgctgaaacattcgggctaacctccgctgaagccagtaaggatattcgacaggctttaaaaggttttgcgggtaaggaagtggttttctatcgccctgaagaggatgccggtgatgaaaaagggtatgaatcctttccttggtttatcaaacgtgcgcacagtccatccagagggatttacagtgtacatataaacccatatctcattccctttttcatcgggctacaaaaccggtttacgcagttccggctcagtgaaacaaaagagattaccaatccgtatgccatgcgtttatacgaatccctgtgtcagtaccgtaaacctgatggctcaggtgtcgtgtccctgaaaatcgactggatcatggagcgctaccagctacctcaaagttaccaacgtatgccggattttcgccggcgtttcctgcaggcaagtgttgatgagatcaatagccggacaccaatgcgcctctcttacatcgagaaaaagaaaggccgccagacgactcatatcgtattttccttccgtgatattacctcgatgacaacagaatag

SEQ ID NO: 498 - protein, 267 aa, Escherichia coli
MKYDNLKICHTSHGPVMVEIAVINHKKRKNSPRIVQSNELTEAAYSLSRDQKRMLYLFVDQIRKSDGSLQEPDGICEIHVAKYAETFGLTSAEASKDIRQALKGFAGKEVVFYRPEEDAGDEKGYESFPWFIKRAHSPSRGIYSVHINPYLIPFFIGLQNRFTQFRLSETKEITNPYAMRLYESLCQYRKPDGSGVVSLKIDWIMERYQLPQSYQRMPDFRRRFLQASVDEINSRTPMRLSYIEKKKGRQTTHIVFSFRDITSMTTE

SEQ ID NO: 499 - DNA, 663 bp, Citrobacter braakii
atgagcacagcaatcaagaagcgtaaccttgaggtgaagactcagatgagtgagaccatctggcttgaacccgccagcgaacgcacggtatttctgcagatcaaaaacacgtctgataaagacatgagtgggctgcagggcaaaattgctgatgctgtgaaagcaaaaggatatcaggtggtgacttctccggataaagcctactactggattcaggcgaatgtgctgaaggccgataagatggatctgcgggagtctcagggatggctgaaccgtggttatgaaggcgcagcagttggtgcagcgttaggtgccggtatcaccggatataattccagttctgccggtgccacactcggtgtgggccttgctgccggtctggtgggtatggctgcagatgcgatggtggaagatgtgaactataccatgatcacggatgtgcagattgcagagcgtactaaggcaacggtgacaacggataatgttgccgccctgcgtcagggcacatcaggtgcgaaaattcagaccagtactgaaacaggtaaccagcataaataccagacccgtgtggtctcaaatgcgaacaaggttaacctgaaatttgaagaggcgaagcctgttctcgaagaccagctggccaaatcaatcgcaaatattctctga

SEQ ID NO: 500 - protein, 220 aa, Citrobacter braakii
MSTAIKKRNLEVKTQMSETIWLEPASERTVFLQIKNTSDKDMSGLQGKIADAVKAKGYQVVTSPDKAYYWIQANVLKADKMDLRESQGWLNRGYEGAAVGAALGAGITGYNSSSAGATLGVGLAAGLVGMAADAMVEDVNYTMITDVQIAERTKATVTTDNVAALRQGTSGAKIQTSTETGNQHKYQTRVVSNANKVNLKFEEAKPVLEDQLAKSIANIL

SEQ ID NO: 501 - DNA, 822 bp, Escherichia coli
atgcgactggcttcccgttttggccgatataattccattcgtcgtgagcgtccgttaacggatgacgaattaatgcagttcgtgccttctgtattttccggtgataaacatgagtcccggagtgaacgttatacgtatattccaacaatcaatatcatcaataagttacgtgatgaaggtttccagccattctttgtctgtcagagtcgggttcgtgatttggggcgtcgagaatacagtaaacatatgttacgtcttcgcagggaagggcatattaacgggcaggaagttcctgaaattatcctgcttaattcacatgatggttcatccagttatcagatgatccccggaatttttcgttttgtctgcacaaatggcctggtgtgcggaaataattttggcgaaatccgcgttccacataaaggtgatattgtcgggcaggttatcgagggagcgtatgaagtgctcggtgtctttgataaggtcactgataatatggaggcaatgaaagaaattcatcttaacagtgacgagcaacatttatttggcagagctgcactgatggtcaggtatgaagatgaaaataaaacgccagtgacacctgaacagataattactccccgtcgtcgggaagataaacagaacgatctctggacgacctggcagcgggttcaggagaatatgataaaaggcggattatcggggcgaagtgcctccgggaaaaataccaggacaagagccattacaggtattgatggtgatataagaatcaacaaggcgttatgggtgattgccgaacagttcagaaagtggaagttatga

SEQ ID NO: 502 - protein, 273 aa, Escherichia coli
MRLASRFGRYNSIRRERPLTDDELMQFVPSVFSGDKHESRSERYTYIPTINIINKLRDEGFQPFFVCQSRVRDLGRREYSKHMLRLRREGHINGQEVPEIILLNSHDGSSSYQMIPGIFRFVCTNGLVCGNNFGEIRVPHKGDIVGQVIEGAYEVLGVFDKVTDNMEAMKEIHLNSDEQHLFGRAALMVRYEDENKTPVTPEQIITPRRREDKQNDLWTTWQRVQENMIKGGLSGRSASGKNTRTRAITGIDGDIRINKALWVIAEQFRKWKL

SEQ ID NO: 503 - DNA, 234 bp, Citrobacter koseri
atgagcgaatatttcagaatacttcaggggctgcctgacggtccttttacccgcaaacataccgaagctgttgccgcacagtaccggaacgtctttatcgaggatgaccacggcgaacagtttcgcctggttgtccgtaataacggtgcaatggtctggcgtacctggaattttgaggacggtgcagggtactggatgaaccatgtcatccgggatttcggcattcttaagtaa

SEQ ID NO: 504 - protein, 77 aa, Citrobacter koseri
MSEYFRILQGLPDGPFTRKHTEAVAAQYRNVFIEDDHGEQFRLVVRNNGAMVWRTWNFEDGAGYWMNHVIRDFGILK

SEQ ID NO: 505 - DNA, 237 bp, Proteus mirabilis
atgcccgaaaatcggcccattaccgcctacacctccgtacaccattcccttttgatttcgaattctttgttgtcgctataccgcttaacgttcccggtattatcctggttcccgacaacaggaacatattcagcttttaataacctgagaagagccaataagaatcacaaagcggataacacctggcgcgatgcagttgtgattaccgaacgctcagatgacatatttccagactga

SEQ ID NO: 506 - protein, 78 aa, Proteus mirabilis
MPENRPITAYTSVHHSLLISNSLLSLYRLTFPVLSWFPTTGTYSAFNNLRRANKNHKADNTWRDAVVITERSDDIFPD

SEQ ID NO: 507 - DNA, 510 bp, Acinetobacter pittii
atgtcagttttgcaagtgttacatattccggacgagcggcttcgcaaagttgctaaaccggtagaagaagtgaatgcagaaattcagcgtatcgtcgatgatatgttcgagacgatgtacgcagaagaaggtattggcctggcggcaacccaggttgatatccatcaacgtatcattgtaattgatgtttcggaaaaccgtgacgaacggctggtgttaatcaatccggagcttttagaaaaaagcggcgaaacaggcattgaagaaggttgcctgtcgatccctgaacaacgtgctttagtgccacgcgcagagaaagttaaaattcgcgccctggaccgcgacggtaaaccatttgaactggaagcagacggtctgttagccatctgtattcagcatgagatggatcacctggtcggcaaactgtttatggattatctgtcaccgctgaaacaacaacgtattcgtcagaaagttgaaaaactggatcgtctgaaagcccgggcttaa

SEQ ID NO: 508 - protein, 169 aa, Acinetobacter pittii
MSVLQVLHIPDERLRKVAKPVEEVNAEIQRIVDDMFETMYAEEGIGLAATQVDIHQRIIVIDVSENRDERLVLINPELLEKSGETGIEEGCLSIPEQRALVPRAEKVKIRALDRDGKPFELEADGLLAICIQHEMDHLVGKLFMDYLSPLKQQRIRQKVEKLDRLKARA

SEQ ID NO: 509 - DNA, 1263 bp, Escherichia coli
atgggtaaattaactctggtagagcaggctttacggcttcacaaagaatattacggtgaagataattttggaactgtcgtaaaggattgtgattactatcctaaagtggcagagatttttataaacagaaagaaccgtaaaatttattcgaatctggatatcgaacctgttgcttcaaccgttgttcatacgggaagtagccctgttatggctaaagccgggagaattaaaaaacttatgttcaaagatggttctggtgcatacaggattcatcttggtcaaaatgaagttgttcatattattcgcttcattcttaactctaaagtcaggatggagtacgccgttgggactactaaaagtatgtcaatgctccacaatctttgcgaggcaggtcgcgctaaattaaaccgctcattaccacgtaaaggtatctggaaacttgggtactatgatggtgtttattatcacggtaaggcaagaaaggaggaaattgaaaatgctatgcgtttctcagttcatccaaaatttgacgagctggaaaacgactttaatcagttcttttctgatattgatttctatacccggtatggtcagtcaggtatgcgtaaagtgctctttactggccccccaggaacaggcaagacaactatcgcaaaagctttgggggcaaagtatcaggataagtatgtttttgtttatgccgacgattactttaaagatgtttgctacgctgctgctcagaagaaaatacccgtcattattatagctgaagaggttgatgaactttatcgggctgatgccggaacgttaagttttcttgatggagctgatacaccgcgaaatgtcgcaggaacatatgtgatcttttctacaaactatccaaaacgtatcgacccacgtattagaaaacgtccaggtcgaattgacaggataatctctgtaggtgctttcagaaccaaagccgctgccgcttgcgccaaaatgtacttaccagaagatgtagaaattgaccttaaagagcttggcgcagtgctggacagaacgactccggctgaaatcaaggaaattattaatatcgcaatcggaatgattcgcggaaccaaaaatgaattatcagtggatgtaataaaaaatgctcgtgcctttttgaaaggaacccttgatctgagcgtgcaggaagcagatgaagatatagaggaaagggaagagctttataaaaagaacggggcgcaacctgactatttaagttacctggaggattaa

SEQ ID NO: 510 - protein, 420 aa, Escherichia coli
MGKLTLVEQALRLHKEYYGEDNFGTVVKDCDYYPKVAEIFINRKNRKIYSNLDIEPVASTVVHTGSSPVMAKAGRIKKLMFKDGSGAYRIHLGQNEVVHIIRFILNSKVRMEYAVGTTKSMSMLHNLCEAGRAKLNRSLPRKGIWKLGYYDGVYYHGKARKEEIENAMRFSVHPKFDELENDFNQFFSDIDFYTRYGQSGMRKVLFTGPPGTGKTTIAKALGAKYQDKYVFVYADDYFKDVCYAAAQKKIPVIIIAEEVDELYRADAGTLSFLDGADTPRNVAGTYVIFSTNYPKRIDPRIRKRPGRIDRIISVGAFRTKAAAACAKMYLPEDVEIDLKELGAVLDRTTPAEIKEIINIAIGMIRGTKNELSVDVIKNARAFLKGTLDLSVQEADEDIEEREELYKKNGAQPDYLSYLED

SEQ ID NO: 511 - DNA, 468 bp, Klebsiella oxytoca
atgcttaaacaggtagaaattttcaccgatggttcgtgtctgggtaatcctggacctgggggttacggcgctattttacgctatcgcggacacgagaaaacctttagcgctggctacacccgcaccaccaacaaccgtatggagttgatggccgctattgtcgcgctggaggcgttaaaagaacattgcgaagtcattttgagtaccgacagccagtatgtccgccagggtatcacccagtggatccataactggaaaaaacgtggctggaaaacagcagacaaaaaaccagtaaaaaatgtcgatctctggcaacgtcttgatgctgctctggggcagcatcaaatcaaatgggaatgggttaaaggccatgccggacacccggaaaacgaacgctgtgatgaactggctcgtgctgcggcaatgaatcccacactggaagatacaggctatcaagtcgaagtttaa

SEQ ID NO: 512 - protein, 155 aa, Klebsiella oxytoca
MLKQVEIFTDGSCLGNPGPGGYGAILRYRGHEKTFSAGYTRTTNNRMELMAAIVALEALKEHCEVILSTDSQYVRQGITQWIHNWKKRGWKTADKKPVKNVDLWQRLDAALGQHQIKWEWVKGHAGHPENERCDELARAAAMNPTLEDTGYQVEV

SEQ ID NO: 513 - DNA, 180 bp, Escherichia coli
atggattttatgagcattttggggcgctgtttacttcttcctttccctgttgcgatgtttgtcggttgcctgtttctaggcattgatgatcgttttactggaatgttcatgagttttattgtcggttgtctatcgtggtatatcaccaagccaaaaccgcaaaaggctgaggtcgcgtaa

SEQ ID NO: 514 - protein, 59 aa, Escherichia coli
MDFMSILGRCLLLPFPVAMFVGCLFLGIDDRFTGMFMSFIVGCLSWYITKPKPQKAEVA

SEQ ID NO: 515 - DNA, 474 bp, Escherichia coli
gtgaaagtatcattaatggctgcaaaagcgaaaaacggagtgattggttgcggtccacacataccctggtccgcgaaaggagagcagctactctttaaagccttgacgtacaaccagtggcttttggtgggccgcaagacgttcgaatctatgggagcactccctaataggaaatacgcggtcgttactcgctcagcctggacggccgataatgacaacgtaatagtattcccgtcgatcgaagaggccatgtacgggctggctgaactcaccgatcacgttatagtgtctggtggcggggagatttacagagaaacattgcccatggcctctacgctccatatatcgacgattgatattgagccggaaggagatgttttctttccgaatattcccaataccttcgaagttgtttttgagcaacactttagctcaaacattaactattgctatcaaatttggcaaaagggttaa

SEQ ID NO: 516 - protein, 157 aa, Escherichia coli
MKVSLMAAKAKNGVIGCGPHIPWSAKGEQLLFKALTYNQWLLVGRKTFESMGALPNRKYAVVTRSAWTADNDNVIVFPSIEEAMYGLAELTDHVIVSGGGEIYRETLPMASTLHISTIDIEPEGDVFFPNIPNTFEVVFEQHFSSNINYCYQIWQKG

SEQ ID NO: 517 - DNA, 654 bp, Escherichia coli
atgattcaaacacgtaatcaatatctgcagtttatgctggttatgctggctgcatggggcattagttggggagccagatttgtcatggagcaggccgttctgctttatggatcaggaaaaaactatttgttcttcagtcatggtactgttctgatgtacctgctgtgtgttttcctggtataccgccgttggatagctccgctaccggtcgttggtcagctgcgcaacgttggcgtaccgtggctggtcggtgcgatggccgtggtgtatgtcggtgtatttctgctcggtaaggcgctggctctgcctgctgagccatttatgacgaaactttttgccgataagtccatacctgacgtgatcctgacgttgctgaccatctttatccttgccccgttgaatgaggaaacgctgttccgggggattatgctgaacgtcttccgttcacggtactgctggacgatgtggctgggggcgctgataacgtcgttgttgttcgtcgccgcgcacagccagtatcagaacctgctgacactggcagaactgttcctggtggggttgattacatcagtggccaggatcagaagtggtggcttgctgctgccggtattgctgcatatggaagcaaccacgctgggtttactgtttggttga

SEQ ID NO: 518 - protein, 217 aa, Escherichia coli
MIQTRNQYLQFMLVMLAAWGISWGARFVMEQAVLLYGSGKNYLFFSHGTVLMYLLCVFLVYRRWIAPLPVVGQLRNVGVPWLVGAMAVVYVGVFLLGKALALPAEPFMTKLFADKSIPDVILTLLTIFILAPLNEETLFRGIMLNVFRSRYCWTMWLGALITSLLFVAAHSQYQNLLTLAELFLVGLITSVARIRSGGLLLPVLLHMEATTLGLLFG

SEQ ID NO: 519 - DNA, 258 bp, Escherichia coli
atgcataccacccgactgaagagggttggcggctcagttatgctgaccgtcccaccggcactgctgaatgcgctgtctctgggcacagataatgaagttggcatggtcattgataatggccggctgattgttgagccgtacagacgcccgcaatattcactggctgagctactggcacagtgtgatccgaatgctgaaatatcagctgaagaacgagaatggctggatgcaccggcgactggtcaggaggaaatctga

SEQ ID NO: 520 - protein, 85 aa, Escherichia coli
MHTTRLKRVGGSVMLTVPPALLNALSLGTDNEVGMVIDNGRLIVEPYRRPQYSLAELLAQCDPNAEISAEEREWLDAPATGQEEI

SEQ ID NO: 521 - DNA, 333 bp, Escherichia coli
atggaaagaggggaaatctggcttgtctcgcttgatcctaccgcaggtcatgagcagcagggaacgcggccggtgctgattgtcacaccggcggcctttaatcgcgtgacccgcctgcctgttgttgtgcccgtaaccagcggaggcaattttgcccgcactgccggctttgcggtgtcgttggatggtgttggcatacgtaccacaggtgttgtacgttgcgatcaaccccggacaattgatatgaaagcacggggcggaaaacgactcgaacgggttccggagactatcatgaacgaagttcttggccgcctgtccactattctgacttga

SEQ ID NO: 522 - protein, 110 aa, Escherichia coli
MERGEIWLVSLDPTAGHEQQGTRPVLIVTPAAFNRVTRLPVVVPVTSGGNFARTAGFAVSLDGVGIRTTGVVRCDQPRTIDMKARGGKRLERVPETIMNEVLGRLSTILT

SEQ ID NO: 523 - DNA, 861 bp, Escherichia coli
atgagtattcaacattttcgtgtcgcccttattcccttttttgcggcattttgccttcctgtttttgctcacccagaaacgctggtgaaagtaaaagatgctgaagatcagttgggtgcacgagtgggttacatcgaactggatctcaacagcggtaagatccttgagagttttcgccccgaagaacgttttccaatgatgagcacttttaaagttctgctatgtggtgcggtattatcccgtgttgacgccgggcaagagcaactcggtcgccgcatacactattctcagaatgacttggttgagtactcaccagtcacagaaaagcatcttacggatggcatgacagtaagagaattatgcagtgctgccataaccatgagtgataacactgctgccaacttacttctgacaacgatcggaggaccgaaggagctaaccgcttttttgcacaacatgggggatcatgtaactcgccttgatcgttgggaaccggagctgaatgaagccataccaaacgacgagcgtgacaccacgatgcctgcagcaatggcaacaacgttgcgcaaactattaactggcgaactacttactctagcttcccggcaacaattaatagactggatggaggcggataaagttgcaggaccacttctgcgctcggcccttccggctggctggtttattgctgataaatctggagccggtgagcgtgggtctcgcggtatcattgcagcactggggccagatggtaagccctcccgtatcgtagttatctacacgacggggagtcaggcaactatggatgaacgaaatagacagatcgctgagataggtgcctcactgattaagcattggtaa

SEQ ID NO: 524 - protein, 286 aa, Escherichia coli [sequence omitted]

SEQ ID NO: 525 - DNA, 1311 bp, Escherichia coli
atggctaatgaaaacttagatattgactccaagacagcagaagaattatacgagtggtatctggatgataaattaattataaatcgaagataccaaagaaaattagtatggtccctcgaagagaaaacagcactgatttcatcaatgactcagcaataccctatccctttgctattgtttgtttccattgacaacaaaagagaaatccttgatggaatgcaaagactagaagctttaatgagttttattgagcagcgattttcattaaatggtaaatactttaatttagatgccattgcattaacaaaacaactaaaagacagtggtaaacttcaacaaaaagagccagtgctatcccgcgaaagttctacattaattgctcgctatagatttgctatatctgaatactcttcaacagaggaccacattgacgaagtgtttcgacgcataaattccaatggtaaaattttatcaaaacaagaactacgaagtgcggggtgcgttagtaatttttcagagttagtaaggaaaatatcgacaattataagaggagatactacacatagcgatataatgggactgaataaaatacataacatatcaatttgcaatgatggactcgattatggaataaatatagacaatcatttctatattagaaatcatatcattagtaggcctagcattagagactctgacgatgaagagttagttgcaaatatcttgggctatatatttttagatgataagccaacatcaggatcaacatcgctcgatacattttacggtgaaggttcgacgagtcatgcaatccatacacgaactcaattagagaattacattcagacaaatggtgcagataaaattgtcaataattacctcttcgtttatgagatgattcaaaaattatttgatgcaaataatttgaactttagatcacacattctgggcaatgcatcttcatctcaagaatgtcctcgttactatcaagctgtttttcttgctttgtatgaattaatcataaatgaaaacatgcaacttgacgatgaacagaaatttatcgctcagttaggagacagtgtacaacgttcaatggtgcaaaccgaagggggccgttgggcagctagcgctcgtcagaaaagtgtcgaagatttatgtgctttaatcagacgatattttaaagaatcagaaaataaatttatcaatcatgcttggcaaacactgataagaactctacttaataactcaagaacagaacaaccaaattatgattttaaacagggaggtgatgctgccaacttactgatttag

SEQ ID NO: 526 - protein, 436 aa, Escherichia coli
MANENLDIDSKTAEELYEWYLDDKLIINRRYQRKLVWSLEEKTALISSMTQQYPIPLLLFVSIDNKREILDGMQRLEALMSFIEQRFSLNGKYFNLDAIALTKQLKDSGKLQQKEPVLSRESSTLIARYRFAISEYSSTEDHIDEVFRRINSNGKILSKQELRSAGCVSNFSELVRKISTIIRGDTTHSDIMGLNKIHNISICNDGLDYGINIDNHFYIRNHIISRPSIRDSDDEELVANILGYIFLDDKPTSGSTSLDTFYGEGSTSHAIHTRTQLENYIQTNGADKIVNNYLFVYEMIQKLFDANNLNFRSHILGNASSSQECPRYYQAVFLALYELIINENMQLDDEQKFIAQLGDSVQRSMVQTEGGRWAASARQKSVEDLCALIRRYFKESENKFINHAWQTLIRTLLNNSRTEQPNYDFKQGGDAANLLI

SEQ ID NO: 527 - DNA, 168 bp, Citrobacter koseri
atgactgtgcgggagacagaggaaaacattgaacaaatcttccctgagctttcgaacttaattgatattattaataaatggctttcccatggaaacattgatcctgaactggcacacttcatcatttatcttcttgattacctaaccaccacacacaaaagcatataa

SEQ ID NO: 528 - protein, 55 aa, Citrobacter koseri
MTVRETEENIEQIFPELSNLIDIINKWLSHGNIDPELAHFIIYLLDYLTTTHKSI

SEQ ID NO: 529 - DNA, 642 bp, Citrobacter koseri
gtgaatgcggacacctggacccgcctgcaggccttccgacatgctctggagctgacttcctgtgaggcttctctcaccgccgggtatgatcacctgaaggatttcccggccggttgcagcgagctggccagccagacgctgactgattatctgacggaagacggcagcaacctgtactcctgtattgtcggtatgcagtgggataatggtcctggcagatacggccacgtcattgccgaccctgccagggactatatcgacctaacccttgatcagtttccaggctatcataaccggattgtggcagagcccgttgagtccggcggacagctcgcggcagacctcaacagggagcctgccatcagtacagctgatggaatagtggccagcccatcagataaggttaattacattactgaacagaaaaatcgccagccaatggtgatcattacagaatgttacaagctgatcagaatgacggcaagatttataccaatgtgccagtcatctcaactcttccagcaccaggtattccctcgcttatttatcatttcagacgttggctcctgcagtttgttcaggaacaccttagatcgtttagctactgactggaaggtgacactgtccatcctgtcgctatag

SEQ ID NO: 530 - protein, 213 aa, Citrobacter koseri
MNADTWTRLQAFRHALELTSCEASLTAGYDHLKDFPAGCSELASQTLTDYLTEDGSNLYSCIVGMQWDNGPGRYGHVIADPARDYIDLTLDQFPGYHNRIVAEPVESGGQLAADLNREPAISTADGIVASPSDKVNYITEQKNRQPMVIITECYKLIRMTARFIPMCQSSQLFQHQVFPRLFIISDVGSCSLFRNTLDRLATDWKVTLSILSL

SEQ ID NO: 531 - DNA, 474 bp, Escherichia coli
ttgaaaatatcattgatttctgcagtgtcagaaaatggcgtaatcggtagtggtcctgatatcccgtggtcagtaaaaggtgagcaactactctttaaagcgctcacatataatcaatggctccttgtcggaagaaaaacatttgactctatgggtgttcttccaaatcgcaaatatgcagtagtgtcaaagaacggaatttcaagctcaaatgaaaacgtcctagtttttccttcaatagaaaatgctttgaaagagctatcaaaagttacagatcatgtatatgtctctggcgggggtcaaatctataatagccttattgaaaaagcagatataattcatttgtctactgttcacgttgaagtcgaaggtgatatcaaattccctataatgcctgagaatttcaatttggtttttgaacagttttttatgtctaatataaattatacataccagatttggaaaaaaggctaa

SEQ ID NO: 532 - protein, 157 aa, Escherichia coli
MKISLISAVSENGVIGSGPDIPWSVKGEQLLFKALTYNQWLLVGRKTFDSMGVLPNRKYAVVSKNGISSSNENVLVFPSIENALKELSKVTDHVYVSGGGQIYNSLIEKADIIHLSTVHVEVEGDIKFPIMPENFNLVFEQFFMSNINYTYQIWKKG

SEQ ID NO: 533 - DNA, 789 bp, Citrobacter koseri
atgggtgaatttttccctgcacaagttttcaagcagctgtcccacgctcgcgcggtgatcgagcgccatctggctgcgacactggacacaatccacctgttcggatctgcgatcgatggagggctgaagccggacagcgacatagacttgctcgtgaccgtcagcgccgcacctaacgattcgctccggcaggcgctaatgctcgatttgctgaaagtctcatcaccgccaggcgatggcggaacatggcgaccgctggagctaactgttgtcgctcgaagcgaagtagtgccttggcgctatccggcgcggcgtgagcttcagttcggtgagtggctccgccacgacatcctttccggaacgttcgagcctgccgttctggatcacgatcttgcgattttgctgaccaaggcgaggcaacacagccttgcgcttctaggcccatccgcagccacgtttttcgagccggtgccgaaggagcatttctccaaggcgcttttcgacactattgcccagtggaatgcagagtcggattggaagggtgacgagcggaacgtcgttcttgctcttgctcgcatttggtacagcgcttcaactggtctcattgctcctaaggacgttgctgccgcatgggtatcggagcgtttgcctgccgagcatcggcccctcatctgcaaggcacgcgcggcgtacctgggtagcgaggacgacgacctagcaatgcgcgtcgaagagacggccgcgttcgttcgatatgccaaagcaacgattgagagaatcttgcgttga

SEQ ID NO: 534 - protein, 262 aa, Citrobacter koseri
MGEFFPAQVFKQLSHARAVIERHLAATLDTIHLFGSAIDGGLKPDSDIDLLVTVSAAPNDSLRQALMLDLLKVSSPPGDGGTWRPLELTVVARSEVVPWRYPARRELQFGEWLRHDILSGTFEPAVLDHDLAILLTKARQHSLALLGPSAATFFEPVPKEHFSKALFDTIAQWNAESDWKGDERNVVLALARIWYSASTGLIAPKDVAAAWVSERLPAEHRPLICKARAAYLGSEDDDLAMRVEETAAFVRYAKATIERILR

SEQ ID NO: 535 - DNA, 204 bp, Escherichia coli
atggacagcgaggagcctccgaacgttcgggtcgcctgctcgggtgatatcgacgaggttgtgcggctgatgcacgacgctgcggcgtggatgtccgccaagggaacgcccgcctgggacgtcgcgcggatcgaccggacattcgcggagaccttcgtcctgagatccgagctcctagggatcgcctcagaaaacggaaaataa

SEQ ID NO: 536 - protein, 67 aa, Escherichia coli
MDSEEPPNVRVACSGDIDEVVRLMHDAAAWMSAKGTPAWDVARIDRTFAETFVLRSELLGIASENGK

SEQ ID NO: 537 - DNA, 1206 bp, Escherichia coli
atgacgaataaccctaccgatgacagcagaccatggtcggtctttcttatttttctgcggcttggattgacatcttttggcggccccattgcgcacttgggctacttccgcgccgaatttgtcacacggcggcgctggctctccgaacggagctatgctgacttggtcgcgctttgtcagttcttgccagggcctgcaagcagccaggtcggcatagcggtaggactgtctcgggctggatacagcggggcgctggctgcttgggctggcttcacgctgccgtctgccatagccttgatcctttttgcgctcggcatctccagctatggcgattacgtctcgcagggcgcgttgcatggcttaaaagtggtggctgtggccgtggtcgctcaagcagtatggggcatggcgcgtaacctatgcacggatgggctgcgagtcaccatcatggcaattgctacctgcgtcgttttacttgtgccgtccgcgtggggacaggttggcgtgattgctatcgcaggcatcgcaggccggttattgttcaagccagcgaaagttgttgagcatgaccccctacctatcacggtcagtcaccgggccggcgtgctttggctctcgctgttctttgtcttgctgattggcctgccggtgttggccgaactgatgccaagtcaaaccatggcaatggtggattccttctatcgtgtcggatcactggtgttcggcggtggtcacgttgtgctgccattactgcaagccgaagtggtgccctccggctgggtcaacaatgaatcctttctcgcggggtacggggcagctcaagcggtgcccggccctttgttcacgttcgccgcgtttcttggtgcctcgatgaacaccgccccgtcgggctggatcggcggcattgtgtgtctgctggctatcttcgcgccctcgttcttgctggtcgtcggatcaatgccattttgggagcgtttgcgccgcaatacaggcatccaagctgcgctggccgggatcaatgccgctgtagtcggcttgctgctggccgcgctgtatcagcctgtatggactagcgccatctttcagccgcaagacttcggcttggcattagttgcccttgtcgcacttatgttctggaagctcccgccgtggctggttgtcctcggtagcggtgcagctgggtggctgttgagcgtcgctctgtga

SEQ ID NO: 538 - protein, 401 aa, Escherichia coli
MTNNPTDDSRPWSVFLIFLRLGLTSFGGPIAHLGYFRAEFVTRRRWLSERSYADLVALCQFLPGPASSQVGIAVGLSRAGYSGALAAWAGFTLPSAIALILFALGISSYGDYVSQGALHGLKVVAVAVVAQAVWGMARNLCTDGLRVTIMAIATCVVLLVPSAWGQVGVIAIAGIAGRLLFKPAKVVEHDPLPITVSHRAGVLWLSLFFVLLIGLPVLAELMPSQTMAMVDSFYRVGSLVFGGGHVVLPLLQAEVVPSGWVNNESFLAGYGAAQAVPGPLFTFAAFLGASMNTAPSGWIGGIVCLLAIFAPSFLLVVGSMPFWERLRRNTGIQAALAGINAAVVGLLLAALYQPVWTSAIFQPQDFGLALVALVALMFWKLPPWLVVLGSGAAGWLLSVAL

SEQ ID NO: 539 - DNA, 837 bp, Acinetobacter baumannii
atgttcatgccgcctgtttttcctgctcattggcacgtttcgcaacctgttctcattgcggacaccttttccagcctcgtttggaaagtttcattgccagacgggactcctgcaatcgtcaagggattgaaacctataaaagacattgctgatgaactgcgcggggccgactatctggtatggcgcaatgggaggggagcagtccggttgctcggtcgtgagaacaatctgatgttgctcgaatatgccggggagcgaatgctctctcacatcgttgccgagcacggcgactaccaggcgaccgaaattgcagcggaactaatggcgaagctgtatgccgcatctgaggaacccctgccttctgcccttctcccgatccgggatcgctttgcagctttgtttcagcgggcgcgcgatgatcaaaacgcaggttgtcaaactgactacgtccacgcggcgattatagccgatcaaatgatgagcaatgcctcggaactgcgtgggctacatggcgatctgcatcatgaaaacatcatgttctccagtcgcggctggctggtgatagatcccgtcggtctggtcggtgaagtgggctttggcgccgccaatatgttctacgatccggctgacagagacgacctttgtctcgatcctagacgcattgcacagatggcggacgcattctctcgtgcgctggacgtcgatccgcgtcgcctgctcgaccaggcgtacgcttatgggtgcctttccgcagcttggaacgcggatggagaagaggagcaacgcgatctagctatcgcggccgcgatcaagcaggtgcgacagacgtcatactag

SEQ ID NO: 540 - protein, 278 aa, Acinetobacter baumannii
MFMPPVFPAHWHVSQPVLIADTFSSLVWKVSLPDGTPAIVKGLKPIKDIADELRGADYLVWRNGRGAVRLLGRENNLMLLEYAGERMLSHIVAEHGDYQATEIAAELMAKLYAASEEPLPSALLPIRDRFAALFQRARDDQNAGCQTDYVHAAIIADQMMSNASELRGLHGDLHHENIMFSSRGWLVIDPVGLVGEVGFGAANMFYDPADRDDLCLDPRRIAQMADAFSRALDVDPRRLLDQAYAYGCLSAAWNADGEEEQRDLAIAAAIKQVRQTSY

SEQ ID NO: 541 - DNA, 804 bp, Acinetobacter baumannii
ttgaatcgaactaatattttttttggtgaatcgcattctgactggttgcctgtcagaggcggagaatctggtgattttgtttttcgacgtggtgacgggcatgccttcgcgaaaatcgcacctgcttcccgccgcggtgagctcgctggagagcgtgaccgcctcatttggctcaaaggtcgaggtgtggcttgccccgaggtcatcaactggcaggaggaacaggagggtgcatgcttggtgataacggcaattccgggagtaccggcggctgatctgtctggagcggatttgctcaaagcgtggccgtcaatggggcagcaacttggcgctgttcacagcctatcggttgatcaatgtccgtttgagcgcaggctgtcgcgaatgttcggacgcgccgttgatgtggtgtcccgcaatgccgtcaatcccgacttcttaccggacgaggacaagagtacgccgcagctcgatcttttggctcgtgtcgaacgagagctaccggtgcggctcgaccaagagcgcaccgatatggttgtttgccatggtgatccctgcatgccgaacttcatggtggaccctaaaactcttcaatgcacgggtctgatcgaccttgggcggctcggaacagcagatcgctatgccgatttggcactcatgattgctaacgccgaagagaactgggcagcgccagatgaagcagagcgcgccttcgctgtcctattcaatgtattggggatcgaagcccccgaccgcgaacgccttgccttctatctgcgattggaccctctgacttggggttga

SEQ ID NO: 542 - protein, 267 aa, Acinetobacter baumannii
MNRTNIFFGESHSDWLPVRGGESGDFVFRRGDGHAFAKIAPASRRGELAGERDRLIWLKGRGVACPEVINWQEEQEGACLVITAIPGVPAADLSGADLLKAWPSMGQQLGAVHSLSVDQCPFERRLSRMFGRAVDVVSRNAVNPDFLPDEDKSTPQLDLLARVERELPVRLDQERTDMVVCHGDPCMPNFMVDPKTLQCTGLIDLGRLGTADRYADLALMIANAEENWAAPDEAERAFAVLFNVLGIEAPDRERLAFYLRLDPLTWG

SEQ ID NO: 543 - DNA, 816 bp, Enterobacter cloacae
atgaataaatcgctcatcattttcggcatcgtcaacataacctcggacagtttctccgatggaggccggtatctggcgccagacgcagccattgcgcaggcgcgtaagctgatggccgagggggcagatgtgatcgacctcggtccggcatccagcaatcccgacgccgcgcctgtttcgtccgacacagaaatcgcgcgtatcgcgccggtgctggacgcgctcaaggcagatggcattcccgtctcgctcgacagttatcaacccgcgacgcaagcctatgccttgtcgcgtggtgtggcctatctcaatgatattcgcggttttccagacgctgcgttctatccgcaattggcgaaatcatctgccaaactcgtcgttatgcattcggtgcaagacgggcaggcagatcggcgcgaggcacccgctggcgacatcatggatcacattgcggcgttctttgacgcgcgcatcgcggcgctgacgggtgccggtatcaaacgcaaccgccttgtccttgatcccggcatggggttttttctgggggctgctcccgaaacctcgctctcggtgctggcgcggttcgatgaattgcggctgcgcttcgatttgccggtgcttctgtctgtttcgcgcaaatcctttctgcgcgcgctcacaggccgtggtccgggggatgtcggggccgcgacactcgctgcagagcttgccgccgccgcaggtggagctgacttcatccgcacacacgagccgcgccccttgcgcgacgggctggcggtattggcggcgctgaaagaaaccgcaagaattcgttaa

SEQ ID NO: 544 - protein, 271 aa, Enterobacter cloacae
MNKSLIIFGIVNITSDSFSDGGRYLAPDAAIAQARKLMAEGADVIDLGPASSNPDAAPVSSDTEIARIAPVLDALKADGIPVSLDSYQPATQAYALSRGVAYLNDIRGFPDAAFYPQLAKSSAKLVVMHSVQDGQADRREAPAGDIMDHIAAFFDARIAALTGAGIKRNRLVLDPGMGFFLGAAPETSLSVLARFDELRLRFDLPVLLSVSRKSFLRALTGRGPGDVGAATLAAELAAAAGGADFIRTHEPRPLRDGLAVLAALKETARIR

SEQ ID NO: 545 - DNA, 432 bp, Escherichia coli
gtggtgaaagaaacggtccccatgccagcgagcggagactatcaggatctccccttgtggaggggacttacgatcgcggcggtcagggagattcgaaggaattactcgcaggacatcatcatcccaatgacgctcgtgcacccggactatctgactgagatactcgacggggtaaggcggatcgacgatcagctgctgcacatctttctgacgctcaacgaggacctattgcgtcaccggatcgcgaaccagaccatgcatcctgacccgaatcgaaatgcggagattcgagagtggcgattagcgaatgtcgcccgatgcttggccgcaagggaacggcttccatgcacaacccgtgttctcgatagtggtgcacacaccagcgatgaactcgcagcgatggtgctcgacggaatcgatgggcgcacctga

SEQ ID NO: 546 - protein, 143 aa, Escherichia coli
MVKETVPMPASGDYQDLPLWRGLTIAAVREIRRNYSQDIIIPMTLVHPDYLTEILDGVRRIDDQLLHIFLTLNEDLLRHRIANQTMHPDPNRNAEIREWRLANVARCLAARERLPCTTRVLDSGAHTSDELAAMVLDGIDGRT

SEQ ID NO: 547 - DNA, 228 bp, Escherichia coli
atggtcaacagctacagcctgtctgacgattccggcgtcatggctgcggcggctatcacgcattttttgttcggtcaggcggtgttttcgtacctcaatggttggagcgtgttgatcggacctggtacaggtttggacagcacgggctgcaaatacgcaagggatttaatgggcctggtggcgttcacggcttttatcgtgacgtttctgttcaggggctactcataa

SEQ ID NO: 548 - protein, 75 aa, Escherichia coli
MVNSYSLSDDSGVMAAAAITHFLFGQAVFSYLNGWSVLIGPGTGLDSTGCKYARDLMGLVAFTAFIVTFLFRGYS

SEQ ID NO: 549 - DNA, 1137 bp, Escherichia coli
gtgtctcaactctcccagcttcgaagccccgccgccgtgcaggctgccatcgatgagttcgtgcaactgggccgcacgaaattcctggcgcgccacggctacggcaagtcccgcgacttcctggtacgtgatccgaagaccggcaccgattgcgattccaaggccatcgccggtgtggccttcggcaagcaatttcccgagcagggcccgctcactgctgacagcttctccggtggcgaggcgaccgtcgttccggcgctgacgcggctcgggtttcgcatcattcgcatcggcgaagactggtccgaagaagaggtcctggccacggtcgaagactatttcgacatgctgcgtgccgaggcggctggggagccgtacaacaagtccgagcacaaccaggcactgcgccaactgctgaacggtcgcagcaagtcttcagtcgagctcaagcaccagaacattagcgccgtactcgatgccctgggcctgccctatatcaacggctacaagccacgcggcaacagccaactgctgctgcgtaaatccgtacacgcctacgttctggaacatcagcagacggtcggcgctcttgtcgatgccctggaggaggtaaaacttccgggtgacaaaacctaccgagcggctttggtagaaccacccgcccgtgaagtgcttgtgcgtaccccggcatctctacggcaacgcctaccgcgaaagttcgattatgccgctcgcgatgaagccaaccgcaagctgggccgggcaggggagcagtgggtgattggctacgaacagcaacgcctgaccgagctcggccacccagagctttttcagcggctggattgggtgtccgacacccagggagacggtgcggggttcgacatcctgtcgttcgaagaggacgcccatgagcgcttcatcgaggtgaaaaccaccaatggcggggtaggctcgtctttcttggtcagccacaacgaactcgaattctccaaggaggcgggcgatcaattccatctgtatcgcgtgttccagtttcgggacggtccgcgcctgttcacgctacccggcgacctcagccaacatgtgcatctcaagccgacggactaccgggcgagtttccggagtttggtggggtaa

SEQ ID NO: 550 - protein, 378 aa, Escherichia coli
MSQLSQLRSPAAVQAAIDEFVQLGRTKFLARHGYGKSRDFLVRDPKTGTDCDSKAIAGVAFGKQFPEQGPLTADSFSGGEATVVPALTRLGFRIIRIGEDWSEEEVLATVEDYFDMLRAEAAGEPYNKSEHNQALRQLLNGRSKSSVELKHQNISAVLDALGLPYINGYKPRGNSQLLLRKSVHAYVLEHQQTVGALVDALEEVKLPGDKTYRAALVEPPAREVLVRTPASLRQRLPRKFDYAARDEANRKLGRAGEQWVIGYEQQRLTELGHPELFQRLDWVSDTQGDGAGFDILSFEEDAHERFIEVKTTNGGVGSSFLVSHNELEFSKEAGDQFHLYRVFQFRDGPRLFTLPGDLSQHVHLKPTDYRASFRSLVG

SEQ ID NO: 551 - DNA, 123 bp, Escherichia coli
atgataatctggatcaacggacctttcggcgccggaaagacgacgctcgctaagcggctgcgcgatcggcgttccaaatcgctgatctttgaccccgaggaaatggcactgttgcaaagttag

SEQ ID NO: 552 - protein, 40 aa, Escherichia coli
MIIWINGPFGAGKTTLAKRLRDRRSKSLIFDPEEMALLQS

SEQ ID NO: 553 - DNA, 861 bp, Escherichia coli
atgcatacgcggaaggcaataacggaggcgcttcaaaaactcggagtccaaaccggtgacctcttgatggtgcatgcctcacttaaagcgattggtccggtcgaaggaggagcggagacggtcgttgccgcgttacgctccgcggttgggccgactggcactgtgatgggatacgcgtcgtgggaccgatcaccctacgaggagactctgaatggcgctcggctggatgacgaagcccgccgtacctggctgccgttcgatcccgcaacagccgggacttaccgtgggttcggcctgctgaatcaatttctggttcaagcccccggcgcgcggcgcagcgcgcaccccgatgcatcgatggtcgcggttggtccgctggctgaaacgctgacggagcctcacgaactcggtcacgccttgggggaaggatcgcccgtcgagcggttcgttcgccttggcgggaaggccctgctgttgggtgcgccgctaaactccgttaccgcattgcactacgccgaggcggttgccgatatccccaacaaacggtgggtgacgtatgagatgccgatgcttggaagagacggtgaagtcgcctggaaaacggcatcggattacgattcaaacggcattctcgattgctttgctatcgaaggaaagccggatgcggttgaaactatagcaaatgcttacgtgaagctcggtcgccatcgagaaggtgtcgtgggctttgctcagtgctacctgttcgacgcgcaggacatcgtgacgttcggcgtcacctatcttgagaagcatttcggaaccactccgatcgtgcctccgcacgaggccgtcgagcgctcttgcgagccttcaggttag

SEQ ID NO: 554 - protein, 286 aa, Escherichia coli
MHTRKAITEALQKLGVQTGDLLMVHASLKAIGPVEGGAETVVAALRSAVGPTGTVMGYASWDRSPYEETLNGARLDDEARRTWLPFDPATAGTYRGFGLLNQFLVQAPGARRSAHPDASMVAVGPLAETLTEPHELGHALGEGSPVERFVRLGGKALLLGAPLNSVTALHYAEAVADIPNKRWVTYEMPMLGRDGEVAWKTASDYDSNGILDCFAIEGKPDAVETIANAYVKLGRHREGVVGFAQCYLFDAQDIVTFGVTYLEKHFGTTPIVPPHEAVERSCEPSG

SEQ ID NO: 555 - DNA, 441 bp, Escherichia coli
atgagaaaatcaggaaaagcattagcgagattgcgagcagctttagaacgcctaatttcgggcaagccacaaaatgtttcaccttcaggtaaattaacccttaataaaataaataacgaagctggacttggtaacagttacatacacaaatttaaagattttattgaaaatgaagcaaacccagccattgagtcgtttaacgctaattacgatcccgtcaaagcgaaactattacaaaacaagcagaatctaactgagaaagaaaagcataaagccagaatgaagaaagaagtcaaacttaaagagcaataccgccaagagcgagatgatctaaaaactataaacaaagaattagaaacacaaattagttctttgatgttcaggctgtatgaattacaagaacaacttaatgtacaaaatgttgtgaagatctctcaataa

SEQ ID NO: 556 - protein, 146 aa, Escherichia coli
MRKSGKALARLRAALERLISGKPQNVSPSGKLTLNKINNEAGLGNSYIHKFKDFIENEANPAIESFNANYDPVKAKLLQNKQNLTEKEKHKARMKKEVKLKEQYRQERDDLKTINKELETQISSLMFRLYELQEQLNVQNVVKISQ

SEQ ID NO: 557 - DNA, 1272 bp, Escherichia coli
atggcaaaaatatcagatttgaattgttatcaacacatggcatcagccgacaatgttaaaccaaaaaatgaagtcttaaatacctggtgtgtgggaatgaatgattttgctcgtaatgccgaggggcaggatagcagaaggaatattctatctcctggagcatttttggagtttttggcaaaaatatttaccctgggttatgtggattttagcaaatgctccaacgaagcgggtagaaatatgatggctcatattgagtcctcatcttatatcaaaaataatgatggcagtgaaataatgaattttgttatgaataatcctgaaggtgagcgtgcggattcatctaaggtgattatagaaatttcactttctactaccactactatggggactcgtcaaggacatacagccattatatttccacaatctgattttttgagttttcgttatgaaggtaagtcttttgaaagaaaagatgatagttcattacacctgattactaacaaggttctggcgtgttaccaacgtgaagctaacaagaatatggcgcttctattaaataatcatcagttgaactggaaggacgcaattgattataacgagttattagaaaagccattagccagtacattagaaaaaataaagaaagaacatctgctattaatgcctcatgtatgtgatgacacgattccatacttactaggcgaaggtggtatacttgaagaaataaatgatctgaaaacgttacatgataccagaattgctagtggtacagaaggtaatgatgaaattaataacatcaaaattaacctgtctaatattcttattgattccttagatgatgcaaaagttaatctcgaaaaggtcatcgattcgatgttgaagacttttttaaaattgccatatattaatgatgtaaaaattctggagtggtgttttaatcaaagtatgcaatattctgatgatactacaaagataaagcatgcccgctccgtgatcgatcatattgattttaactgcgatcagtctaaaatagctgagacattatttttcaacctcaataaagaaccctataaaaacagccctgagttacaggaattgatttgggagaagttggttgtatatgtcaatgattttaatttaagtaatcaagaaaaatcgcgcttaatactaaggctatttgatgatgttaaattggtttttgataaagtgcctctcagtattttagtgaatgatattttttttgaaggattttttcatgaagcaacctga

SEQ ID NO: 558 - protein, 423 aa, Escherichia coli
MAKISDLNCYQHMASADNVKPKNEVLNTWCVGMNDFARNAEGQDSRRNILSPGAFLEFLAKIFTLGYVDFSKCSNEAGRNMMAHIESSSYIKNNDGSEIMNFVMNNPEGERADSSKVIIEISLSTTTTMGTRQGHTAIIFPQSDFLSFRYEGKSFERKDDSSLHLITNKVLACYQREANKNMALLLNNHQLNWKDAIDYNELLEKPLASTLEKIKKEHLLLMPHVCDDTIPYLLGEGGILEEINDLKTLHDTRIASGTEGNDEINNIKINLSNILIDSLDDAKVNLEKVIDSMLKTFLKLPYINDVKILEWCFNQSMQYSDDTTKIKHARSVIDHIDFNCDQSKIAETLFFNLNKEPYKNSPELQELIWEKLVVYVNDFNLSNQEKSRLILRLFDDVKLVFDKVPLSILVNDIFFEGFFHEAT

SEQ ID NO: 559 - DNA, 270 bp, Escherichia coli
atggaaaatctactttttgtgatgtgttggattaaagatcatcatgtgatgtcattaacttttggcgtcttatctgcaattttatggattaaatctgctacagcaaaagttgagttaggcaaaaaaattgtcatggttacgtatgaagatcccgaacttaacgtgaatctccatgatttcttcgccactgcgcggcttcaatctaagtacaattcatttgcagcattgtctgcagcagcaaccgcgctattccagattattggtttgtaa

SEQ ID NO: 560 - protein, 89 aa, Escherichia coli
MENLLFVMCWIKDHHVMSLTFGVLSAILWIKSATAKVELGKKIVMVTYEDPELNVNLHDFFATARLQSKYNSFAALSAAATALFQIIGL

SEQ ID NO: 561 - DNA, 363 bp, Escherichia coli
ttgtttgaaataacaggtgttaacgtctcaggggctctcattgccgtcgttatggcgactggctacgagaaccccttgacttcagttcacgaaatcgagaagaggctttctgttatactgggcaattcacaggctacaggtgaggttttgtttgaccttttgtgttctaatggtccagagtggaatcgctttgtttcgctggaaataaggtgtggcagtattttgctggatactgccaaaattgtggatgagcaagaaattccagcgcagatcttgagacatcagagagatgtattacgtaaccaccctgagtacgtagaagactctgtgttaacaccagatgatgttctttgtattctctag

SEQ ID NO: 562 - protein, 120 aa, Escherichia coli
MFEITGVNVSGALIAVVMATGYENPLTSVHEIEKRLSVILGNSQATGEVLFDLLCSNGPEWNRFVSLEIRCGSILLDTAKIVDEQEIPAQILRHQRDVLRNHPEYVEDSVLTPDDVLCIL

SEQ ID NO: 563 - DNA, 228 bp, Escherichia coli
atgaagccgttcccggtaccggcctttacccttatcggcgacgactgcagcatctccggctcggcgatcggtaacccatccgaactgcgcacgctgaggaagttcgccggacgcagcaaagtggctccgaccaccgagctgttccctatgtcgcaaattaacgaagcgttgaaacacgttcgcgaaggcaaagcccgctaccgcgcggtgctgaaagccgacttatga

SEQ ID NO: 564 - protein, 75 aa, Escherichia coli
MKPFPVPAFTLIGDDCSISGSAIGNPSELRTLRKFAGRSKVAPTTELFPMSQINEALKHVREGKARYRAVLKADL

SEQ ID NO: 565 - DNA, 888 bp, Escherichia coli
atgagcgctgacatctcgccgctgctggtccacacacccgccgctgcgcgtccgctgtggctgcgcctgcgtcgctcgtcgccctttacgctcacagtattaatgtgctgcctggcgctgctgtgggtcagcccgtttatctggatgctgaccacctcattcagcgcaactaccttcggcgacgatatggcctcgctgctgccgcgcctgccgctgactctcgataacttccgcgacgcctggaacagcgccgactggctgagcctgtacgccaacacaattatcttcaccttcggcaccttcttcgtgcagctgttgaccatcaccaccgccggctacgtctttgcctgtcacgagtttcgcggcaagcagacgctgtttctcctgttcctggtgcagctgatgatcatgccggtagtgatgatggtgccgaacatgctgaccctgaaaaccttcggtctgctcaacaccctcatcggggtgatgatgccctacttcacctcggcgttcggcgtattcctaatgcgtaaggcgttcctcgccattccgaaagagctggaggaggcggcgctgatggagggctgcagctggtggcaggtgctgttccgcgtgctgctgccgatgtcctggccgtcggtgctggccttcgctaccgtcagcattacctaccactggaacgagtacctgtggccgctgatgatgctcaacgatcccgataagcaggtgctgaccgtcgggctggtctctttcgccatgggcgccgaatccggtggccagtggggcaccatcggcgccgggacgctgatggtctgcctgccgctgatgctggcgtttatcctttttcagaaacagttcctgcggagcttcggcttctccgggatcaaataa

SEQ ID NO: 566 - protein, 295 aa, Escherichia coli
MSADISPLLVHTPAAARPLWLRLRRSSPFTLTVLMCCLALLWVSPFIWMLTTSFSATTFGDDMASLLPRLPLTLDNFRDAWNSADWLSLYANTIIFTFGTFFVQLLTITTAGYVFACHEFRGKQTLFLLFLVQLMIMPVVMMVPNMLTLKTFGLLNTLIGVMMPYFTSAFGVFLMRKAFLAIPKELEEAALMEGCSWWQVLFRVLLPMSWPSVLAFATVSITYHWNEYLWPLMMLNDPDKQVLTVGLVSFAMGAESGGQWGTIGAGTLMVCLPLMLAFILFQKQFLRSFGFSGIK

SEQ ID NO: 567 - DNA, 825 bp, Escherichia coli
atgctgttagcacacatttccgatacccattttcgcagccgcggcgagaagctgtatggctttatcgacgtcaatgccgccaacgccgacgtggtctcccagcttaacgcactgcgcgagcgcccggacgcggtggtggtgagcggggatatcgtcaactgcggccgcccggaggagtatcaggtggcccgccagatcctcggcagcctgaactatccgctgtatctgatccccggcaaccacgacgacaaagcccattttctcgaacatcttcacccgctgtgcccgcagctgggcaacgatccgcaaaatatgcgctatgtggtggatgacttcgccacccgcctgctgtttatcgactccagtcatgccggcacgtcaaaaggctggctgaccgacgagaccatcggctggctggaagcccagctgttcgagggcggcgacaaaccggcaacgatctttatgcaccacccgccgctgccgctgggcaatgcgcagatggatcctattgcctgcgaaaatggccaccgtctgctggagttggtggagcgttttccgtcgctgacgcgcatcttctgcggccataaccacagcctgaccataacccagtatctccaggcgctgatctccaccattcctggcaccgtccatcaggtgccgtactgccacgaagatacccggtcctattacgatctctccccggcctcgtgcctgatgcaccgtcaggtcggcgagcagtgggtgagctaccagcactcgctggcccaccacgccggaccgtggctgtacgacgaaaacatcagttgcccaacggaagagcgctaa

SEQ ID NO: 568 - protein, 274 aa, Escherichia coli
MLLAHISDTHFRSRGEKLYGFIDVNAANADVVSQLNALRERPDAVVVSGDIVNCGRPEEYQVARQILGSLNYPLYLIPGNHDDKAHFLEHLHPLCPQLGNDPQNMRYVVDDFATRLLFIDSSHAGTSKGWLTDETIGWLEAQLFEGGDKPATIFMHHPPLPLGNAQMDPIACENGHRLLELVERFPSLTRIFCGHNHSLTITQYLQALISTIPGTVHQVPYCHEDTRSYYDLSPASCLMHRQVGEQWVSYQHSLAHHAGPWLYDENISCPTEER

SEQ ID NO: 569 - DNA, 1074 bp, Escherichia coli
atgctcagtctgcaaaacatcagtaaacgtttcgacggcaaaccggcgctcagcgccctgtcgctggatatccacgaaggcgaattcgtggtgctggtcggcccgtcgggctgcgggaaaagcaccctgctacgcctgctcgccgggctggaaccggtcagcgaaggccaaatctggctgcatgatgagaacatcaccgccaccacgccgcgcgatcgcaacttcgcgatgatcttccagaactatgccctgtttccgcatctgtcggtgcgcgacaacatcaccttcggcatgaaggtgcgcaaggaagagaaaagcagctggcagccgcgagtggataaagtggcgcagatgctgcagctggaggcgctgctcgactgcaaaccggcgaagctctccggcggccagcgccagcgggtggcgatggcccgggcgattgtgcgtaatccgcggctgttcctgatggacgagccgctctgcaacctcgacgcccgcctgcgcagcgaagtgcgcgacagcattatggccctccatcagcagctgaaaaccagcaccatctatgtgacccacgatcagaccgaggcgatgtcgatggccgaccgcatcgtggtgatgaacggcggccacgtgcagcaggtcgggcacccggagtatctgtacgccaacccggccaacctgttcgtcgctgggtttatcggttcgccggcgatgaacctcctgtcgctgccctgcgccaacggtgaagtactgttgggagaacagcgccatccgctgccgccgcgccaccgggatcagacccgcgtctggctgggcgttcgcccggaacatattaccgaccacgtggaggaggaccatctgcgcctgccggccaccgttctgcaacgagaactgatgggagccgattatctgctccacgtcagcaccccgatcggcaccctgcgctttagccgccgcaaccgcggcaaggtgccggagaaagacgagtcgctaccgatcggcttctcgcctgccgatgtgcatctttttcatgctgagacccagcataatttacagatggagacagatcatgtttaa

SEQ ID NO: 570 - protein, 357 aa, Escherichia coli
MLSLQNISKRFDGKPALSALSLDIHEGEFVVLVGPSGCGKSTLLRLLAGLEPVSEGQIWLHDENITATTPRDRNFAMIFQNYALFPHLSVRDNITFGMKVRKEEKSSWQPRVDKVAQMLQLEALLDCKPAKLSGGQRQRVAMARAIVRNPRLFLMDEPLCNLDARLRSEVRDSIMALHQQLKTSTIYVTHDQTEAMSMADRIVVMNGGHVQQVGHPEYLYANPANLFVAGFIGSPAMNLLSLPCANGEVLLGEQRHPLPPRHRDQTRVWLGVRPEHITDHVEEDHLRLPATVLQRELMGADYLLHVSTPIGTLRFSRRNRGKVPEKDESLPIGFSPADVHLFHAETQHNLQMETDHV

SEQ ID NO: 571 - DNA, 1311 bp, Escherichia coli
atgtttaaacccctcaccgccctgacggttgggctcagccttgccctgagcggcgcggcgctggcgaaagagaaaatagactttatgttcccggcgccggtggacggcaagctgaccatggagatgacccgcgtcattaagcaattcaacgactcgcagcaggatgtcgaagtgcgcggaatcttcaccggcaactacgacaccaccaagatcaaagccgaatcggcgcagaaggccggccagccaccggcgctggtgatcatgtccgccaacttcaccaccgatctggcgctgaaggatgagatcctgccgatggatgagctgtttaaatatggcgatcaaaaggccggcaattttctgcaaacggaattctggcccgcgatgcataagaacgcccaggtgatgggcaccacctatgcgatcccgttccataactcgacgccgctcctctactacaacaagacgatgttcgatcgggccgggatccaacagccgccgcagacctgggccgagttgctggccgatgccaaaaagctgaccgacgagagcacaggccagtgggggatcatgctgccgtcgaccaacgacgacttcggcggctggatcttctcggcgctggtgcgcgccaacggcggaaaatactttaacgaagactatccgggcgaggtctattacaactcgccgaccacaatcggcgccctgcgcttctggcaggatctgatctacaaagacaaggtgatgccgtccggggtgctgaactcgaaacagatcagcgccgcgttcttctccggcaagctcgggatggcgatgctcagcaccggcgcgctgggctttatgcgtgagaacagcaaagactttgagcttggggtagctatgctgccagccaaagagcagcgcgcagtgccgatcggcggcgccagcctcgtaagttttaaaggcatcagcgaggcgcagaagaaagcagcgtatcggttcctgacctatctggtgagccccgaggtgaacggcgcatggagccgcttcaccggctacttctcgccgcgcaaggcgtcatacgatacgccagagatgaaggcctatctgcagcaggatccgcgggcggcgattgcgcttgagcaactgaagtacgcccatccatggtactccacctgggagaccgtcgccgtgcgtaaggcgatggagaaccagctggcggcggtggtcaacgatgccaaagtaaggccggaagccgcggtacaggcggcgcagaaggaagctgacgcgctaatgaaaccctatgtggataagaccgcgttgtcggaagtgaagtga

SEQ ID NO: 572 - protein, 436 aa, Escherichia coli
MFKPLTALTVGLSLALSGAALAKEKIDFMFPAPVDGKLTMEMTRVIKQFNDSQQDVEVRGIFTGNYDTTKIKAESAQKAGQPPALVIMSANFTTDLALKDEILPMDELFKYGDQKAGNFLQTEFWPAMHKNAQVMGTTYAIPFHNSTPLLYYNKTMFDRAGIQQPPQTWAELLADAKKLTDESTGQWGIMLPSTNDDFGGWIFSALVRANGGKYFNEDYPGEVYYNSPTTIGALRFWQDLIYKDKVMPSGVLNSKQISAAFFSGKLGMAMLSTGALGFMRENSKDFELGVAMLPAKEQRAVPIGGASLVSFKGISEAQKKAAYRFLTYLVSPEVNGAWSRFTGYFSPRKASYDTPEMKAYLQQDPRAAIALEQLKYAHPWYSTWETVAVRKAMENQLAAVVNDAKVRPEAAVQAAQKEADALMKPYVDKTALSEVK

SEQ ID NO: 573 - DNA, 1122 bp, Escherichia coli
gtggatgaaacaggccagactggccgaaacctttttgacaaaacccagccagtcctctcctacggagtgctgtcgtctgatgctaatctggataaggttgctgaagcggatctagccgtaatacgcaaaacgcttggcgtgcagcgcctgcacgctgcggaactgggcttgcaccgcctttctgaccttgtagatacgctgctggttctgcagaaaaagcaccggatacggtttgacatctggcaggtagtaaagcgcgatcatgccattatttcgttcttcgaccaggtatttgatcagggaatgaatccagccgtaccctggtctgcatactggacccctctgcgctaccccctgctgctgaatctggccagcctgtttgatgatgaacttgcttcaaacgcatggacggcaaggctggaggcgcatgatgagcgtgcgtcggaacttttttgtaccgtcagtgatgaactgatcagcaggacggcagccagcgcgctggaccaccggtcgaagcagctgatcaccgatgccctgaactgggcgtcagccaattttgaacagttgggctataactgtaaaaccaacaaggaaaggctgcggattatgcccaatatgattggctttcagtccgtattgcacgggatctgttcccgactgggggcaccagaaagaaaggccagtatcattgttgaccagcagtcacagttcaacaccacccagcgtgaacttaacgagttttactaccagatacgggatatgccctgggaactggggcccggattacctgttatgaacatgaaaaatatgccggctgaaccacttgtattccagtccggtaccaagagtgcaggtctggagttggtagatatttatctctggacattcaagcgattcatggaagacaaggcgctggcaaagccactttcccgccttgtttataccaatctgaaaacagccaggaccaacagcgtgtcaatccagtcggttgccagtcgatttaaggaactcctgggtaaactcccggtaccaagcgcagagatcatgaggcaggcgcaggagctgcgggactttgatgaagccagacgcatgccatatgtggtgtcgggatcacccgactga

SEQ ID NO: 574 - protein, 373 aa, Escherichia coli
MDETGQTGRNLFDKTQPVLSYGVLSSDANLDKVAEADLAVIRKTLGVQRLHAAELGLHRLSDLVDTLLVLQKKHRIRFDIWQVVKRDHAIISFFDQVFDQGMNPAVPWSAYWTPLRYPLLLNLASLFDDELASNAWTARLEAHDERASELFCTVSDELISRTAASALDHRSKQLITDALNWASANFEQLGYNCKTNKERLRIMPNMIGFQSVLHGICSRLGAPERKASIIVDQQSQFNTTQRELNEFYYQIRDMPWELGPGLPVMNMKNMPAEPLVFQSGTKSAGLELVDIYLWTFKRFMEDKALAKPLSRLVYTNLKTARTNSVSIQSVASRFKELLGKLPVPSAEIMRQAQELRDFDEARRMPYVVSGSPD

SEQ ID NO: 575 - DNA, 207 bp, Escherichia coli
atgcctgtctgcccgcgccgggaaaaaacgcgcgccggtggcgctgaaaggggccgcgctcacgcgccgcccctttcattacgcggacgttctgatgggggcttctgtttcttcatgcctgtcatttgtctgttactgatgttgttgttcctgctactgctactgctactgctactgctactgttcttctttttcctgctgctctga

SEQ ID NO: 576 - protein, 68 aa, Escherichia coli
MPVCPRREKTRAGGAERGRAHAPPLSLRGRSDGGFCFFMPVICLLLMLLFLLLLLLLLLLLFFFFLLL

SEQ ID NO: 577 - DNA, 273 bp, Escherichia coli
gtggtgctgaattttgacgatcggggtaccgtcacccatcgggcgatattgggggaaacctgtacggtgctggagatggccgcaggaacctggcatgccgtgctgtcgctggataccggtggcataatttttgaagtaaaacacggtggctatcaacccgtggctgccgatgactatgcgcactgggctccagcggaaggagaaccaggaaccacggagcttatggcctggtatgcgcaagcgcaggtgggcgacagcacttttgccgtctaa

SEQ ID NO: 578 - protein, 90 aa, Escherichia coli
MVLNFDDRGTVTHRAILGETCTVLEMAAGTWHAVLSLDTGGIIFEVKHGGYQPVAADDYAHWAPAEGEPGTTELMAWYAQAQVGDSTFAV

SEQ ID NO: 579 - DNA, 876 bp, Escherichia coli
atggttaaaaaatcactgcgccagttcacgctgatggcgacggcaaccgtcacgctgttgttaggaagtgtgccgctgtatgcgcaaacggcggacgtacagcaaaaacttgccgaattagagcggcagtcgggaggcagactgggtgtggcattgattaacacagcagataattcgcaaatactttatcgtgctgatgagcgctttgcgatgtgcagcaccagtaaagtgatggccgcggccgcggtgctgaagaaaagtgaaagcgaaccgaatctgttaaatcagcgagttgagatcaaaaaatctgaccttgttaactataatccgattgcggaaaagcacgtcaatgggacgatgtcactggctgagcttagcgcggccgcgctacagtacagcgataacgtggcgatgaataagctgattgctcacgttggcggcccggctagcgtcaccgcgttcgcccgacagctgggagacgaaacgttccgtctcgaccgtaccgagccgacgttaaacaccgccattccgggcgatccgcgtgataccacttcacctcgggcaatggcgcaaactctgcggaatctgacgctgggtaaagcattgggcgacagccaacgggcgcagctggtgacatggatgaaaggcaataccaccggtgcagcgagcattcaggctggactgcctgcttcctgggttgtgggggataaaaccggcagcggtggctatggcaccaccaacgatatcgcggtgatctggccaaaagatcgtgcgccgctgattctggtcacttacttcacccagcctcaacctaaggcagaaagccgtcgcgatgtattagcgtcggcggctaaaatcgtcaccgacggtttgtaa

SEQ ID NO: 580 - protein, 291 aa, Escherichia coli
MVKKSLRQFTLMATATVTLLLGSVPLYAQTADVQQKLAELERQSGGRLGVALINTADNSQILYRADERFAMCSTSKVMAAAAVLKKSESEPNLLNQRVEIKKSDLVNYNPIAEKHVNGTMSLAELSAAALQYSDNVAMNKLIAHVGGPASVTAFARQLGDETFRLDRTEPTLNTAIPGDPRDTTSPRAMAQTLRNLTLGKALGDSQRAQLVTWMKGNTTGAASIQAGLPASWVVGDKTGSGGYGTTNDIAVIWPKDRAPLILVTYFTQPQPKAESRRDVLASAAKIVTDGL

SEQ ID NO: 581 - DNA, 123 bp, Escherichia coli
atgaaaaatgtctggtataataagaatatcatcaataaaattgagtgttgctctgtggataacttgcagagtttattaagtatcattgcagcaaagatgaaatcaatgatttatcaaaaatga

SEQ ID NO: 582 - protein, 40 aa, Escherichia coli
MKNVWYNKNIINKIECCSVDNLQSLLSIIAAKMKSMIYQK

SEQ ID NO: 583 - DNA, 600 bp, Escherichia coli
atgagcaacgcaaaaacaaagttaggcatcacaaagtacagcatcgtgaccaacagcaacgattccgtcacactgcgcctcatgactgagcatgaccttgcgatgctctatgagtggctaaatcgatctcatatcgtcgagtggtggggcggagaagaagcacgcccgacacttgctgacgtacaggaacagtacttgccaagcgttttagcgcaagagtccgtcactccatacattgcaatgctgaatggagagccgattgggtatgcccagtcgtacgttgctcttggaagcggggacggacggtgggaagaagaaaccgatccaggagtacgcggaatagaccagttactggcgaatgcatcacaactgggcaaaggcttgggaaccaagctggttcgagctctggttgagttgctgttcaatgatcccgaggtcaccaagatccaaacggacccgtcgccgagcaacttgcgagcgatccgatgctacgagaaagcggggtttgagaggcaaggtaccgtaaccaccccatatggtccagccgtgtacatggttcaaacacgccaggcattcgagcgaacacgcagtgatgcctaa

SEQ ID NO: 584 - protein, 199 aa, Escherichia coli
MSNAKTKLGITKYSIVTNSNDSVTLRLMTEHDLAMLYEWLNRSHIVEWWGGEEARPTLADVQEQYLPSVLAQESVTPYIAMLNGEPIGYAQSYVALGSGDGRWEEETDPGVRGIDQLLANASQLGKGLGTKLVRALVELLFNDPEVTKIQTDPSPSNLRAIRCYEKAGFERQGTVTTPYGPAVYMVQTRQAFERTRSDA

SEQ ID NO: 585 - DNA, 204 bp, Citrobacter koseri
atgttccagccgccttgcctcttcctgatcccggtattccctcgcctttttcatcatttctgccgttggctcctgcagtttgtcgagaaactccttagatcgtttagccaccgactgaagggagacactgtccgtcctgccggtattgcgattggtgtaaaccaggcgggtaagggggtctggttaactccttcccttccataa

SEQ ID NO: 586 - protein, 67 aa, Citrobacter koseri
MFQPPCLFLIPVFPRLFHHFCRWLLQFVEKLLRSFSHRLKGDTVRPAGIAIGVNQAGKGVWLTPSLP

SEQ ID NO: 587 - DNA, 360 bp, Escherichia coli
gtgaaagccgtaattactccctttgtacaaaaagagcttggcgtcgccacattcaaagtggatcaggaagtcagaaagctggtggaggctggccgtaaatttattatggagccggtaccgcgtgagttaatcgagcacatggacgacggcctcgttgtttccgagcaaactatggcaacaaatgaggcgttgcagccgttttttaacagcgatgaactgtttcgccgtattggtggaattgactcgctggtagcgtggttgcgcaggaaagaggggcaggtcaggctgggccatgtcgttctcgccggacagcaggcttaccatgaaagcactggaaatggcatgggaaacccgtggtaa

SEQ ID NO: 588 - protein, 119 aa, Escherichia coli
MKAVITPFVQKELGVATFKVDQEVRKLVEAGRKFIMEPVPRELIEHMDDGLVVSEQTMATNEALQPFFNSDELFRRIGGIDSLVAWLRRKEGQVRLGHVVLAGQQAYHESTGNGMGNPW

SEQ ID NO: 589 - DNA, 1428 bp, Citrobacter rodentium
atgtccatacgtttagaaggttatatgcaaacaacacaacaaaatgcgccactgaagcgcacaatgaaaacgcgtcacctgattatgctttccttgggcggcgtgattggcacaggattattcttcaataccgggtacatcatttccaccactggagcggcgggaacgctgctggcctatctgattggtgcgctggtggtctggctggttatgcagtgtctgggcgagctgtcggtcgcgatgccggagaccggagcgtttcacgtttatgccgcgcgctatcttggtccggctaccgggtataccgtggcctggctttactggctgacctggaccgtggcgctgggttcgagctttaccgccgctggattctgtatgcagtactggtttccacaggtgccggtatgggtctggtgcgtggtgttctgcgcgattatttttggtctgaatgttatctccacgcgcttttttgccgaaggggagttctggttctcgctggtcaaagtggtcactatcatcgcctttatcatcctcggtggggcggcgattttcggctttattccgatgcaggatggctcgcccgcgccggggctgagtaatatcacggcagaaggctggttcccgcacggtggcttaccgattttgatgactatggtggcagtgaactttgctttttcgggtaccgagcttatcggcattgccgccggtgaaacggaaaacccgcgcaaagttatcccggtagcgattcgtactaccatcgcgcgactgattattttctttatcggcaccgtgtttgtgctggcagcgctgatcccgatgcagcaggcgggcgtggagaaaagcccgtttgtgctggtatttgagaaagtagggatcccgtacgccgctgatatttttaacttcgtgatcctgacggctattctttctgcagcgaactccgggttatatgcctccgggcgcatgctgtggtcgttgtcgaatgaacgtacgctaccggcctgttttgcgcgagtaacgaaaaacggcgtgccactgacggcgctgtcggtcagtatgctcggtggtgtgctggcgctgttttccagcgtggtggccccggacacggtatttgttgcgctgtcggcaatctccgggtttgcggtggtagcggtgtggctgagtatctgcgcctcgcattttgtttttcgtcgccgtcatctgcaacaaggtaaggcattgagtgaattacattatcgcgcgccgtggtatccgctggtgccagtattaggttttgtgctgtgcctggtggcctgtgttgggctggcattcgatccagcgcagagaattgcgttgtggtgcgggttaccgtttgttgcgttgtgctatggtgcttatttccttactcaaccccgaaacgcaaaacaggagccagaacatgtcgcagaataa

SEQ ID NO: 590 - protein, 475 aa, Citrobacter rodentium
MSIRLEGYMQTTQQNAPLKRTMKTRHLIMLSLGGVIGTGLFFNTGYIISTTGAAGTLLAYLIGALVVWLVMQCLGELSVAMPETGAFHVYAARYLGPATGYTVAWLYWLTWTVALGSSFTAAGFCMQYWFPQVPVWVWCVVFCAIIFGLNVISTRFFAEGEFWFSLVKVVTIIAFIILGGAAIFGFIPMQDGSPAPGLSNITAEGWFPHGGLPILMTMVAVNFAFSGTELIGIAAGETENPRKVIPVAIRTTIARLIIFFIGTVFVLAALIPMQQAGVEKSPFVLVFEKVGIPYAADIFNFVILTAILSAANSGLYASGRMLWSLSNERTLPACFARVTKNGVPLTALSVSMLGGVLALFSSVVAPDTVFVALSAISGFAVVAVWLSICASHFVFRRRHLQQGKALSELHYRAPWYPLVPVLGFVLCLVACVGLAFDPAQRIALWCGLPFVALCYGAYFLTQPRNAKQEPEHVAE

SEQ ID NO: 591 - DNA, 267 bp, Escherichia coli
atgcgcaagtatgaatgtgaggggaaatacaccgttagaaatttggtaaaaaataaagctatagcattggaattagctgagatgtatgttaaaaatcgttatgggcatgatgccgcagaagaagaaaaaccatacaaaatcatggaattaccaacaagttggattgttgaaggcaccattgaatcagaccaaattgctggtagggtttttattatagaaataggcaaaaatgacgggagaattctaaattttggccacggaaaataa

SEQ ID NO: 592 - protein, 88 aa, Escherichia coli
MRKYECEGKYTVRNLVKNKAIALELAEMYVKNRYGHDAAEEEKPYKIMELPTSWIVEGTIESDQIAGRVFIIEIGKNDGRILNFGHGK

SEQ ID NO: 593 - DNA, 360 bp, Morganella morganii
gtgtcactggccgagaaggtgttcggagccgtggagacggtcgaaggggtggcgcaaaggttgaacgccaaaataatggggtctgtgcagccgatggccgagaaagccgctgtaagcgcccagaacgagcgaagagccaaggagctaagggaaaccctagcccagcagcaaaaacgcttacaggcccttcaggagccgtttaaggggctatccaaggatcaggtagcgggactgatccggcaggcggtgaaattgcggcaggagaacgagcaggagaagcaggagcgcgcccagcagatcaaagagcgattcaaggccaagcgggaacgggagcgcagcgaccgcagcaggggccgttaa

SEQ ID NO: 594 - protein, 119 aa, Morganella morganii
MSLAEKVFGAVETVEGVAQRLNAKIMGSVQPMAEKAAVSAQNERRAKELRETLAQQQKRLQALQEPFKGLSKDQVAGLIRQAVKLRQENEQEKQERAQQIKERFKAKRERERSDRSRGR

SEQ ID NO: 595 - DNA, 222 bp, Escherichia coli
atggccatgagcatgtattacatcaagacaggtctggagtactggaaacccaagggctacgggtacaccaagagccgcgaggaggcgggggttttcaccctcaaggacatggaagaattgaacctcgatggctgcaccctggaacgcgccgaagtggcgttcctggacgaggacggccccagtcccgacctaccccaccgcgtcaccctgccccgcgattga

SEQ ID NO: 596 - protein, 73 aa, Escherichia coli
MAMSMYYIKTGLEYWKPKGYGYTKSREEAGVFTLKDMEELNLDGCTLERAEVAFLDEDGPSPDLPHRVTLPRD

SEQ ID NO: 597 - DNA, 204 bp, Escherichia coli
atgacagatccactcaaagcccttttcggcaagcctgattactcccatatcgtaagggacaccacggccactatcagcatcacagccgctgaaatggccgctgttttggaggcttacgacaggggtatagacacgctggacggcaccaccagaacggcgctggattccgttatatcgaaactcaaggacgaggtatggccatga

SEQ ID NO: 598 - protein, 67 aa, Escherichia coli
MTDPLKALFGKPDYSHIVRDTTATISITAAEMAAVLEAYDRGIDTLDGTTRTALDSVISKLKDEVWP

SEQ ID NO: 599 - DNA, 294 bp, Citrobacter koseri
atgtgcgataccgccggtatcgacaatcagcgtgcctccggcacgaatattgctgccagttgccgtacctcctttctcaacaacctgcttgctcccggaagagatatttgttgtgtcagctttcccgccgctcttgatattttgcgtgccactgttgatattagttcccgtagcaataccatgattataaatattctgtgtaccgccattaattatggtattagtcgcgttcccggcaacatccatggccccgccgttatctattcgggtcgcatcagctttagcattcgttaa

SEQ ID NO: 600 - protein, 97 aa, Citrobacter koseri
MCDTAGIDNQRASGTNIAASCRTSFLNNLLAPGRDICCVSFPAALDILRATVDISSRSNTMIINILCTAINYGISRVPGNIHGPAVIYSGRISFSIR

SEQ ID NO: 601 - DNA, 510 bp, Enterobacter cloacae
atgatcgagcttcatgccattttagctgccaccgccaatggttgcattgggaaggacaacgcacttccctggccaccactaaaaggcgatctggccagattcaaaaaattgaccatggggaaggtggtcattatggggcgcaagacctatgagagcttgcccgtcaaattagaaggtcgcacctgcatcgttatgacgcgccaagcgctggagcttccgggtgttcgtgacgctaacggcgctatcttcgtgaacaacgtcagcgacgccatgcggttcgctcaagaagagagcgtgggcgatgtggcctacgtcattggtggcgctgagatattcaagcgacttgccttgatgatcacgcagattgaattgacctttgttaagcgactgtacgaaggcgacacctacgttgatctggccgaaatggtcaaagactacgagcagaatggcatggaagaacatgaccttcacacttacttcacttaccgtaaaaaggagcttacagaatga

SEQ ID NO: 602 - protein, 169 aa, Enterobacter cloacae
MIELHAILAATANGCIGKDNALPWPPLKGDLARFKKLTMGKVVIMGRKTYESLPVKLEGRTCIVMTRQALELPGVRDANGAIFVNNVSDAMRFAQEESVGDVAYVIGGAEIFKRLALMITQIELTFVKRLYEGDTYVDLAEMVKDYEQNGMEEHDLHTYFTYRKKELTE

SEQ ID NO: 603 - DNA, 657 bp, Enterobacter cloacae
atgaccttcgttgccatttcagatacgcacctgcacaactggtcgcagttcgcgataccaacagagtcgggcattaactccaggctgttgcagattcttaaagccattgaagaagcggcttgcgccgccgattaccacgccccagcgggcgtggttccaaccgtctatcacggcggcgatctcttccatgtgcgaggttctttgaccccttctgtgctaaacgcggtgctcgacttttttaagaccatccaccgtgactacggcgttcgctttcgcatgatcgccggcaatcacgatctggaaaccaaagactcatgtcctatgggcaatgcagctgcggcgcttaattcgttgccgtttgtggaggttgtatccgaaaaaacgctgttcgaggaccacaaagtcgctctgctgccatggcgcgattccatggacgatctgcgtgcggatcttgcgcacgttaaagacgcgatcggcgctagtgttgcctctaagtggacagcaatcatccacgcaccggttaacggggttgttcttggcattccagaccatgggttcgacggaaaagagctcgcctcctatggcttcgggttagtgctcgccggtcactaccacaaccacaaaaaaatcggcactgttgcaaatagtcggtggtga

SEQ ID NO: 604 - protein, 218 aa, Enterobacter cloacae
MTFVAISDTHLHNWSQFAIPTESGINSRLLQILKAIEEAACAADYHAPAGVVPTVYHGGDLFHVRGSLTPSVLNAVLDFFKTIHRDYGVRFRMIAGNHDLETKDSCPMGNAAAALNSLPFVEVVSEKTLFEDHKVALLPWRDSMDDLRADLAHVKDAIGASVASKWTAIIHAPVNGVVLGIPDHGFDGKELASYGFGLVLAGHYHNHKKIGTVANSRW

SEQ ID NO: 605 - DNA, 351 bp, Escherichia coli
atgtctgaaccacaaaacgggcgcggtgcgctcttcgccggcgggctggccgccattcttgcatcgacctgctgcctggggccgctagtactggtcgccctgggcttctccggtgcttggatcggcaacctgacggtgctggaaccctatcgaccgttgttcatcggcgcggcgctagtggcgctgttcttcgcctggaagcggatttaccggcccgtgcaggcatgcaagccaggtgaggtctgcgcgattccgcaggtgcgcgccacctacaagctgattttctggatcgtggccgtgctggtcctggtcgcgcttggatttccctatgtcgttccatttttctattaa

SEQ ID NO: 606 - protein, 116 aa, Escherichia coli
MSEPQNGRGALFAGGLAAILASTCCLGPLVLVALGFSGAWIGNLTVLEPYRPLFIGAALVALFFAWKRIYRPVQACKPGEVCAIPQVRATYKLIFWIVAVLVLVALGFPYVVPFFY

SEQ ID NO: 607 - DNA, 474 bp, Enterobacter cloacae
gtgaaactatcactaatggtagctatatcgaagaatggagttatcgggaatggccctgatattccatggagtgccaaaggtgaacagctcctgtttaaagctattacctataaccaatggctgttggttggacgcaagacttttgaatcaatgggagcattacccaaccgaaagtatgcggtcgtaacacgttcaagttttacatctgacaatgagaacgtagtgatctttccatcaattaaagatgctttaaccaacctaaagaaaataacggatcatgtcattgtttcaggtggtggggagatatacaaaagcctgatcgatcaagtagatacactacatatatctacaatagacatcgagccggaaggtgatgtttactttcctgaaatccccagcaattttaggccagtttttacccaagacttcgcctctaacataaattatagttaccaaatctggcaaaagggttaa

SEQ ID NO: 608 - protein, 157 aa, Enterobacter cloacae
MKLSLMVAISKNGVIGNGPDIPWSAKGEQLLFKAITYNQWLLVGRKTFESMGALPNRKYAVVTRSSFTSDNENVVIFPSIKDALTNLKKITDHVIVSGGGEIYKSLIDQVDTLHISTIDIEPEGDVYFPEIPSNFRPVFTQDFASNINYSYQIWQKG

SEQ ID NO: 609 - DNA, 846 bp, Escherichia coli
atgaaaaaactaccaccaaatctctttttccgacttaatagagcagcaaatttattagaaatagaagtcgatgatcttctacttatgggagtatcaggctctatatttttgagcacaataattcaccagtatgaaggtgtactctatcaagcgggaaacttgccaccagaccacggcagcaaagacatagaaaacttattatttggttctattatttctactagagaagataccgaaagatatctaaatgaaggtgttttcgatggtatgaagtgcttagcaagtggattatggcacgttcctagtgatttcattgcttcccttgcaggggttaagagagcccctgacattccactcatattctcaccagcatatataaaaaaagaactagatatcacatcaggacgttactttttctacgattttcgcgaacatgataccaccgtatcgtctgtggaagatttgtatatatcaagaccgtgggttgaatatatagctgaaagcatggataaaaatcagccaatacccagcatactccatttgggttcacacgatctttatgaaaaggaatttaaaaacatagagcatggaaatagagcacgacatagcctgaaccgtgagaatagcattatggcgttgatttatgtgaaacggcactatccggaagagtgcaaagggaaaaacgggaaagaaaccaacgaagcgtgggcaaacgctacgatagaccactggccacatgtgggtggcgattatgatgaaccatctacagattatttaaagaagatcatatctgacatggacagattgccggaaaaacgtaccacggcaggaaagaagaaatcatga

SEQ ID NO: 610 - protein, 281 aa, Escherichia coli
MKKLPPNLFFRLNRAANLLEIEVDDLLLMGVSGSIFLSTIIHQYEGVLYQAGNLPPDHGSKDIENLLFGSIISTREDTERYLNEGVFDGMKCLASGLWHVPSDFIASLAGVKRAPDIPLIFSPAYIKKELDITSGRYFFYDFREHDTTVSSVEDLYISRPWVEYIAESMDKNQPIPSILHLGSHDLYEKEFKNIEHGNRARHSLNRENSIMALIYVKRHYPEECKGKNGKETNEAWANATIDHWPHVGGDYDEPSTDYLKKIISDMDRLPEKRTTAGKKKS

SEQ ID NO: 611 - DNA, 1107 bp, Escherichia coli
atgacaggaaatgtcccagtagtacttagtgaagcagaaatgaaatccattttgacactaatcacgagatttccatggaacgtggcaaaacctgttatttcagctcttggattagctcgtggtaaaggtagagatgctactcatggaaaaatactggaagaattaacagaattaaaggaaaagaatttaaataaatttaatgatatcataaggtctgtaaataatttgatatttggtcaattggtctacggtgataaagcttttttttgtttatcagtagacaaccaaataatttcctcgctaacaaaggctatgaaattaaagtgggatttatctgaacagccttctgtcgcctcagatgtaatcctttctgagcaggaaattaatgcgtcggggaagaataaaataaacttagttcattattctgagagcaataatcaggctttagctctatttagttccgttagagagcaaaaaattagagagcggatttcgcctaaaagtttaccgcagtacagtggctacgaagagatcattgctactaaaaaagaaaagcatcaatgttttgatgtgtgcatttttaataagaccaactctactatctctattttgatagatgcaggtattaatacaataggtgagagcgtcttgtttgcaaagagtactgtagtaagagaactttataatattataggtgctgagtttgcatcaaaagaaagagatttctttcccttgattgaaccaatctttaagcaagatcaaaaaccatactcaactcttaattataaagtttttgagctttcattccttacccctgaagggacaacacataaggaaaggaaaactgactccactaaagatttgagacaagatatcttcaatcaagaaggtattaaagccgtaggcaatatcggactttataggataggcatcagggttgagcgaacaaatcctttactacagttagcggacaatgtagaacttactataccaggaacgctaagacggtaccttggtggaagctctggttcaccagtgaattttgctatacttagtaaatgtatctctcgtgatgatttcgaaacgcttacgaagctgatactatag

SEQ ID NO: 612 - protein, 368 aa, Escherichia coli
MTGNVPVVLSEAEMKSILTLITRFPWNVAKPVISALGLARGKGRDATHGKILEELTELKEKNLNKFNDIIRSVNNLIFGQLVYGDKAFFCLSVDNQIISSLTKAMKLKWDLSEQPSVASDVILSEQEINASGKNKINLVHYSESNNQALALFSSVREQKIRERISPKSLPQYSGYEEIIATKKEKHQCFDVCIFNKTNSTISILIDAGINTIGESVLFAKSTVVRELYNIIGAEFASKERDFFPLIEPIFKQDQKPYSTLNYKVFELSFLTPEGTTHKERKTDSTKDLRQDIFNQEGIKAVGNIGLYRIGIRVERTNPLLQLADNVELTIPGTLRRYLGGSSGSPVNFAILSKCISRDDFETLTKLIL

SEQ ID NO: 613 - DNA, 429 bp, Escherichia coli
atgaaggatgctaacttggcaaagactatacaagacatatgctcagaacgcccagaagtgggagttttggcgtgcatgttttatgaaaaacttgctaagttagcagctcgctctcctaatatattcattagttataaccttttatttgatatagcgatttcgaataaggggggcgctaaagtggatgagcatgatatttacttggctatccaagttttgtgtaatccaaaagttaattttttgaaattaaactatcaatttatagacgatggtttcgatccagttaatataagcattgcggacgtgattgatgctgaagataatcaaggtttagagcatccatatactggtgagattgtgccagactacaaaaaatatgtatttcctttctttacagttattaatttcacaaaggaaggggcgtactaa

SEQ ID NO: 614 - protein, 142 aa, Escherichia coli
MKDANLAKTIQDICSERPEVGVLACMFYEKLAKLAARSPNIFISYNLLFDIAISNKGGAKVDEHDIYLAIQVLCNPKVNFLKLNYQFIDDGFDPVNISIADVIDAEDNQGLEHPYTGEIVPDYKKYVFPFFTVINFTKEGAY

SEQ ID NO: 615 - DNA, 648 bp, Escherichia coli
atgcttacaagtctggatgatttggagaaaaactttcatttgcagaaggttcactttgccattcaaaggattcaatttgcgttggagtcctattctaatttcaacagtcttgttcgaaaggagctggattacgctgtaagtaaattagagcaaaatggcaataaaattaactttgatctctctgaagatcagttaactctatatttgctttcgtatgttgaaaatagatatctggggctcgaagccagtcacgagaagaaccagagaggacattgtgatatatctattacccttgcagattatatctggcatggggaagctaaaaaacattcttcatatttatatctttttaaaggttatgcacaacttaccgagcggtatagtactgggactataaatagctcttcgggtggtttaattatttatacgaaaaacgcttcctgttctgacatgatggattcatggaaaacattcttatcaaagaatgcacctaggattcatgcttgtaaatccgttaatattattgattgcccaaaaaaccccttggttttttatagtcagcaccttcatactgtaagtaagctggattatcaagttgtgcattatcctgtatcattacatcataaacctatagaccctgatctatag

SEQ ID NO: 616 - protein, 215 aa, Escherichia coli
MLTSLDDLEKNFHLQKVHFAIQRIQFALESYSNFNSLVRKELDYAVSKLEQNGNKINFDLSEDQLTLYLLSYVENRYLGLEASHEKNQRGHCDISITLADYIWHGEAKKHSSYLYLFKGYAQLTERYSTGTINSSSGGLIIYTKNASCSDMMDSWKTFLSKNAPRIHACKSVNIIDCPKNPLVFYSQHLHTVSKLDYQVVHYPVSLHHKPIDPDL

SEQ ID NO: 617 - DNA, 1521 bp, Escherichia coli
atgagttgcttagatcaattatcttcagaaaataaaaaatccctattatcatcagtattttcaaagagttatttcctctggattggctctggattttcgtacaatttcggatatccaagttggggggccgtacttgaagaaatagcaaagcgaatagagtacccgttaaaattagattcatcacagcctctgcgtgctgcagaattacttttaagttatgcgatgagtgaatcatcaataaaagaatatgatttcaattcgctcgttgccaggacgattatagatttaaaaacagaaactaaagaaccaagatggcttaaaagattcaaactcttcgctcccaatacaattgtaacaactaactgggatgaggtgcttgaagaaacatttgagcatatggcaaataaaatcatcagaaaggatccattccctaaagtatcaacaaaagggaaaaatatcttcaaaattcatggtgacgtcggaaaacctgattcgattgttataacacaaagtcaatacttttcttttcagcgcgaagacacttatcttagccgaaaaatttacacattgttttcagaaatgtcccctatattcatcggttacagcttaaccgaccccaatataggtttcctttatgaagaagcattagcacatctgcatggaaaaaacccgccagcattcatggtaattcacccagatgcaaaccctttaactttcgaggagacaaagtatttatttaaatcaaaaaatatacacctgattaaagcaaccatagaagacttccttgcagatttatctcaggaatataaatcctttaaagaatcacctcatcgtttcaaccttgagcacgaacatgttcttcccaaaataaaaactgtaatggataccgttacgaaaggaaaaaaaaataaaaaagcggaactagaagccttatgtcctcaaagagctgcaagctgggccgtgacaaaagccataattgacattctaaagaaaccaatattgtacattcaattcggcggaaaacttctttctccagacaatattatcccctacagagagttcgatgctttagttaatgtagtcataacacttagcaacaatcacggttaccctgacgagcttatacgtcaagattttcatgcttctgttgtcaaaatgtgcatcgaaacagaaggggtttgggacttcaactatgctgaagtacctttctctaacattttaagaataagccctagccccggcactgaaagtttcgacaaaaaaatatcccatataatagaaattatgcgatggtcgtccccatctgaaatagggaagtgctgggcaacatggaatgtatttaaagaaaaacaagattggattagccacagtgatattgttggcattctttcgaaacttgaaaccgatggtgacttagaataccaacccagagataaaaaatggctaaacatcctgaaaaaatgccctcacgcaacggctgcagatatcaagagaattgatactctgataaccccagcttag

SEQ ID NO: 618 - protein, 506 aa, Escherichia coli
MSCLDQLSSENKKSLLSSVFSKSYFLWIGSGFSYNFGYPSWGAVLEEIAKRIEYPLKLDSSQPLRAAELLLSYAMSESSIKEYDFNSLVARTIIDLKTETKEPRWLKRFKLFAPNTIVTTNWDEVLEETFEHMANKIIRKDPFPKVSTKGKNIFKIHGDVGKPDSIVITQSQYFSFQREDTYLSRKIYTLFSEMSPIFIGYSLTDPNIGFLYEEALAHLHGKNPPAFMVIHPDANPLTFEETKYLFKSKNIHLIKATIEDFLADLSQEYKSFKESPHRFNLEHEHVLPKIKTVMDTVTKGKKNKKAELEALCPQRAASWAVTKAIIDILKKPILYIQFGGKLLSPDNIIPYREFDALVNVVITLSNNHGYPDELIRQDFHASVVKMCIETEGVWDFNYAEVPFSNILRISPSPGTESFDKKISHIIEIMRWSSPSEIGKCWATWNVFKEKQDWISHSDIVGILSKLETDGDLEYQPRDKKWLNILKKCPHATAADIKRIDTLITPA

SEQ ID NO: 619 - DNA, 183 bp, Escherichia coli
atgaaatggtttacaccatatgacattgtttctgcgtatctcgctggtgagatgacccgctaccaggttcgccagaatcgtaatacagcccgtcgccgtggctacccagagcgtgaaaaatgctttgacgacgcactaaaaattattgatgaactgcgtaaggcagaagcagagaaagaataa

SEQ ID NO: 620 - protein, 60 aa, Escherichia coli
MKWFTPYDIVSAYLAGEMTRYQVRQNRNTARRRGYPEREKCFDDALKIIDELRKAEAEKE

SEQ ID NO: 621 - DNA, 198 bp, Escherichia coli
atgatagaacgtttattgagcaacaattttgcagtgatgcgctatatgccgcattacacaaggcacagcgaaagtgatgtaaaagtgaagaaagctaacattgcacttttaagctacttttcattgaatttttacgtaggaattacacagggattaatcatcaattacattgaatttaagcctgttttagatgtttaa

SEQ ID NO: 622 - protein, 65 aa, Escherichia coli
MIERLLSNNFAVMRYMPHYTRHSESDVKVKKANIALLSYFSLNFYVGITQGLIINYIEFKPVLDV

SEQ ID NO: 623 - DNA, 375 bp, Escherichia coli
atgaaacatcggccaccgggaagctatactgtcgataaattaaacggaatcaagaggaactatggaaaactgggttatgaggggctggaatctcagtgcgttgatgctgacaggctcgaaaagcgaataaaggacattctcagtgtggtaagtcgcgcaccaagggaaagaattcccgtatcctgcccacccggagtgagacaaaaggtgcttatcgttgcatatttcagtgataaaatttcagccgataaaattatggctccccataagaaaaataacatcgaaaggactaaacagtttaacgggctctggtcttacaggctacgactgaaacaaatcattctggacaaaaaaagaaacagggcatcggtgtaa

SEQ ID NO: 624 - protein, 124 aa, Escherichia coli
MKHRPPGSYTVDKLNGIKRNYGKLGYEGLESQCVDADRLEKRIKDILSVVSRAPRERIPVSCPPGVRQKVLIVAYFSDKISADKIMAPHKKNNIERTKQFNGLWSYRLRLKQIILDKKRNRASV

SEQ ID NO: 625 - DNA, 330 bp, Escherichia coli
atgaaccagcgagaatcccatagagaaatcttttgtaagcgtttgaaagaagcgcgtacggctgctggtttgtctcaaaagaagctgggcattgctgccgggatcgacgaatttgtagcaagcactcgtatcaaccgatacgaaaaaggagttcatgaagcggatattcatactgcacaaaaattagcagaaacgttaaatgtgcctttagcatatttctacgtggaagatgatgaacttgctactatcgtgatgaattatgaaaatttatctgaagacaataaaaaaacaataataaaaattattgataaaaataatattacgaagtaa

SEQ ID NO: 626 - protein, 109 aa, Escherichia coli
MNQRESHREIFCKRLKEARTAAGLSQKKLGIAAGIDEFVASTRINRYEKGVHEADIHTAQKLAETLNVPLAYFYVEDDELATIVMNYENLSEDNKKTIIKIIDKNNITK

SEQ ID NO: 627 - DNA, 726 bp, Shigella sonnei
gtgagcaggcttgcgataaccacaatcgtattttctctttttttaacttcatgtagttgggatcctaatggtgctaaagctcaggaaaaatggctatcccaaaaaaatgaagaaaaacaagcgtacgataagcaagttgaggagagccagaaaagcaggcttcaaatacagcgcgaagaaaagtctcaatttgaagtttcacatccagaggttatcgttgatggtgttgggaacgagcttacaagtaagggtgcagaatctttgcgagatgcgtacaacagcattccattcgtaactcgttatccgggaaccacggaccctaacaaagtttatacctatgtcggtgactacaaattaaatttgcaactggttaacacatctgtgctttctcagatcgcagattgcaaacgcatttcagcgtatgccgatgttgatattaatcgtacttgcttcaatcaaattggaaatgatttgagtttgtttgcatctgtaattaaagacaaaaatattaccggaattgcaaaaaaagcagctctacgagattcaacttacggaaccaaaattgattttggtcatgctgcgcgtttagcaaaaatgcatgccactttatgccaaaagcagggcggtaaaggatttgtcaaaatgtcgactgtagctgtgccttgcggctcttcaggcgatgtaattaactatcgaagcgccggtaagatggggcttataaactga

SEQ ID NO: 628 - protein, 241 aa, Shigella sonnei
MSRLAITTIVFSLFLTSCSWDPNGAKAQEKWLSQKNEEKQAYDKQVEESQKSRLQIQREEKSQFEVSHPEVIVDGVGNELTSKGAESLRDAYNSIPFVTRYPGTTDPNKVYTYVGDYKLNLQLVNTSVLSQIADCKRISAYADVDINRTCFNQIGNDLSLFASVIKDKNITGIAKKAALRDSTYGTKIDFGHAARLAKMHATLCQKQGGKGFVKMSTVAVPCGSSGDVINYRSAGKMGLIN

SEQ ID NO: 629 - DNA, 321 bp, Escherichia coli
atgaatatccatttattttcagaagtattgttctgcgtatgggttatagctttgattgtgattttatttatagttgttaaatattacaggcgtgtccattacagactcaattcactgtctgaaacgataaagcgcacacagggcggtgttaataagcgaatatctgaaaacagagaactgcttgaacttataaagaatcaacatcctgaaattcttgatgaatatccgtgggtaagtggttggcttgattcacaggaaaagtttttggtcgctcttgctgataagtctggtatcgatatcaacaaatcaggacttatttga

SEQ ID NO: 630 - protein, 106 aa, Escherichia coli
MNIHLFSEVLFCVWVIALIVILFIVVKYYRRVHYRLNSLSETIKRTQGGVNKRISENRELLELIKNQHPEILDEYPWVSGWLDSQEKFLVALADKSGIDINKSGLI

SEQ ID NO: 631 - DNA, 261 bp, Shigella sonnei
atgctgatggcggggattcagttcaccgctggtgagcatgagttccagttgtttcatcagcagcggaaaggcctggtccagatggtacgcatccgcgtcgctgaaccggcctctgataccggcgcggtcggcaaggtaatacaaccggttaccctcctgcaccagacgggcgccaaaacagggtgttatggtgcagggcagcccccaccaggggcggttgttatagtcgtcgggataatttgtctcatggtgcgtgtctga

SEQ ID NO: 632 - protein, 86 aa, Shigella sonnei
MLMAGIQFTAGEHEFQLFHQQRKGLVQMVRIRVAEPASDTGAVGKVIQPVTLLHQTGAKTGCYGAGQPPPGAVVIVVGIICLMVRV

SEQ ID NO: 633 - DNA, 132 bp, Escherichia coli
atggtcataactgaagcatccgacgacgtggtgtctaccagagtgtcagatatgcaggaaaatatgagttccgacagaaatgcagtaaaaaaggagtctcgcactcctctccagaaaactccagggctgtaa

SEQ ID NO: 634 - protein, 43 aa, Escherichia coli
MVITEASDDVVSTRVSDMQENMSSDRNAVKKESRTPLQKTPGL

SEQ ID NO: 635 - DNA, 945 bp, Escherichia coli
atgattaaaaagctatcagtttttttgatggatacagtagcggcggtacgctgcgtgaaatctgataaaaaagcagggggaacggagaagatttttcacgtagtctccgataaagtgactattgatattagcaatgaacataaggagggtattgtgggagctacaaaagattgggttatgcaagtcgaggaaagtcgccgtgaggaatggatacgagaacggctttccagcccagatcttgaggaggattctgaagaatggcagttacttgaaaaggactatgacgagtatcaggactttctttctgatatggctatggaagaatatgaaaacgaaaaatggttaaaacagcatccacatacagaaatttataaaatagcaataaaccttttagaacaaataaaagaagagggaaaacaatctacaagtgaagttttcataaaaatgaaaatcgcatacattgtgacaataatggaaaactgtcttagcgaaatgattaaaagcgttgtattgtcacataacagatatgtagaaaatgccataagaaacataaatgaactgaaagcaaagaatatctctctatctgagttgataaataaagagtctaatgcaaacaaatatgtacaggagtacctttcagatattctttatcatagaatccaactggtagttgaaatatataaagcagtcctgcaacctaagcaatatccacgttttccactcaaaaatatcaatgaattgatgaaactgaggcatgacatagttcatcgtaacgggaaaacgaaaacaacggatgaaaagatacatacattcaatacagctacgctcaatgatgcgtttaaagttgtagaggagtttcttaataacatgatgaatttgatcagtgatgctgttgagcatcatgagaatgagcagatagccagagatcttgaagacgagttttga

SEQ ID NO: 636 - protein, 314 aa, Escherichia coli
MIKKLSVFLMDTVAAVRCVKSDKKAGGTEKIFHVVSDKVTIDISNEHKEGIVGATKDWVMQVEESRREEWIRERLSSPDLEEDSEEWQLLEKDYDEYQDFLSDMAMEEYENEKWLKQHPHTEIYKIAINLLEQIKEEGKQSTSEVFIKMKIAYIVTIMENCLSEMIKSVVLSHNRYVENAIRNINELKAKNISLSELINKESNANKYVQEYLSDILYHRIQLVVEIYKAVLQPKQYPRFPLKNINELMKLRHDIVHRNGKTKTTDEKIHTFNTATLNDAFKVVEEFLNNMMNLISDAVEHHENEQIARDLEDEF

SEQ ID NO: 637 - DNA, 1326 bp, Escherichia coli
atggcaacaaaaaaatacgaactaacaaaagaatacttttttcatggtgaattttggcaccaacttgatgataacaaaggaagattttctgcacgaattgaatattcaccgtaccatggtctgattctagattattgtatttctgacagtgaaagccccagaacatgtgaaatattatatggagtcttaaatactggagaaagatgtactctaattgggaaatttgatttcacacaagggaatattcattttggtaaagggattatccatactggaaggcatggatttcccataatgctattcaatgatttttatgcccccgactcaaagatagaatattgtgatttatccttgcacggattgcaagaatttatccaccctcacggttttttcactcaattgaaacatttagaacatccaatgtttatcgcaaaaggaaaccattggactcttcaacttgtcaaccatgtatcttttagcgtaattgatgatgatctattaaacataataaattgccaaaacaaagccgcactggataacataactcatcaactaaaaaagacaaaagaattatatccagatgcttttttctcaattagaaaagaacttattttctactttaggataaaatcatctaatgatttaggaataaaagaccacatatcaaagtgctgggatatttccgggttattttcaattcttctgaacaaaccgactcttcctgaagaaataaacataaagttcaagggaaatggttcgaagacaccatgtctcttaacaacggggtttgaacaaagaactattgacctggcgctgagggaaataaaacatcaactccttccaataaacaggaagcatattaatcttggaaagatattctgcaaatggttcaaaatagcagaaagatatatgccattgataataacatatcagtatgaaacaggttttcgaacactgcatcaagctcatactgatattatattgtttgcgactcagttagaagcaataaacaaaacaataggtggctcaaaaaatgaaaaatacatgaaacccattaatgaatatgcaagtttgtttcttattcaagagatagagctattttttaagaaattcaacaataaatctattggtgaaaatattgccacactcagaaatgaattagcacatgttgaccgcaaaaaggagttaatgaacatattgacgattggtgattatgttaaaattggaaactacctaaaaacaattgtaacatcttatctgctatcagatttaggaatcaataacattattattgaaaaatatcaggctcagacaattcaagaataa

SEQ ID NO: 638 - protein, 441 aa, Escherichia coli
MATKKYELTKEYFFHGEFWHQLDDNKGRFSARIEYSPYHGLILDYCISDSESPRTCEILYGVLNTGERCTLIGKFDFTQGNIHFGKGIIHTGRHGFPIMLFNDFYAPDSKIEYCDLSLHGLQEFIHPHGFFTQLKHLEHPMFIAKGNHWTLQLVNHVSFSVIDDDLLNIINCQNKAALDNITHQLKKTKELYPDAFFSIRKELIFYFRIKSSNDLGIKDHISKCWDISGLFSILLNKPTLPEEINIKFKGNGSKTPCLLTTGFEQRTIDLALREIKHQLLPINRKHINLGKIFCKWFKIAERYMPLIITYQYETGFRTLHQAHTDIILFATQLEAINKTIGGSKNEKYMKPINEYASLFLIQEIELFFKKFNNKSIGENIATLRNELAHVDRKKELMNILTIGDYVKIGNYLKTIVTSYLLSDLGINNIIIEKYQAQTIQE

SEQ ID NO: 639 - DNA, 264 bp, Escherichia coli
atgagtaatacatcctacaaacaaattatccctgcgacagactggtatttccgtcacgataatgtctccggtgtggcaggaaagtcaacagtataccaactggctgcatgggcgcttaaagaaaatggtgaggtagttggtctggtgacggttcgtgatgataatgggcgtcctaaactggttactcctccccctgtccctggtgattatttgcataaagaacaactcaccgatgatgaaaaagagtgggcgaagagacgctaa

SEQ ID NO: 640 - protein, 87 aa, Escherichia coli
MSNTSYKQIIPATDWYFRHDNVSGVAGKSTVYQLAAWALKENGEVVGLVTVRDDNGRPKLVTPPPVPGDYLHKEQLTDDEKEWAKRR

SEQ ID NO: 641 - DNA, 276 bp, Escherichia coli
atggattgtcgagccgtcttactgattgaggacaggaaaggcaaaataataatgagaatattcatcgtattagctggtcttttattgggatgctggaggttatttgataactacagatcctataaaaaaggaatttataaagaacatcgcaagatggctcctcctgtttattattatcgtggagatcatacgtttatcatacggatagtaattgattcacttttgaccctggtgatgattggttttgttgtctggttctggtttagaactgcttaa

SEQ ID NO: 642 - protein, 91 aa, Escherichia coli
MDCRAVLLIEDRKGKIIMRIFIVLAGLLLGCWRLFDNYRSYKKGIYKEHRKMAPPVYYYRGDHTFIIRIVIDSLLTLVMIGFVVWFWFRTA

SEQ ID NO: 643 - DNA, 597 bp, Escherichia coli
atggcatcagataatagatacagtattaacttcacgctatctgttttagaaaaaacagaagcaagcaaattaataaaagaacaagaaaaacaagagcatatagaaccttatggctatattttgcttataaaaaaagcagcgttgttagttctttcatttgcagcattatttgattttataatactttttggtttgattgctctcgccccaaaagaccctgattatgtagaaagagcaaaatttctttccattattacatttacactaatagctatatttatcgggttattatatatatatgattatttgatgaaaaaagtaatgaggactaactatttatcagaaataagagattctgaactaatgttacgtctcaaaataaatcgttcatacattgagcaaatcatgaaaattggtagttcgaaggttttctggaataacataaaaaaaacataccgtaagaaaggatttctatttatccagacaaaagaaaacagatgcataatcattccagaaagagtttttaaaaatggagaagaaaccaaaaaattatataattttgtaaaggagcaaatagcaaaaaacacaatagaatga

SEQ ID NO: 644 - protein, 198 aa, Escherichia coli
MASDNRYSINFTLSVLEKTEASKLIKEQEKQEHIEPYGYILLIKKAALLVLSFAALFDFIILFGLIALAPKDPDYVERAKFLSIITFTLIAIFIGLLYIYDYLMKKVMRTNYLSEIRDSELMLRLKINRSYIEQIMKIGSSKVFWNNIKKTYRKKGFLFIQTKENRCIIIPERVFKNGEETKKLYNFVKEQIAKNTIE

SEQ ID NO: 645 - DNA, 1041 bp, Shigella sonnei
atggcacagaacccgtttaaagcactaaatatcaatattgacaagattgagtctgctctgacgcagaatggcgtcacaaactattcctctaatgtaaaaaacgaaagagaaactcacatatctggcacatataaaggaatagacttcttaataaaactaatgccatcaggcggaaataccactatcggaagagcgtctgggcaaaataacacttactttgatgaaatcgccttgattataaaagaaaactgtttgtattcagacacaaagaactttgaatacaccattccaaaattcagtgatgatgacagggcaaatctatttgaatttctttctgaagaggggataacaataacagaagataataataacgatcctaattgtaaacaccaatatattatgaccaccagcaatggtgacagggtcagggcaaaaatttacaagcgcggctctattcaattccaaggaaaataccttcaaatcgcgagtttgattaacgatttcatgtgctcaatactaaacatgaaagagattgtcgaacaaaaaaataaagaatttaatgttgacataaaaaaagaaactattgagtccgagttgcatagcaaactaccaaaaagcatcgataaaatccatgaagatatcaaaaaacagctatcatgctcgctaataatgaaaaaaatagatgtcgaaatggaagattactcaacatactgcttctctgcattaagagccatagaaggctttatatatcaaatacttaatgatgtttgcaatccatcatcatcaaagaaccttggcgaatacttcactgaaaacaaacccaaatatataatcagagaaatacaccaagaaactataaatggtgaaatagcggaagttttgtgtgaatgctacacttactggcatgagaacaggcatggtttgtttcatatgaaaccaggaatagctgacacgaagacaattaacaaattagaatcaatcgcaatcatcgataccgtttgccaattaatagatggtggcgtagctaggttgaaattatga

SEQ ID NO: 646 - protein, 346 aa, Shigella sonnei
MAQNPFKALNINIDKIESALTQNGVTNYSSNVKNERETHISGTYKGIDFLIKLMPSGGNTTIGRASGQNNTYFDEIALIIKENCLYSDTKNFEYTIPKFSDDDRANLFEFLSEEGITITEDNNNDPNCKHQYIMTTSNGDRVRAKIYKRGSIQFQGKYLQIASLINDFMCSILNMKEIVEQKNKEFNVDIKKETIESELHSKLPKSIDKIHEDIKKQLSCSLIMKKIDVEMEDYSTYCFSALRAIEGFIYQILNDVCNPSSSKNLGEYFTENKPKYIIREIHQETINGEIAEVLCECYTYWHENRHGLFHMKPGIADTKTINKLESIAIIDTVCQLIDGGVARLKL

SEQ ID NO: 647 - DNA, 381 bp, Shigella sonnei
atgaaaaaagataaaaaatatcaaatagaagcaataaaaaataaagataaaactttatttattgtctatgctactgatatttatagcccgagcgaatttttctcaaaaatcgaatccgacttgaagaaaaagaaaagcaagggtgatgttttttttgatttaataattcctaacggtggaaaaaaagatcgttacgtctatacgtcatttaatggcgagaagttttcaagttacacattaaacaaagttacgaaaactgatgaatataatgatttatctgagctctcggcttcgttctttaaaaaaaactttgataagatcaacgtaaaccttctatccaaagccacatcatttgctttgaaaaaaggcattccaatataa

SEQ ID NO: 648 - protein, 126 aa, Shigella sonnei
MKKDKKYQIEAIKNKDKTLFIVYATDIYSPSEFFSKIESDLKKKKSKGDVFFDLIIPNGGKKDRYVYTSFNGEKFSSYTLNKVTKTDEYNDLSELSASFFKKNFDKINVNLLSKATSFALKKGIPI

SEQ ID NO: 649 - DNA, 228 bp, Escherichia coli
atgatccgctgccatcttgctcggctcatgggcgaacataagatgcgaatagccgatgttgtcagagaaactggcctgagtcgcaacactatcactttgctttacaaagagacggctcagaaggttgacctgcatacattagaaaggctttgcgtgctttttgactgtgaaatacacgatttactgcaaaaggttcctgcttcgcagaatcgtacagagaaaaattaa

SEQ ID NO: 650 - protein, 75 aa, Escherichia coli
MIRCHLARLMGEHKMRIADVVRETGLSRNTITLLYKETAQKVDLHTLERLCVLFDCEIHDLLQKVPASQNRTEKN

SEQ ID NO: 651 - DNA, 420 bp, Escherichia coli
atgaccaccattaccaaagaacgcgcggagattagatcattcatcactggcttcctgagcgacccggcgcacaataaccaatcctcagacagcctgcttgccaatgtgtttcgtatcgcactggcatcgctggaagcagagccggtggcgtggaaggtaacattcacgcaaattgaccgtgaatataacacgttcactggtatgtatcctgacaaagcagaagtcgaacggtgggtgcggctgcataaagcatgtaattttcgggcagatataacaccgctttataccgcagccagcgccggtatctgtgccggaagtagtcggctgggaagatgtgccagaggaaatcacggaagacgacattgctctggcatccgcatgggcgattggcttcaaccagtgccgcgcagcaatgcttaa

SEQ ID NO: 652 - protein, 139 aa, Escherichia coli
MTTITKERAEIRSFITGFLSDPAHNNQSSDSLLANVFRIALASLEAEPVAWKVTFTQIDREYNTFTGMYPDKAEVERWVRLHKACNFRADITPLYTAASAGICAGSSRLGRCARGNHGRRHCSGIRMGDWLQPVPRSNA

SEQ ID NO: 653 - DNA, 408 bp, Enterobacter cloacae
atgtcaaacactcttcagccccgcagggcgcgggcgtcctactcaatggactttaagctggctctcgtcgaaaagtcatatcagcctggagcctgtgttgcccggttggcgcgggataatggaattaatgacaatctgctgtttacctggcgccagcgttacagacatcttctgcccgatgaaatacaacggtcaatcagagagcaagactctgttatccccgttgtcctgcctgatatggccctgtcacaccatgctgagccgcactatgaacccgccgctccagcctgccgcgaggccatgacatgcgaggtgactgtcggcggtgccagcctgcgtctgtccggggatttatcacctgcacttctgaaaacgctgatccgcgagctgaccgggaggagccgatga

SEQ ID NO: 654 - protein, 135 aa, Enterobacter cloacae
MSNTLQPRRARASYSMDFKLALVEKSYQPGACVARLARDNGINDNLLFTWRQRYRHLLPDEIQRSIREQDSVIPVVLPDMALSHHAEPHYEPAAPACREAMTCEVTVGGASLRLSGDLSPALLKTLIRELTGRSR

SEQ ID NO: 655 - DNA, 498 bp, Escherichia coli
atgaactcggaatcagtacgcatttatctcgttgctgcgatgggagccaatcgggttattggcaatggtcctaatatcccctggaaaattccgggtgagcagaagatttttcgcagactcactgagggaaaagtcgttgtcatggggcgaaagacctttgagtctatcggcaagcctctaccgaaccgtcacacattggtaatctcacgccaagctaactaccgcgccactggctgcgtagttgtttcaacgctgtcgcacgctatcgctttggcatccgaactcggcaatgaactctacgtcgcgggcggagctgagatatacactctggcactacctcacgcccacggcgtgtttctatctgaggtacatcaaaccttcgagggtgacgccttcttcccaatgctcaacgaaacagaattcgagcttgtctcaaccgaaaccattcaagctgtaattccgtacacccactccgtttatgcgcgtcgaaacggctaa

SEQ ID NO: 656 - protein, 165 aa, Escherichia coli
MNSESVRIYLVAAMGANRVIGNGPNIPWKIPGEQKIFRRLTEGKVVVMGRKTFESIGKPLPNRHTLVISRQANYRATGCVVVSTLSHAIALASELGNELYVAGGAEIYTLALPHAHGVFLSEVHQTFEGDAFFPMLNETEFELVSTETIQAVIPYTHSVYARRNG

SEQ ID NO: 657 - DNA, 150 bp, Klebsiella oxytoca
atgccatctgaacatgatgaacaacgggatgttgctgatacgcagcttcccggcgagtatgacctttttgatttaatggcgaaggttactgaagagaacctgcacgccccggtggattccgggccacctgtcggccgggaagcgttatag

SEQ ID NO: 658 - protein, 49 aa, Klebsiella oxytoca
MPSEHDEQRDVADTQLPGEYDLFDLMAKVTEENLHAPVDSGPPVGREAL

SEQ ID NO: 659 - DNA, 264 bp, Escherichia coli
atgatctctaaggttctatgggcagataaggcattatctgatcgagagactatctttgagtctaacgataaggtttctggtttgtcgtatgcaaaatcagaagatgcaaaaattaaacgtgctgtttctacgataaaacgaaacaacaaagtaggcagaaatgacctggatgagcgaggttatgtctatgttctacctaaaagatacaagattttgtatcggctgactgaggagcatatttttattgagcgcgttttctactga

SEQ ID NO: 660 - protein, 87 aa, Escherichia coli
MISKVLWADKALSDRETIFESNDKVSGLSYAKSEDAKIKRAVSTIKRNNKVGRNDLDERGYVYVLPKRYKILYRLTEEHIFIERVFY

SEQ ID NO: 661 - DNA, 903 bp, Shigella sonnei
atgattgcggttgatattgcgcttgcaacctacaatggtgctaattttattcggcaacagattgaatctatccagaaacaaacttatagaaattggcgtcttataataagtgatgataactcgagtgatgatactgttgatattattaaggatatgatgtctaacgacagtcgtatctatttggtaggaaataaaagacaaggaggggttattcagaactttaattatgctctttcacaaactacatctgaaattgtgttactatgtgaccaggatgacatttggccggaggagcgtctggaaattcttatagataaatttaaggccttgcagcgtaatgattttgttccggcaatgatgtttactgatttgaaattagtagacgaaaataattgtttgattgcagaaagtttttatcgaacgaataatattaatccacaagataatctgaaaaataataatcttctctggcgttcaacggtatatggctgtacttgcatcatgaataagaaacttgttgatattgcattgcctatacctacatatgcacatatgcatgatcaatggttggcattattagcgaagcaatatggtaacattttttatttcgactatgcgtctgttcgttataggcaacattctacaaatgttgttggtggtagaaataaaacgccatttcaaaaatttaattccatacaaaaaaacctaaaaaggattaatttgctagtggatagaactgttgctttaattaaatcaaataacgatttctatccagggaataaaatggaaaataaaattgattacttaaaatttggagtgaatgaagtattaccttatctttttaaaggaaacaagaaagttttttcactttgtgtattaattagtttggcattacaaaaatga

SEQ ID NO: 662 - protein, 300 aa, Shigella sonnei
MIAVDIALATYNGANFIRQQIESIQKQTYRNWRLIISDDNSSDDTVDIIKDMMSNDSRIYLVGNKRQGGVIQNFNYALSQTTSEIVLLCDQDDIWPEERLEILIDKFKALQRNDFVPAMMFTDLKLVDENNCLIAESFYRTNNINPQDNLKNNNLLWRSTVYGCTCIMNKKLVDIALPIPTYAHMHDQWLALLAKQYGNIFYFDYASVRYRQHSTNVVGGRNKTPFQKFNSIQKNLKRINLLVDRTVALIKSNNDFYPGNKMENKIDYLKFGVNEVLPYLFKGNKKVFSLCVLISLALQK

SEQ ID NO: 663 - DNA, 372 bp, Shigella sonnei
atggaaccccttcgtgaaataagaaatcgactgcttaacggctggcaactatcaaaactgcatacttttgaagtggctgccaggcatcagtccttcgctctcgcggcagaggaattgtcgctgagccccagtgcggtaagtcaccgtatcaatcagctggaagaagaattaggtattcagttgtttgttcgttcccatcgcaaagtggaattaacgcacgaggggaaacgtgtttattgggcgctaaaatcgtcgctggataccctgaatcaggaaattctggatatcaaaaatcagggaattatcgggaacgttaacgctgtattcccggccctctatcgcccaatgctggttggtgcccgcattaggtga

SEQ ID NO: 664 - protein, 123 aa, Shigella sonnei
MEPLREIRNRLLNGWQLSKLHTFEVAARHQSFALAAEELSLSPSAVSHRINQLEEELGIQLFVRSHRKVELTHEGKRVYWALKSSLDTLNQEILDIKNQGIIGNVNAVFPALYRPMLVGARIR

SEQ ID NO: 665 - DNA, 372 bp, Escherichia coli
atgaaaaatcaactttatagccgtcaaggaatatacgacataatcagaagccactatttaagaaactttccatatacgattcaatttgaagcgcttaatgcaataaatgaacacattagccttataattgatagcgcatcaatacaaaaaagtgaaagtggtgagtacgtatttatcaataataatcctaatatggaagttgatgacccatttgaaagcacagagagaaatcttgctgcttatctatcaaagtctagtggtgttgaagcgttattccaagatgtgaacgcattacaaaaatggttgctccaatatggatttatccatggtggtatagcgactgaaaaaatgctggttacgaataaactataa

SEQ ID NO: 666 - protein, 123 aa, Escherichia coli
MKNQLYSRQGIYDIIRSHYLRNFPYTIQFEALNAINEHISLIIDSASIQKSESGEYVFINNNPNMEVDDPFESTERNLAAYLSKSSGVEALFQDVNALQKWLLQYGFIHGGIATEKMLVTNKL

SEQ ID NO: 667 - DNA, 468 bp, Escherichia coli
atgacagtaaatcttggcgatgtgtttggtggtttggcgttttttctctcaatctatgcaacaattaaaaccgtaaagttcaatgaaagacaaaaagcgttaatagaagcgcaagaaaggttaacgaatctccaacttactaaagaaaaaaatgagttggaaagttcaaagaaagctgatattagtgcaagcatggtctctgtaggaaatagagaatataaactaagagttattaataaagggaaggtttctgcgaaaaatgtaagaatagaatttcccgataataattcaccagtatcaatgagtgacgttaaaagcaaatttccgcttgagtatctcgcgacagatcaaccagtcgatctcattgcgtcaggagagttaggtcgagcaaggaaatttactgtaagactaatgtgggatgacgatttcaaggatgataatgaaattgttttacatataacatattga

SEQ ID NO: 668 - protein, 155 aa, Escherichia coli
MTVNLGDVFGGLAFFLSIYATIKTVKFNERQKALIEAQERLTNLQLTKEKNELESSKKADISASMVSVGNREYKLRVINKGKVSAKNVRIEFPDNNSPVSMSDVKSKFPLEYLATDQPVDLIASGELGRARKFTVRLMWDDDFKDDNEIVLHITY

SEQ ID NO: 669 - DNA, 672 bp, Shigella sonnei
atgactcctctattttcaaagaaattaagcaagataataagttatagcctattaattttcagtagcttctttttcgctttttctgaaaccatattaagtgcactccttgcaattttgccagaaggatccattgccagtgaaaaattaagtttttacttagcaaccgagcaatacaggccacagttatctattgggagtggcactattcttgacattatacttatttttctgatatgtgtaagttttaaacgaataaagaaatatatgctcgctaattataatgctgcaaatgagatattgcttattggttgctgtctttatatttctttcggtatttttatcgggaaaatgatgccagttatgactcgcattggttggtatggttttccatttgttatagtacttctttatattaacttgggttattcagaatattttaagaggtatataaataaaagagggtgtgggtatagcaaattattaattgctttttattttttgctacaaattttgcgaccattaacatatgattatagctattataatataatgcaccaggatactttgctgaataggtttgatgcattagatgatgcatcattaagacaatcagcgaagagaaaatgtttcgatttgggaaagataggatatggtttcttatgtagtatataa

SEQ ID NO: 670 - protein, 223 aa, Shigella sonnei
MTPLFSKKLSKIISYSLLIFSSFFFAFSETILSALLAILPEGSIASEKLSFYLATEQYRPQLSIGSGTILDIILIFLICVSFKRIKKYMLANYNAANEILLIGCCLYISFGIFIGKMMPVMTRIGWYGFPFVIVLLYINLGYSEYFKRYINKRGCGYSKLLIAFYFLLQILRPLTYDYSYYNIMHQDTLLNRFDALDDASLRQSAKRKCFDLGKIGYGFLCSI

SEQ ID NO: 671 - DNA, 882 bp, Escherichia coli
atgtctgaaacatcaaaatttatagatgcagttaagaagtactattcagatgataaaaatacgcttgatttttattcagaactgtttcgtgaaatggaacaaaaggacctattagatagtaactttatctcacaaatgaataataatgagaattcccgacagagattatcagaattactgatgtttaaatattgtttgacatcttctgtaggggcgatatcgagcgaagatagtggacctgacattaagtttaattttaacgacagaaaagtaaatattgaagttgttacgccatttataactaaacaagaggaggcttcttggagtgtttttgaattttctttgacagaaagcaaaggctacaaaaggagtcaaaatattcccagtatagatactttacatcccaggataacaggttctttgaaggaaaaactaataaaatataaaaaatattttgctgcgaataaagtcaatgatgatgatataaatatcatctgcataaatgttggttttattgaaaatatagattgtgtggatttccctaatttaaaaaatttgttctataagcaagaaataatccgtccagaacgtaatagtgaagggggtatatcattgtcgatagaaaaacatgatttcatagtaaaaaaagataacggtgaagcttttagaacaagttacattgataatgaagaggaatgtttgcatatagatggagtttggcttataaactgcaatgaaagaagttttaaggagattaaaaaatttaaatatgatgattttaaaatatatgaaaatgttatttatcaaaaaagtaattcaaaaataccagatgaattgctgacttctctgagcataaataaacccaaacgagtttgcgtataa

SEQ ID NO: 672 - protein, 293 aa, Escherichia coli
MSETSKFIDAVKKYYSDDKNTLDFYSELFREMEQKDLLDSNFISQMNNNENSRQRLSELLMFKYCLTSSVGAISSEDSGPDIKFNFNDRKVNIEVVTPFITKQEEASWSVFEFSLTESKGYKRSQNIPSIDTLHPRITGSLKEKLIKYKKYFAANKVNDDDINIICINVGFIENIDCVDFPNLKNLFYKQEIIRPERNSEGGISLSIEKHDFIVKKDNGEAFRTSYIDNEEECLHIDGVWLINCNERSFKEIKKFKYDDFKIYENVIYQKSNSKIPDELLTSLSINKPKRVCV

SEQ ID NO: 673 - DNA, 1026 bp, Escherichia coli
atgaccgaacagcgcaaaggctatgagaactttgtttatcagaacggcgtttacgatctcggcaccaaaggtgatatgcgacgtaacgaacgtaacctgatgtggaacctcgatccctacattcaaacgcactggcagctcacctcagccctggggctggacgccggggcgcgctatagctcggtatggtttgattccaacgatcgttatgttgtaggtaaaaatggtgatgatagcggcgaagcgagctatcacaagtggcttccggcggcagcgctgaagtatgccatgacgccgcagtggaacgtttacctctctgccgggaggggatttgaaacgccgaccattaacgagctgtcctatcgtcccgatggtcagtccgggcttaactttgctctgcaaccggccactaacaccaccgttgaagcaggcagtaaatggcaggtgggcaccgggatggcgagcctgagcgtcttcaatacggacacgaaaaatgaaattgtcgttgccgccagcgacaatggccgtacgtcctatcagaacgcgggcaagacgcgccgccgcggggtcgaactgggatgggatcagcaatttgcgcccgcctggcgcgccaaactggcgtggacgctgctggatgcgacctaccgtgaaaacgccggcgatgctattcagagcggcaatcggatcccggggattgcacgtaatagcgcctatgcctcctttggctgggtgccggaagagggatggtacgctggcgctgaagtccgctatatgagcgatattcaggtcaacgatgccaatagcgagcaggctccagcctatacggtgacggcactgaataccggctataaatatgtgctagataactggaccgtcgacctctatacgcgcgttgataacctgtttgataagcgctacgtcggctctgttatcgtcaacgagagcaacggacgctattatgaaccggcgccgggccgtaactatggcgttgggctatcggtcagctatcagtttgattcgctgtaa

SEQ ID NO: 674 - protein, 341 aa, Escherichia coli
MTEQRKGYENFVYQNGVYDLGTKGDMRRNERNLMWNLDPYIQTHWQLTSALGLDAGARYSSVWFDSNDRYVVGKNGDDSGEASYHKWLPAAALKYAMTPQWNVYLSAGRGFETPTINELSYRPDGQSGLNFALQPATNTTVEAGSKWQVGTGMASLSVFNTDTKNEIVVAASDNGRTSYQNAGKTRRRGVELGWDQQFAPAWRAKLAWTLLDATYRENAGDAIQSGNRIPGIARNSAYASFGWVPEEGWYAGAEVRYMSDIQVNDANSEQAPAYTVTALNTGYKYVLDNWTVDLYTRVDNLFDKRYVGSVIVNESNGRYYEPAPGRNYGVGLSVSYQFDSL

SEQ ID NO: 675 - DNA, 876 bp, Escherichia coli
atggtgacaaagagagtgcaacggatgatgttcgcggcggcggcgtgcattccgctgctgctgggcagcgcgccgctttatgcgcagacgagtgcggtgcagcaaaagctggcggcgctggagaaaagcagcggagggcggctgggcgtcgcgctcatcgataccgcagataatacgcaggtgctttatcgcggtgatgaacgctttccaatgtgcagtaccagtaaagttatggcggccgcggcggtgcttaagcagagtgaaacgcaaaagcagctgcttaatcagcctgtcgagatcaagcctgccgatctggttaactacaatccgattgccgaaaaacacgtcaacggcacaatgacgctggcagaactgagcgcggccgcgttgcagtacagcgacaataccgccatgaacaaattgattgcccagctcggtggcccgggaggcgtgacggcttttgcccgcgcgatcggcgatgagacgtttcgtctggatcgcactgaacctacgctgaataccgccattcccggcgacccgagagacaccaccacgccgcgggcgatggcgcagacgttgcgtcagcttacgctgggtcatgcgctgggcgaaacccagcgggcgcagttggtgacgtggctcaaaggcaatacgaccggcgcagccagcattcgggccggcttaccgacgtcgtggactgtgggtgataagaccggcagcggcggctacggcaccaccaatgatattgcggtgatctggccgcagggtcgtgcgccgctggttctggtgacctattttacccagccgcaacagaacgcagagagccgccgcgatgtgctggcttcagcggcgagaatcatcgccgaagggctgtaa

SEQ ID NO: 676 - protein, 291 aa, Escherichia coli
MVTKRVQRMMFAAAACIPLLLGSAPLYAQTSAVQQKLAALEKSSGGRLGVALIDTADNTQVLYRGDERFPMCSTSKVMAAAAVLKQSETQKQLLNQPVEIKPADLVNYNPIAEKHVNGTMTLAELSAAALQYSDNTAMNKLIAQLGGPGGVTAFARAIGDETFRLDRTEPTLNTAIPGDPRDTTTPRAMAQTLRQLTLGHALGETQRAQLVTWLKGNTTGAASIRAGLPTSWTVGDKTGSGGYGTTNDIAVIWPQGRAPLVLVTYFTQPQQNAESRRDVLASAARIIAEGL

SEQ ID NO: 677 - DNA, 126 bp, Escherichia coli
atgaaggtggtgtacctggctatccaggcggcgaccaagaaatggacgatgccgatccgcaactggaagccggccatgaaccgttttatgatcgaatttggtgaccgtttaaatggccacctttaa

SEQ ID NO: 678 - protein, 41 aa, Escherichia coli
MKVVYLAIQAATKKWTMPIRNWKPAMNRFMIEFGDRLNGHL

SEQ ID NO: 679 - DNA, 378 bp, Escherichia coli
gtgtctgccgccaaagctcttgcctatgcactttgtgacaagttggaaagcaaaaaagttgatgaagtcgtacgaaatcttgtttctagcggctggaatattagggaagtggcctgggaagcttcgtcctttgatcatgaaatgccctactttgacacggggcgggacttcgatattggatttcctgacacgctgtcatccaagattgagtttttgaccgcgaatggatcaatcgtccaagcacgtgctcgcctgcacttcaagcaggctctaatttttgccaaggcgtccaaacatgtcgccgcgctcaagaactcattggattactactatggatcgtctgtaatcccccctcaaaaccacggaggctatttgtag

SEQ ID NO: 680 - protein, 125 aa, Escherichia coli
MSAAKALAYALCDKLESKKVDEVVRNLVSSGWNIREVAWEASSFDHEMPYFDTGRDFDIGFPDTLSSKIEFLTANGSIVQARARLHFKQALIFAKASKHVAALKNSLDYYYGSSVIPPQNHGGYL

SEQ ID NO: 681 - DNA, 372 bp, Escherichia coli
gtgtcatacgaacctccaagagacggttacacaaacgggtacattgttgatgtcatgtatgacaatcgcccaagtaagtatccagctgtgttcagaacgtacgtccgaattccagactatgtcgaactagataacgcggaggagctggccgacgcaatcattcgagaggttgagttaaaggaggcatggctcacaagggtcttggggaactcagccgatcctgacgcttctgtgggcaagtgggaccggcgcctagcgcagtgcggtggtattgatgagatgtcaagtggggtgcaggcaacatacttcagtccaaacggtcagctggtcggcttagtggcatacattgatgccgaatggatggatgaatag

SEQ ID NO: 682 - protein, 123 aa, Escherichia coli
MSYEPPRDGYTNGYIVDVMYDNRPSKYPAVFRTYVRIPDYVELDNAEELADAIIREVELKEAWLTRVLGNSADPDASVGKWDRRLAQCGGIDEMSSGVQATYFSPNGQLVGLVAYIDAEWMDE

SEQ ID NO: 683 - DNA, 498 bp, Escherichia coli
atgcgcgatctgttgaaggtggttctaagcctcgtacttgcgatggcatcggggcaggcacttgctgacctgccaattgttttagtggatgaagctcgtcttccctatgactactccccatccaactacgacatttctccaagcaactacgacaactccataagcaattacgacaatagtccatcaaattacgacaactctgagagcaactacgataatagttcatccaattacgacaatagtcgcaacggaaatcgtaggcttatatatagcgcaaatgggtctcgcactttcgccggctactacgtcattgccaacaatgggacaacgaacttcttttccacatctggcaaaaggatgttctacaccccaaaaggggggcgcggcgtctatggcggcaaagatgggagcttctgcggggcattggtcgtcataaatggccaattttcgcttgccctgacagataacggcctgaagatcatgtatctaagcaactag

SEQ ID NO: 684 - protein, 165 aa, Escherichia coli
MRDLLKVVLSLVLAMASGQALADLPIVLVDEARLPYDYSPSNYDISPSNYDNSISNYDNSPSNYDNSESNYDNSSSNYDNSRNGNRRLIYSANGSRTFAGYYVIANNGTTNFFSTSGKRMFYTPKGGRGVYGGKDGSFCGALVVINGQFSLALTDNGLKIMYLSN

SEQ ID NO: 685 - DNA, 525 bp, Acinetobacter baumannii
atgaagatttcggtgatccctgagcaggtggcggaaacattggatgctgagaaccatttcattgttcgtgaagtgttcgatgtgcacctatccgaccaaggctttgaactatctaccagaagtgtgagcccctaccggaaggattacatctcggatgatgactctgatgaagactctgcttgctatggcgcattcatcgaccaagagcttgtcgggaagattgaactcaactcaacatggaacgatctagcctctatcgaacacattgttgtgtcgcacacgcaccgaggcaaaggagtcgcgcacagtctcatcgaatttgcgaaaaagtgggcactaagcagacagctccttggcatacgattagagacacaaacgaacaatgtacctgcctgcaatttgtacgcaaaatgtggctttactctcggcggcattgacctgttcacgtataaaactagacctcaagtctcgaacgaaacagcgatgtactggtactggttctcgggagcacaggatgacgcctaa

SEQ ID NO: 686 - protein, 174 aa, Acinetobacter baumannii
MKISVIPEQVAETLDAENHFIVREVFDVHLSDQGFELSTRSVSPYRKDYISDDDSDEDSACYGAFIDQELVGKIELNSTWNDLASIEHIVVSHTHRGKGVAHSLIEFAKKWALSRQLLGIRLETQTNNVPACNLYAKCGFTLGGIDLFTYKTRPQVSNETAMYWYWFSGAQDDA

SEQ ID NO: 687 - DNA, 327 bp, Escherichia coli
atgctccttaaggaactcgatgcgtacgccgcgctgggtgaggccctgcaccaggcggcgcaggtcgtcgaggttgcgcgccagacgatccatgctgtgcaccacgaccgtgtcgccttcgcgcacgaaggcgagcagccgttccagttcgggccgccgtgtgtccttgcccgacgccttgtcggtgaacactttatccacctggatctgttcgagctgccgttctgggttctggtcgaagctgctgacgcggacgtaaccgatgcgctgaccgtgcaaggtatcctcctgagggaaatgtgtcaggaagaaatctatgacccttga

SEQ ID NO: 688 - protein, 108 aa, Escherichia coli
MLLKELDAYAALGEALHQAAQVVEVARQTIHAVHHDRVAFAHEGEQPFQFGPPCVLARRLVGEHFIHLDLFELPFWVLVEAADADVTDALTVQGILLREMCQEEIYDP

SEQ ID NO: 689 - DNA, 261 bp, Escherichia coli
gtgcacccgataattaaggtcatgctggtgggcggtaaggcggacgggctgttggtcagcgtcgccgatgacgcgaccgaagtctcggtgacgcctgcgcagtacggtgcgctatccgggcaatcgttgagctaccgaattgttagccaaaccattgacgatgaacgctatttttttggcgttttcagcgacgcccatcaggatagcgataagctgacgcgggtcgccctgacccgtggaatgaaaaaaatgttctgttaa

SEQ ID NO: 690 - protein, 86 aa, Escherichia coli
MHPIIKVMLVGGKADGLLVSVADDATEVSVTPAQYGALSGQSLSYRIVSQTIDDERYFFGVFSDAHQDSDKLTRVALTRGMKKMFC

SEQ ID NO: 691 - DNA, 861 bp, Escherichia coli
atgcgttatattcgcctgtgtattatctccctgttagccaccctgccgctggcggtacacgccagcccgcagccgcttgagcaaattaaactaagcgaaagccagctgtcgggccgcgtaggcatgatagaaatggatctggccagcggccgcacgctgaccgcctggcgcgccgatgaacgctttcccatgatgagcacctttaaagtagtgctctgcggcgcagtgctggcgcgggtggatgccggtgacgaacagctggagcgaaagatccactatcgccagcaggatctggtggactactcgccggtcagcgaaaaacaccttgccgacggcatgacggtcggcgaactctgcgccgccgccattaccatgagcgataacagcgccgccaatctgctactggccaccgtcggcggccccgcaggattgactgcctttttgcgccagatcggcgacaacgtcacccgccttgaccgctgggaaacggaactgaatgaggcgcttcccggcgacgcccgcgacaccactaccccggccagcatggccgcgaccctgcgcaagctgctgaccagccagcgtctgagcgcccgttcgcaacggcagctgctgcagtggatggtggacgatcgggtcgccggaccgttgatccgctccgtgctgccggcgggctggtttatcgccgataagaccggagctggcgagcggggtgcgcgcgggattgtcgccctgcttggcccgaataacaaagcagagcgcattgtggtgatttatctgcgggataccccagcgagcatggccgagcgaaatcagcaaatcgccgggatcggcgcggcgctgatcgagcactggcaacgctaa

SEQ ID NO: 692 - protein, 286 aa, Escherichia coli
MRYIRLCIISLLATLPLAVHASPQPLEQIKLSESQLSGRVGMIEMDLASGRTLTAWRADERFPMMSTFKVVLCGAVLARVDAGDEQLERKIHYRQQDLVDYSPVSEKHLADGMTVGELCAAAITMSDNSAANLLLATVGGPAGLTAFLRQIGDNVTRLDRWETELNEALPGDARDTTTPASMAATLRKLLTSQRLSARSQRQLLQWMVDDRVAGPLIRSVLPAGWFIADKTGAGERGARGIVALLGPNNKAERIVVIYLRDTPASMAERNQQIAGIGAALIEHWQR

SEQ ID NO: 693 - DNA, 669 bp, Escherichia coli
ttgcaacagtgcctccgtcgggacgtcagtaaactggaggagcaggggctgctggtcagcgtctcgggcggcgtgcgcgccgtcagccggctggctgcggaacccagtcatctggtgaaaagcacgctgcagagtgaggagaaacaggcgatcggcgcgctggcggcgagtcatatcgctaaaaacagttgcatctatctggatgccgggactaccaccctggcgctggcgcgggcgatcctcgaccggaacgatctccaggtggtcaccaatgattttgagataacccagctgctgatcgatgccagccagtgcggcgtgatccacaccggcggcactctgtgccgggagaaccgctcctgcgtgggcgaatcggcggcgcgtacgttacgccacctggctatcgatacggcctttatctccgccagcggctgggacagtcgcgggatattcacccctgatgagaacaaggttaccgtcaaggagaccgtcagccaggtcagcgcgagaagcatcctgctgtgcgacagttcgaaatacaatcaggtggccacgtttatggcgttacctttgacccggttcaccaccatcattaccgaccggcatctttccgatgccgccgccagtcatatcgcccggcacgcctgcgaggtgctgcgggccggataa

SEQ ID NO: 694 - protein, 222 aa, Escherichia coli
MQQCLRRDVSKLEEQGLLVSVSGGVRAVSRLAAEPSHLVKSTLQSEEKQAIGALAASHIAKNSCIYLDAGTTTLALARAILDRNDLQVVTNDFEITQLLIDASQCGVIHTGGTLCRENRSCVGESAARTLRHLAIDTAFISASGWDSRGIFTPDENKVTVKETVSQVSARSILLCDSSKYNQVATFMALPLTRFTTIITDRHLSDAAASHIARHACEVLRAG

SEQ ID NO: 695 - DNA, 123 bp, Shigella sonnei
atgcaattgaatattcatctgctcagcaacgtagtagatttcctcagaaagcatcaacaaaaaaccaagagaatcccatcctctgttactgactacaattgttctttttttggtatttcctga

SEQ ID NO: 696 - protein, 40 aa, Shigella sonnei
MQLNIHLLSNVVDFLRKHQQKTKRIPSSVTDYNCSFFGIS

SEQ ID NO: 697 - DNA, 318 bp, Escherichia coli
atgtcctggatcgttttattaattgcaggtttgctcgaagttgtctgggcgattggcctgaaatacacccacggttttacgcgtcttacgccaagcattatcactattgcggcgatgatcgtcagtatcgccatgctctcttgggcaatgcgcacgttgcctgtaggaaccgcttatgcggtctggaccggtattggcgctgttggggcggccattacagggattttgctgctgggtgagtctgccagcccggcacgtttgctgagccttgggctgatcgttgctggcattattggtctgaagctgagcactcactaa

SEQ ID NO: 698 - protein, 105 aa, Escherichia coli
MSWIVLLIAGLLEVVWAIGLKYTHGFTRLTPSIITIAAMIVSIAMLSWAMRTLPVGTAYAVWTGIGAVGAAITGILLLGESASPARLLSLGLIVAGIIGLKLSTH

SEQ ID NO: 699 - DNA, 804 bp, Escherichia coli
atgaaatttgtctctgaaagaattgaccatgtaaaaatagctaatggatattgtgtaatatgtggtaattttggaaaattaaaaaaagaccatgttcccccgcaatgtgcatctaaaccttcacctatgttacaaaaaacgatttctgagtatttctctaatactcgagtaccaccaattaaagcaaaaagcgggacaacttttcgtaccatttgtcacaattgtaactcgaatattttaggatcaatggatgcagaaataggccgtgttacaactgaattcatcgaaaagttaaatgattattttagtggtaagttcttttacaaaaattatatttcattaaaatttgatgcggataaatttctaagagcaatgattggacaccttctggctgcaacttcagtaaaagattgtatgaagcctattgttgatagtcctttttatactccattgagaaattttgtattaggcaggaatccagacattggggcaactcataatatttactattggttttatccattcagaaaacaaattactgctcagtcagttacattctacaataatggacatcatagtatatgttcttgcttacattttttcccaatatcttttttggttacactgaaggagcaaggaacatttcctattcatgcaactgaaatgactcaatatgatcaatctcttcattttaatatgacaacggctaatattgattatgcttcatttccctttgtaggtttaaagaataatcaatttatgatggtaatttctggtcatacttgtgttagttatcctaaatga

SEQ ID NO: 700 - protein, 267 aa, Escherichia coli
MKFVSERIDHVKIANGYCVICGNFGKLKKDHVPPQCASKPSPMLQKTISEYFSNTRVPPIKAKSGTTFRTICHNCNSNILGSMDAEIGRVTTEFIEKLNDYFSGKFFYKNYISLKFDADKFLRAMIGHLLAATSVKDCMKPIVDSPFYTPLRNFVLGRNPDIGATHNIYYWFYPFRKQITAQSVTFYNNGHHSICSCLHFFPISFLVTLKEQGTFPIHATEMTQYDQSLHFNMTTANIDYASFPFVGLKNNQFMMVISGHTCVSYPK

SEQ ID NO: 701 - DNA, 315 bp, Escherichia coli
atggatcacgaaaaggttgcagccagcttagctgagctagggaatagtcaccgactgtccgtgttccgctttctggtcaaagctggccatgatggggcttcggtcggagatatccagaaggggctgggtattcctgcttcgacgctatcacatcaccttgcgcgcatggccaaggtagggctgatccggcaggagaaacatagccgcacgattgtctgtatacccgagtatgggcacctagagaatttgatcggtttcttacaagaggaatgttgtgcaggtgtccggattgcgcatgaaccagaaccgctttga

SEQ ID NO: 702 - protein, 104 aa, Escherichia coli
MDHEKVAASLAELGNSHRLSVFRFLVKAGHDGASVGDIQKGLGIPASTLSHHLARMAKVGLIRQEKHSRTIVCIPEYGHLENLIGFLQEECCAGVRIAHEPEPL

SEQ ID NO: 703 - DNA, 2622 bp, Citrobacter koseri
atgtatcccgtatttgagaatggctcatgctgggtcaaggtcgattttcaccttcatacccgtgcagacaaagaatttcgctatgccggcgaatccgacagatatattcgcgattacgtcaatgccctcaaagcggcggaagtgagcgtgggcgtgatcaccaatcacaataaattcgatcccggcgagtttaaagtattgcggaaagccgcgcgccgtgaaggtatggacctgcttcccggcgtggagctgtccgttaatgatggccaggccggcgtgcacacgctcgtggtgtttgctgatgagtggtttatcaatccacagcagacgaaccatattgaaagtttccttacggccacgtttgcgggcgttgataattttgagaatgaaaatgcccgttcaacagaaaatatcacacagaccatccagcgccttgaccggtatgaaagggattacttcattgtatttgctcacgtggaggcccaaaacgggttatggggcgggctgagcccaggccggatcggggagctttttgataatgaccttgtccgccggcgcgtgacgggatttcagaaggtgatgacccacgacctgcgggtcaaaattaaggacgtgctcggtgagcgctatcctgccgaagtccagggatgcgatgccaaaacgctggatcacattggtgccagaaaagtcgccagctatctgaagctgggggattacagttttgaagccgtccgctttgcgctgcaggattttccgcatcgcgtcagcggagagaaaccggccctgacccacagccatatccgccagatagcattcgagggcgccggttcgctcggtggaaccgtggtgaaattatctccagaactgaacaccctgatagggatccgcggcagcggcaaatcctccatccttgaagggatccgatatgccctggacattccgtttggcgagaaggcctctgaccgcgactacaaagaaaatctggtcagtaatttactgaaaagcggagggaaaattaccgttgatgccgtgtgccgtcacggacgggcctatcagatagttcgcattttcggtcaggagccgcaggtcatttttgacggccaggtccggcacggggtggcgctacgggaaacggttctgcataagccagtgtattttggccagaaagatctgtccaataccggtgccggatttgaacacgatctgatagaaaaactggtcggtgagcgtctggctcccgtacgagagaaaatccggcagcagaatgcggtcgtgctcgacaggttagtccagcttcgccgtctgaaaacatcgggagaagcgctctccgaatggcaggcgaaagagaaggatgcgcagttccgcctgcgcttctatgcccagcatggcatggaagaaaaactggagcgtcagaccaccttcgggcgggatgagcgctatctcagcagcagcacttccctggcaagccgagcgctggacagtctgcaggacggaatcagggagactctggacgggctgaaacaggagcagaaacatgagtcagcacataaccaggcggatattgatgattatcgtgagggatatgaccgctttacgactcatctcagctccctgaacaccattgtcgacggtgcccgccagatcctagatgagctcaacgttaagcagcaggccttcctgcagaaaaagcaggcgctgacggaggaatttgccgaaatagaacgtggccttgcagaagagctgcggctagccggggtggaaaaagcagatcccgccgacttcctgaagctgaaagccgggctggaagttgcggaacaaaaaatagccgagttgacccgggctgaaagcagccagacgttactggagaagagtctgacagaagcgctaaaccgattgtctgaactgtgggtggaagagtatcaggaaattgaagccgtgctggctgccatcaaccaggcagattcgcccctgaagatcgtgccgtcctttgcgagcgataaaaaagccatgctggccgttctgaaagaagcctgtactggcagccggttgagggaaagtacctaccagaccgtggttgacagcttcagtaactttggcgagctctggctgaacagggataaactccccgggattatcaatagctctgcggagacgttcagcatgtatctggagcagcagatagaatcgcttattgtctggcagatcccgaatacctacatcattgaattccggggcaaaccactggaacaacactcattgggtcaacgcgcatccgcattaatgctgtttgtcctgaatcagcaggacaatgatgtggtgatcatcgatcaacccgaagacgacctggacaatcagacgatttatgacgacgtgattaaaatcatcagggcgatgaaaccccgcacgcaatttatctttgccactcacaatgccaatattccggtgctcggagatgcagaaaatgtctgtgcctgtgaatattcagacggaaagatccagactgtcggcggaggcgtggatgcccctcttgtacaacagcacattatttcggtaatggaaggagggcgggaagccttcgagcgacgcagggaagtttacggctcatggctcagtaaaacctga

SEQ ID NO: 704 - protein, 873 aa, Citrobacter koseri
MYPVFENGSCWVKVDFHLHTRADKEFRYAGESDRYIRDYVNALKAAEVSVGVITNHNKFDPGEFKVLRKAARREGMDLLPGVELSVNDGQAGVHTLVVFADEWFINPQQTNHIESFLTATFAGVDNFENENARSTENITQTIQRLDRYERDYFIVFAHVEAQNGLWGGLSPGRIGELFDNDLVRRRVTGFQKVMTHDLRVKIKDVLGERYPAEVQGCDAKTLDHIGARKVASYLKLGDYSFEAVRFALQDFPHRVSGEKPALTHSHIRQIAFEGAGSLGGTVVKLSPELNTLIGIRGSGKSSILEGIRYALDIPFGEKASDRDYKENLVSNLLKSGGKITVDAVCRHGRAYQIVRIFGQEPQVIFDGQVRHGVALRETVLHKPVYFGQKDLSNTGAGFEHDLIEKLVGERLAPVREKIRQQNAVVLDRLVQLRRLKTSGEALSEWQAKEKDAQFRLRFYAQHGMEEKLERQTTFGRDERYLSSSTSLASRALDSLQDGIRETLDGLKQEQKHESAHNQADIDDYREGYDRFTTHLSSLNTIVDGARQILDELNVKQQAFLQKKQALTEEFAEIERGLAEELRLAGVEKADPADFLKLKAGLEVAEQKIAELTRAESSQTLLEKSLTEALNRLSELWVEEYQEIEAVLAAINQADSPLKIVPSFASDKKAMLAVLKEACTGSRLRESTYQTVVDSFSNFGELWLNRDKLPGIINSSAETFSMYLEQQIESLIVWQIPNTYIIEFRGKPLEQHSLGQRASALMLFVLNQQDNDVVIIDQPEDDLDNQTIYDDVIKIIRAMKPRTQFIFATHNANIPVLGDAENVCACEYSDGKIQTVGGGVDAPLVQQHIISVMEGGREAFERRREVYGSWLSKT

SEQ ID NO: 705 - DNA, 1035 bp, Escherichia coli
atgacaaaaattactaattctaatgagttgaagttgctgtataaacagtcagtgctcattccatcatacaaagatcacgtagcgatcttgcaaaaacaattaggaatagaaaaacattcttttcaaaatatgccaagattgaatagacaagctgtaattagtaactctcttcgaaaacaattggctagtataccgaacttggctggaataggcagcaagtatcgtgaacatatcgcgattttacagaaacagactcaggctcttttccctcatgatgcaaatagatatattcaaatgctaaggaaacaggccgaaatagctatgccattacgaaaacagcttgaggtgcttaataagcaagctggtttaaataacatgcaagcgatacttaaagaattacaacaaagtgcaagttataaaatagatgtaagccaagacataaagaaagtactagatcactatgctagaacaagaaatgcttcattacatcaaataatagagcaggggatttcatctattgcgcaggcttatgctgaaggtgctactgaaacatcacacaccaaaagtaatgttcaaaataaaggattaaataaacctagctcaaagtttgttgattcatttaaagagcttccttatccactgcaatggttactaatggttatattttctcaagttgtgtttggtgcttttattgattacggaaaagagaaaaccttgctgggaatacacaaggcagaatcatattttatatctctgtttgaggataaaccaatatcaaaacaacaattaattaaagaaaacaaagaaattagttgggaagatctcaatggttttcgttttataactggtgagaacgtcagattacacgtcagtccttctataaatagtgaggtgattgaatgcattggcaaaaatactatagtggctgttttagataaaaaagatcgccaatggcttttcgtgcaggttaaatcaggggacgagtttattactggatggattacacgaacatacacaaagcctcttaaggcttga

SEQ ID NO: 706 - protein, 344 aa, Escherichia coli
MTKITNSNELKLLYKQSVLIPSYKDHVAILQKQLGIEKHSFQNMPRLNRQAVISNSLRKQLASIPNLAGIGSKYREHIAILQKQTQALFPHDANRYIQMLRKQAEIAMPLRKQLEVLNKQAGLNNMQAILKELQQSASYKIDVSQDIKKVLDHYARTRNASLHQIIEQGISSIAQAYAEGATETSHTKSNVQNKGLNKPSSKFVDSFKELPYPLQWLLMVIFSQVVFGAFIDYGKEKTLLGIHKAESYFISLFEDKPISKQQLIKENKEISWEDLNGFRFITGENVRLHVSPSINSEVIECIGKNTIVAVLDKKDRQWLFVQVKSGDEFITGWITRTYTKPLKA

SEQ ID NO: 707 - DNA, 1083 bp, Escherichia coli
atgcttgagctttatgatcctcaagactatgacgtgaaatacgccgcctggcgttttgatgacctgccgatcaaaacgccctggccgcccaagtacaaaatcagagccgatgcacagcagcaaactaacatcatcttttctctcatcgagaaagcgaccagtatcgttcatgccggagacccggacgatgaaggctgcctgttggttgatgaaattttagattacgcaaaaaatacaaaacccgttcagcgccttctcgttgcagatctcaacctcgctcccgttcagaaggctctcgccaatatgcagcctaacgagaaattcaggggcatgacaaatagcgctctggcacgctctctatgcgatcagggattcggctacaaccttacgcgcggctgtacccttaaagggcaggagaaaggctttcatggcgtcctgaatgttggtcgtgtgcaaagcgctgttcttgggctggttaaccagagaactctggctaaccagaaccacacagaaagcttttattatgatgttcaagcggcattgtcgatgaacgggcatctcttaaaggccaaatatcaagtcgctgaaggtgatgaaaaggatgaaaaaaatcgtctgatctctgaggctcaggcgaaggcggttgttgagcatgtcacgggtaaaaaagctgttatttctgaaacggccaccaaacccgaacacactaaaccgcctatgccgctgaacctttcgacactgcaacaaatctgcgcaagacgtttcggttataaggcaaaagaaacgctcgatatcatgcaaggtctttacgaaactcataagcttttgacctatccgcgaacagataaccgctatctgtctgacgagcatttcactcaggctggcgatattgccgacgctatcggcgcgacgttaccagagctggcgaccgcgaccgctggcatggataaaacgcaaaaacataaagcttttaacgcaagcaaaattgaggctcaccacgctattatcccgaccactaaaagcgggaaaggcgttcagcttaatgaggggagcccgcagaattcggaaaaaatcgtacgctaa

SEQ ID NO: 708 - protein, 360 aa, Escherichia coli
MLELYDPQDYDVKYAAWRFDDLPIKTPWPPKYKIRADAQQQTNIIFSLIEKATSIVHAGDPDDEGCLLVDEILDYAKNTKPVQRLLVADLNLAPVQKALANMQPNEKFRGMTNSALARSLCDQGFGYNLTRGCTLKGQEKGFHGVLNVGRVQSAVLGLVNQRTLANQNHTESFYYDVQAALSMNGHLLKAKYQVAEGDEKDEKNRLISEAQAKAVVEHVTGKKAVISETATKPEHTKPPMPLNLSTLQQICARRFGYKAKETLDIMQGLYETHKLLTYPRTDNRYLSDEHFTQAGDIADAIGATLPELATATAGMDKTQKHKAFNASKIEAHHAIIPTTKSGKGVQLNEGSPQNSEKIVR

SEQ ID NO: 709 - DNA, 231 bp, Escherichia coli
atgtcatcaatttattctgaagaatatcaattagttataaagttactacgatctaccaggattgctaaaggcctgacccaggctcaactggctaaggcgctgggaaaaccccaatcattcattgcaaaagttgaaaatggagagcgtcgtctggatgtgattgaatttgcgcatatggcacggttgctttctcttgatccggccgatgctctgagaatagtcatgcggtga

SEQ ID NO: 710 - protein, 76 aa, Escherichia coli
MSSIYSEEYQLVIKLLRSTRIAKGLTQAQLAKALGKPQSFIAKVENGERRLDVIEFAHMARLLSLDPADALRIVMR

SEQ ID NO: 711 - DNA, 366 bp, Escherichia coli
atgatcccgggcggcccattcacgtttccacaatgcctgctcagcggtctgaatcagggacgccagcagttcagcagggacggtcacctggcggttttcgctcacgttattgatgatctccatcaccgcagcggaagaaataccggactcaatccgctgttcttccgggatgtcctccaggcgtgccaggacggtcctgatttcatgaccggtcagagaaatttccataccgtcagccagtgcctgaatctcttccggggaccagacaaccagcatcagcggcgtgttctccgtatactgcgctgccagctcccggcagagcgtttcgcatgttccgtacattctcgtctccttctcaatctttga

SEQ ID NO: 712 - protein, 121 aa, Escherichia coli
MIPGGPFTFPQCLLSGLNQGRQQFSRDGHLAVFAHVIDDLHHRSGRNTGLNPLFFRDVLQACQDGPDFMTGQRNFHTVSQCLNLFRGPDNQHQRRVLRILRCQLPAERFACSVHSRLLLNL

SEQ ID NO: 713 - DNA, 513 bp, Citrobacter freundii
atgcaccagtcgcaaagtcagcgcctcggccataaaacaaaaaccctactcgtagcagtagggttttcctgcatttctgtgagctcatttgcagccacacagacctgtgcagcatacgaactggcaaaagctggtgctgatgctgcctataaacaggaggttgaacggattaacaacgccgctaaaagtgaatccagtacatctgattctctcggacagtgcctggggtcgctatcggtatcactaaaaatccctcagtttccgtctatcagcgacatcattgataaggtgaaggatgaggtatgcaatacggttaaatcgaagattaatgagaagtgggggagcctgactaatacgacgctggacccgtggtcaacgatttcatcccgactgccagatacgtcaggtatcctgcccaacgcatcttctaagaatgtgcaattaaacaatccggcagctgcgagtggaagtggtgaggatgcaaacagtgatgcattcccgttccatttgtaa

SEQ ID NO: 714 - protein, 170 aa, Citrobacter freundii
MHQSQSQRLGHKTKTLLVAVGFSCISVSSFAATQTCAAYELAKAGADAAYKQEVERINNAAKSESSTSDSLGQCLGSLSVSLKIPQFPSISDIIDKVKDEVCNTVKSKINEKWGSLTNTTLDPWSTISSRLPDTSGILPNASSKNVQLNNPAAASGSGEDANSDAFPFHL

SEQ ID NO: 715 - DNA, 198 bp, Escherichia coli
atgaaatcagctgaagactggctgcatactgtcagacgtttcatgaatgaagattcgcttgatacgtatgtagactcaaaacgtgatgttctacctgccacagaatttatgcgtttactaaccgcggcggaacaccgccgcgttgaaatacgaaccggcaagctattcgataaaatcccgaaaggactcttccggtag

SEQ ID NO: 716 - protein, 65 aa, Escherichia coli
MKSAEDWLHTVRRFMNEDSLDTYVDSKRDVLPATEFMRLLTAAEHRRVEIRTGKLFDKIPKGLFR

SEQ ID NO: 717 - DNA, 411 bp, Escherichia coli
atgagcgaacataatgattacgaatcctgtgcagttatcatgtgcgaacgacgaaaagccaccgccgttttgcgcaaaatcccgccagaaaaccttgaacaactcattaatatgtggtccgacattgcacagggaatgatcgagaaatttaaggaagaacagaaggccactgaagagaaagccgcagccacaaagcggttcatggaagaacacaatattacggctgatgaagctctccagatcttcgaaaatctctttggtccgtccacgaaaagtaaatccacttttggaaaagtgaagtaccggatcgaagttgatggaaagtccataacctggacaggaaaaggtcgccgacctgcagcgtttgccgagatgagcgacgatgagctcaaaaaatatgaaatcagctga

SEQ ID NO: 718 - protein, 136 aa, Escherichia coli
MSEHNDYESCAVIMCERRKATAVLRKIPPENLEQLINMWSDIAQGMIEKFKEEQKATEEKAAATKRFMEEHNITADEALQIFENLFGPSTKSKSTFGKVKYRIEVDGKSITWTGKGRRPAAFAEMSDDELKKYEIS

SEQ ID NO: 719 - DNA, 1152 bp, Escherichia coli
atgaagattaaactgttaactgtacttatggccgcactgttttcggcaaattctgtatctgcagctgatgcaccgactggtaatggatcgccgcagcaaacggcgccagctgtgcctggtggtgatattgctcaatggcagcaggccagttccgggttgcccgtaaatcagcagtcacaggtgcaacagccaccacagcaaacagcacaggaacaaggtcagcagcaggcgcaaggccaacaaccacaggcacagccccaacagcggccaacgactgcactgcctcctgcacctatgccgcagattcctccgccacagcagcaggttactcatgttaatccgcagacactggaagagttacctgcacctgttctgcagcagatccagcctattacccctggtcaggtgcggtcggcccgcagcgcaatggaagatatgagcgcggcggccaaaacctcaccattaacgccgatcccacgaatttcaagccagacggtatcactgtcagctggcgcatccattccgcaggtacgggtatttccaaaccaggcaaccacagtgacgttttcagatgcaaccggacacccctgggtattaggtgcccctccatataattcgagtccctgtgcatctggtggtgaactgtgtgttggctatattccaggatcggcggtattcacaattcagccgaccaatgcctatgccagcgggaacatcacagtgcttctgaaggggctggccacgccggtcattattaacgtgaagggggcagaaccctccgttaaatcaaaaaccgttgatgttgattatcgtctggatctccgtatcccgaagcgcagtcctgacacaccggtttataccgctacgcctgagaaaaaaatctcactgtatgacaagcagctgcagagcgtgctcgatggcatcccgcctgaagatgctcagcggttgaaacttaaaaacgcgccagggagtaccaaagtctggcagatcggtgatgaactctacgtcagaagtaacatgcagctgcaggatgagtttgagaaaacgctttccgctatcgatggcacacatgtttacgtgctgccggcaacaccagtgctgactttttcggttaacggtcaggcgcgtgacgttgaagttgagctgaattaa

SEQ ID NO: 720 - protein, 383 aa, Escherichia coli
MKIKLLTVLMAALFSANSVSAADAPTGNGSPQQTAPAVPGGDIAQWQQASSGLPVNQQSQVQQPPQQTAQEQGQQQAQGQQPQAQPQQRPTTALPPAPMPQIPPPQQQVTHVNPQTLEELPAPVLQQIQPITPGQVRSARSAMEDMSAAAKTSPLTPIPRISSQTVSLSAGASIPQVRVFPNQATTVTFSDATGHPWVLGAPPYNSSPCASGGELCVGYIPGSAVFTIQPTNAYASGNITVLLKGLATPVIINVKGAEPSVKSKTVDVDYRLDLRIPKRSPDTPVYTATPEKKISLYDKQLQSVLDGIPPEDAQRLKLKNAPGSTKVWQIGDELYVRSNMQLQDEFEKTLSAIDGTHVYVLPATPVLTFSVNGQARDVEVELN

SEQ ID NO: 721 - DNA, 705 bp, Escherichia coli
atgaatctgtttgaagatgacaataaaaacgaagcagctcctgcccaggaaccggtgtctgctaagcctgctgaaaagccaaaaccgacagtgacgccagcagcaaaagcgagcaaaaagccgcttaatattagtgactatgcatggattggtggtatcgctgtcatcggtatcctgcttttagtctggttgtttgggggctccgatagtgacactgcgcctgcggccgggaatggtacgatccagtcttcagggcaacgtcagaacgtacaggctgcccctgccgggcaggattcaggtgacttccgcgagcagatttccgggattctgctgcagcaaaaggaacggctggacgcgatagaatcaacttctaaaaatggaatgatgatcctttccagtcagttacaaagcgctaatgaacaaatcaaaaatctgaacaatcaggttcaggaactgaaaatgaaagccgctggttatgggccttcatttggtaatcagagtggaacaatttccggttcaacgtcacaggcattacctttgttgagaggtttttcaattaatgatttatctggcgatcttgcttgggtaaaatacaaaaaccagacgtatgctgtgaaggtcggaagtcaacttggcggagtcaccattacgggtatcgatactgaaaatagaatcgttactacaagtaaaggccttatccgctaa

SEQ ID NO: 722 - protein, 234 aa, Escherichia coli
MNLFEDDNKNEAAPAQEPVSAKPAEKPKPTVTPAAKASKKPLNISDYAWIGGIAVIGILLLVWLFGGSDSDTAPAAGNGTIQSSGQRQNVQAAPAGQDSGDFREQISGILLQQKERLDAIESTSKNGMMILSSQLQSANEQIKNLNNQVQELKMKAAGYGPSFGNQSGTISGSTSQALPLLRGFSINDLSGDLAWVKYKNQTYAVKVGSQLGGVTITGIDTENRIVTTSKGLIR

SEQ ID NO: 723 - DNA, 234 bp, Shigella sonnei
atgatctctgagacggatctggacttctatcgttttacttcttccactacgatctttggccttaataagtcggttatttgtatcttcatcgagatacaccgagaccgttctgcttataccgcctctcgcgttacgcctcctcactcaattcacctctgtttcccgactaataaaattatgattgcacagaaaccgacgaaaaaaaacacgccaaaattggcgtgtcttatttaa

SEQ ID NO: 724 - protein, 77 aa, Shigella sonnei
MISETDLDFYRFTSSTTIFGLNKSVICIFIEIHRDRSAYTASRVTPPHSIHLCFPTNKIMIAQKPTKKNTPKLACLI

SEQ ID NO: 725 - DNA, 1323 bp, Escherichia coli
atggaactgaccgttgaatcagtgcaagccctggcgcccgatgacgcctcggttaaagcggctcgtggcctggttgctcccgcaaaatggccgacgctcggatatagcgaggctgccttctggggagagtgtaaaggtagcggctcccgcccttatcaggtacgaatcgacagacaggatctggcctgtaaatgttcctgccccagccgtaaattcccctgtaaacatagccttgcgttgctttttctccaggtgcaacacaccgcaagtttcaccgctggcgagccgccggaatgggtaagcgagtggctaacctcgcgccagcagcgggcggttcgcaaagaagagaagaaagagcaggctgaggcaaaagctgccgacccgcaggctgccgccaaacgggaagcggcacgcaaccaaaaaatgacggcggggctggatttcctcgaacagtggatgcacgacctgatccgccacggtctggcgcagatctctgcacaacagttgccttttgccgggatcgccgcccgcatggtcgacgcccaactaccgggaattgccgctcgcctgaacaatctgaccactcattttactaccgccgaggtatggccatcgagcctgtgcaaagaactggggcagctacagctgattattgacgcctggcgccagcaacaaatgttatccccggcacaacttagcgatctccatgcggcattgggaatacccccggataaacacgacgtcactgacggattaacctgcctcgataactggcaggtcttaggtcaaagcgcgcaagaagggaataatctgtggcgacgccgggtctggctgtacggagaaaagagccaccgcaccgcgctactgctggactattcacacggtagtaaaaactttccccagcactttatcaccgggcaagtctgccagggcgcgcttgcctttttccctggcgcatcaccgctacgggcgcgggttgtggagccgtttacccgcggtgaaagattcccgcttgcagaattacccctcccggacgcgctgcatgacatggcgcagcggcttagcgcgaatccctggcaatggcctctgccgctgcgagtaagcgaaatattgatttacccgcacgagagcggctggcgattcgtctcgacacagggccagcacttaccgacgcacctgtcgtcggacgagggttggcggttactggcggccagcggcggcgcgccgtttatgctaatgggggaatgggatggtcagcagctgacgccctgtagcgcctggcttgccggtagcgtcatttgggcaaccggaggcgcacaatga

SEQ ID NO: 726 - protein, 440 aa, Escherichia coli
MELTVESVQALAPDDASVKAARGLVAPAKWPTLGYSEAAFWGECKGSGSRPYQVRIDRQDLACKCSCPSRKFPCKHSLALLFLQVQHTASFTAGEPPEWVSEWLTSRQQRAVRKEEKKEQAEAKAADPQAAAKREAARNQKMTAGLDFLEQWMHDLIRHGLAQISAQQLPFAGIAARMVDAQLPGIAARLNNLTTHFTTAEVWPSSLCKELGQLQLIIDAWRQQQMLSPAQLSDLHAALGIPPDKHDVTDGLTCLDNWQVLGQSAQEGNNLWRRRVWLYGEKSHRTALLLDYSHGSKNFPQHFITGQVCQGALAFFPGASPLRARVVEPFTRGERFPLAELPLPDALHDMAQRLSANPWQWPLPLRVSEILIYPHESGWRFVSTQGQHLPTHLSSDEGWRLLAASGGAPFMLMGEWDGQQLTPCSAWLAGSVIWATGGAQ

SEQ ID NO: 727 - DNA, 1605 bp, Escherichia coli
atgaacgaatggcaaaatttaacccgcacagcgctactcggcacagacaaaaaagcgtttacaccgtcggcgtcgcaaagtgagattgggctgttactgtctgaactggcgaataacacatccgcagagcaacagctactgcgctcggcgggcgttctggcgctctgccatctggctggctgggtgccgcaggcgattgaccccgcaccgctgccggaaatcgataaagaaaatgccgagccaataaacaacccggcttttgcgggactgctgcatctgctgctgtcagaaggaccgccgcggttgctgtggtcggcgcttgatctattggtccgtcgtcaacttcttcctccgcccctgctgttaccagcattgctgaattatggagcgcaaaagccatctctacgcggcatcctgtccaatgttctgggcgctcgcgggtgctggctggcgcaaatcaacgccgattggggctatgttctcgcctccactgacgctccgctggatgaagaaatgtggctgcacggcacgtccgaacagcgtctgcaatatctgacgcaaatgcgcattcgcgccccggaacagggtcgcgatcggctggcgcaggagatgagttcgctggatgcccgcgaacgcgcacagctgctggctgtgctggaagtggggatctcccaacacgacgaagcctttctggaacagacattatccgatcgcagcaaagaggtgcggcaaactgcggcacggttactgtgttgtctgccggaaagcgcctggatctcgcgcatgaagtctcggttagcgccgttgctcagttcatcccccgctcctgagaccttacttgaaaggctaaaaggcttatccggcaaagaaaaaatgctgcgcgtcgcccttgatgccccggaggcgttcttaccagagtggaaggccgatgcgctggaagaaactaagcccaaaggcgaaaagttgggccagcgcgcatggtggctgtatcagatagttgcagcggttccgctcgactggtggcaaacgcaactgcaggctacccccgttgaactgctgcgctgggccgggaaaaccgactggcaggaggcgctactgcgcgcctggtatcacgccgtcctgcgcgaaaaaaatccacagtgggcgcaggcattcctcgccctactccccgtcggaataagcattcattcccctgctggcgtgaagattaacgcctttgagcttctgcaatgcctgcccgtagaagaacacgagccagtgttgacgttactgttctcggtaatgggcggcgaacatttacaacgctacatcgccctgttaccgctggatgcgtcgctctttagcctgcgcctgagccagcaaatggtcacggagctgcaccgttgggtgaaacatgattccgcgcgctttgactacgccctgcgccatgtgatgagtgatttcgcctgcctgctggcccccgaagtcctcaatgatgtcattgacaagtggccgcatgacgcacaacaaacgccttattgcgaggcagcctttactgccctgagcgccacgctggcgcaccgaattcaacttcattcgttttttgtcggagaaactactttatga

SEQ ID NO: 728 - protein, 534 aa, Escherichia coli
MNEWQNLTRTALLGTDKKAFTPSASQSEIGLLLSELANNTSAEQQLLRSAGVLALCHLAGWVPQAIDPAPLPEIDKENAEPINNPAFAGLLHLLLSEGPPRLLWSALDLLVRRQLLPPPLLLPALLNYGAQKPSLRGILSNVLGARGCWLAQINADWGYVLASTDAPLDEEMWLHGTSEQRLQYLTQMRIRAPEQGRDRLAQEMSSLDARERAQLLAVLEVGISQHDEAFLEQTLSDRSKEVRQTAARLLCCLPESAWISRMKSRLAPLLSSSPAPETLLERLKGLSGKEKMLRVALDAPEAFLPEWKADALEETKPKGEKLGQRAWWLYQIVAAVPLDWWQTQLQATPVELLRWAGKTDWQEALLRAWYHAVLREKNPQWAQAFLALLPVGISIHSPAGVKINAFELLQCLPVEEHEPVLTLLFSVMGGEHLQRYIALLPLDASLFSLRLSQQMVTELHRWVKHDSARFDYALRHVMSDFACLLAPEVLNDVIDKWPHDAQQTPYCEAAFTALSATLAHRIQLHSFFVGETTL

SEQ ID NO: 729 - DNA, 237 bp, Escherichia coli
atgatgatgaaaaaaggtgttaaaaaagtggcactagccactcttgaaactaaagatctgctttgtgctgcaatgattgatgctggagttgaccctaaacaagctctcttggcctccactgtagcaacgaaagcccatgttgatgtaattattgaccgtgtttttggcaatcagagcgcggctgacatcacgcatggtttatcggaagttggtcgcggcactcgtccgctcaattaa

SEQ ID NO: 730 - protein, 78 aa, Escherichia coli
MMMKKGVKKVALATLETKDLLCAAMIDAGVDPKQALLASTVATKAHVDVIIDRVFGNQSAADITHGLSEVGRGTRPLN

SEQ ID NO: 731 - DNA, 930 bp, Escherichia coli
ttggctatattcgaattattttcaaaaagacaaaaaaaattaagaggtgaagtagctgatgtttaccaatacacgaatataccaaatgcatttcgtgttcaggttgttcatattgtaagagatactatcggtgaagatagtgactatgaaacggaagcaagtaagctttacagactcgttcataaaacgctgtgtaaggaatatggtgtattctctctcaaacagtatcctgaatcgaatttcggggcaatttttgactatttcctagctgagagagatcatgaaaaatgcttggatatcattgagatatgtttcaaactgatagacgggtatataagatcaaatgagtggaaattcagagggttagtaaagcaaagtcctgatgatgctattgaagaacttaatatcaggtttaaagaagcaggtcttggatatcaatttgagtcaggagagttggttaaagttgactcacaattcattcattctgatgttgtaaagcctacgcttcagattcttggtaagaacaagagttataacggagcaaacgatgagtttttatccgcccatgagcattatagacatcagcgatataaagaatgtttaaatgattgcctcaaatcttttgaaagtctaatgaaagccatacataaaaaacattcttggcaatttaatgatactgacacagctaaaaaactaattaacagttgtttggcaaataatttagtacctgaatacctccagaatcaattttcttcaataagaattctacttgagagtggtattccaaccattcgaaataaagaaggtggacatggacaaggggcagaaataacaaaagttcctgagtatttagcgagttatacccttcatttaaccgctactaatctgctgtttttggctaaatgcgaagagagttatacgaaaaagtag

SEQ ID NO: 732 - protein, 309 aa, Escherichia coli
MAIFELFSKRQKKLRGEVADVYQYTNIPNAFRVQVVHIVRDTIGEDSDYETEASKLYRLVHKTLCKEYGVFSLKQYPESNFGAIFDYFLAERDHEKCLDIIEICFKLIDGYIRSNEWKFRGLVKQSPDDAIEELNIRFKEAGLGYQFESGELVKVDSQFIHSDVVKPTLQILGKNKSYNGANDEFLSAHEHYRHQRYKECLNDCLKSFESLMKAIHKKHSWQFNDTDTAKKLINSCLANNLVPEYLQNQFSSIRILLESGIPTIRNKEGGHGQGAEITKVPEYLASYTLHLTATNLLFLAKCEESYTKK

SEQ ID NO: 733 - DNA, 1893 bp, Escherichia coli
atgcacaatacgtacatcaaagactatatagaatattaccttagccttaaaactgaacctcaatacgccattatgcttaaaggtgcttggggatcaggtaaaacttggttcattgaacgagttcttgaagaatataagcaaaagcattcagagttcaaatttcttaaagtgagtttgtatggcgtcaactctattgagcagattgaagatgagttctatcgtcaacttcatcctattctatcaaacaaagcccttatctttggtgcaaatgtactaaaaaatacgcttaaggctactttcaagatcgatttcaatggcgataataagtctgacgtagatgtcaatgccagtgtccccactattaatcttagcgactttagcagagaaccagatggttttgtgctggtctttgatgatatcgagagagctggtatagatttaccaatcttatttggatatataaatcactttgtagaagtaaacggatacaaagcgatcctggttgccaatgaagaagaaataatcaacagagaaaagcgaataaataatgatgatgagaaatctagcagtgaatacataagaacaaaagaaaagcttgtaggtaaaacatttgaagtaacgtcagatttacatagtgcttgtaatattttcttgggcgtaattagtagtttacacgtagctaatatatttaaagaagatatgcagaccatagaacacctctatgtgtcggcgaaatataataatctaagacatttgaggcagttctttcttgatgtacaacgcatcatttcccttttgggagataaatatgtcagcaacgacgattttatgaaagtatttttccagcagttattaattttctcgatggagtaccggggagggaaccttaactacgaggatttcaattcaatcggcaatgtaaattatagtatgtttttagataaagggcgtgccaaaactaagtatgatatgatcgtcgagaaatattcatcacctgtattaaccgagacgttactggatggtgcgtactggagagagctaatctgtgatggaaaggtaacgcatgatcttctcgctcagctggatattacgcgattttttagaagcaccgatgcccaagcatgggagtatttgtggaactatcgagaacttaatgaaactattcttaatgaacagtacgccattgccaaggataatctattttcaggtaagatcacttccttaggtgaactcctgatgaccgcgagtattttgctggcattggcgaaagaaggtttaaccacagatgctgttgatgacattataaatgagacaaaacatcatatagatatttattacaatggattaggacctgaagatatacatcaggagtatgcgcaaagacattataatgagttaatggcatggcgtggctttggttttcttgacagggatagcgatgaattcaaactcattattgagcatattaagatagcgcagaagaaacggtttgatgaatcaattccggagtttgcattgaagttcagcgatgagttgcaaagaggaaatttatcgtttgtatctgaattgtgtcattctaataataggcagctaaatcttcataacgtgccttttttacacttggtttctcctgaagttttcattgaaagctataggaaacttgacccaatcatcatgaggaaactggcatttagcttgagggatcgttattctgatagggatgccagaaccagactgaccgaagaatacaactggttgattagcctaaaagagatagctgtagatttcactcaaaacgcagccaataactcctttcaggtttttcatgtaaagttttttattgactatgcactaactaatgcaatcaaattatttactgagggaactgattaa

SEQ ID NO: 734 - protein, 630 aa, Escherichia coli
MHNTYIKDYIEYYLSLKTEPQYAIMLKGAWGSGKTWFIERVLEEYKQKHSEFKFLKVSLYGVNSIEQIEDEFYRQLHPILSNKALIFGANVLKNTLKATFKIDFNGDNKSDVDVNASVPTINLSDFSREPDGFVLVFDDIERAGIDLPILFGYINHFVEVNGYKAILVANEEEIINREKRINNDDEKSSSEYIRTKEKLVGKTFEVTSDLHSACNIFLGVISSLHVANIFKEDMQTIEHLYVSAKYNNLRHLRQFFLDVQRIISLLGDKYVSNDDFMKVFFQQLLIFSMEYRGGNLNYEDFNSIGNVNYSMFLDKGRAKTKYDMIVEKYSSPVLTETLLDGAYWRELICDGKVTHDLLAQLDITRFFRSTDAQAWEYLWNYRELNETILNEQYAIAKDNLFSGKITSLGELLMTASILLALAKEGLTTDAVDDIINETKHHIDIYYNGLGPEDIHQEYAQRHYNELMAWRGFGFLDRDSDEFKLIIEHIKIAQKKRFDESIPEFALKFSDELQRGNLSFVSELCHSNNRQLNLHNVPFLHLVSPEVFIESYRKLDPIIMRKLAFSLRDRYSDRDARTRLTEEYNWLISLKEIAVDFTQNAANNSFQVFHVKFFIDYALTNAIKLFTEGTD

SEQ ID NO: 735 - DNA, 459 bp, Escherichia coli
atgactaaacaaagctccgaatacttccaattacactactgttattaccttgaactaatgacagcaacgttccatggtcgagctgataaattaatgacagcaatccaacttataagcggaacagctgtatttgctaatacaggtctggaatggttgttcgcttttcctgttgttgtaatcgcaacaatccaacttgtatggcaaccagctattattgcggaacgagcaagcgtacaaagccgacaatatggtgagttgctttacgccgaggatgaattgtctccacagttcattgcacaaaaattgaaagctttgcatcactctgactccacaacattcggatctttgttaaaccctgcctacaaaagagctgctattgcctgtggtcgggttgacgatgtaaacctcagcttccaagaaaaacttttcgcttggttcgcaggttgtttgccacgttaa

SEQ ID NO: 736 - protein, 152 aa, Escherichia coli
MTKQSSEYFQLHYCYYLELMTATFHGRADKLMTAIQLISGTAVFANTGLEWLFAFPVVVIATIQLVWQPAIIAERASVQSRQYGELLYAEDELSPQFIAQKLKALHHSDSTTFGSLLNPAYKRAAIACGRVDDVNLSFQEKLFAWFAGCLPR

SEQ ID NO: 737 - DNA, 468 bp, Escherichia coli
atgaaacgtaaggtattttacagctttcactttgataacgatgttatgcgggtacagcagattcgtaacatgggagtgctggagggggatgaaccggtcagcccaaatacttgggaacaaattaaacgaactgagcagggcgtgaagaattggattaatcagagcttaaatggcaaatcctgcttagtagtactgatcgggagtcaaacggctaatcgcccatgggtcaagtatgagatcgaaagagcctggaaagagggtaaggctgtggtgggtatttatattcatcgactgaaatgccctcgtaacggctatgggacaaaaggaccgaatcctttcgaccaatttacatttaagcgaggcgatcgagtaattaaaccactcgtatatgaacctaactttaacgacgcttatagcgatatcaagaacaatttggcgacatggatagaaaacgccattaaacaataa

SEQ ID NO: 738 - protein, 155 aa, Escherichia coli
MKRKVFYSFHFDNDVMRVQQIRNMGVLEGDEPVSPNTWEQIKRTEQGVKNWINQSLNGKSCLVVLIGSQTANRPWVKYEIERAWKEGKAVVGIYIHRLKCPRNGYGTKGPNPFDQFTFKRGDRVIKPLVYEPNFNDAYSDIKNNLATWIENAIKQ

SEQ ID NO: 739 - DNA, 147 bp, Escherichia coli
atgtctggcaataacgtttttgatgggttgttttccagcccggagcgcgatattgccaccagtcacagaaacaccgagaacaccagatttcagcggtcgctgaatttgaacgagatcttttacttgaacgaacttattcagggatag

SEQ ID NO: 740 - protein, 48 aa, Escherichia coli
MSGNNVFDGLFSSPERDIATSHRNTENTRFQRSLNLNEIFYLNELIQG

SEQ ID NO: 741 - DNA, 2133 bp, Escherichia coli
atgctttctactcaggatataaacggtttttttaatgctgttgactctctcaaaaggtttaaacgagcagaaataagggacaacaaagataaaccacttattgattcactttacacagatctattgccaaacaatcacgtcttcaaaatgtgctacggggaaaacactacatttttaattggaagaaaaggcacaggaaaatccacaataattcttaaacttgaaagtgagtacagaaaagaatcttcatacctcccatgctatatagatacaaaaacagtattcgaaagtgttagaggtgagtatcaaaaaatagactacctaaaagggaagatacctgaagagcatctagaaaaatatttagtcgagcgtgcattcattaaaaacatcttgaaatcaatcggtgacgaattgaatattcgagcagaaagcatattctcaaaactagcagggattgttaatgcaagcaaaaaacaagcggtaaaagcaaaaataacaaaactacttttaatggtggacaataaccaaataataaaagaaattgaaatacccgtaataacagaagtaaatactaaacttactaaggcgaacgaatcagaaaatggaactacccaaaactataactctgagctaactgtaaaaatcggaacatcacaacatgaaggtggtggaaaaataggagcggtaaaaggaatcacctcaagacagaaaaacaatgacgcttgggaaaagagtttctctacagcccttctaaaggtttttcaaattacatcagtaattgaagaaattaaaatcatattaagagagctaggagtaaaaaagcttgtaatatttttagacgatttctctgaagttgaagagaagacgctaaaaaacttcgtcgatgttgtacttgctccgctaaataactgggctaatgatttcatttgttttaaagtcgctgcctacccaagtcgcatatattatggcgacattgatgttggcaaaatagatgtggtaaatttagatttttataatttatattctaattatgataaatctacgatggaatccttatcagctgacttcaccaagagacttttaaatcaaaggcttaatcagttttgcacattgaagtttgaagattattttgatacatcttcagctactccagaagagtactatgatcttatatttaaagtatccatgaatgtccctagaattataggatacattctttattactgccatcaaaccaatgtatctcttggcagaaaaataaataaaggctcaatcgagaaagcagctcagacttattatgagcaagttgtatctaagtttttcgatattgccacgcatagtctgatgtctttcagtgaaaaagtttctgaacttcagcaaaaagagattctaaatctcttcgttcagaaattaaaaacgattaagcgacaaataataacaaatgaactaactggcacaatttacaatagagacagaacaaatccttattgtagtcatttttattttcaacctaatcttgaacattttctgcgtacattggagcttaatttcttcattaccaaatataatgaattagtaaataaagacggaaacaaggtctcgatatatggaataaattatggattagctcgaagtgaaaacctcaaatggggaaaacctgaaggtaatcagttccgtagttatttcgtagaaagaccatttgatttcaacaaagatatcgaagatttcttaagagaatcgaaaaaaatcgtatgtcttaatagctcttgtgataaaacctatccatatgaagaacttgcatttcttgaatataataaaatgagatgtattgaatgccagtcgcctgttgaagtaagatcgttttctgaaagtatcagttctgaaatatctaaaattgacaacgctaaacttttaccaaaattagaattaatgatattacatgaactgaataaggcagacgatcatctcctagctcgagacattgctgaggaactagacgcttcatcacaattaattgccaaacgggctgaaaaattagacagaaaaggtcttgtttttagagataaaagtgatgcattaattaagtattcaataacaaataaagcagtagaaggttatttctatgatgactaa

SEQ ID NO: 742 - protein, 710 aa, Escherichia coli
MLSTQDINGFFNAVDSLKRFKRAEIRDNKDKPLIDSLYTDLLPNNHVFKMCYGENTTFLIGRKGTGKSTIILKLESEYRKESSYLPCYIDTKTVFESVRGEYQKIDYLKGKIPEEHLEKYLVERAFIKNILKSIGDELNIRAESIFSKLAGIVNASKKQAVKAKITKLLLMVDNNQIIKEIEIPVITEVNTKLTKANESENGTTQNYNSELTVKIGTSQHEGGGKIGAVKGITSRQKNNDAWEKSFSTALLKVFQITSVIEEIKIILRELGVKKLVIFLDDFSEVEEKTLKNFVDVVLAPLNNWANDFICFKVAAYPSRIYYGDIDVGKIDVVNLDFYNLYSNYDKSTMESLSADFTKRLLNQRLNQFCTLKFEDYFDTSSATPEEYYDLIFKVSMNVPRIIGYILYYCHQTNVSLGRKINKGSIEKAAQTYYEQVVSKFFDIATHSLMSFSEKVSELQQKEILNLFVQKLKTIKRQIITNELTGTIYNRDRTNPYCSHFYFQPNLEHFLRTLELNFFITKYNELVNKDGNKVSIYGINYGLARSENLKWGKPEGNQFRSYFVERPFDFNKDIEDFLRESKKIVCLNSSCDKTYPYEELAFLEYNKMRCIECQSPVEVRSFSESISSEISKIDNAKLLPKLELMILHELNKADDHLLARDIAEELDASSQLIAKRAEKLDRKGLVFRDKSDALIKYSITNKAVEGYFYDD

SEQ ID NO: 743 - DNA, 501 bp, Shigella sonnei
atggaaataaaaaaacctacaaaaaaagagttatatgactatttactatcgaaatatatagaagataaatgcaaagaagaagctgatgaaatcaataagaagtcgatgagtcgtgtcaataaacataaggagcggctgatggagattacgccagaaatcttcttccgtttcttgtctgagaagggggtttccagtgtctgcccttcatgtggatcgtctcgattatctgtgcctgaaagtatggatctttgctgggataaaaataagaaaccagaaaattttaacaatctacccttggaggagcagagtgagttaattaaagagaacataaagcattatgtatcttatacttttttgggtgatgttaagagcatacctgatatgcgcaaaacttattacacgctgcattgcctgaattgtggttacctgagcctttaccgtacgtctgcggtgctgaagtggttggagaaagacaaagcacaggatggtgaaaatgggtaa

SEQ ID NO: 744 - protein, 166 aa, Shigella sonnei
MEIKKPTKKELYDYLLSKYIEDKCKEEADEINKKSMSRVNKHKERLMEITPEIFFRFLSEKGVSSVCPSCGSSRLSVPESMDLCWDKNKKPENFNNLPLEEQSELIKENIKHYVSYTFLGDVKSIPDMRKTYYTLHCLNCGYLSLYRTSAVLKWLEKDKAQDGENG

SEQ ID NO: 745 - DNA, 315 bp, Shigella sonnei
atggacgaatcaagaaagcagtttgaggaatacgttgccaaaaaattgagattaccattcgagatgataaccgaggcaagaaatggtgataggtactttgcattttcaagcatggatattcgtcactccttaaatgagtggtgggctttatggcaggcatcgcgagcagctattgaaataatcgcgccaaagtttatcgacagcagagaagcattagccaaagggtttactgttgattattccaatggcttcggtgatgcaatggatgcttatgaggaaaacatccgcgccgctggaataaaagtgaaggagtga

SEQ ID NO: 746 - protein, 104 aa, Shigella sonnei
MDESRKQFEEYVAKKLRLPFEMITEARNGDRYFAFSSMDIRHSLNEWWALWQASRAAIEIIAPKFIDSREALAKGFTVDYSNGFGDAMDAYEENIRAAGIKVKE

SEQ ID NO: 747 - DNA, 258 bp, Escherichia coli
atggcaacctgctggctgaccggagaatgtctgcaggaaggttcacgggaatgtcgccagcaccagggacagggcccggctccacaataccagcgccggcattttgcacactgccagcgcaccggcatcacaacacgtatcatgcaactccccctcgtgattcctctgttcgctgctgcatccactgctccacttcgcttctgtacccgcggctgctacgacccggttttatgggttcaggaaaatggccttcactga

SEQ ID NO: 748 - protein, 85 aa, Escherichia coli
MATCWLTGECLQEGSRECRQHQGQGPAPQYQRRHFAHCQRTGITTRIMQLPLVIPLFAAASTAPLRFCTRGCYDPVLWVQENGLH

SEQ ID NO: 749 - DNA, 579 bp, Citrobacter koseri
atgaacagaatcagtcgctattattttcaccgctcagtactttccttattgatagctgccatgatatatgccccgcctgggatgacggccttcacttctaatgttattggcgttgtaaatgatgagactgtagacggcagccaaagagtagatgaacgaggtacaacaaataatgctcatatcatcaatcacggcaatcaggaggtatatggcgggatttctaatggaagtgttattgatactggtggacatcaagaggtatctggtcatggctcttatcaggggcaggctaataatacagtcattaacggtggcagccagacaattagtgagggaggaatttctacagggacgataattaacgataaaggaacaatgtcagttttaacgaatgctaaagctgatgcgacccgaatagataacggcggggccatggatgttgccgggaacgcgactaataccataattaatggcggtacacagaatatttataatcatggtattgctacgggaaccaatatcaacagtggcacgcaaaatactgatgaatcccctaatgattttggtaaaaatcattaa

SEQ ID NO: 750 - protein, 192 aa, Citrobacter koseri
MNRISRYYFHRSVLSLLIAAMIYAPPGMTAFTSNVIGVVNDETVDGSQRVDERGTTNNAHIINHGNQEVYGGISNGSVIDTGGHQEVSGHGSYQGQANNTVINGGSQTISEGGISTGTIINDKGTMSVLTNAKADATRIDNGGAMDVAGNATNTIINGGTQNIYNHGIATGTNINSGTQNTDESPNDFGKNH

SEQ ID NO: 751 - DNA, 498 bp, Escherichia coli
atgtcgatgcttgaagcacgttacttcgtggcaaagataagcgatgcacaggccgtgctctgcgatgaggagctggcgacactggaaaggctgatccggaaggttgatgatggccgcagagcaaatggcaagagctcgcttacttgcgttgttgtcgaagaagattggccgaactggcagcaaacggttgactctgtactttcacttgctgacgggaaagacaacgattggaccaatgccacaccagaacaaatcaaggccttttgggtcgatgactcagtttggaaaactctggatggccgggataaatggattgaagatctcgacctgctggtggacggttccccggtggcttctgagtgggaaccttttggcttggaatcagggcagtctgtcgtcatacgaggcggatggatagaagggaatgccttgagtgatgatggcgtaccgctagtgcaggcattcgtcgcttggaaacagggccaagacaaccactaa

SEQ ID NO: 752 - protein, 165 aa, Escherichia coli
MSMLEARYFVAKISDAQAVLCDEELATLERLIRKVDDGRRANGKSSLTCVVVEEDWPNWQQTVDSVLSLADGKDNDWTNATPEQIKAFWVDDSVWKTLDGRDKWIEDLDLLVDGSPVASEWEPFGLESGQSVVIRGGWIEGNALSDDGVPLVQAFVAWKQGQDNH

SEQ ID NO: 753 - DNA, 489 bp, Escherichia coli
ttgagtgcaattatcagcaagtgcggcatgtacagataccgtctggaaagggatgtgcaacccgaaggccttgtgttcggttattttggtgtaaacggctctacggccacggccaccgaggacgatcacacggtcagaaagtggatagggtttaccaaggtcaacggagggaggcgattcatagtcggtaatgcttttgcttttcgggcgaccgacgttcgagagctggctacggcggttgatcctgtcgggcctgaaaatgaaatccacttggaaaggattattcgggatgctgatgtcttggtgccctgctgggggagccgaactaagctgcctaagtctttgcatgttcatttggacaggcttttagagcagctcgttgcatctgggaagccggtattggcatttggcgtgactggttcgggggacccgaagcacccactaatgcttggatattcgacaaaacttgtgccctggggaggaaaataa

SEQ ID NO: 754 - protein, 162 aa, Escherichia coli
MSAIISKCGMYRYRLERDVQPEGLVFGYFGVNGSTATATEDDHTVRKWIGFTKVNGGRRFIVGNAFAFRATDVRELATAVDPVGPENEIHLERIIRDADVLVPCWGSRTKLPKSLHVHLDRLLEQLVASGKPVLAFGVTGSGDPKHPLMLGYSTKLVPWGGK

SEQ ID NO: 755 - DNA, 336 bp, Escherichia coli
atgaaacatgtactgaatatcgcgctgatggctgttgttattcttggcctggctatgcttgaggccaccaactggggttacgcagtgctggctatcccggcagtgatttgggccaagtcggtgctcaaccttctgcacaaactgccggttctggctgctgctttttggattctggttgctgttttcgcgtggcaagcggcacttgttggtatcctgttctatggcgtacttgcgacccctaaagcgccagcaaacaccaatggcaagaaaagccgaaaagccaatctgatgggcacttacagctacgactttaaaaccggcgaatgctttagctaa

SEQ ID NO: 756 - protein, 111 aa, Escherichia coli
MKHVLNIALMAVVILGLAMLEATNWGYAVLAIPAVIWAKSVLNLLHKLPVLAAAFWILVAVFAWQAALVGILFYGVLATPKAPANTNGKKSRKANLMGTYSYDFKTGECFS

SEQ ID NO: 757 - DNA, 144 bp, Escherichia coli
atgctgcaaggcaatactaacacgaataagcgcatcccgctcgcggcgttcatgaaatggccgctggcgaaacgtcaggacttcatcgaccgggaaatgtccggttgccccgactttatcaagacgtctttgcttcggcattaa

SEQ ID NO: 758 - protein, 47 aa, Escherichia coli
MLQGNTNTNKRIPLAAFMKWPLAKRQDFIDREMSGCPDFIKTSLLRH

SEQ ID NO: 759 - DNA, 222 bp, Escherichia coli
atgggtgcatgctgtctgtctgctgattgcagtaaaattagtgggatgacgccacaactcataaaaaaaggtttaattggcggactggagtgcgtctcgctaataaaactgtataaatccgcgatcaccagatgcggtttccattgcaaaatatgctcttttgctaacaggagattattgattcctgataccagaaatgaggagctgaacctgccagaatga

SEQ ID NO: 760 - protein, 73 aa, Escherichia coli
MGACCLSADCSKISGMTPQLIKKGLIGGLECVSLIKLYKSAITRCGFHCKICSFANRRLLIPDTRNEELNLPE

SEQ ID NO: 761 - DNA, 822 bp, Acinetobacter baumannii
gtgggaaagaggagggtaaattttcagcgttgctggctccccgtcagccggattgggttgcatcgcaggggtgtcgaaagagtcaactgcggtccaaagctgttggacttgggtgaaaagggcgtttattcttcctatacgtgccgcgttccaggcggcgactatgagggctatgtcgatgcccatgtgcgccggctggaggcgctacgccgggccggtatcgtcgagcggatcgacgccgaccaatggcgcatccccgatgatctggtcagccgtgccgccgcccatgacgccggccgagacagtcaggccagcgttcgcgtcctttccccggtcgatctgaacaaacagatcggatcggacggcgcgacctggctggaccggcggctgatccacggcgagacggccgaccttgcgccaaccggcttcgggcaacaagtccgcgaagccatggaccagcgccgcgagcaccatatcgaacagggcgacgccacccgcagccgggacagccgcgtcttctaccggcgcaaccttctcgccatcctgcgggagcgcgaggtagccggcgtcggatcggatatggctttgagtaagggcctgccgttccgcgccgccacggacggcgagagcgtcagcggcaagtttaccggaaccgtgcatctatcgagcggcaagttcgccgtggtcgagaaatcccatgagttcacccttgtcccgtggcggccgatcatcgaccgccaactcggccgcgaggttatgggcatcgtgcagggcgggtcggtgtcgtggcagttagggcggcagagggggctggaacgctga

SEQ ID NO: 762 - protein, 273 aa, Acinetobacter baumannii
MGKRRVNFQRCWLPVSRIGLHRRGVERVNCGPKLLDLGEKGVYSSYTCRVPGGDYEGYVDAHVRRLEALRRAGIVERIDADQWRIPDDLVSRAAAHDAGRDSQASVRVLSPVDLNKQIGSDGATWLDRRLIHGETADLAPTGFGQQVREAMDQRREHHIEQGDATRSRDSRVFYRRNLLAILREREVAGVGSDMALSKGLPFRAATDGESVSGKFTGTVHLSSGKFAVVEKSHEFTLVPWRPIIDRQLGREVMGIVQGGSVSWQLGRQRGLER

SEQ ID NO: 763 - DNA, 237 bp, Acinetobacter baumannii
atgaacagccccgagcgcatgccggccgagacacacaagccgttcaccggctacctgtggggtgcgctggcggtgctcacctgtccctgtcatttgccgattctcgccattgtgctggccggcacgacggccggcgcgttcatcggcgagcactggggtattgcagccctcacgctgaccggcttgtttgtcctgtctgtgacgcggctgctgcgggccttcagaggtcgatcatga

SEQ ID NO: 764 - protein, 78 aa, Acinetobacter baumannii
MNSPERMPAETHKPFTGYLWGALAVLTCPCHLPILAIVLAGTTAGAFIGEHWGIAALTLTGLFVLSVTRLLRAFRGRS

SEQ ID NO: 765 - DNA, 648 bp, Escherichia coli
atgaataaacttaaagcaattggcataattcgacatcgtgtagatccggacttttacccttcttttgaggttgctacataccgcagcgaataccaatatggatcatctttccttttgggcgttcgcgctgatactggcggcacttattcagtaatggcggcttcatgggtttttgaagaatataaaaacattgatgatgatggcatgaataaagaaagtgaaatcattgacgagttaatcgaagatgagcgccatgattgtgataaaccaaaagtcgaggaatggcagccaggggaaagaccgccgttagatgtatggctcgaattttacccaggtgactttgcgcctgtatactgcgtagccaaatatatttttactggcgatgaaatagggatatttgttagaaggactggaaaatgtgaagaaacagcaagatggaaccgttttaggtatcgccgctggatagatccgaaagaaaaagcactggcgcaaattgcgtttgcactggctactaaggttattggtgaagacgcagcaggagaaataaatttcaatcgtgataatgattattcgcgtgattatcgcaacatggcgcaagctattatagacggatgtatcggacacgttgaatacacgggggataaataa

SEQ ID NO: 766 - protein, 215 aa, Escherichia coli
MNKLKAIGIIRHRVDPDFYPSFEVATYRSEYQYGSSFLLGVRADTGGTYSVMAASWVFEEYKNIDDDGMNKESEIIDELIEDERHDCDKPKVEEWQPGERPPLDVWLEFYPGDFAPVYCVAKYIFTGDEIGIFVRRTGKCEETARWNRFRYRRWIDPKEKALAQIAFALATKVIGEDAAGEINFNRDNDYSRDYRNMAQAIIDGCIGHVEYTGDK

SEQ ID NO: 767 - DNA, 207 bp, Escherichia coli
atgagacgggtaatcttttattcagttgaaacattcattgatgaatcacatttccgtttcccgtgcgattctcgcggcgcgatggtttatacacctccacttatgcgcaagtacagacacgtaaaatttaaacgggtttttgttccaattcgtgaagcgttacaggcgctgcgcggtgaattacgaaacacaatgcgcattgtgtga

SEQ ID NO: 768 - protein, 68 aa, Escherichia coli
MRRVIFYSVETFIDESHFRFPCDSRGAMVYTPPLMRKYRHVKFKRVFVPIREALQALRGELRNTMRIV

SEQ ID NO: 769 - DNA, 177 bp, Escherichia coli
atgtcttttgagaattaccaatggcatgacgactatgaacgggaaagtgtcatgcgtgcaatgtgcagtgtatgcagcacgaagaagggagaatgtaacgagtgcaacgaatgcgtagatcgcttgctaagggccggacacgccgaaaggctgaacgaaacagagaatcaagaataa

SEQ ID NO: 770 - protein, 58 aa, Escherichia coli
MSFENYQWHDDYERESVMRAMCSVCSTKKGECNECNECVDRLLRAGHAERLNETENQE

SEQ ID NO: 771 - DNA, 1059 bp, Escherichia coli
atgcgcatgaatagacttccaggatatggccttcccgaactggctttttggcctcagcctaaatatgaacggaataaatggtcgatgttctgtctgaaactccgtaatgatggaacccttgcttggtatcggcgatatgttgatcgtggtatgccaaaccacgctgttgatgacgactacgataactatcctgaagcaagaaaagcggcattagagctgaataaaaacgtgagctttgacattgaaaaacttcctctatctatgtttcaaaagaagtcattgcgtttgaaagttgacaaagcactcaaagccaaatcacgtctcatggatgaagagtatataatgctcaacgaagcaattaaggcacacgccaacgatccgcgagtgacattaaatgagttaataattaacccagattacgaaactttgcgtcaacccctttttgacgtgctaagcgagatgccttacttacattttgtttttcttcccaaattccaagtttcacttcaactcgttgctcctaacacttgggaatgttcatataacaacaaagctaagacagcgaagatctgctaccaagaacgcatagccagaggttttggtttatcaggtgctgcacattggggaaaaacaaaagcgactattcgctcaatgcttctgccgcgtgctaaccggttactgcaactcgccagcgtaaaaagaatgctggatgaagctctcaggaatgggcaaaaggtactggttgttggcaactttgttttctggtttgaggacaaaaatcaggtaggttggagtgttaaagttgctagcgaaagcgaaaccacctcaagaggcaatacgctctggaaagaaggaactatcatttcaaaaaatcacggtcgaattgtcgtgctgccgtatacaaaagaaaacggtaaacatgtaaaaggttataccaagaatgcccctaacgacggcaatgcaattccgagacataaggatgagtatgttgagttgccctttgaaattttggatggtgacttgatgttcagtctgttcggtgagcttaactacgaatag

SEQ ID NO: 772 - protein, 352 aa, Escherichia coli
MRMNRLPGYGLPELAFWPQPKYERNKWSMFCLKLRNDGTLAWYRRYVDRGMPNHAVDDDYDNYPEARKAALELNKNVSFDIEKLPLSMFQKKSLRLKVDKALKAKSRLMDEEYIMLNEAIKAHANDPRVTLNELIINPDYETLRQPLFDVLSEMPYLHFVFLPKFQVSLQLVAPNTWECSYNNKAKTAKICYQERIARGFGLSGAAHWGKTKATIRSMLLPRANRLLQLASVKRMLDEALRNGQKVLVVGNFVFWFEDKNQVGWSVKVASESETTSRGNTLWKEGTIISKNHGRIVVLPYTKENGKHVKGYTKNAPNDGNAIPRHKDEYVELPFEILDGDLMFSLFGELNYE

SEQ ID NO: 773 - DNA, 366 bp, Acinetobacter baumannii
atgagcgcctacacagtgtcccggctggcccttgatgccggggtgagcgtgcatatcgtgcgcgactacctgctgcgcggattgctacggccggtcgcgtacaccacgggcggctacggcttgttcgatgacaccgcgttgcaacggctgcgctttgtacgggctgccttcgaagcgggtatcggcctggacgcactggcgcggctgtgccgggcgctggatgctgcggacggtgacggtgcgtctgcgcagcttgccgtgttgcggcaactcgtcgagcgtcggcgcgaggccctggccagcctcgaaatgcaactggccgccatgccaaccgaaccggcacagcacgcggagagtctgccatga

SEQ ID NO: 774 - protein, 121 aa, Acinetobacter baumannii
MSAYTVSRLALDAGVSVHIVRDYLLRGLLRPVAYTTGGYGLFDDTALQRLRFVRAAFEAGIGLDALARLCRALDAADGDGASAQLAVLRQLVERRREALASLEMQLAAMPTEPAQHAESLP

SEQ ID NO: 775 - DNA, 426 bp, Escherichia coli
atgggactcatcacgcgcatcgctggcaaaaccggcgcgctcggcagcgtcgtttccgcgatgggctgcgccgcctgttttcctgccatcgccagctttggcgcggccatcggactgggcttcttgagccagtacgaggggctattcattggcatcctgctgccgatgttcgccggcatcgcgttactcgccaatgctatcgcttggctcaatcatcgacagtggcgacgcacggcgctcggcacgataggcccgatcttggtgctggcagcggtgtttttaatgcgggcttacggctggcagagcggtggactgctctatgtcggcctggccttgatggttggggtgtcggtctgggatttcatctcgccagcacatcgccgctgcgggccggacagctgtgaattgccagaacaacgtggctga

SEQ ID NO: 776 - protein, 141 aa, Escherichia coli
MGLITRIAGKTGALGSVVSAMGCAACFPAIASFGAAIGLGFLSQYEGLFIGILLPMFAGIALLANAIAWLNHRQWRRTALGTIGPILVLAAVFLMRAYGWQSGGLLYVGLALMVGVSVWDFISPAHRRCGPDSCELPEQRG

SEQ ID NO: 777 - DNA, 276 bp, Escherichia coli
atgaaaaaactgtttgccgccctcgccctcgctgccgttgttgcccccgtgtgggccgccacccagaccgtcacgctgtccgtgcctggcatgacctgcgcctcttgcccgatcactgtcaagcacgcgctttccaaggttgagggcgtgagcaagaccgacgtaagtttcgacaagcgccaggccgtcgtcaccttcgacgatgccaagaccaacgtccagaagttgaccaaggcgaccgaggacgcgggctatccgtccagcctcaaacgctga

SEQ ID NO: 778 - protein, 91 aa, Escherichia coli
MKKLFAALALAAVVAPVWAATQTVTLSVPGMTCASCPITVKHALSKVEGVSKTDVSFDKRQAVVTFDDAKTNVQKLTKATEDAGYPSSLKR

SEQ ID NO: 779 - DNA, 258 bp, Escherichia coli
atgaaaacgacctgtcatgcggccggcatcacggcggcgccgctttccccgcaggagtggcgggcgctgctcagggcgaaaggctggaagcagaaggagctggcccgccgctggaatgtgtcagaaacctggatcagtaagctggccaataaccccgaacggggcacgcactggaacgatgcctgccggggtctgcccgatattcgtgcccggcggcccggcgaaccgcacagacgcaccagagccgggaggccctga

SEQ ID NO: 780 - protein, 85 aa, Escherichia coli
MKTTCHAAGITAAPLSPQEWRALLRAKGWKQKELARRWNVSETWISKLANNPERGTHWNDACRGLPDIRARRPGEPHRRTRAGRP

SEQ ID NO: 781 - DNA, 216 bp, Escherichia coli
atggagcgccgcctatctgtgcaggccgctcaatctcagatgatgacctttgcgcctcatgccagcatctcgactatcgccctgggcacctcagcgcctgcctgctgtcaggttgcgggcgtgacgactggccttcagaactggatgcaaacggctacagcgttgcctgtagcagctatgagcgtgaaaaatcgcttgattaatatggctcattag

SEQ ID NO: 782 - protein, 71 aa, Escherichia coli
MERRLSVQAAQSQMMTFAPHASISTIALGTSAPACCQVAGVTTGLQNWMQTATALPVAAMSVKNRLINMAH

SEQ ID NO: 783 - DNA, 1008 bp, Escherichia coli
atgaaaatattatatgatgggattgtgaaaagtttacaatcatatggtggtatcactgtatactttgaagaaatcattaagagattaaaaaatgacgaatacaaattcattcaatttaatgataaaaatgaaaatcacaatgatgatctccatcggccatgccggtttttagaacgatatagatgttttgaagcattaaaaagtgattcagattacagtatatttcattctacatattatcgggttccgaaagatggggaatatgcggttgtgaccacggtccacgatttcacatatgaattgtatatgaaaggacttcggcgcaatgttcatagcttacaaaaaagatgggctgtgaaacatagcgatgcaatcatttgtgtctctaataatacagccaaggatttaattaatttctttaaggttgatgaaaaaaagatacatgttattcataatggtgtatcggaagattatagacacttaaatctagaaaaagaaaattttgtgctttttgtcggtgctcgttcaggatataaaaattttgagcttgcagttaaagccgtttctaaactttttgatactaatcttaaaatagtcggcggaggtggtttaaataaagcagaaatgaagttactatctgaatatcttccagaaagattccagtacttagggaaggtatcaaatgaaaaactaaatatattatataattcggcttattgcttaatctatccttcagaatatgaagggtttggaattcccttgcttgaggctatgcgaactggctgtcctgtgatagccgtaaatagatcatcaatacccgaggttgtgggggatagtgcgattttagtcgaagaagtatcaattgaaagtttattctcagctttattaagtgtagaagctaacgctaatgaattaaaaaataaaggattagcgcaatctaataaattttcatgggggaagtgtttctccgaaacatataatctatataaatcactatctaagttttga

SEQ ID NO: 784 - protein, 335 aa, Escherichia coli
MKILYDGIVKSLQSYGGITVYFEEIIKRLKNDEYKFIQFNDKNENHNDDLHRPCRFLERYRCFEALKSDSDYSIFHSTYYRVPKDGEYAVVTTVHDFTYELYMKGLRRNVHSLQKRWAVKHSDAIICVSNNTAKDLINFFKVDEKKIHVIHNGVSEDYRHLNLEKENFVLFVGARSGYKNFELAVKAVSKLFDTNLKIVGGGGLNKAEMKLLSEYLPERFQYLGKVSNEKLNILYNSAYCLIYPSEYEGFGIPLLEAMRTGCPVIAVNRSSIPEVVGDSAILVEEVSIESLFSALLSVEANANELKNKGLAQSNKFSWGKCFSETYNLYKSLSKF

SEQ ID NO: 785 - DNA, 177 bp, Shigella sonnei
atgcccttgaagatgacgacgatgttcaaaaagtttatcataacgtcgcaaatctctaattatattttaaaggaatctgtctttatggcagatttctttaatctcatatattcttataaaaaatataatattcaactcgtcatattgattataaaaataccgaccccagagaaataa

SEQ ID NO: 786 - protein, 58 aa, Shigella sonnei
MPLKMTTMFKKFIITSQISNYILKESVFMADFFNLIYSYKKYNIQLVILIIKIPTPEK

SEQ ID NO: 787 - DNA, 381 bp, Escherichia coli
atgacaaatacacttgacccatcacgcgagcaaatcgaaatgtggcgcagagctaccggttccgaaggtggactcaacgaataccgcaactggattctggaaaacagaatgagatttacagcatacggtattcataccgttatcgtcgaaggtgaggcgaagcatataacagcgcttgatgatgttaccctctgtaacgagtgggcgaagcttaaaagagaaaacaataggctttacgcagcaaatgaaaaaatttgctctggctggcgtggttttgtgttgcgtttgttaggaataacactgccatgcagaaaaccggtcatcttactgggggcagatgggaagaatcaaaatgatgccgtgaaaggggctgatttgtaa

SEQ ID NO: 788 - protein, 126 aa, Escherichia coli
MTNTLDPSREQIEMWRRATGSEGGLNEYRNWILENRMRFTAYGIHTVIVEGEAKHITALDDVTLCNEWAKLKRENNRLYAANEKICSGWRGFVLRLLGITLPCRKPVILLGADGKNQNDAVKGADL

SEQ ID NO: 789 - DNA, 666 bp, Escherichia coli
atgatctctgaacgctcagtacacttaatcacttcctgtacaaagggcaagaatcatcagggccacgtctggccgacattggacatagatccaaaacaaaccccggacgacgcagcatatgcctggagtaacattgtagacgacgccagaagtaatcaggcggtaccggcgttgtccttgtattcaggtaatcactggtctacggcaaaggaaattttaaactcaaccagaaatctggagttgtggataatctctgccgggatgggttttttaaatagtcgagatcgggtgccctcttacgaggcgacatttcatcaagtaccattcaggcatgatctctggtggaaagccctcacaaaatcactaggaaagcataaccgttgcgcaactataagccagttaatgcagtccagtccgaatgatgaatatttgattgcggcttcgcctgtttatattgctgctgtccagaatgacatcctgaagggcatcgagagtttgactcatcctcttacgcaactaacgatcgtaacatcaggggcatatgctggcccacttgaagaatacttaattaagagttcttcaagaatgatgaaagatctggagtgcaatatggtgtgcctgaatataaaactggctcaatacatacttaaaagtggtagtcgttag

SEQ ID NO: 790 - protein, 221 aa, Escherichia coli
MISERSVHLITSCTKGKNHQGHVWPTLDIDPKQTPDDAAYAWSNIVDDARSNQAVPALSLYSGNHWSTAKEILNSTRNLELWIISAGMGFLNSRDRVPSYEATFHQVPFRHDLWWKALTKSLGKHNRCATISQLMQSSPNDEYLIAASPVYIAAVQNDILKGIESLTHPLTQLTIVTSGAYAGPLEEYLIKSSSRMMKDLECNMVCLNIKLAQYILKSGSR

SEQ ID NO: 791 - DNA, 405 bp, Serratia marcescens
atgtctgaagcactcaaatcgttaaacaatattcgtactcttcgcgcccagggccgcgaactgtctttagaagtacttgaggaaatcctcgaaaagctgaccgtaattgttgaagagcgtcgtcaggaagagtcttctaaggctgccgaactgcaagctcgtcaggaaaagcttgatgctctgcgtaagttaatggaagaagacggcattaacccggaggagctgctgggctcattccaggctaaatcctcggctcctaagaaagcccgcgaaccacgcccggccaaatactcatttactgacgaaaatggcgaaacaaaaacgtggactggtcaggggcgcaccccaaaagctctggcagaacaacttgcagccggtaaaagtcttgatgatttcctgatctaa

SEQ ID NO: 792 - protein, 134 aa, Serratia marcescens
MSEALKSLNNIRTLRAQGRELSLEVLEEILEKLTVIVEERRQEESSKAAELQARQEKLDALRKLMEEDGINPEELLGSFQAKSSAPKKAREPRPAKYSFTDENGETKTWTGQGRTPKALAEQLAAGKSLDDFLI

SEQ ID NO: 793 - DNA, 204 bp, Escherichia coli
atgcaaacccaaaaagaaattacagttggccagatctgggaagaagtggatccaagactgatccggaaagtgcgagttgttgaggtggcctcgttagaagggcccaaaggcatcctaatcgaaaacgtggagtctggtcgtaagaactgggcgtcgtcatcccgctttaatggaaagcgtggagggtaccgtcttatttcctga

SEQ ID NO: 794 - protein, 67 aa, Escherichia coli
MQTQKEITVGQIWEEVDPRLIRKVRVVEVASLEGPKGILIENVESGRKNWASSSRFNGKRGGYRLIS

SEQ ID NO: 795 - DNA, 858 bp, Escherichia coli
atgaaaatgacgaagtcaaacccggtaagccggatgaaaaaaccgtttattagtgagcttgcagaactggatttatcgggtgaaattctttcaattcgaactgacggcatgcaggggacactcatacccgatcttaccgcaggggtgagtgaagcaacccgtgtgaaaaccggcaactgggtaatctctgacaaaagaaccttcgaccatgtcgttctgtgtgttgaaagacaagatgagaactatgatgtgttcgtaggtaaattcatccagttacatgtagccgctaataagagccttaagatcgtcgaaatgggcgatgtgaaactggtggccaagactagttcgattcctactatttttaatggtggggtaaggagatacaaaggggttacgtatgtgtcactttcccaaacagctcaaaccactatcgacttcccgaagcgtatctacaaagagggccaggaatgtacttctgtcaccagtcctgaccaaggtcctttcgcccgggatgttaggttgaattgctacgggcgatgtgttgtcaccggcgtaaggtccccctggcgtactgaggccgcgcacttaacgccccgtcatgaagaaggcattcccgacgtaacgaacggaattttacttcgccgtgatatccatacactgttcgacaatgaccattgcgccataaaccctgacactatgaaaatttacttcagccgggaggcccgggagttggatgatgatctcctgaaatggcatgggaatgagatagagacgacacgcatgcaagttccggttaacatcgaaaaccttcggatacgatggcaaaaatttaaggctaaggatcgtcagcgtaaataa

SEQ ID NO: 796 - protein, 285 aa, Escherichia coli
MKMTKSNPVSRMKKPFISELAELDLSGEILSIRTDGMQGTLIPDLTAGVSEATRVKTGNWVISDKRTFDHVVLCVERQDENYDVFVGKFIQLHVAANKSLKIVEMGDVKLVAKTSSIPTIFNGGVRRYKGVTYVSLSQTAQTTIDFPKRIYKEGQECTSVTSPDQGPFARDVRLNCYGRCVVTGVRSPWRTEAAHLTPRHEEGIPDVTNGILLRRDIHTLFDNDHCAINPDTMKIYFSREARELDDDLLKWHGNEIETTRMQVPVNIENLRIRWQKFKAKDRQRK

SEQ ID NO: 797 - DNA, 606 bp, Escherichia coli
atgaattatcaaataaatcaatattctaccttactttcatgcctttatgacgaacagcatcccatcggcaatctggggcgcggaacccattattcaatattcagaactgtagaatggctcgatgttacccgtacacctgttgacttaccccaattgcatgatttttcagtcatctgggatgaagatcatgatgagcgaatcattaacgtaatcgaaaacatttacatggctggattactttcacctgtacaatttattggtgagagaaaggggacccttacagtaattgtcgcggcgaaattctatttcggtggaatccccgatataaaagattacgaaaaacaattacaaaagatttgcgatcaatccacttatggagatttttggccagtagaggtagggatgtttgatcgctcaccaggatttcctcctgatgccccacatcagacagaggttctcggattgataaatgataaacatcacagagtagttacttatttaagaaacatcgattcactttgggcgctgggtacaaagccttttatgccaaaaggaaaagaaagtgtctctattttttcgtctgccccccctattccaaaacagtaa

SEQ ID NO: 798 - protein, 201 aa, Escherichia coli
MNYQINQYSTLLSCLYDEQHPIGNLGRGTHYSIFRTVEWLDVTRTPVDLPQLHDFSVIWDEDHDERIINVIENIYMAGLLSPVQFIGERKGTLTVIVAAKFYFGGIPDIKDYEKQLQKICDQSTYGDFWPVEVGMFDRSPGFPPDAPHQTEVLGLINDKHHRVVTYLRNIDSLWALGTKPFMPKGKESVSIFSSAPPIPKQ

SEQ ID NO: 799 - DNA, 816 bp, Escherichia coli
atgatttatcactatacagatttgaatgccgcaacatcgatagcaaataatgctcagatgtggctgaccgattatcgattcctgaatgataaggaagaatttaaacaaggatttgaggtattgcttgaggcgcttgagtcataccaagataattctggtaaatataatccagaatttttctatactctttcaagagcgatagggtttatacgtgatgataacttctcaaattttgaagggaataatatatttgtatcatcatttagtaaaacccccgatttattgagtcagtggcgaagttatggaatgtattgtctggagcttgacgccgattttttcagggatgaaggagtatctgtactcgaatgcatctatttacatgaccgaagagaggctcttgataaagcaaatgaaattatttgcaatgaatttattccagtgctatttgatacttggaaggaaaatagaccgtatttgattgatattgtacttagttcattgcttgagattcatgctctatcattcaaacatgcggctttcgccgatgaggatgaagtcaggtttgtactgagttgtgcacctgatgatgaaaaaattaaattccgggtgaaagggcaattattgataccgtatgtatcctttgattttgatcctgaattattgaaaacgataatagtgggtcctgttgataatcaggaattggcctatgaatctttatctatgttcgctaggaaagttaaacgtaaagtacaagaaagtaatatagaatatgatttagttattgaaaaatcagagattccttttaggagtatttaa

SEQ ID NO: 800 - protein, 271 aa, Escherichia coli
MIYHYTDLNAATSIANNAQMWLTDYRFLNDKEEFKQGFEVLLEALESYQDNSGKYNPEFFYTLSRAIGFIRDDNFSNFEGNNIFVSSFSKTPDLLSQWRSYGMYCLELDADFFRDEGVSVLECIYLHDRREALDKANEIICNEFIPVLFDTWKENRPYLIDIVLSSLLEIHALSFKHAAFADEDEVRFVLSCAPDDEKIKFRVKGQLLIPYVSFDFDPELLKTIIVGPVDNQELAYESLSMFARKVKRKVQESNIEYDLVIEKSEIPFRSI

SEQ ID NO: 801 - DNA, 915 bp, Morganella morganii
atgcttttatataaaatgtgtgacaatcaaaattatggggttacttacatgaagtttttattggcattttcgcttttaataccatccgtggtttttgcaagtagttcaaagtttcagcaagttgaacaagacgttaaggcaattgaagtttctctttctgctcgtataggtgtttccgttcttgatactcaaaatggagaatattgggattacaatggcaatcagcgcttcccgttaacaagtacttttaaaacaatagcttgcgctaaattactatatgatgctgagcaaggaaaagttaatcccaatagtacagtcgagattaagaaagcagatcttgtgacctattcccctgtaatagaaaagcaagtagggcaggcaatcacactcgatgatgcgtgcttcgcaactatgactacaagtgataatactgcggcaaatatcatcctaagtgctgtaggtggccccaaaggcgttactgattttttaagacaaattggggacaaagagactcgtctagaccgtattgagcctgatttaaatgaaggtaagctcggtgatttgagggatacgacaactcctaaggcaatagccagtactttgaataaatttttatttggttccgcgctatctgaaatgaaccagaaaaaattagagtcttggatggtgaacaatcaagtcactggtaatttactacgttcagtattgccggcgggatggaacattgcggatcgctcaggtgctggcggatttggtgctcggagtattacagcagttgtgtggagtgagcatcaagccccaattattgtgagcatctatctagctcaaacacaggcttcaatggcagagcgaaatgatgcgattgttaaaattggtcattcaatttttgacgtttatacatcacagtcgcgctga

SEQ ID NO: 802 - protein, 304 aa, Morganella morganii
MLLYKMCDNQNYGVTYMKFLLAFSLLIPSVVFASSSKFQQVEQDVKAIEVSLSARIGVSVLDTQNGEYWDYNGNQRFPLTSTFKTIACAKLLYDAEQGKVNPNSTVEIKKADLVTYSPVIEKQVGQAITLDDACFATMTTSDNTAANIILSAVGGPKGVTDFLRQIGDKETRLDRIEPDLNEGKLGDLRDTTTPKAIASTLNKFLFGSALSEMNQKKLESWMVNNQVTGNLLRSVLPAGWNIADRSGAGGFGARSITAVVWSEHQAPIIVSIYLAQTQASMAERNDAIVKIGHSIFDVYTSQSR

SEQ ID NO: 803 - DNA, 177 bp, Escherichia coli
atggaaaaagatctgaaagcgttgcgggaatacctgttactctcccctgactatcctgaagttaacgattctctggctaatttctcaactgaagacatgaccaacgaagagatagcggaacgtttgggaattgctccagattggatggaaaccgtagaccccagcaaacttacctga

SEQ ID NO: 804 - protein, 58 aa, Escherichia coli
MEKDLKALREYLLLSPDYPEVNDSLANFSTEDMTNEEIAERLGIAPDWMETVDPSKLT

SEQ ID NO: 805 - DNA, 2328 bp, Escherichia coli
atgtcttttgcgttggtaggtttaaaaaatttgttatgggtcatattaacgttatttgcactgggttttgttgaagattatattcggaataatacgattttgcttcatcctcttagctatgatgaaaaaaaatttaatattgatcaacttaggttgtacgcacagatacttaccgctatattttcaatatactttgctacaataggtatcattctaagtacaggatataccagacttcggcgagatattatacaaatgcttactaccgagcaggtaggtaatgtgtattcgcggactttagtgctttctgcggtgttttgtcttagtgcaactgctctccacttgttcggggttgaacccggtcttttcgtttatgcaatgggaacattgctgacacttgttagttccttagctctgttcccattaggtcaaagattattcaatttttttgacctaaatcagttagcccgaagtgaaatactcccacgaattgcacgacacatcgaaggtgcgtctaatcccaagaattcagtatctttagctaatcatcactctaaagccgcacatttggcctttgagcagttaaactacattgatgatcgcctgatatgtgaaaaagtaggactcggagataatttacctgctctcagtaatgtttattcggcattacttcttcattaccttaatcagaaacacagaattgattatcaaagttactggttccctagacgaataaaacataagcaatggttcttagctggcgacagtgtaacatccattgctttaaaaacaaggagccaattaacggttgaagaagaaccaaattatctttggttagagaatgaaattatcaataggttggtaggccatattgaacttgcattcaaagccggtgatttcaagctcgggttggatctcatcagtctattctcatctcgtatattaacttatgcacaacagtttcagttcgatattggtatacgtgaacttcggaaaatgaagacgatcattgaaaaagcctttacaccgtctgatgtcgttaattattttgaggaaaaggtgataaaagttggaattgcggatgcatgggctgcattaggcagcaatctttgccttgaaatgttacgccgcatgattacttttgagaaagaattggagcagttctttaaagatgatatctggacagagacctctctacacactttgcctgcttttctgcaggttgagttggcctttatcgtagaacgtatcgaattcgaaaaagagattgaaggacagagattatccaaaccaaagtacgtccagcagttggcggttcagaagttattacaacaatattctaaaattctgccagaagtatgcgattttcacgtaaacatggttccagatttcgttaactcactgataaacatgaagatgccggaagccgcaacgcaagtcgttctcgctagcctacataatcatttgaagtttccccattggtttaatgaactttctctgctcttggagagatacagaaagtacgagcactactctgaaaagctatacgcattaccagaaattaatattgctgaaatgctcaaacagtttgtcgttacacaggatgaagctatagctattcttggtagggtggaaattgtgggacatatcattgaacaagagcaagatgatgaactaccggatcattttggacagatatattttgagttggctgaggaatgtatacatgcgcttgaacagaatgatgaaaataaactgagcaaggtattccctatgttcatggttctctcattgctggcatcagataccaaatttgtagatccgaaactcgatataaacaacgagtttcgactgcatctcctttcatccgcgatcaacgatctgatgtcagttctaggttttgctatcctttacagtgcttatttcgataatgcaaaactatctaaaacagtacttgataggtttaagtcttggctcgagtctgttcccaacaaacagcagtatttgaagagaatgatgattctttcaaatccgcgcaatttcagcttgtgcgcatcaccgagagatatgattcgtcttaactggaaaatggaatttgagcgccgcgcaagacatgatggctttagcgatcaaatgggaatgaatcgagggaaatctcatacgaacaaagttgtcagagagttcttaaactcccattcagatgcatcgcatctcttttgtgctctcgaaattttcccgcaactcgagcaaattgacttcaagatcgattaccatgttagtgagttggctcgtcgttttggcgtggaatacgataaggattttgaatga

SEQ ID NO: 806 - protein, 775 aa, Escherichia coli
MSFALVGLKNLLWVILTLFALGFVEDYIRNNTILLHPLSYDEKKFNIDQLRLYAQILTAIFSIYFATIGIILSTGYTRLRRDIIQMLTTEQVGNVYSRTLVLSAVFCLSATALHLFGVEPGLFVYAMGTLLTLVSSLALFPLGQRLFNFFDLNQLARSEILPRIARHIEGASNPKNSVSLANHHSKAAHLAFEQLNYIDDRLICEKVGLGDNLPALSNVYSALLLHYLNQKHRIDYQSYWFPRRIKHKQWFLAGDSVTSIALKTRSQLTVEEEPNYLWLENEIINRLVGHIELAFKAGDFKLGLDLISLFSSRILTYAQQFQFDIGIRELRKMKTIIEKAFTPSDVVNYFEEKVIKVGIADAWAALGSNLCLEMLRRMITFEKELEQFFKDDIWTETSLHTLPAFLQVELAFIVERIEFEKEIEGQRLSKPKYVQQLAVQKLLQQYSKILPEVCDFHVNMVPDFVNSLINMKMPEAATQVVLASLHNHLKFPHWFNELSLLLERYRKYEHYSEKLYALPEINIAEMLKQFVVTQDEAIAILGRVEIVGHIIEQEQDDELPDHFGQIYFELAEECIHALEQNDENKLSKVFPMFMVLSLLASDTKFVDPKLDINNEFRLHLLSSAINDLMSVLGFAILYSAYFDNAKLSKTVLDRFKSWLESVPNKQQYLKRMMILSNPRNFSLCASPRDMIRLNWKMEFERRARHDGFSDQMGMNRGKSHTNKVVREFLNSHSDASHLFCALEIFPQLEQIDFKIDYHVSELARRFGVEYDKDFE

SEQ ID NO: 807 - DNA, 993 bp, Escherichia coli
atgaaaattatcaagaatatacccctttacggttatagcgtcgatcctgagcaattaagttttgttgatagactattgaccaagtctaagaatgaacgaccaggtttctatcaaaggatgttttatgaggattttgctagagtttttaattttgtaaatcacggtgataccaatttgtttcaagtcgaaactaacgacgaagaactcatacgtaaaatgtttggaaatttacaagctagatataggaaatactcggtagatgaaacaatacgtgaattggtggaggcagtagcgcaatcgttgatttggcaaggaacggcatactattttgttcaaaacgttcctgagcaagaaaaaatacatattactcctctcgtttctgataatatattttgttttttttcagtgtattttcagtatgtgccgaaacggtgtgaaagatatttagaacgggatcatgagatgcttccaagagaattaagaatcttggataaaaacaaactaatgcgtttcgaaattcctaggtccttaaggcggatgttgtctgaacaaaatcggactttaaagatcattgacaagcatcaatttggtgttactaatttttatcctcaagcaacatacgaaaatcctaacccgaaaagtcactttgattttagcatttggaaaaatacgcaagagcaagcattattccgagctacgaggaaaaccgggtggaatggtagaaattatgattcatcaaaatgttctgatttcttccattactatcgtcttattcgatttagacggaatcaacttattttacgtgattatatattgttgcaattaggtaaagagctcacaagggtaggtcaccgatataatgaggactttaatgttgtgatttcaccaacaagtgttttgcctcaaatcgataaactagatgagatggaatcattactttctagggaggaaatagattttactgaggtgtcggattactattacgaacgttga

SEQ ID NO: 808 - protein, 330 aa, Escherichia coli
MKIIKNIPLYGYSVDPEQLSFVDRLLTKSKNERPGFYQRMFYEDFARVFNFVNHGDTNLFQVETNDEELIRKMFGNLQARYRKYSVDETIRELVEAVAQSLIWQGTAYYFVQNVPEQEKIHITPLVSDNIFCFFSVYFQYVPKRCERYLERDHEMLPRELRILDKNKLMRFEIPRSLRRMLSEQNRTLKIIDKHQFGVTNFYPQATYENPNPKSHFDFSIWKNTQEQALFRATRKTGWNGRNYDSSKCSDFFHYYRLIRFRRNQLILRDYILLQLGKELTRVGHRYNEDFNVVISPTSVLPQIDKLDEMESLLSREEIDFTEVSDYYYER

SEQ ID NO: 809 - DNA, 1020 bp, Escherichia coli
atgaaattgcttgtaactggtggattagggtatataggttctcatactgtcgtgtcgttattagatgctggctacgaagttatcataattgataatttatctaactcgcatttatcagtattaaaaaggattaacaatatttgcttaagaaaggcatcatttatagaaggtgacattagaaatagaacagtacttaatcaaatctttaatagttataatattgatgctgttatacattttgccggtttaaaatcagtagatcaatcgattagttcacctataagttattatgataataatgtcgtcggaactctagcattgcttgaagagatgttacgacatgatgtaatgagatttatttttagttcatctgctacagtatatggatcaccaaagagtattcctataaaagagtcaaatgaagttggacatacaactaatccatatggtacatctaaactaataatagaaaaaattctatcggatatatgttattcgaatagttcatttcggtgtactattttgcgttattttaatcctgttggggctcacacatcaggattattaggggaagatccaagaggaaaacctaataatcttatgccatatatttgccaaaccgcaataggtaaactcaatgaggttcatattttcggtaatgattataatacccatgatggtactggtgtgcgtgattatattcatgttatggatcttgccgaaggacatgttgcagcggtaaaggcatcgaatgaaggggagaattgtaagatctataatttaggtactggaaaaggttattcggttcttgacttaataaaaacttttgaacaaataacaaatgtcgctgtaccacatatatttgttggtaggcgtcccggtgacatcgctgaatgttggtcagatccttcaaaagcttatgaagaattaaattggagagctaaaaaagatttagctgatatgattcgagatgcttggaaatggcaagtgcaaaaccccaatggatattcagatgattaa

SEQ ID NO: 810 - protein, 339 aa, Escherichia coli
MKLLVTGGLGYIGSHTVVSLLDAGYEVIIIDNLSNSHLSVLKRINNICLRKASFIEGDIRNRTVLNQIFNSYNIDAVIHFAGLKSVDQSISSPISYYDNNVVGTLALLEEMLRHDVMRFIFSSSATVYGSPKSIPIKESNEVGHTTNPYGTSKLIIEKILSDICYSNSSFRCTILRYFNPVGAHTSGLLGEDPRGKPNNLMPYICQTAIGKLNEVHIFGNDYNTHDGTGVRDYIHVMDLAEGHVAAVKASNEGENCKIYNLGTGKGYSVLDLIKTFEQITNVAVPHIFVGRRPGDIAECWSDPSKAYEELNWRAKKDLADMIRDAWKWQVQNPNGYSDD

SEQ ID NO: 811 - DNA, 249 bp, Escherichia coli
atgagtggattgaaaggccgccgcatcagtgcggatatgtttgccataatgctgaagatatctgccgggcagctggtttttgcagcccggcatgacaagccgttacgcggactgaccctgcccccttacagaatcgaaggcggaaaaagctggagctcgaccacctcaacacggagcatgacgtttgatatgcaggaagcggtcgatttcagcgagaaatttcataaaattcagtcgcctgacggctga

SEQ ID NO: 812 - protein, 82 aa, Escherichia coli
MSGLKGRRISADMFAIMLKISAGQLVFAARHDKPLRGLTLPPYRIEGGKSWSSTTSTRSMTFDMQEAVDFSEKFHKIQSPDG

SEQ ID NO: 813 - DNA, 513 bp, Escherichia coli
atgcggcaattcataatctctgaaaataccatgcaaaaaacttcttttagaaatcaccaggttaagcgattcagctcgcaacgttctaccaggcgtaaacctgacaaccagcccacgcgtgtgatcctgttcaataaaccctacgatgttcttccgcagttcaccgatgaagccggacgcaaaacattaaaagaattcatcccggttcagggggtgtatgcggcaggtcgtctcgaccgcgacagcgaagggttactggtgctgaccaataacggcgcgttgcaggcgcgtttaacccagccgggtaaacgcaccggaaaaatctattatgtgcaggtggaaggtattcccaccagctggctgaagatcaccttatatgaaggacgtaatcgccaggtgcgccgcatgaccgcccatgttggtttccccacgctgcgactgattcgctatgcgatgggggattactctttggataatcttgccaatggcgaatggcgagacgcgacagattaa

SEQ ID NO: 814 - protein, 170 aa, Escherichia coli
MRQFIISENTMQKTSFRNHQVKRFSSQRSTRRKPDNQPTRVILFNKPYDVLPQFTDEAGRKTLKEFIPVQGVYAAGRLDRDSEGLLVLTNNGALQARLTQPGKRTGKIYYVQVEGIPTSWLKITLYEGRNRQVRRMTAHVGFPTLRLIRYAMGDYSLDNLANGEWRDATD

SEQ ID NO: 815 - DNA, 186 bp, Enterobacter cloacae
atgcgtaaagatcagatcccggatttcgttgatgagatcttcgccaccggctgcccaatcaccgcagtaggacaagattgctatgttttgcagagagcgatctgctggcagaagacttcgaccgtgttggtgaggtggtcgataaaatctgccagcgataaggaaagcgtgaccatctgttgctga

SEQ ID NO: 816 - protein, 61 aa, Enterobacter cloacae
MRKDQIPDFVDEIFATGCPITAVGQDCYVLQRAICWQKTSTVLVRWSIKSASDKESVTICC

SEQ ID NO: 817 - DNA, 552 bp, Enterobacter cloacae
atggaactccagtgctctcggctgcttgcccgacaagatcgtcaaggcttgccagtgccgctcgatcgtcaggatcgtggcttgtgggatcgattgctcatacgtcgaggtctggagatagttgagcgagcatgccgcatgtcgtctcccactggatggtatcttctgcaagcgttgatttctgcttgtcacgcgcgggctgcgagctttcgagacaccaattggcgagagatactggcgagatatgacgcgctcttcctgttgagccctacatacgtagttgccctcaatcgagcagtcgctgtgtcgtgggccatgaaccccgctgcagggatggcggtccttaaggcgattgaggacgagtgggacgtggagacctacccgctttttcacgcgacgcgggcggatttcctttcgcgtcttggtttccaagaccaagctgcggcagcctatcaggctgcggccgtactcagcaccaacctacctcaaaagttgttcttggtcacgcgcgctgaggaatgcctggcagggtctcggacagatgttggataa

SEQ ID NO: 818 - protein, 183 aa, Enterobacter cloacae
MELQCSRLLARQDRQGLPVPLDRQDRGLWDRLLIRRGLEIVERACRMSSPTGWYLLQALISACHARAASFRDTNWREILARYDALFLLSPTYVVALNRAVAVSWAMNPAAGMAVLKAIEDEWDVETYPLFHATRADFLSRLGFQDQAAAAYQAAAVLSTNLPQKLFLVTRAEECLAGSRTDVG

SEQ ID NO: 819 - DNA, 828 bp, Enterobacter cloacae
atggcaatccgaatcttcgcgatacttttctccattttttctcttgccactttcgcgcatgcgcaagaaggcacgctagaacgttctgactggaggaagtttttcagcgaatttcaagccaaaggcacgatagttgtggcagacgaacgccaagcggatcgtgccatgttggtttttgatcctgtgcgatcgaagaaacgctactcgcctgcatcgacattcaagatacctcatacactttttgcacttgatgcaggcgctgttcgtgatgagttccagatttttcgatgggacggcgttaacaggggctttgcaggccacaatcaagaccaagatttgcgatcagcaatgcggaattctactgtttgggtgtatgagctatttgcaaaggaaattggtgatgacaaagctcggcgctatttgaagaaaatcgactatggcaacgccgatccttcgacaagtaatggcgattactggatagaaggcagccttgcaatctcggcgcaggagcaaattgcatttctcaggaagctctatcgtaacgagctgccctttcgggtagaacatcagcgcttggtcaaggatctcatgattgtggaagccggtcgcaactggatactgcgtgcaaagacgggctgggaaggccgtatgggttggtgggtaggatgggttgagtggccgactggctccgtattcttcgcactgaatattgatacgccaaacagaatggatgatcttttcaagagggaggcaatcgtgcgggcaatccttcgctctattgaagcgttaccgcccaacccggcagtcaactcggacgctgcgcgataa

SEQ ID NO: 820 - protein, 275 aa, Enterobacter cloacae
MAIRIFAILFSIFSLATFAHAQEGTLERSDWRKFFSEFQAKGTIVVADERQADRAMLVFDPVRSKKRYSPASTFKIPHTLFALDAGAVRDEFQIFRWDGVNRGFAGHNQDQDLRSAMRNSTVWVYELFAKEIGDDKARRYLKKIDYGNADPSTSNGDYWIEGSLAISAQEQIAFLRKLYRNELPFRVEHQRLVKDLMIVEAGRNWILRAKTGWEGRMGWWVGWVEWPTGSVFFALNIDTPNRMDDLFKREAIVRAILRSIEALPPNPAVNSDAAR

SEQ ID NO: 821 - DNA, 432 bp, Escherichia coli
gtgacgctcgaatggaaatacaacgacgactctgtcgattggaacgaactctccgccttgtacaaagccgcccccttgggcgataaacagccgatgcatttgcagaaggtcttcgccaacagcatgtttaagtgcttcgtctatgaaggctccaagctggttgctgcaggcagagcgctcgccgatggagcagattgctcgtacatctgcgacatcgccgcattgcctagtcatcaaggtaccggactgggcaagcaagtcgtagctcatttggtcgaagtctcgcgcggtcacaagaagatcatcctgtacgctgtgccgggcaaagagcccttctatcggaagtttggcttcttgcgcatgaagacggcgatggccatattcgagaaccagcaacaacaggtagagcgaggctatctcagtgaagcctaa

SEQ ID NO: 822 - protein, 143 aa, Escherichia coli
MTLEWKYNDDSVDWNELSALYKAAPLGDKQPMHLQKVFANSMFKCFVYEGSKLVAAGRALADGADCSYICDIAALPSHQGTGLGKQVVAHLVEVSRGHKKIILYAVPGKEPFYRKFGFLRMKTAMAIFENQQQQVERGYLSEA

SEQ ID NO: 823 - DNA, 294 bp, Acinetobacter pittii
atgcagaataaaaccagcaaaagcgaaattggcgctacgttcaaattgggtgatggcgtccagcacgttgttcagacagtcggctttgctggtggggccaggacgcgcgcagactaccttatgcacgttcgggaagcgagcgcacacttcgtcaacatcacgctgagtatcggggtcgttggggtaggtgccaacaaagatatgatagttttcgtagtcgagcgtggtcgccgccagctcggccatattgccgatgacgcccgtttcattccacgccggaaccataatcgctaa

SEQ ID NO: 824 - protein, 97 aa, Acinetobacter pittii
MQNKTSKSEIGATFKLGDGVQHVVQTVGFAGGARTRADYLMHVREASAHFVNITLSIGVVGVGANKDMIVFVVERGRRQLGHIADDARFIPRRNHNR

SEQ ID NO: 825 - DNA, 393 bp, Escherichia coli
atgattgcccgaggcgatcaggcggcgaatttttgcgcgcgcgcacggtcgcggcggcgcgcgataaaggcgatgggtagccccacgaggaagatatgcgcggcgattaacatcaagccgctgtacgaccgcgtcgtcatcaagcgcaccgaggaagagaaggtctccgccggtggtatcgtgatcccggattcggccaccgagaagccgatcaagggccaggtcgtcgccgtgggcgagggcaaggtgttcgacaacggcaacgtgcgcgcgccgaaggtcaaggtcggcgaccaggtgctgttcggcaagtacgccggcaccgaggtcaagctcgacggcaccgagtacctggtggtgaaggaagacgacatcttcgccgtgctgggctga

SEQ ID NO: 826 - protein, 130 aa, Escherichia coli
MIARGDQAANFCARARSRRRAIKAMGSPTRKICAAINIKPLYDRVVIKRTEEEKVSAGGIVIPDSATEKPIKGQVVAVGEGKVFDNGNVRAPKVKVGDQVLFGKYAGTEVKLDGTEYLVVKEDDIFAVLG

SEQ ID NO: 827 - DNA, 1611 bp, Enterobacter cloacae
atgaattgcaaaactatcatcctacgtttcagagatttggtcacccccgccggagaaacaatcactctacatcaggaagtaatcaaatctaaaggttcagtttggtggggatggtgggcaaagccggatgaaagagtttcttctgaattcataaaaatcaaacaaaatttggcgagtaaaccattaggtattttcctttttgatagtgggcaaaagaaattgtatgaagccaagttgaaagatatttttttaaatggcgatttagctccgtgtcctgccccagaaatgtctcctgcatattatgctaagcaatgttataatttatggtttgaattatttgatataaatcaaattaatgatgacgtaattaataattacgcatactccgacaaggttaaagatttttttgatgaccctactttattttcagtattcgataacaagcaggtgtcaggacttagggagttaagatttcaagacagaaccatttggtttgttaatgaatatgaccctaaaaagcatgaatctcatgagattttgttgaacgatgcaaacattggaattcccggagtgtttccaaaacgcccggtggacttacacaatggaaaagtagtttggttttcggatatccatttcgatgaagataaggagaaacatcaatttaatcaagttaatcaattgtcgctttctaagatattaattagcaggcaggatctcgacataaacgggatgattatttcaggtgatttaacgtggaaagccacaaagaaagagtttgaattggctacgaatttcttcaatgatatctgttctgttaaacgagtaaaatatgatgcaataggattttgccctggtaatcacgatgtcagctttagtaaaacacttccagctaaagtaaaaagagcacttaataactatcatgaagctcaaatggggaagaaaaaaatcactaaagaagaatggaatattcttgctgcaagaagtctttctaataaaagcaaagaaaactataaggatttttttaaattgacagtaggcacagagcctaacgaatttctttcgatgggcaaacgctttattattagaaatcaaaagatagttgatttctgtttcttaaacagtaattttcttcagcaacatcaacttgcttttcaaggtcaaggatttgtcggagcagaacagcttgatgatgctgaaaagaaaatgctttggcaaaataatgagaaaattaaagggggataccgggtggttgttttgcaccataatttgtatcctgttaattatacctcagagccgtatgtgagtgctccagctagtctggtatatgatacggaagcaataattcaatggtgcttcaaacatggagttgatttgatacttcatggtcatacacatgaacgtttcatgactaaagtatccagaaggatagatggttgcactaaaagtctatggataactggtttaggtagttcaggtgtgatctcttctcaccttgtaggttttaatgagtttgcagaaattgatttcaataatgaaaaaataaatatcaagttctataatataaagaataatgcaattgatgaccaatttgaaatcattaacttggactga

SEQ ID NO: 828 - protein, 536 aa, Enterobacter cloacae
MNCKTIILRFRDLVTPAGETITLHQEVIKSKGSVWWGWWAKPDERVSSEFIKIKQNLASKPLGIFLFDSGQKKLYEAKLKDIFLNGDLAPCPAPEMSPAYYAKQCYNLWFELFDINQINDDVINNYAYSDKVKDFFDDPTLFSVFDNKQVSGLRELRFQDRTIWFVNEYDPKKHESHEILLNDANIGIPGVFPKRPVDLHNGKVVWFSDIHFDEDKEKHQFNQVNQLSLSKILISRQDLDINGMIISGDLTWKATKKEFELATNFFNDICSVKRVKYDAIGFCPGNHDVSFSKTLPAKVKRALNNYHEAQMGKKKITKEEWNILAARSLSNKSKENYKDFFKLTVGTEPNEFLSMGKRFIIRNQKIVDFCFLNSNFLQQHQLAFQGQGFVGAEQLDDAEKKMLWQNNEKIKGGYRVVVLHHNLYPVNYTSEPYVSAPASLVYDTEAIIQWCFKHGVDLILHGHTHERFMTKVSRRIDGCTKSLWITGLGSSGVISSHLVGFNEFAEIDFNNEKINIKFYNIKNNAIDDQFEIINLD

SEQ ID NO: 829 - DNA, 846 bp, Enterobacter cloacae
atgaaaaaattattaattacagatttggataacacattatatgattgggtttcattctatgcccagtcatttactgcaatgctagatgtattagtcaatattttagatgtacctaaaagtgagttgcttgaagaatttagacaagttcacatcaaacatgggaattctgaatatccatttggtgcattagagatagattcagtaaagaaaaaatatgcccacctaactagagatgaggttgctttaaaactcgatgaggcttttcatgcctttaattctactagaaagaaaacattaagatgttatgagggagttatcgagaccttagactacctcaagaatcaaggggtcgtcattgtaggccacaccgaagcccctgttagaaatgccatattccgattgaaatctcttggtattcttgaatttatgacacatctttatacccctcaagatagattccacgatgaattggatgttaaaactaagtcttggattgaatcatatggtgattttatttatctattaagtgacgaggaaaaaaaacctaacccactcttgttagccgacatttgtgctaaagagggattcagtacaagtgaggcagtttacattggagattcattagttaaagatatctccatggcaaatgatgcaggtgttgaatcaatatatgcagagtatgggcgacagcatgaaaaggtatactgggatattttagtttcaataactcattggacgcaagaagatattcaaagggaaggtaaattaaaggaactttataaacatgtcgttccaaatcacataataaaatcttttgataaagtaattgatgttatcctgaaataa

SEQ ID NO: 830 - protein, 281 aa, Enterobacter cloacae
MKKLLITDLDNTLYDWVSFYAQSFTAMLDVLVNILDVPKSELLEEFRQVHIKHGNSEYPFGALEIDSVKKKYAHLTRDEVALKLDEAFHAFNSTRKKTLRCYEGVIETLDYLKNQGVVIVGHTEAPVRNAIFRLKSLGILEFMTHLYTPQDRFHDELDVKTKSWIESYGDFIYLLSDEEKKPNPLLLADICAKEGFSTSEAVYIGDSLVKDISMANDAGVESIYAEYGRQHEKVYWDILVSITHWTQEDIQREGKLKELYKHVVPNHIIKSFDKVIDVILK

SEQ ID NO: 831 - DNA, 198 bp, Escherichia coli
atgggaaatagcgaccatgaatatgatggcgtttatcagtcattggctacgcgagcttattaccgcctcgaaggtgagcacgttttgatgcgcctcggtagtcttgatcggtggcatgagccatttttacctatgacagcgaaagaagttatcacgatggttaatcatagatactggcgcaaggttggtgatttgtaa

SEQ ID NO: 832 - protein, 65 aa, Escherichia coli
MGNSDHEYDGVYQSLATRAYYRLEGEHVLMRLGSLDRWHEPFLPMTAKEVITMVNHRYWRKVGDL

SEQ ID NO: 833 - DNA, 300 bp, Escherichia coli
atgaaaagcgataaattcattgcgtgctgttttgttgaagtgcctaaaggtgatgccttctgcgattatgaatttaaagacagttggggaaaatctcatgttgtagttggcaagcgcggagactggttatacataacagacgacgacatgatttttactgcaaaccagttattcaaaattaagtcagaaaatagtgaaacgccactttgcagcatgtttaacatgcattatcactcactattattgttaaaacaagatgttataaataaagcgcgtagcttacctggtgcggagttttaa

SEQ ID NO: 834 - protein, 99 aa, Escherichia coli
MKSDKFIACCFVEVPKGDAFCDYEFKDSWGKSHVVVGKRGDWLYITDDDMIFTANQLFKIKSENSETPLCSMFNMHYHSLLLLKQDVINKARSLPGAEF

SEQ ID NO: 835 - DNA, 585 bp, Escherichia coli
atggccaccaagcatattaatgacgagctctggcatcgtattgaagttctgaccgtccgggcaaatgccaggcaaaacctgatccgcccggtcaaagaagcggacgtgcttcatctggttctgcagcgtggcctggagctgcttacagacgacgatctgctgcagctgggcaagtaccgccggcccataggatttgtgctgcgtcggccgggcatggagatgctgaagctggacacactgagtatggctgacgctgctactatcctcatgcgcagcggaccggcaacgctgtgcatctggagtcgtgacgatatcctgcggcaggccagtgaagcggtgatccgcgaacggctaccggaaacggccctgctgtcggagggggatgaccgggcccggttccagacgctgctgcctggcgtctggaatgccgcgaaccggggcgaaacggccgtgatttccctgcgtgctgacaatgcggatctcgctattgcacgcatcactgacctgatgtgcgaatccctgctgggttataaggggcagcgggcataccgggcaggtgaaaacgaacagggagaagagtcatga

SEQ ID NO: 836 - protein, 194 aa, Escherichia coli
MATKHINDELWHRIEVLTVRANARQNLIRPVKEADVLHLVLQRGLELLTDDDLLQLGKYRRPIGFVLRRPGMEMLKLDTLSMADAATILMRSGPATLCIWSRDDILRQASEAVIRERLPETALLSEGDDRARFQTLLPGVWNAANRGETAVISLRADNADLAIARITDLMCESLLGYKGQRAYRAGENEQGEES

SEQ ID NO: 837 - DNA, 159 bp, Escherichia coli
atgatgcgtcagggggtgatttccgccgttatttttttactgctggcattgctggtcatgatctacatgccggagggatatgcagcgattagctgggccataggcgcggttgtggttgtgacgctgatttatattcgtgcccgtaaaggagaggattga

SEQ ID NO: 838 - protein, 52 aa, Escherichia coli
MMRQGVISAVIFLLLALLVMIYMPEGYAAISWAIGAVVVVTLIYIRARKGED

SEQ ID NO: 839 - DNA, 681 bp, Enterobacter cloacae
gtgctcgacgccctcagcgaacaggatctgctcacccagggcgtggcgctgcgggagatgaagctggtctccggcggttccggcctcgccatcggcctcgcccgcgactgggcgcagcgccatggcgccaggggggaaagcgctcaggccggcatgccgctggccggtccggcggtggtgctctcgggctcctgctcggtgatgaccaacagccaggtggcggcctatcgtcaacaggcccccgcccgcgccgtcgacttaagcgcctgctttaccgatctggagagctacgtcaggacgctgactgactgggtggacgcgcagcgcgatgcgccgctggcgccgatgatctatgccaccaccgagccgcaaacgctgcagcggatccaggcgcagtatggcgacaaggccagcagcgaacgggtggaacagctgtttgccgctcttgccgccgccctgaaggcgaacggatttacccgctttattgtggccggaggggaaacgtcgagcattgtggcgcagaccctgggggttgaggcgttccatattgggccgaccatctcccctggcgtgccctgggtgcgtgacacccgccagccgctctccctggcgctgaagtcaggtaacttcggcgatatccagttctttgcccgtgcccagcaggagtttcgtcatgactga

SEQ ID NO: 840 - protein, 226 aa, Enterobacter cloacae
MLDALSEQDLLTQGVALREMKLVSGGSGLAIGLARDWAQRHGARGESAQAGMPLAGPAVVLSGSCSVMTNSQVAAYRQQAPARAVDLSACFTDLESYVRTLTDWVDAQRDAPLAPMIYATTEPQTLQRIQAQYGDKASSERVEQLFAALAAALKANGFTRFIVAGGETSSIVAQTLGVEAFHIGPTISPGVPWVRDTRQPLSLALKSGNFGDIQFFARAQQEFRHD

SEQ ID NO: 841 - DNA, 903 bp, Enterobacter cloacae
atggctgcacacactaacgtctgcgtgattggactgggttcaatgggcatgggcgccgcccgcgcctgcctgcaggcgggcctgaacacctggggcgttgacatcaatcccgacaactgtcgcgcactgctggcggcgggcgccaaaggcgcgggccccagcgcggtgccgttcgccgcggaactggatgcagttgtgctgctggtggtcaatgccgcccaggtgcgggggatcctgttcggcgagagcggcctcgccgcccatctgaagccgggcaccgtcgtgatggtgtcgtccaccatcgcctccgccgatgctcaggccattgccgaggcgctggcggagtaccagctattgatgctcgacgcgccggtatcgggcggcgccgtgaaagcggccgccggcgacatgacggtgatggcctccgggagcgatgccgcctttgcccgactcgcgccggtgctggacgccgtggccggcaaagtctaccgcatcgggagcgacattggtcttggctcgacggtaaaaattatccatcagctgctggccggggtgcacatcgccgttgccgccgaagcgatggcgcttgccgcccgcgccgggatcccactggagacgatgtatgacgtggtcacccacgcggcgggtaattcctggatgtttgagaatcgcatgcagcacgtcctggatggcgattactcgccaaaatccgctgtcgatatttttgtcaaagatctcgggctggtgaatgacactgcccgggcgctgaccttcccgctgccgctcgctaccaccgcgctgaatatgttcacctccgccagtaatgccggattcggtcgggaagatgacagcgcggtgatcaagattttcaacggcatcaccctgccgggccataaacagtga

SEQ ID NO: 842 - protein, 300 aa, Enterobacter cloacae
MAAHTNVCVIGLGSMGMGAARACLQAGLNTWGVDINPDNCRALLAAGAKGAGPSAVPFAAELDAVVLLVVNAAQVRGILFGESGLAAHLKPGTVVMVSSTIASADAQAIAEALAEYQLLMLDAPVSGGAVKAAAGDMTVMASGSDAAFARLAPVLDAVAGKVYRIGSDIGLGSTVKIIHQLLAGVHIAVAAEAMALAARAGIPLETMYDVVTHAAGNSWMFENRMQHVLDGDYSPKSAVDIFVKDLGLVNDTARALTFPLPLATTALNMFTSASNAGFGREDDSAVIKIFNGITLPGHKQ

SEQ ID NO: 843 - DNA, 876 bp, Escherichia coli
atggtcagacgttatctcccccttaacccgctgcgcgcctttgaggccgccgcccgtcatctcagttttacccgcgcggcgattgagctgaatgtcacccatgccgccgtcagccagcaggtcagggcgctggaagaacaactcggctgtgtgctgtttacccgcgtctcgcgcgggctggtgctgacccatgaaggtgagggattactgccggtgctcaatgaggcgtttgaccggattgcggatactctggagtgtttttctcacgggcagttccgtgagcgggtgaaagtcggtgcggtgggaacatttgccgcaggctggctgctgccgcgtctggccggattctatgacagccatccgcatattgatctgcatatctccacccataacaatcatgtggacccggcggcggaagggcatgattatacgatccgtttcggtaacggcgcgtggcatgagtcagatgcggaactgattttcagtgcaccacacgctccgctgtgctcaccggccattgcagaacagttacagcagccggatgatgttcaccgctttaccctgctgcgctcattccgccgggatgaatggagccgctggctggattgtgcgggcggcacaccgccttccccgtcacagccggtaatggtgttcgatacctcactggccatggccgaggcggcacaactgggtgccggggtagcgatcgcaccggtatgtatgttcagccgcctgttacagtcaggcgcactggtacagccgtttgccgcagaaatcaccctcggcggctactggctgacgcggttacagtcccgtacggaaaccccggccatgcagcaattcgcccgctggctgctgaatacggcggcggcgtaa

SEQ ID NO: 844 - protein, 291 aa, Escherichia coli
MVRRYLPLNPLRAFEAAARHLSFTRAAIELNVTHAAVSQQVRALEEQLGCVLFTRVSRGLVLTHEGEGLLPVLNEAFDRIADTLECFSHGQFRERVKVGAVGTFAAGWLLPRLAGFYDSHPHIDLHISTHNNHVDPAAEGHDYTIRFGNGAWHESDAELIFSAPHAPLCSPAIAEQLQQPDDVHRFTLLRSFRRDEWSRWLDCAGGTPPSPSQPVMVFDTSLAMAEAAQLGAGVAIAPVCMFSRLLQSGALVQPFAAEITLGGYWLTRLQSRTETPAMQQFARWLLNTAAA

SEQ ID NO: 845 - DNA, 1140 bp, Escherichia coli
atgaaaaaatcgttatctgcaacactgatttccgctctgctggcgttttccgccccggggttttctgccgctgataatgtcgcggcggtggtggacagcaccattaaaccgctgatggcacagcaggatattcccgggatggcggttgccgtctccgtaaagggtaagccctattatttcaattatggttttgccgatattcaggcaaaacagccggtcactgaaaatacactatttgagctcggatctgtaagtaaaactttcacaggtgtgctgggtgcggtttctgtggcgaaaaaagagatggcgctgaatgatccggcggcaaaataccagccggagctggctctgccgcagtggaaggggatcacattgctggatctggctacctataccgcaggcggactgccgttacaggtgccggatgcggtaaaaagccgtgcggatctgctgaatttctatcagcagtggcagccgtcccggaaaccgggcgatatgcgtctgtatgcaaacagcagtatcggcctgtttggtgctctgaccgcaaacgcggcggggatgccgtatgagcagttgctgactgcacggatcctggcaccgctggggttatctcacacctttattactgtgccggaaagtgcgcaaagccagtatgcgtacggttataaaaacaaaaaaccggtccgcgtgtcgccgggacagcttgatgcggaatcttacggcgtgaaatccgcctcaaaagatatgctgcgctgggcggaaatgaatatggagccgtcacgggccggtaatgcggatctggaaatggcaatgtatctcgcccagacccgctactataaaaccgccgcgattaaccaggggctgggctgggaaatgtatgactggccgcagcagaaagatatgatcattaacggtgtgaccaacgaggtcgcattgcagccgcatccggtaacagacaaccaggttcagccgtataaccgtgcttcctgggtgcataaaacgggcgcaacaactggtttcggcgcctatgtcgcctttattccggaaaaacaggtggcgattgtgattctggcgaataaaaactacccgaataccgaaagagtcaaagctgcacaggctattttgagtgcactggaataa

SEQ ID NO: 846 - protein, 379 aa, Escherichia coli
MKKSLSATLISALLAFSAPGFSAADNVAAVVDSTIKPLMAQQDIPGMAVAVSVKGKPYYFNYGFADIQAKQPVTENTLFELGSVSKTFTGVLGAVSVAKKEMALNDPAAKYQPELALPQWKGITLLDLATYTAGGLPLQVPDAVKSRADLLNFYQQWQPSRKPGDMRLYANSSIGLFGALTANAAGMPYEQLLTARILAPLGLSHTFITVPESAQSQYAYGYKNKKPVRVSPGQLDAESYGVKSASKDMLRWAEMNMEPSRAGNADLEMAMYLAQTRYYKTAAINQGLGWEMYDWPQQKDMIINGVTNEVALQPHPVTDNQVQPYNRASWVHKTGATTGFGAYVAFIPEKQVAIVILANKNYPNTERVKAAQAILSALE

SEQ ID NO: 847 - DNA, 3603 bp, Escherichia coli
atggacgttctgcgttttatcctccgcttaccttttattttgctgcgtctggcggctcgcagtcttgtttatctctttactctgctgggttttctgctgcgcccgttcaccggacggatccgctgggcggtgccgggctgggtgacctttgccggtaatcagcttgcccggctggagcgggggggcaaccgctatccgaaaaccatatctgccttattattactgactgctgcggtggcagcgggcagttattacacctggcactggtatcagaacaaaccgaagccggtggatgttgcgccgctggtggtgcaggatatttccgcgtctgtgcagcgcccttcggcggttaattataaccgtgatgataattcagcgcagattgtggtggtgacattctcccgctctgccgcaccggtaacgctgatcggtaaaccggtcaccgccggtattaccctgacccccgcaatggaaggtgagtggcagtggcgtaatgaccgtaagctggtattcacggcgaaaaaaaccttcccgatggggaaaacctacaccgtcgatatggatgccaaaacactgctggctccgcaggtggcgttaacagagaaacaaaaaacctttaccacccctgagttttattatcgcggcggccgggcggagttctatcaggatccgcaagatccgatgaaaaaacacgccattatcggcctgaccttcaatgcccccgctgatgtcaaaaatctggaatcgcgtctgtctatgacccgtgacggcaagccggtgccgtataccgtcacttatgatgataaaaaactcaaagcctggatccactccgggcagctggcactcaatgatacagacagcgaagtgttgctgacagtcagagccggtgtcggggcggccgttccggccaataccacggacaaagatgaaaccttccgcgtgatcgtgccgaaccgctacagtctggatgtgacgggcatcgacagtcagctggtggaatcagatgacggaaaagatcgccgcgctctgattgtgtcattctctgacccggtgaatgaaaaacagatcacaaaagcggttcgtgcccgtctgctgccggaaaaacacccggattataattctgagggtatttatgacgactggaaatcagatgatatcagcgaaaaagtcatcgcattatcagagccggtcacgctgaccccggatgacagcgagcaggagaatcaggcggcattcagcttcagttataacgccccggccaaccgctggctgctggtggaaatcaccggtggtatgagttcggcgggcggttattacctgaaaacatcacgctatctgccggtacgcatcccggattacccgaaaacactgcgttttatgtctgacggggctttgctgtcgatgaaaggtgaaaaacagatcaccgtcgcggcacgtaacttcccgggcctgcagctggatgtgaaacgggtgatcccgggccagttacagcacatcgtctcctttaaggataaaaactttacctcaacggattttaaccgtctgagtgatgaatactttacagaacactttacttaccagacggcgctgtctgccgccaatcccggcgatattcagtacaaaggtatcgacctgagcaaatacctctcagctgacccatccgcaaaacgcggcatattcctgctgagcctgcgggcgtgggatccggctaaaccggcggaagccccggaagcggaaagctatgacgaaggggatgaggattacgaagaggatgcggttctcgactcgcgctttgtggtggtcactgatatggggatcatcgcgaaatcctcccccgacggctcgcgggatgtgttcgtgcagtccgtgtataccggcgagccggtcagtggtgcgaaagtctctgtagtggccaaaaacggcaccacactgctgagccggacaaccggcagtgacggtcacgccgcattcccgccgctgcatgatttccgcaatgagcagatggcggtaatgttcctggcggaaaaagagggggatgtctccttcctgccggtcaacgcctggtatgaccgccagccggatttctcgcgctttgatatttacggcgacgaaaccccggaagatccgcgcaccctcagcagctatcttttctcagatcgcggtatttaccggccgggggaaacctttcatgcaggtcttatcacccgtacctatgactggaaaactccgctgaccggcatcccgctgcgggcggagatccgcgacccgcgtgacactctgatgcattcacagcagattattctggatgccaccggtttcagcgaactgagctacaccacatcggaaaactctccgaccggcgactggaatatctatctctatctggaaggtaaagatgagaatgacctgcgtctgctcggtaccaccaccgtggtggtgaaagagtttgagccggacagcatgaaagtggcactgaaactgacgccggatcgtcagcagggctgggtgaaaccggaggaattacaggcggcggttgatgtgcagaacctgttcggcaccccggcgcagaatcgtcgtatcgcgacaaaaatgaccatgcggccggtttatccgtcattcacgcagtatccggattaccgtttctatgaaaacagccgcagtacggataactttgaaacgcagcttgaagagcgcaccaccgatgaaaacggtgccgcaccgctggcgttaggactggaaaactacgcggaagcgacctatcagttacagctgttcaccgaagcgtttgagccgggcagcggccgttcagtcacggcagcagcgcgggtactggtctccccgcatgactcgctggtgggtatcaaagcggacggcgacacggattacatcagtaaggatgcagtgcggatgctgaatctgattgcggtggatccgtcactgacccgtattgaaaaaaccaatctgaaactggtgcttctggagcagaaatacatttccgtgctgatgcgccagccatccggggtcttcaaatatcagtccagactgaaagaaacccggattgatgagcaaccgctgaccatcagcagcgccggcactgatatcacactgaacacctcgaaacccggccactttatcttacaggcggaagatgcggacggtaatgtgctgaacagaaccgactacaccgtcgccggtaacgcgaacatcacccgctcgctggatcgcaatgcggaactgcagctgacgctgaataaagaggaattcaaaccgggcgaagagattgaaattgccgtcagcgcgccgtacaccggcagcggtattatcaccattgagcgcgacaaagtgtatcagtgggtatggttccgtgcagacaccactaactcagtgcagaaaatccgcgtaccggcagaactgaccggcaacggctatgttaacgtgcagtttgtccgtgatattaactccgatgaaatctttatgagcccgctgagcttcgggtataggaagtataaaccacctttttgctcctcatccgaagtatcttacctgaaattccctcactcgtttaccgctcaagccccaattttaactgccggtccagcctaa

SEQ ID NO: 848 - protein, 1200 aa, Escherichia coli
MDVLRFILRLPFILLRLAARSLVYLFTLLGFLLRPFTGRIRWAVPGWVTFAGNQLARLERGGNRYPKTISALLLLTAAVAAGSYYTWHWYQNKPKPVDVAPLVVQDISASVQRPSAVNYNRDDNSAQIVVVTFSRSAAPVTLIGKPVTAGITLTPAMEGEWQWRNDRKLVFTAKKTFPMGKTYTVDMDAKTLLAPQVALTEKQKTFTTPEFYYRGGRAEFYQDPQDPMKKHAIIGLTFNAPADVKNLESRLSMTRDGKPVPYTVTYDDKKLKAWIHSGQLALNDTDSEVLLTVRAGVGAAVPANTTDKDETFRVIVPNRYSLDVTGIDSQLVESDDGKDRRALIVSFSDPVNEKQITKAVRARLLPEKHPDYNSEGIYDDWKSDDISEKVIALSEPVTLTPDDSEQENQAAFSFSYNAPANRWLLVEITGGMSSAGGYYLKTSRYLPVRIPDYPKTLRFMSDGALLSMKGEKQITVAARNFPGLQLDVKRVIPGQLQHIVSFKDKNFTSTDFNRLSDEYFTEHFTYQTALSAANPGDIQYKGIDLSKYLSADPSAKRGIFLLSLRAWDPAKPAEAPEAESYDEGDEDYEEDAVLDSRFVVVTDMGIIAKSSPDGSRDVFVQSVYTGEPVSGAKVSVVAKNGTTLLSRTTGSDGHAAFPPLHDFRNEQMAVMFLAEKEGDVSFLPVNAWYDRQPDFSRFDIYGDETPEDPRTLSSYLFSDRGIYRPGETFHAGLITRTYDWKTPLTGIPLRAEIRDPRDTLMHSQQIILDATGFSELSYTTSENSPTGDWNIYLYLEGKDENDLRLLGTTTVVVKEFEPDSMKVALKLTPDRQQGWVKPEELQAAVDVQNLFGTPAQNRRIATKMTMRPVYPSFTQYPDYRFYENSRSTDNFETQLEERTTDENGAAPLALGLENYAEATYQLQLFTEAFEPGSGRSVTAAARVLVSPHDSLVGIKADGDTDYISKDAVRMLNLIAVDPSLTRIEKTNLKLVLLEQKYISVLMRQPSGVFKYQSRLKETRIDEQPLTISSAGTDITLNTSKPGHFILQAEDADGNVLNRTDYTVAGNANITRSLDRNAELQLTLNKEEFKPGEEIEIAVSAPYTGSGIITIERDKVYQWVWFRADTTNSVQKIRVPAELTGNGYVNVQFVRDINSDEIFMSPLSFGYRKYKPPFCSSSEVSYLKFPHSFTAQAPILTAGPA

SEQ ID NO: 849 - DNA, 390 bp, Escherichia coli
atgaaatataatacgatgaataacaacgaaattattttatctctatgtgcacgcattaaagaaacgcggatctcattatcgttgacccaacagcagttagccgatcgtgcattggtgggcattgcaacggtcaagcggattgaaaagggaggaagtttaaatcttgataccctcatttctcttctgcgcgcgctgaataaattgcaaaatctcgatgccatattgttcgaagctgaaatgcgtaatttcaacgaaaattcttccagcggcgaaggggcagggcgacttcaggtgcgccagcaactgacagatttaaaccagaagtctccagccccgcacgcagatgaccgtgattttagtacggcgctggaaaataccctttgctggtga

SEQ ID NO: 850 - protein, 129 aa, Escherichia coli
MKYNTMNNNEIILSLCARIKETRISLSLTQQQLADRALVGIATVKRIEKGGSLNLDTLISLLRALNKLQNLDAILFEAEMRNFNENSSSGEGAGRLQVRQQLTDLNQKSPAPHADDRDFSTALENTLCW

SEQ ID NO: 851 - DNA, 318 bp, Escherichia coli
atgcgtatgtctctgatgtttgctgcggttgcgcttttcagtggcgttaaccttttatttgtcccgtttctgcctgagcctgcattgtggggagtaatcctggccgctgcttttattatgattaatgtcgtatcggataaaatgcgcctccggagtggtctgatatggagtttttgggctgtcattatcatggccgttatgctgggaggagtggaccccggtgacgaattaagaatactgatgacggtctttgctttcctggcgtcggcctggtacagcgttgtgaaatacagaaaagaaaaaaatttccgtccctga

SEQ ID NO: 852 - protein, 105 aa, Escherichia coli
MRMSLMFAAVALFSGVNLLFVPFLPEPALWGVILAAAFIMINVVSDKMRLRSGLIWSFWAVIIMAVMLGGVDPGDELRILMTVFAFLASAWYSVVKYRKEKNFRP

SEQ ID NO: 853 - DNA, 1146 bp, Klebsiella oxytoca
atggcaaaggtatcgctggagaaagacaagattaagtttctgctggtagaaggcgtgcaccaaaaggcgctggaaagccttcgtgcagctggttacaccaacatcgaatttcacaaaggcgcgctggatgatgaacaattaaaagaatccatccgcgatgcccacttcatcggcctgcgatcccgtacccatctgactgaagacgtgatcaacgccgcagaaaaactggtcgctattggctgtttctgtatcggaacaaatcaggttgatctggatgcggcggcaaagcgcgggatcccggtatttaacgcaccgttctcaaatacgcgctctgttgcggagctggtgattggcgaactgctgctgctattgcgcggcgtgccagaagccaatgctaaagcgcatcgtggcgtgtggaacaaactggcggcgggttcttttgaagcgcgcggcaaaaagctgggtatcatcggctacggtcatattggtacgcaattgggcattctggctgaatcgctgggaatgtatgtttacttttatgatattgaaaacaaactgccgctgggcaacgccactcaggtacagcatctttctgacctgctgaatatgagcgatgtggtgagtctgcatgtaccagagaatccgtccaccaaaaatatgatgggcgcgaaagagatttcgctaatgaagcccggctcgctgctgattaatgcttcgcgcggtactgtggtggatattccagcgctgtgtgacgcgctggcgagcaaacatctggcgggggcggcaatcgacgtattcccgacggaaccggcgaccaatagcgatccatttacctctccgctgtgtgaattcgacaatgtccttctgacgccacacattggcggttcgactcaggaagcgcaggagaatatcggcttggaagttgcgggtaaattgatcaagtattctgacaatggctcaacgctctctgcggtgaacttcccggaagtctcgctgccactgcacggtgggcgtcgtctgatgcacatccacgaaaaccgtccgggcggtgctaactgcgctcaacaaaatttttgccgagcagggcgtcaacatcgccgcgcaatatctacaaacttccgcccagatgggttatgtagttattga

SEQ ID NO: 854 - protein, 381 aa, Klebsiella oxytoca
MAKVSLEKDKIKFLLVEGVHQKALESLRAAGYTNIEFHKGALDDEQLKESIRDAHFIGLRSRTHLTEDVINAAEKLVAIGCFCIGTNQVDLDAAAKRGIPVFNAPFSNTRSVAELVIGELLLLLRGVPEANAKAHRGVWNKLAAGSFEARGKKLGIIGYGHIGTQLGILAESLGMYVYFYDIENKLPLGNATQVQHLSDLLNMSDVVSLHVPENPSTKNMMGAKEISLMKPGSLLINASRGTVVDIPALCDALASKHLAGAAIDVFPTEPATNSDPFTSPLCEFDNVLLTPHIGGSTQEAQENIGLEVAGKLIKYSDNGSTLSAVNFPEVSLPLHGGRRLMHIHENRPGGANCAQQNFCRAGRQHRRAISTNFRPDGLCSY

SEQ ID NO: 855 - DNA, 753 bp, Klebsiella aerogenes
atgacttcccggattgctcaggcgggcacgtatggcatccactgcgctggcgtccataatgtccgtcagttgtttaccggcccgttgcagtttgaacgtcagaaactcttcaaggttattgtccagaggcagaagttcgaccacctcacagcgctgaacgacttcacggacttccatattgcgttcagacagttttgtcgccagttccggctggccaatcagcacgatggacagcagttttttgaaaccggactccagctcaaaaaagcgtttgaggtgtttcagtgtcggaatgggcagactgtgggcctcctcaatcaccagaacgtggctgaaccccgcctggctgctgtctttcaggacgcgatgcaactggcgaaagcgggcgtcctgactgcgtctgatgctttccagtggtgcgatggtactgataatggcttcggcaatcgctgctgccttcagggttttccctttcacatcgttgtcttccatagcgatgatgtatggctcgataacaattaccggcgcattctcgcggttgatacgttcagtcaggtcgcggcgcagcgtggatttacccgcaccggactcaccgatgacggccataaacccaccatgacgggctgtctggtacaacgcctcacgcacgtagcgaatgtccggggtggtgaacacatcatcagaaccctgcatggcttcgtcggcgaacgggtcacggaaaagaccaaacgcttttttggttgctggaaataa

SEQ ID NO: 856 - protein, 250 aa, Klebsiella aerogenes
MTSRIAQAGTYGIHCAGVHNVRQLFTGPLQFERQKLFKVIVQRQKFDHLTALNDFTDFHIAFRQFCRQFRLANQHDGQQFFETGLQLKKAFEVFQCRNGQTVGLLNHQNVAEPRLAAVFQDAMQLAKAGVLTASDAFQWCDGTDNGFGNRCCLQGFPFHIVVFHSDDVWLDNNYRRILAVDTFSQVAAQRGFTRTGLTDDGHKPTMTGCLVQRLTHVANVRGGEHIIRTLHGFVGERVTEKTKRFFGCWK

SEQ ID NO: 857 - DNA, 216 bp, Shigella sonnei
atggatgataacggaaaccaatgggtcaatgttgaacaccggctaccagaaagcaaagaaggaatgtggtctaaagaggttatagctcttactgatactggtgacgtgttcaaactatcatgtatgggctcttactggcagagaaccaaggcattcatcgattcaggagcaagcaaggttacacactggatgccgcttaattacccagatgattaa

SEQ ID NO: 858 - protein, 71 aa, Shigella sonnei
MDDNGNQWVNVEHRLPESKEGMWSKEVIALTDTGDVFKLSCMGSYWQRTKAFIDSGASKVTHWMPLNYPDD

SEQ ID NO: 859 - DNA, 249 bp, Escherichia coli
  misc_feature (233)..(242): n is a, c, g, or t
atgaacaaaattattatagttgggcaccccaattcaaatttcgaatttgttgaaaaaatatctctgcaatatgggatgggtacccctcatacatcaaaacgagaaaacctaagcccacaaaacataactgagattatttgtaaagcgtataacacacccaagataagtgaagtcacaagtacatcagatttttcccctttacaggtttctgctgtctggcacggtatggctcnnnnnnnnnngctctag

SEQ ID NO: 860 - protein, 82 aa, Escherichia coli
  misc_feature (78)..(81): Xaa can be any naturally occurring amino acid
MNKIIIVGHPNSNFEFVEKISLQYGMGTPHTSKRENLSPQNITEIICKAYNTPKISEVTSTSDFSPLQVSAVWHGMAXXXXL

SEQ ID NO: 861 - DNA, 621 bp, Escherichia coli
atgccgttctcacaaaaaaaccgcttgccatgccgcaatcagtcaggttacatttccgctgcacctcataaaacgggtgccgggtttcgcagcctgctgactacgtacgcgcacaaccgcgccagcggtttttttatgtgcgaagcattgccacatctttttcgcacacgaattatggtggggcgtacagggccgaccttggtcgggccggagtcgtgcgtagccggtactgcgaaccctgtatgtctcaccacccacagtttcgcagctctggatggtgagtttttaaaacttactacgtacgaggccacaccatggcaaaccgcaaacaacagcgcgcatacgctgcgcgtcgtcacatccagactgaaatcaaccgcagacttttccgcgcatcacgcgtcgcacaaatcatgcacatcaatatgctgcatgagcgcagccacgcactatcgaacacctattccgcctctgttttcagctatctggcggatgatctgcgcgagcttcagcagctcatccagcagcaaaacaaactccattaattcctgttccgggcctttcctgcaccttgcggcgggaggccttcgcacatctgtaacaagaggattgccgcaatga

SEQ ID NO: 862 - protein, 206 aa, Escherichia coli
MPFSQKNRLPCRNQSGYISAAPHKTGAGFRSLLTTYAHNRASGFFMCEALPHLFRTRIMVGRTGPTLVGPESCVAGTANPVCLTTHSFAALDGEFLKLTTYEATPWQTANNSAHTLRVVTSRLKSTADFSAHHASHKSCTSICCMSAATHYRTPIPPLFSAIWRMICASFSSSSSSKTNSINSCSGPFLHLAAGGLRTSVTRGLPQ

SEQ ID NO: 863 - DNA, 276 bp, Klebsiella michiganensis
atgagcagaacgattttttgtactttcctgcaacgtgaagcagaaggtcaggattttcagctgtaccccggcgaactgggaaaacgcatctataacgagatctccaaagaagcctgggcgcagtggcagcacaaacaaaccatgctgattaatgaaaagaaactcaacatgatgaatgccgagcaccgcaagctgctggagcaggagattgtcaacttcctgttcgagggtaaagaggtgcatatcgagggctttacgccggaagataaaaaataa

SEQ ID NO: 864 - protein, 91 aa, Klebsiella michiganensis
MSRTIFCTFLQREAEGQDFQLYPGELGKRIYNEISKEAWAQWQHKQTMLINEKKLNMMNAEHRKLLEQEIVNFLFEGKEVHIEGFTPEDKK

SEQ ID NO: 865 - DNA, 504 bp, Escherichia coli
atgacaagatgggaacagatcgtgaaacgaatttcaccagaacgtaaatcggctgcactggctaaattactaccgccttacaacatgaccgtcaccgcagttgcgcagatggaagggatatcggaagctaccctttattactggcgtaacaaggcgaaagcagagggaataccggtgccgggtgcaaacaaaactacagaccaatggtcagccgaagcccggctggctgtgattatcgaaacagctacactcagcgaaacagaactcgcgcaatactgccgtaaaaaagggctttacctggaacagattagtcagtggaaacaaggctttttgcaggtgtcttcgcccactgacaaagcggcgctcaaacaaagccagaaagaagttaaacaactaaaacgcgaactgcttcgtaaggaaaaggcgctggcggaggcggcagcgatactggtgctgcgaaagcagttgcgggatttttacggggaaaccgacgaggacgactga

SEQ ID NO: 866 - protein, 167 aa, Escherichia coli
MTRWEQIVKRISPERKSAALAKLLPPYNMTVTAVAQMEGISEATLYYWRNKAKAEGIPVPGANKTTDQWSAEARLAVIIETATLSETELAQYCRKKGLYLEQISQWKQGFLQVSSPTDKAALKQSQKEVKQLKRELLRKEKALAEAAAILVLRKQLRDFYGETDEDD

SEQ ID NO: 867 - DNA, 270 bp, Escherichia coli
gtgggggccctgccagctaagctttttctaacaaaatctatgtatttcaatgcactaaaaagcggtggggcaatgattttgtatcaccaaaagtatacactggcaagccgttttctcatgcgacagacacaaaaaaaccggggctgccccggctttgtatggcttttgaccaaactccatctaagctacattttccactaccatgtaggatcgcccaacctcttcaatcagtggctggaggttcttatcgctgcctttgactgtaaatag

SEQ ID NO: 868 - protein, 89 aa, Escherichia coli
MGALPAKLFLTKSMYFNALKSGGAMILYHQKYTLASRFLMRQTQKNRGCPGFVWLLTKLHLSYIFHYHVGSPNLFNQWLEVLIAAFDCK

SEQ ID NO: 869 - DNA, 723 bp, Escherichia coli
atggcgagaactaagggtgctgtagcaaaaggggttgataatacagctgtacgcattttcttacgagggtatggctctttgggggagttgccacgcattgtggaagattgtatctgcggtgcattggggcaggaagaagagacaagaaggttcaagggtgagcgaattcttgcaatcttagaacaactggatcatatcgatacgccaacagtacatcggcagatgtgggattataatatttctcaaggtaaaaatactgagccatccaaacggaacacggaacgcatgacaagggttctaagatgtgcttccagggcactgtatcatcatttgaaattgtgtaacggattgtcgcgtgaagacgaggttgtccagatttcgactcccgatctcacggtagatgagatcgaacatgcccgtcgtttggctctggcaggtaaaattgaagagttcacacaatttgtgaactcttgccggagcgtgatcaaaaactatgagccgccagtgttcaagtacacaggggaaaatgtggtcgctttatcttcttgtacggaggtatctttaaggactgcggttagtcatccgtattatggttatgttaaaaaagccgtaaaagatgaacagccagaagacctatttacagtcaaaggcagcgataagaacctccagccactgattgaagaggttgggcgatcctacatggtagtggaaaatgtagcttag

SEQ ID NO: 870 - protein, 240 aa, Escherichia coli
MARTKGAVAKGVDNTAVRIFLRGYGSLGELPRIVEDCICGALGQEEETRRFKGERILAILEQLDHIDTPTVHRQMWDYNISQGKNTEPSKRNTERMTRVLRCASRALYHHLKLCNGLSREDEVVQISTPDLTVDEIEHARRLALAGKIEEFTQFVNSCRSVIKNYEPPVFKYTGENVVALSSCTEVSLRTAVSHPYYGYVKKAVKDEQPEDLFTVKGSDKNLQPLIEEVGRSYMVVENVA

SEQ ID NO: 871 - DNA, 645 bp, Escherichia coli
atgaattttccgggcccagcatcaactgcttcttatttaagatctaattacagcagagatttcttgactattcagtgtggtgaatacacatacggaaaaccaagaattgagattgggatgcatgacgacaagcgaattctttcaattggtgaatattgctctatagctttcgacgttgtgatttttgttggaagacaaggtcgtcatgcgacaaatacattaacaagttacccgctaaatatggttgtagatcctgagttaagaaatggatttaaccctacaggacatatatggcaggcgagctctgacatatttgggaaagatcttgatgttatcatagggcatgatgtatggattggttctagatgtacaattttagcaggggttaatattggaactggtgccatcattgccgcaggttctgttgttactaaagatgtaccgccatatgcaattgtaggaggagtaccagctaaggttattagatacagacatcctccagaaataattgatagattattaaagactgaatggtggaagttaaaacctaatgagctgtggaatttgattggttcatctttcgggacgtctaatattgaaatcccattaaaaatattagaaaacagaagcgcttcagaaaaataa

SEQ ID NO: 872 - protein, 214 aa, Escherichia coli
MNFPGPASTASYLRSNYSRDFLTIQCGEYTYGKPRIEIGMHDDKRILSIGEYCSIAFDVVIFVGRQGRHATNTLTSYPLNMVVDPELRNGFNPTGHIWQASSDIFGKDLDVIIGHDVWIGSRCTILAGVNIGTGAIIAAGSVVTKDVPPYAIVGGVPAKVIRYRHPPEIIDRLLKTEWWKLKPNELWNLIGSSFGTSNIEIPLKILENRSASEK

SEQ ID NO: 873 - DNA, 156 bp, Escherichia coli
atggcgggcatcaattgtctgttgcgtatgggcgtagctttccagcacgcgttggtggaaagtttcgcagaggggaactggcagaaaaagttgatgccggagcttatcaataataagccgggagagagtggtaaagtcgacaggataactgcctga

SEQ ID NO: 874 - protein, 51 aa, Escherichia coli
MAGINCLLRMGVAFQHALVESFAEGNWQKKLMPELINNKPGESGKVDRITA

SEQ ID NO: 875 - DNA, 225 bp, Escherichia coli
atggataactatcatattacaaaagatggcgataagtggaagttgcaaaaagagggcaatgaccgccctagcaagaccgcgcccacaaaggccgagctgattaaaacaacatctgagtttatgtcgaacaaaacaggctcggtcaaaattcacaaggaagatgggaaaattcaggaagaacgcacttatcagagaaaagatgatcctaaaaagtctaagggctaa

SEQ ID NO: 876 - protein, 74 aa, Escherichia coli
MDNYHITKDGDKWKLQKEGNDRPSKTAPTKAELIKTTSEFMSNKTGSVKIHKEDGKIQEERTYQRKDDPKKSKG

SEQ ID NO: 877 - DNA, 270 bp, Shigella boydii
atggacgaatcaagaaagcagtttgaagaatggtttgaaaattacaccggatgtgatcctaaaaataaaatatacgccaatatggttgagatgtattggcaagcgtggcaggcatcgcgagcagctattgaaataaccgcgccaaagtttatcgacagcagagaagcattagccaaagggtttactgttgattattccaatggcttcggcgatggaatggatgcttatgaggaaaacatccgcgccgttggagtcaaagtgaaggagtga

SEQ ID NO: 878 - protein, 89 aa, Shigella boydii
MDESRKQFEEWFENYTGCDPKNKIYANMVEMYWQAWQASRAAIEITAPKFIDSREALAKGFTVDYSNGFGDGMDAYEENIRAVGVKVKE

SEQ ID NO: 879 - DNA, 288 bp, Shigella boydii
atgatcgtagtaaagaaattgcaaatcattaaaatcaaagtaaaatctattgccatttggattaatagaacgatatgtttttattttcccattttcatcgaaacgtctatagcaatcaaggttattatagatattgtgcatgaaattcactttatcaatatctatttcattagctatatctttttttctattgtacaaaacattgtctatgatatattttatagtttcatcattaagttgaaaatcttttacatcatcaccaggcatgatgttatgcagattaactaa

SEQ ID NO: 880 - protein, 95 aa, Shigella boydii
MIVVKKLQIIKIKVKSIAIWINRTICFYFPIFIETSIAIKVIIDIVHEIHFINIYFISYIFFSIVQNIVYDIFYSFIIKLKIFYIITRHDVMQIN

SEQ ID NO: 881 - DNA, 456 bp, Escherichia coli
atggaccgcatcaagtacctgaaatggatagctgaagaatcaccaagtacggctcagcagctggtggcctggttaaacagagcaaggcactatacgcccgacatgaaagagcatcaggcaggtgtacagattcaagaaaaggggattgttgtagggcttagacaaagtactaatcgttatcatggagattgtctgaccatacatgtggtacggcttccggaagaaatacaaaacaagggatggtttaagtcttttctgaagctttgctgtgaatcgaatccctggtgcgatgttgtaatagaagacgtgaaaaacccatatttattaagcttttgtaagaaactaaactttactgtattagatgaattttacccgaatacttacatagtaaacacagatgccattatgagtttacctatcccacccttagggagatacgaaacctatctttattaa

SEQ ID NO: 882 - protein, 151 aa, Escherichia coli
MDRIKYLKWIAEESPSTAQQLVAWLNRARHYTPDMKEHQAGVQIQEKGIVVGLRQSTNRYHGDCLTIHVVRLPEEIQNKGWFKSFLKLCCESNPWCDVVIEDVKNPYLLSFCKKLNFTVLDEFYPNTYIVNTDAIMSLPIPPLGRYETYLY

SEQ ID NO: 883 - DNA, 252 bp, Enterobacter cloacae
atggttttctcctcaattcaggatgccttaataaatttagaggaaatcacggatcatgttatcgtttctggtggtggtgaaatatacaaaagcttgatttccaaagtagatactttgcatatttcaacagtcgacatcgagcgagatggagacatagtttttcctgaaatcccagatacattcaagttggtatttgagcaagatttcgagtctaacattaactattgttatcaaatctggcaaaagagttaa

SEQ ID NO: 884 - protein, 83 aa, Enterobacter cloacae
MVFSSIQDALINLEEITDHVIVSGGGEIYKSLISKVDTLHISTVDIERDGDIVFPEIPDTFKLVFEQDFESNINYCYQIWQKS

SEQ ID NO: 885 - DNA, 1065 bp, Escherichia coli
atgaagattcttgtcaccggtggcgcaggctttatcggctctgccgtagttcgtcatatcattgaaaatacccgggatgaagtccgcgtggtggactgcctgacctacgccggcaacctcgaatccctggcgccggtggccgggagcgaacgctactcgttttcccagactgatatcacggatgccgctgccgtggcggcccagttcagtgagttccgcccggatatcgtgatgcacctggcggcagaaagtcatgtggatcgctccattgatggcccggccgccttcatccaaaccaacgtgatcggcaccttcactctgctggaagcggcccgtcactactggtccgggcttggggaggagcagaagcaggctttccgcttccaccacatctccaccgatgaagtgtatggagacctgcatggcaccgatgacctgttcaccgaagaaaccccgtacgcgccgagtagcccgtactccgcctccaaagcgggcagcgaccatctggttcgcgcctggaaccgcacctacggcctgccggtggtggtgaccaactgctccaacaactatggtccgtatcacttcccggagaaactaatcccgctgactatcctcaacgccctggcgggtaaaccgctgccggtgtatggcaacggggagcagatccgtgactggctgtatgttgaggaccatgcccgtgcgctgtataaagtggcgaccgaaggcaagagcggcgaaacctacaatattggcggtcataacgagcgtaaaaatatcgatgtggtgcgcaccatctgcgccattctcgacaaggtggtggcgcagaagccgggtaacatcactcatttcgcagacctgatcacttttgtcaccgaccgtccgggacacgacctgcgctacgccattgatgccgcaaaaattcagcgcgatctgggctgggtgccgcaggagacgttcgagagcgggattgaaaaaaccgtgcactggtatcttaacaaccagacctggtggcagcgcgtgctggatggctcctatgccggtgagcgtctgggcctaaataactga

SEQ ID NO: 886 - protein, 354 aa, Escherichia coli
MKILVTGGAGFIGSAVVRHIIENTRDEVRVVDCLTYAGNLESLAPVAGSERYSFSQTDITDAAAVAAQFSEFRPDIVMHLAAESHVDRSIDGPAAFIQTNVIGTFTLLEAARHYWSGLGEEQKQAFRFHHISTDEVYGDLHGTDDLFTEETPYAPSSPYSASKAGSDHLVRAWNRTYGLPVVVTNCSNNYGPYHFPEKLIPLTILNALAGKPLPVYGNGEQIRDWLYVEDHARALYKVATEGKSGETYNIGGHNERKNIDVVRTICAILDKVVAQKPGNITHFADLITFVTDRPGHDLRYAIDAAKIQRDLGWVPQETFESGIEKTVHWYLNNQTWWQRVLDGSYAGERLGLNN

SEQ ID NO: 887 - DNA, 870 bp, Escherichia coli
atgaaaggtattgttctggccggcggctccggcacgcgtttatatccgatcacccagggcgtctccaagcagctgctgccgatctatgacaagccgatgattttctacccggtgtccgtcctgatgctggcggggattcgcgacatcctgattatctccaccccggacgacatgccttccttccagcgcctgctgggtgacggggcgcagttcggggtgaacttcagttacgccatccagccgtcgccggacggcctggcgcaggcctttatcattggcgagaagttcatcggcaacgatgcctgcgccctggtgctgggagataatatctactttggccagagcttcggtaaaaagctggaagcgacagcggcgaagacttccggtgccacggtgtttggttatcaggtgctggatccggagcgcttcggggtggtggagttcgatgagaactttaaggcactgtctatcgaggagaaaccgctgaagccgaaatcagactgggcggtgaccgggctctatttctacgacaataacgtggtggagatggcgaaggacgtgaagccttctgaacgcggcgagctggagatcaccaccctgaaccagatgtatctggagcaaggtgacctgcatgttgaactgctggggcgcggttttgcttggctggatacgggcacccacgacagcctggtggacgcgtcgcagttcattcacaccattgagaagcgccaggggatgaaagtggcctgcctggaagagatagcctaccgtaatcagtggctgtcggcggaaggggtggcggctcaggcggaacgcctgaagaaaaccgagtacggtgcttatctgaagcgcctgctgaacgagcgttaa

SEQ ID NO: 888 - protein, 289 aa, Escherichia coli
MKGIVLAGGSGTRLYPITQGVSKQLLPIYDKPMIFYPVSVLMLAGIRDILIISTPDDMPSFQRLLGDGAQFGVNFSYAIQPSPDGLAQAFIIGEKFIGNDACALVLGDNIYFGQSFGKKLEATAAKTSGATVFGYQVLDPERFGVVEFDENFKALSIEEKPLKPKSDWAVTGLYFYDNNVVEMAKDVKPSERGELEITTLNQMYLEQGDLHVELLGRGFAWLDTGTHDSLVDASQFIHTIEKRQGMKVACLEEIAYRNQWLSAEGVAAQAERLKKTEYGAYLKRLLNER

SEQ ID NO: 889 - DNA, 891 bp, Escherichia coli
atgaagattttactgattggcaagaatggccaggtgggctgggaactgcagcgttcactgtccaccctcggcgacgtggtcgcggtggactactttgacaaagagctgtgcggcgacctgactaatctggaaggcatcgcgcagaccgtgcgtaccgtccgcccggatgtggtggtgaatgccgccgcgcacacggcggtggacaaggcagaaagcgagcgggagctctccgacctgctgaacgacaaaggggtggcggtgctagcggcagagtcggcgaagctgggtgccctgatggtgcactattccacggattatgtgttcgacggcgccggcagccattatcgccgggaagatgaggcaaccggcccgctgaacgtctacggcgaaaccaaacgcgccggtgaactggccctggagcagggtaacccgcgtcacctgattttccgtaccagctgggtgtatgccacccgcggcgccaactttgccaaaaccatgctccgcctggcgggtgagaaagagacgctctccatcattgacgaccagcacggggcgcccaccggcgctgagctgctggcagactgcacggcgacggcaatccgtgaaacgttgcgtaatccggcgctggccggtacctatcatctggtggccagcggcgagaccagctggtgcgactacgcccgctatgtgtttgaggtggcgagggcgcacggtgcagagctggcggttcaggaagtgaagggcattccgacgacggcctatccgacgccggcgaagcgtccgctcaactcacgcctgtcgaatgaaaaattccagcaggcatttggggtgactctcccggactggcgtcagggtgtggctcgcgtggtaacagaagtcctgggcaaataa

SEQ ID NO: 890 - protein, 296 aa, Escherichia coli
MKILLIGKNGQVGWELQRSLSTLGDVVAVDYFDKELCGDLTNLEGIAQTVRTVRPDVVVNAAAHTAVDKAESERELSDLLNDKGVAVLAAESAKLGALMVHYSTDYVFDGAGSHYRREDEATGPLNVYGETKRAGELALEQGNPRHLIFRTSWVYATRGANFAKTMLRLAGEKETLSIIDDQHGAPTGAELLADCTATAIRETLRNPALAGTYHLVASGETSWCDYARYVFEVARAHGAELAVQEVKGIPTTAYPTPAKRPLNSRLSNEKFQQAFGVTLPDWRQGVARVVTEVLGK

SEQ ID NO: 891 - DNA, 135 bp, Escherichia coli
atggaagccgataaatatataatgataatcaaatacttatcagacaactctcacaaactaaccccgcttgtcttggcggtttcggttcttgtcgcctttctatcaatcctgtttattgcaatgcgcatggggtaa

SEQ ID NO: 892 - protein, 44 aa, Escherichia coli
MEADKYIMIIKYLSDNSHKLTPLVLAVSVLVAFLSILFIAMRMG

SEQ ID NO: 893 - DNA, 705 bp, Escherichia coli
atgaagccttgggtaaaatttccttcaaagttcgtactagatggacgcttaaaagagcttttatggactgatgacaaggtaggaaaaccgtcacataaggtcgcagccttaaaactgtatatagcgctgtccatgagagctgaaagtaaagaggctttctgtcattacatagatacctacataacatattattcagctcaggcgacctatgaggaactctcggaactgacagccctgagcagatcatcaatatcatcaggcattgatattttagagagacttgggctgttatcagtagataaagttaggcgaaaaaatatctaccgattccctgggtttgatggttcgaaggactggtgcaaaatgccttgtagagcgttgttatctcgtgatggcaaacggattgaagcattccataaacttaagttaagaagcaagattgagctttatgcgctaaagatgttcatctacttatgtgctgttcgagacaatcacagtcattatacaagcgcttcatttgaaagaataaacttgcagacttctattccagaagcggacatacctaggacgcatgcctacctgagcgggataggactcatagctttagtagagaaacgaaaagatgggtttggcggcatgaagaaaaaccctccaaattcctactttgttactggtcataatgacttttttataggaaagcgataa

SEQ ID NO: 894 - protein, 234 aa, Escherichia coli
MKPWVKFPSKFVLDGRLKELLWTDDKVGKPSHKVAALKLYIALSMRAESKEAFCHYIDTYITYYSAQATYEELSELTALSRSSISSGIDILERLGLLSVDKVRRKNIYRFPGFDGSKDWCKMPCRALLSRDGKRIEAFHKLKLRSKIELYALKMFIYLCAVRDNHSHYTSASFERINLQTSIPEADIPRTHAYLSGIGLIALVEKRKDGFGGMKKNPPNSYFVTGHNDFFIGKR

SEQ ID NO: 895 - DNA, 534 bp, Escherichia coli
atgttcaatctttacatcacacactcagattcatcaccaccagattgtgtaagcactgaaaacaaccgacttacctctgtaatatctacgcttatttcatcacacgataacaatattctttccgttactgactttcttaaaagaaatgacatctcgcattgtttttacttcctgtcgacagggaatatacggtttactacacataaccagagtatgatcacggtgcagacccagaaaaaaactgtttatataaaccacaggttaaacaatatctggacaaaactggttatcaaaaaacatttatccggaagaataccatttttccggagccactttactctttcccgggcaggaatatttaaatatgttctggatgtaaacaggaaacaatgccagtattattcaataaaaaatcatatcttacattcacaattcatcattccggtttcttccaccattgcaccggacaggcgatcatgtgggtgcagtccacgttctgttcacgcggaaaaacccggtgtgcatcgtttttga

SEQ ID NO: 896 - protein, 177 aa, Escherichia coli
MFNLYITHSDSSPPDCVSTENNRLTSVISTLISSHDNNILSVTDFLKRNDISHCFYFLSTGNIRFTTHNQSMITVQTQKKTVYINHRLNNIWTKLVIKKHLSGRIPFFRSHFTLSRAGIFKYVLDVNRKQCQYYSIKNHILHSQFIIPVSSTIAPDRRSCGCSPRSVHAEKPGVHRF

SEQ ID NO: 897 - DNA, 204 bp, Escherichia coli
atgcgtaatgttccatcatctgcatggtgccagatgcctcccgatgagtccgtcatcagcatccggacccgcaatattgcccaaataaagctaaaggatgattgtgacctgctgatttgcacctccgcacaggtggattcaccatgcaaactttttttacaaacgctcagcctgtcaggcaacagtcaactgactgaattgtga

SEQ ID NO: 898 - protein, 67 aa, Escherichia coli
MRNVPSSAWCQMPPDESVISIRTRNIAQIKLKDDCDLLICTSAQVDSPCKLFLQTLSLSGNSQLTEL

SEQ ID NO: 899 - DNA, 264 bp, Escherichia coli
atgaagaagatgtttattgtagctttattttcgttagtttctgttaatgcaatggcagcggattgtgctaaaggtaaaattgagttctctaaatataatggaaataatacattcacagtaaaagtagccgggaaagaatactggactaaccgctggaacctgcaaccgttactgcaaagtgcacagttgacaggaatgactgtaacaatcaaatctattacctgtgattcaggctccggatttgctgaagtacagtttaattaa

SEQ ID NO: 900 - protein, 87 aa, Escherichia coli
MKKMFIVALFSLVSVNAMAADCAKGKIEFSKYNGNNTFTVKVAGKEYWTNRWNLQPLLQSAQLTGMTVTIKSITCDSGSGFAEVQFN

SEQ ID NO: 901 - DNA, 234 bp, Escherichia coli
atggcatcaaagggaaaaccggacgcccacccttttcaacgtcatttattgctgataatatgcgttccgacattttattcctcgcaacagaatcaagtgtcacggtatcaggttgccccacaacctgataccatctttatctttactttattaacttctcaattgcttcttttttggctttctcctgttctgatggtgggtatgcaaggtcataccagttatcaatacaactaa

SEQ ID NO: 902 - protein, 77 aa, Escherichia coli
MASKGKPDAHPFQRHLLLIICVPTFYSSQQNQVSRYQVAPQPDTIFIFTLLTSQLLLFWLSPVLMVGMQGHTSYQYN

SEQ ID NO: 903 - DNA, 294 bp, Shigella sonnei
atgagcaaagtacgcgttatttttgaatttgaccacgtaatgcatgaagtaaagccagccggtaatgatagtgaggaaatcacggagggggttactgccacggtaaaaatcgaacgtgatacagagaacagaccggcaggaccctgtgatgtttatgcacaaattcttaaatatcacagccccacaatcattcagtttctgacagatgaactacagggttccatgcaggccatgggggtaagcagctccgttgaacgccgttctgttcagaacggaccagatacattgcaataa

SEQ ID NO: 904 - protein, 97 aa, Shigella sonnei
MSKVRVIFEFDHVMHEVKPAGNDSEEITEGVTATVKIERDTENRPAGPCDVYAQILKYHSPTIIQFLTDELQGSMQAMGVSSSVERRSVQNGPDTLQ

SEQ ID NO: 905 - DNA, 711 bp, Klebsiella oxytoca
atggtcattaaggcgcaaagcccggcgggtttcgcggaagagtacattattgaaagtatctggaataaccgcttccctcccgggactattttgcccgcagaacgtgaactttcagaattaattggcgtaacgcgtactacgttacgtgaagtgttacaacgtctggcacgagatggctggttgaccattcaacacggcaagccgacgaaggtgaataatttctgggaaacctctggtttaaatatccttgaaacactggcgcgactggaccacgaaagtgtgccgcagcttattgataatttgctgtcggtgcgtaccaatatttcaactatttttattcgcaccgcgtttcgtcaacatcccgataaagcgcaggaagtgctggcaaccgctaatgaagtggccgatcacgccgacgcctttgccgagctggattacaacattttccgcggcctggcgtttgcttccggcaacccgatttacggtctgatccttaacgggatgaaagggctgtatacgcgcattggtcgtcactatttcgccaatccggaagcgcgcagtctggcgctgggcttctatcacaaactgtcggcgttgtgcagtgaaggcgcacacgatcaggtatatgaaacagtgcgtcgctatgggcatgagagtggcgagatttggcaccggatgcagaaaaatctgccgggtgatttagccatttag

SEQ ID NO: 906 - protein, 236 aa, Klebsiella oxytoca
MVIKAQSPAGFAEEYIIESIWNNRFPPGTILPAERELSELIGVTRTTLREVLQRLARDGWLTIQHGKPTKVNNFWETSGLNILETLARLDHESVPQLIDNLLSVRTNISTIFIRTAFRQHPDKAQEVLATANEVADHADAFAELDYNIFRGLAFASGNPIYGLILNGMKGLYTRIGRHYFANPEARSLALGFYHKLSALCSEGAHDQVYETVRRYGHESGEIWHRMQKNLPGDLAI

SEQ ID NO: 907 - DNA, 345 bp, Escherichia coli
atgggcgaagttattgattttgcagaaaggcaaaaaggcagaaagaagaaaaaggcatcttccattccgcccattttaagaaaattccgtgtccatgcgatcaggttactcgccagcatcatcaaatccggcacttattcagtcgtttatatcgttaagaaaattacgggaaagttaatcaagtttttcgcaattttaacgatttttatttttgttgtcgaatatatcgcaggcgatataggttacaaatctatatataacgctgcgttattattatcgttactttccgtaactaacgttctggcgagcgtatacctgaagaaacaattgaggacaaagcaatga

SEQ ID NO: 908 - protein, 114 aa, Escherichia coli
MGEVIDFAERQKGRKKKKASSIPPILRKFRVHAIRLLASIIKSGTYSVVYIVKKITGKLIKFFAILTIFIFVVEYIAGDIGYKSIYNAALLLSLLSVTNVLASVYLKKQLRTKQ

SEQ ID NO: 909 - DNA, 213 bp, Escherichia coli
atggaaatcaaagcaagtcagtttgtcacatcaagcggcagaagggtgttaacggatgatggcattcaggggatgggcggggaagcaggtgtcggatctacgacagagaaaaaacaggggcaggtggcaagtgcgatttatgctaactgcgagtacctggacaatagacagcttgatgaaattatcgagtgggttcgactattcaagtcttaa

SEQ ID NO: 910 - protein, 70 aa, Escherichia coli
MEIKASQFVTSSGRRVLTDDGIQGMGGEAGVGSTTEKKQGQVASAIYANCEYLDNRQLDEIIEWVRLFKS

SEQ ID NO: 911 - DNA, 135 bp, Kluyvera intermedia
atgaataaggttgtattgctgtgccgtccgggctttgaaaaagagtgcgccgcagaaattaccgataaagccggccagcgggaaattttcggtttttgcccgcgtgaaagagaatgcgggttatgtcatttatga

SEQ ID NO: 912 - protein, 44 aa, Kluyvera intermedia
MNKVVLLCRPGFEKECAAEITDKAGQREIFGFCPRERECGLCHL

SEQ ID NO: 913 - DNA, 951 bp, Escherichia coli
atgaatgtttttattgatacaaatctatatttagaattttatcgaatgggtaaggataaactagatgagctagataaagtatttgccttacatcaatatggtcgtttaaaactttggttgccagaacttttagtgaatgagttctggagaaatcgttctaaagttctctctgaaaccataaaggaaattgcaaaagactacaagccagcgctaccacagattttcagacagcatgaaaaacatttactatttaatgataaggttatagaagctagtcggctaaagaatgaaattattaccgatatacagaacttatttaaagaagagtctttagctgccgatgttgtaattaaaaggatttttgatgcagcgtctaagatagaggctgatgatgaaacaatagaaaaggggaaacgccgattcgatcttggcaaccctccgggtaaaaataaatcatatggtgatgcagtcaattgggagtgtttgctaaaagcaataccaaacggagaggatatatacattataactgaagatggtgattataaaagtgcctttataaaggatgatatgaatgagtatttgaagtacgagtggaaaaagaagaaagattcagaaccacatatctatgcccgcttatcagagtttataggcgagcactttcctcaagccagtaacttagcggaaatggaagttaatttcactatagatgaattacgccgctcaggcagttttgccacaacacatcgagttgtagcaaagttattaaaattcaatcattttacacaagagcaaatcctaaaaataatcgatatctattttaataatgatcaggttggcttcattaaagatgatgatgatgtaaaactactcgccagaagactaatatcacttggtgacgaggataaagatcctgaagggatgcttgagccattccgtgtatttattgattaa

SEQ ID NO: 914 - protein, 316 aa, Escherichia coli
MNVFIDTNLYLEFYRMGKDKLDELDKVFALHQYGRLKLWLPELLVNEFWRNRSKVLSETIKEIAKDYKPALPQIFRQHEKHLLFNDKVIEASRLKNEIITDIQNLFKEESLAADVVIKRIFDAASKIEADDETIEKGKRRFDLGNPPGKNKSYGDAVNWECLLKAIPNGEDIYIITEDGDYKSAFIKDDMNEYLKYEWKKKKDSEPHIYARLSEFIGEHFPQASNLAEMEVNFTIDELRRSGSFATTHRVVAKLLKFNHFTQEQILKIIDIYFNNDQVGFIKDDDDVKLLARRLISLGDEDKDPEGMLEPFRVFID

SEQ ID NO: 915 - DNA, 459 bp, Escherichia coli
atgaaaggcaactgcgccgatctccacctgggcggcgtggtcaaattgccgggccttacggcatcgagctgggcgacgcgcccacttccccggagccgaacggggcagggcgttacgtcgccggtgacgccgaccagggcgaagcgcccaccccctccctgcaaagccggttttggcgggctgtcagacgataccgccgccggaacagtggcccgtcacaacggcccggttgagcgggcgggctggcgcgtagcgacgggccgggcgcgatttatccgggtgttggggggttggtcgcgcagcggccagcgcccctacaggcacgacagcgccgtaactggcagaggatggcgaagccaccccgaaggggcggggccgccggaggcggggcaagtccggcgcagggcgtgggggccaagcggagcgcggagggcgaagcccggaggcgttagggattga

SEQ ID NO: 916 - protein, 152 aa, Escherichia coli
MKGNCADLHLGGVVKLPGLTASSWATRPLPRSRTGQGVTSPVTPTRAKRPPPPCKAGFGGLSDDTAAGTVARHNGPVERAGWRVATGRARFIRVLGGWSRSGQRPYRHDSAVTGRGWRSHPEGAGPPEAGQVRRRAWGPSGARRAKPGGVRD

SEQ ID NO: 917 - DNA, 435 bp, Escherichia coli
atgtttgattcaatattagttgtctgtactggaaatatttgtcgttcacctattggtgaacggtttttaagacagttattaccgaataaaaaaattgactcagctggtactgaagctttggtacatcatgctgccgatgatagtgcatccaaaattgcattgtgtcatggtatttcgttggaaggacatcaatctaaacaatttacttcctcattaggccgtcaatatgatctgatcttagtaatggaaaaatatcatattgagcgtattgggcagattgcacctgaagctagagggaaaacaatgttattcggacattggctaaatcaaagagaaattccggatccgtacagaaaaagtgatgaggcgttccactctgtctataaacttattgagcaagccggtagtctttgggctcaaaaactaggtgcataa

SEQ ID NO: 918 - protein, 144 aa, Escherichia coli
MFDSILVVCTGNICRSPIGERFLRQLLPNKKIDSAGTEALVHHAADDSASKIALCHGISLEGHQSKQFTSSLGRQYDLILVMEKYHIERIGQIAPEARGKTMLFGHWLNQREIPDPYRKSDEAFHSVYKLIEQAGSLWAQKLGA

SEQ ID NO: 919 - DNA, 1164 bp, Escherichia coli
atgaatgataaagtaatcctttacggcgcatatgatcgttataattatggtgataatttaatgccgatcttgttagaaagatttctaaagatgaattttccggataaaactaggaccattgactttatttatgcgtcaatcgattcttctgatctaagtaaatataagtgttattcttcaatagctatgaaagatctgctttatactcaacataattcatcaattatagttgtaggtggtgaggtattaggagcagatgttggaacgttgtatacacatgtacaacaaagccaattttatactcgaattttaaaaaagataagaaggtttcaaccaaaactattgtcaactattgctaaaatattctaccctgcggtttgggattatccatacatacctcaaaaagcaagtttcaagaataatgtcaaggtaatatacaatactgttggtggagttcctgtttcttcacaaactaaatatatcgcacaagcggaatatatatctgcaagagatcgacgtacatatgaagaggtaacaaagtgggccagtgcagaattagttccagattctgttcttatcgcatcaaaaattattgatgatcagttcatgcaagattttgtccgcaaagaaataattgattattgtgcagcaaataagtttattactgtgcaggcctgcccttataaggttaatttttctgctcaagatcttgcatatcaattagatatagtaaaatcacaatcaagtatagatgtagtgttacttcctattggttacgcgagtggtcatgatgatgtaatctttcttcgagaagtacaaaaactggctaaaactgagcttaagcttgaatacgaattaaatatttgggaaataatgtattttctttctcactctcattcattctacggtactagtttgcatggaattattacagcaatgtcgtttggtgtaccacatttttgtattgataaacgaatagaaaaaataacatcattcgttcagacatggagtgttggaccctttactcaacctataagcatttttaatataaaagatagtgttagtaaaatgaatgactatgataattctgatttattaaagtcggtggagtatgcccagcagatcatatctgaaagtttgaagaagatttcccatattttgtaa

SEQ ID NO: 920 - protein, 387 aa, Escherichia coli
MNDKVILYGAYDRYNYGDNLMPILLERFLKMNFPDKTRTIDFIYASIDSSDLSKYKCYSSIAMKDLLYTQHNSSIIVVGGEVLGADVGTLYTHVQQSQFYTRILKKIRRFQPKLLSTIAKIFYPAVWDYPYIPQKASFKNNVKVIYNTVGGVPVSSQTKYIAQAEYISARDRRTYEEVTKWASAELVPDSVLIASKIIDDQFMQDFVRKEIIDYCAANKFITVQACPYKVNFSAQDLAYQLDIVKSQSSIDVVLLPIGYASGHDDVIFLREVQKLAKTELKLEYELNIWEIMYFLSHSHSFYGTSLHGIITAMSFGVPHFCIDKRIEKITSFVQTWSVGPFTQPISIFNIKDSVSKMNDYDNSDLLKSVEYAQQIISESLKKISHIL

SEQ ID NO: 921 - DNA, 474 bp, Escherichia coli
atgagaaaaggatatacacataaattatttaatgaaaataattcaaatggactctcggacattttatctgggaaaactgagattagcttagctataaaaacaattaagtcagctgggtttgactatatttcccgtggtatggttcctcctaatccagctgaactccttatgaataagcgttttggggatttattagagtgggccaataataattatgatattgtagtgttggatactccacctattttagctgtgactgatgcagcagtcattggtcattatgtaggtactactttactggtagccagatttgaattgaataccgcgaaagaaatagaggtaagtataaaacgttttgaacagacaggaattatagtgaaaggttgtatacttaatggtgttgtaaagaaagccagtagttattatggatatggatataaccattatggatattcctatacagataaaaagtaa

SEQ ID NO: 922 - protein, 157 aa, Escherichia coli
MRKGYTHKLFNENNSNGLSDILSGKTEISLAIKTIKSAGFDYISRGMVPPNPAELLMNKRFGDLLEWANNNYDIVVLDTPPILAVTDAAVIGHYVGTTLLVARFELNTAKEIEVSIKRFEQTGIIVKGCILNGVVKKASSYYGYGYNHYGYSYTDKK

SEQ ID NO: 923 - DNA, 1428 bp, Escherichia coli
atgacgattctcgtcaggaattttattgttagcttttcacttgctgtatctgatctttttagttttgttatttcactttatctggcagttggggtgttatctattacatcgagtgattatcaaaatatttatcaggctgagcaattagagggatggaaggccttgcattggttattggctttttgttgtattgcttggtactcaatgcgtctacgccattacttctacagaaaaacgttctggtttgaactcaaggaaattttaaggacacttgtaatttttgcagtaattgaaatagcagtaatggcatttacgaattggtcattctctcgttatctgtgggtattgagttggactttgataatattgttattgcctctagctcgaatgatgacaaaacgtattctcgatattttcggattgtggcgtagggatacatggatcattggcaatggaaataatgcaattgaagcttataaagcaattactagtgagcgtaatcttggatttagtatagtaggtttcattgcaagtgagcaaaataatgcaagtaataataacatcgatggtattccagttttagataatgatcttaactggttatcaacaatagataaaaagactcaattcattgttgcagttgagtcaaatcaaagtgaggttcgtaatacatggttgcgtaattttatgataaaaggctttagatatgtatcagtaatacctactttgcgtggcatgcctttagatagcactgatatgtcttttatttttagtcatgaagttatgatctttcgtgtccaacaaaatttagcgaaattctcatctaggatcataaaacgtcttttcgacattatcggttcattggcaataataataattctttccccagcattagtgtatataagtcgaaaagtaaagaaggatggtgggcccgctatttatgcgcatgagcgtataggtaaaggcggacattcattcaagtgtctaaagtttagaacaatggtcatcaactctaaagaggttcttgcagagttgctagataaagatcctttggcaagacaagaatgggatgctacatttaagctcaaaaatgatcctcgcattacgaagataggagcattccttagaagaacaagtctggatgaattacctcagctattcaatgtactgaagggagagatgagccttgtaggacctagaccaataataaccgcagagcttgaaaggtataatgaagaggtcgattattatttgctgagcaaaccaggaatgacaggtttgtggcaagttagcggacgaagtgacgttgattacgaaacgcgtgtatatcttgatgcatggtatgttaaaaattggtctatgtggaatgatatagccatattatttaagacagttggtgtagtgctgaaaaaagatggtgcatattag

SEQ ID NO: 924 - protein, 475 aa, Escherichia coli
MTILVRNFIVSFSLAVSDLFSFVISLYLAVGVLSITSSDYQNIYQAEQLEGWKALHWLLAFCCIAWYSMRLRHYFYRKTFWFELKEILRTLVIFAVIEIAVMAFTNWSFSRYLWVLSWTLIILLLPLARMMTKRILDIFGLWRRDTWIIGNGNNAIEAYKAITSERNLGFSIVGFIASEQNNASNNNIDGIPVLDNDLNWLSTIDKKTQFIVAVESNQSEVRNTWLRNFMIKGFRYVSVIPTLRGMPLDSTDMSFIFSHEVMIFRVQQNLAKFSSRIIKRLFDIIGSLAIIIILSPALVYISRKVKKDGGPAIYAHERIGKGGHSFKCLKFRTMVINSKEVLAELLDKDPLARQEWDATFKLKNDPRITKIGAFLRRTSLDELPQLFNVLKGEMSLVGPRPIITAELERYNEEVDYYLLSKPGMTGLWQVSGRSDVDYETRVYLDAWYVKNWSMWNDIAILFKTVGVVLKKDGAY

SEQ ID NO: 925 - DNA, 258 bp, Escherichia coli
atgaaatattatattgcaattccaacatataatggcggggaactatgggaaaagtccgttgctaatataaaaaaatacgcgcctcaagatatttttgttcaagttattgactcaagtagtaaagacaaaaccgtatcagtatccaaaaacgcgggttttgatattataaatatttccggaagtgaatttaatcatggtggtactcggaatttagcagtactaaatcatatacaggaatatgatttggtgattttctaa

SEQ ID NO: 926 - protein, 85 aa, Escherichia coli
MKYYIAIPTYNGGELWEKSVANIKKYAPQDIFVQVIDSSSKDKTVSVSKNAGFDIINISGSEFNHGGTRNLAVLNHIQEYDLVIF

SEQ ID NO: 927 - DNA, 594 bp, Escherichia coli
atgataactattaataaaatagttaaaaacaatgctgttattaatatcatttggttgtctgcagatagtctaattagaatgggattaggctttcttgtatcagtatggcttgcacgatatctaggaccgcatgaatttggtatttataattattgtttggctattatcacaatatatgtttctgtagcttctttaggaatgaacggtgtagttgtcagagaggtcattaaaaacgaaaacaaagctaaagtaatcatggggacttcgttgtaccttcagatcttgggaagtcttttagcaagtgtcttagttacaattacaatatatgtactccgcccgaatgactggggggtattatttgctgttttagtgatgttaccttcagtattacttagaagtagtgatatttttaagtattggttcgagtcaaaaataaaatcgaaatacactgttttatcacaaaatattgctttctttataagctcagctgttaaaatatcaataatatattttaatgggtcatacttatatgtctgtgcaactgtttctttagaggcactgattattatgaagctaaaagattattatctttaa

SEQ ID NO: 928 - protein, 197 aa, Escherichia coli
MITINKIVKNNAVINIIWLSADSLIRMGLGFLVSVWLARYLGPHEFGIYNYCLAIITIYVSVASLGMNGVVVREVIKNENKAKVIMGTSLYLQILGSLLASVLVTITIYVLRPNDWGVLFAVLVMLPSVLLRSSDIFKYWFESKIKSKYTVLSQNIAFFISSAVKISIIYFNGSYLYVCATVSLEALIIMKLKDYYL

SEQ ID NO: 929 - DNA, 5454 bp, Escherichia coli
atgagtagcgcgttcataaagcttccacaggataaattgaatgcggcgttggctggagtgctgtgtcctcgtatcgaagcgatcctgagtgatcgtggcctaggccactgtgtgcgggtcaccgaccttgatgacgcagttatggagtcagtatgccgggaacttaggcgaatttggcctgacggaaacatatttatactcggcagtcatgaccaagaaggcatgcctttccgagtaacttccaccaagttggtggaactgcgtaatcctgacgcgaacggcgatctgcgccagcctttgctggtgttcataccgacctcgcttcgtactagcgccgaggattcttttggcgtggcgaccttcgaggaacttgccttcaccggtatctacgaggatctgatcgagtcgctgcttgaccggcttccggcaacgctggctggctatgttcgcgatcttttgggtatcctcaccgaggaggaatggctgtttgctgatgatgtttcgcgcgcgcggtatctactcaccgcgctcgaaaacgggattgatggagaaactcttggggccagcctgtatgaattggcgttgatcccggacttcaagctctttgccgatccgggcaaggtcattggaaaaattcgccgtaatcttggcagcgtccgcagtttgatatcctcacacaagtcggctcgtggtcgtattgctgatcttgggctcagcgataagacattggagttgcgtctattcacctactttgaaaaatacgatgtccatgattccgaatcttggacgccccccattgcgacagacaaaagttggtggagcatttctttcgataaatggacgttcaaagaagaactttcactggacaaggttcttctgacagtgttggaaactgacttgcctgtcgttgcggatgatgagaccgacgatcaactcagtggcctaattgggcaacaggttctggtaccgaacgaccgtcgtaaaatgaacgtggtgtttgaggttaatcctcaccccggtaaggtcagtgggcttgaccattttatggtgcaaatcatttcgcagaatgacggcccggtagggaaatctaaaaaggtaaaagcctggacgccgaaccgcctgcaatgtactgccagcctggctaaactcaataaaatagaattcgaggaaggatggcatttcatccgtgtaatgccctggactgccgatggcgacccgattccgctggaagcagatttcagctccgagggcgttaagcgctcttatgagagcgagcctttctacgtcctgcccggtggcaacattgaagaagatcccccccaacgtgccatgcctattgagcagagcctggagcatgcacgtttccgactgcaattgacagccctaagtgatgaacgtgatcccaatgatatcgctatcagtagtgtagcttggtccgagggcgatcgtaccaagaagacctcccgcctggaaaccttgcacgcaaaattcggtcgtgagggggcggttcagattccgctatcacgtacgctcaaaataatcgagcaacgcatattagcaaagcctaaacacccgtcaggctggcgaatgcagatcaacctggataccgctgagccaccctccgaggtcggactcatgctgcctacatctgccgcgatggcatctttcctggctgcccgtgaagagttttttgcagtggtgcgaaaagactctgccgaactgagcatgcaggggctgttgttccatgactctgaaaaggaatgcctcgcgtatgctgaaagatatcttgacttggtcaggaatctcatccgccaggccgagatgacttctggtggcgagcgccagcaacacctgcgatcgctaagaaacgtactgtccgttgattcaatccatgtcatcctgaccgacttccgtggaaggcatcgcgaggctgttttggtctccccaacccatccggtccgagccttgtggctgaacagttgggttactctgggcaaggattggatcgaaaagatcaagtcaggtgggaaagactacattcctcacgtccgttctgccctattggatggccttgtgccctcagcctatcctgtcggcattcccgtagaggatggtcgtatattcacgccggtggacaatctaaatgcgttttgggcgctatacgctccaacaaccgagaataattctcgtggcctgatggcggagatctgttcggcacttggcttggccgagccctctgcggcgggaattgatatttccggaaaggtcattgcggataagattgagcgctatctctcccagcatccttatgtgagagagctatcgctgaatatctttaaccccggatcaggttcgttaatagctgaggctctgatagcgcttcagcagaaacgtgagtatgccgatttgcgctatgacatacggctctttacctccgagcctgactcgccagttttgggtgaggcgcttgaatccatagttcatcccggagcaacggtgaatgaggctgcagacgcgtttgcggcatcaactggcaatcatctgttttccaagctgaacttggccaagcatgcgctgaatgaattccatgcaaattccaaggattttccagcgcacatcagcgttcttttggatgtgttccccgccgaggagctttccatttccgagaggccgatgggggtgactccgctgtatgggttgatacagggttttgacaccgaattcgttgacgacgattcgggtaccttctggaataagcggccgattattgggcgctccttcggtgcaaataaccacgctgcgtgtttcgatttgctgtcgtcactgaaccgtcacctctgttttgcaacctcagcggttgctacttctggtgctagtttcaaggccgtacccgttgtaacccttggcctcgatgtggctcaacgagaactgatctacgaggttcatcagatcagtgattgggtgtttactatcgaccgaaatatggggattgagtttttcgaccatggaggtcggaagaacagaccggattatctgattgactatgtgccaggagccagctcccaagcgacccataatctgataatctcctcgcgctcgaacgatgagttggaggccatgctgaaaccggtgctgcttgagcacggtttgtccgccgacggcgagcagtcggttcagatactcgcgaacctgcgctcgctttctggtcagcttgccctgaaactgatttccgcacgtacgcaacaggcggaggctcttggcttggctctagcgaggctctatctcgaatatcaaggcgcgttaagcaatcagatcattgtgccattagacgcacacacggacctctaccgcgtaagcggtgagtcagacgatgtcaacgatgctatcagcctacaacgtaccgacttgggtttgtttgatttagatttaaacaccaggacgatcacttgtaatctggttgaggtgaagtgttattcgcaggttggtgcctttgcggctttcaaccaactgaaggaacggatctccgcccagataaatcagagcgagcgcatcctccagcgtcactttgacccggccctgaaaaaaccggatcggccggataggttgctcaagagccgggagttggctcagattcttaggttctatttggagcgctcactgcgttatgggatctttgaagagaccgccgcgcaggaagcgagaggactacttgaatccattgagcagggctactcgcttcaattcaggcggtgcgctttgattttcgactttgacaagtctggaacagaatctccggacaacgagattggcatcgagttccatcgtatcggcaaggatctcattcatgccttgctggagaactgtcgcaagcctgtgtctgtcgagagtgaggaagtaccgactgctcctagtctgagcgaacagatcatttcgaacgtaccgaagctcgagactgccgctttcatcgcccctaatagggtccgctcgacatcctggacggtggacgagctctggaacgatgagctggagacaccagtcactctaccaataccttctgtctcagaggaaaccatcgcacctgttcaaaaggaagcacaggcgaaacccgtcgagcaagcacctgaacctaccaccattgtgcccaaacaagaaaaagatgacgaacaacccgctaccgttgatgtggaaccggaagaagctgttcgacccgctcttgaagtacaggggcatctgacattcgagcctcaagccgaagtcagctacgacatcatgctgggcgttaatggtagttcaccgcagtacggattgctcggagaggtttccggacggaaaatcgcgctggacctcaatcatacccacacgatcagtctcttcggggttcaaggcggtggaaagagctacacccttggaacagcaattgagatggcctcaatgccgattcagcacattaatgtactgccaagcccgctcgccacagtcattttccattatagcccgacgcaggattatgcgccggagtttacctcgatgattaatgccaactcggtagaggatgagatccgtatccttcgtgagcgttacaaggccaacccggaagcattgaaggatgtcttgattcttacccctgccaacaaggtagatgatcgtagggccgagtacccggatattgaggttaagccgattgctttttctgccgctgaacttaaggcagcacactggaaattcctaatgggagcgattggtagccagagcatgtatatgcgccaaatcaatctcatcatgaggggactgcgggataacctgaccttggattctctgcgagcaggcatcgataactctggtttgtccgatcatctaaaggagctggcccagacgcgcttactgtttgcaagcgaatatatcgatgataaccagcgtctccaggatctgattcgccccggccggttgattatcgtggatctgcgagatgaatacattgagaaggacgaagctctcggtttgttcgtggtgatgctacaggttttctcagaagcaacctaccaaggaagagccttcaataagttggtggttttcgatgaagctcacaaatatatcgagaacgatgatctggtttccggcttggtcgaggttgtccgtgagatgcgccacaagggaaccagcattatggtcgcttctcaggacccgccatcagtcccgatctctcttatcgagttgtcttcacagatcatcatgcacaagttcaactcgcccgcatggttgaaacacatccagaaggcgaatgccgctcttggtgagttgacctccgataagatgagtcgtctcggtaccggcgaagcctatgtatggtcgagcaaggcttcggatgactcattcacccggggcgcggtgaagatcaagtgccgtcctcgcattacccagcatggtggcagtaccaaaacggccgtgggtcgatag

SEQ ID NO: 930 - protein, 1817 aa, Escherichia coli
MSSAFIKLPQDKLNAALAGVLCPRIEAILSDRGLGHCVRVTDLDDAVMESVCRELRRIWPDGNIFILGSHDQEGMPFRVTSTKLVELRNPDANGDLRQPLLVFIPTSLRTSAEDSFGVATFEELAFTGIYEDLIESLLDRLPATLAGYVRDLLGILTEEEWLFADDVSRARYLLTALENGIDGETLGASLYELALIPDFKLFADPGKVIGKIRRNLGSVRSLISSHKSARGRIADLGLSDKTLELRLFTYFEKYDVHDSESWTPPIATDKSWWSISFDKWTFKEELSLDKVLLTVLETDLPVVADDETDDQLSGLIGQQVLVPNDRRKMNVVFEVNPHPGKVSGLDHFMVQIISQNDGPVGKSKKVKAWTPNRLQCTASLAKLNKIEFEEGWHFIRVMPWTADGDPIPLEADFSSEGVKRSYESEPFYVLPGGNIEEDPPQRAMPIEQSLEHARFRLQLTALSDERDPNDIAISSVAWSEGDRTKKTSRLETLHAKFGREGAVQIPLSRTLKIIEQRILAKPKHPSGWRMQINLDTAEPPSEVGLMLPTSAAMASFLAAREEFFAVVRKDSAELSMQGLLFHDSEKECLAYAERYLDLVRNLIRQAEMTSGGERQQHLRSLRNVLSVDSIHVILTDFRGRHREAVLVSPTHPVRALWLNSWVTLGKDWIEKIKSGGKDYIPHVRSALLDGLVPSAYPVGIPVEDGRIFTPVDNLNAFWALYAPTTENNSRGLMAEICSALGLAEPSAAGIDISGKVIADKIERYLSQHPYVRELSLNIFNPGSGSLIAEALIALQQKREYADLRYDIRLFTSEPDSPVLGEALESIVHPGATVNEAADAFAASTGNHLFSKLNLAKHALNEFHANSKDFPAHISVLLDVFPAEELSISERPMGVTPLYGLIQGFDTEFVDDDSGTFWNKRPIIGRSFGANNHAACFDLLSSLNRHLCFATSAVATSGASFKAVPVVTLGLDVAQRELIYEVHQISDWVFTIDRNMGIEFFDHGGRKNRPDYLIDYVPGASSQATHNLIISSRSNDELEAMLKPVLLEHGLSADGEQSVQILANLRSLSGQLALKLISARTQQAEALGLALARLYLEYQGALSNQIIVPLDAHTDLYRVSGESDDVNDAISLQRTDLGLFDLDLNTRTITCNLVEVKCYSQVGAFAAFNQLKERISAQINQSERILQRHFDPALKKPDRPDRLLKSRELAQILRFYLERSLRYGIFEETAAQEARGLLESIEQGYSLQFRRCALIFDFDKSGTESPDNEIGIEFHRIGKDLIHALLENCRKPVSVESEEVPTAPSLSEQIISNVPKLETAAFIAPNRVRSTSWTVDELWNDELETPVTLPIPSVSEETIAPVQKEAQAKPVEQAPEPTTIVPKQEKDDEQPATVDVEPEEAVRPALEVQGHLTFEPQAEVSYDIMLGVNGSSPQYGLLGEVSGRKIALDLNHTHTISLFGVQGGGKSYTLGTAIEMASMPIQHINVLPSPLATVIFHYSPTQDYAPEFTSMINANSVEDEIRILRERYKANPEALKDVLILTPANKVDDRRAEYPDIEVKPIAFSAAELKAAHWKFLMGAIGSQSMYMRQINLIMRGLRDNLTLDSLRAGIDNSGLSDHLKELAQTRLLFASEYIDDNQRLQDLIRPGRLIIVDLRDEYIEKDEALGLFVVMLQVFSEATYQGRAFNKLVVFDEAHKYIENDDLVSGLVEVVREMRHKGTSIMVASQDPPSVPISLIELSSQIIMHKFNSPAWLKHIQKANAALGELTSDKMSRLGTGEAYVWSSKASDDSFTRGAVKIKCRPRITQHGGSTKTAVGR

SEQ ID NO: 931 - DNA, 1683 bp, Citrobacter koseri
atgtcaattaaaggccgtgacaaagagtttcgaatcccgaaagtttcttatctcgattttaaacatattgagatggatcgcgtactcaccatgttgtttccacgattgaaatacgatggctatggtagtcgcagacctcctcgcggtggtgatctttcagttgaggagtttctcgaagatttccttgaacatcccgagtggtttgctggtttcgatcaaaaccctgaaattgttcgagcctggattgaaacagatcttatggatctagtgaatagaggtaaaagcaaccaagctctagctgcaccacgtcctttgcatggcaatacctataagtttcgtaacgcgaagcatacccgagattacggcgctgcagagcaaatctactggatgcttttctatgcccgcaaaggtaagggccaagcggcgcgagatgccttgaagtgtttcttcttcccggggatcgacttggtaacggaccgttacgatcccaacgcttccgtggatgtggaaacgcaggccatcttgcgattagaccaacaggttacgcaggatatgaaggattccaaggagcccgcacgtttccaacctctgtgtatcgggcaggccgatattttggcagacgatattctgcgtttactcgcctatgagccttatatcccgcgctcggtgttggttgactatctcaaaactctgatggctttccatctggcactatatcatctcaaactactgcaaatgctgcccaagctggtgaaacagcgctctggtaacgatctctgtaccgccagggaatgtccgagcaacccgggtctcgataatgctctggaaggttgcccttaccgcttggcgttgatagtagatatgggggacgtcaacaatccgcatatggttgagttagctcgaaaatccactgatcggctctatcgtcagatacctgcttttgtgcaggccaattttgtcgtcaagaaactcgatgaaatggcggaatacttgggcaaaaaaactggtaaattggctcctcccggaggcggtgtgttcactgttagtgatctgatatccctgctgaagcccgagcacgacaccgagcgtcaagcctacttcaaattccgcttggcgagcctaattgaagaatcggcctccaggaatgaggatttagacccagagattagggacgtcaccgccatgggcttgggtgaattcgattccttcattgaaatactgatggcctatcgaggtaaatatcaccgccaatacatcactgagtgcctggattctcttctgctgaagaataaagaaagtggacttttggctcaggcccggactaagggaagcccacgtcgatttgtgttaggaagcaagctgctcgaagtgctcctccaggtagctgtactcacccaagacggcgggcgttttgtgacccacgaggttcgcatcgaagaattgttagcctttttaaggaaccgctacggtctttacatcgaccaattaccagaaggaaccacagctaacagcagcatactagacaaacgtgccctgcgtcttaatctcgaagccttcaagcgccgccttcgtgaaattgggttctaccaggatttgtcggatgcttatgtaacccaaaaagtatcgccccgatatgcaattgaaagatttgatagaactgataagaatgggaggcacacatga

SEQ ID NO: 932 - protein, 560 aa, Citrobacter koseri
MSIKGRDKEFRIPKVSYLDFKHIEMDRVLTMLFPRLKYDGYGSRRPPRGGDLSVEEFLEDFLEHPEWFAGFDQNPEIVRAWIETDLMDLVNRGKSNQALAAPRPLHGNTYKFRNAKHTRDYGAAEQIYWMLFYARKGKGQAARDALKCFFFPGIDLVTDRYDPNASVDVETQAILRLDQQVTQDMKDSKEPARFQPLCIGQADILADDILRLLAYEPYIPRSVLVDYLKTLMAFHLALYHLKLLQMLPKLVKQRSGNDLCTARECPSNPGLDNALEGCPYRLALIVDMGDVNNPHMVELARKSTDRLYRQIPAFVQANFVVKKLDEMAEYLGKKTGKLAPPGGGVFTVSDLISLLKPEHDTERQAYFKFRLASLIEESASRNEDLDPEIRDVTAMGLGEFDSFIEILMAYRGKYHRQYITECLDSLLLKNKESGLLAQARTKGSPRRFVLGSKLLEVLLQVAVLTQDGGRFVTHEVRIEELLAFLRNRYGLYIDQLPEGTTANSSILDKRALRLNLEAFKRRLREIGFYQDLSDAYVTQKVSPRYAIERFDRTDKNGRHT

SEQ ID NO: 933 - DNA, 144 bp, Escherichia coli
atggttaatcatctccccgacaatatcgatgaaagcctgtgcatccaccgtctgcgtggtgatatatgctccctgcagagacgcccggatgattttcaccaggttttccatttccagaatgtcagcccggctttttttctttga

SEQ ID NO: 934 - protein, 47 aa, Escherichia coli
MVNHLPDNIDESLCIHRLRGDICSLQRRPDDFHQVFHFQNVSPAFFL

SEQ ID NO: 935 - DNA, 321 bp, Escherichia coli
atgacaacacaaacccttgagcaaattacggaagattttcgtcgccagtgtgatgtttttgcccgcgaacagcagccacgctgcgggctgatttatgaactttatcagcgacgcctgagcgcagatatagacggctaccttgcaggcgttccggctgagtatcgggatgaactgatcgcggtggcacggcgtgaatttgattacctgacccaagacgagatccaggaagaaatccgccaggatagtgagagaggctattgcagccacggtattgatcgtaattgttgcccgctgggctgcggtgatatagacgagtattga

SEQ ID NO: 936 - protein, 106 aa, Escherichia coli
MTTQTLEQITEDFRRQCDVFAREQQPRCGLIYELYQRRLSADIDGYLAGVPAEYRDELIAVARREFDYLTQDEIQEEIRQDSERGYCSHGIDRNCCPLGCGDIDEY

SEQ ID NO: 937 - DNA, 180 bp, Escherichia coli
atgaccactgttaccaccccttccaagctgaaaaaagaagttgaatcggaaaaggagttgatgctgcgcgcctgcctcgaagcgtttaaccagctgcctaatcagcgcctgaaaggtgcgttcccatcaacgtatgcgctggccgcaaagttaaaccagctgttgcagcatacaaaataa

SEQ ID NO: 938 - protein, 59 aa, Escherichia coli
MTTVTTPSKLKKEVESEKELMLRACLEAFNQLPNQRLKGAFPSTYALAAKLNQLLQHTK

SEQ ID NO: 939 - DNA, 378 bp, Escherichia coli
atgcgtgtattaaccccccaccagttttttaacctcaactggtttgtcagtaaccctgaattgacctcactaaaaccggccatgaatggcgaacctgccctggcaattggttatgtatggttccacgtccaggatgaagtgaatggcggcgagcctgacgaggacatgatgtgtgctgttttcccctggtatgccgagatcacttcaaccaatggtgcgccggacattcaggtattcaccgagcaggacgattgctggctttccgcgcatcagtttatgtttgcgcgtgacactgttccttcacatgaagaatttctcgtttatttcgattcgcttaactggcgcgccgacgttcaaaaactgcttcttaatcgctaa

SEQ ID NO: 940 - protein, 125 aa, Escherichia coli
MRVLTPHQFFNLNWFVSNPELTSLKPAMNGEPALAIGYVWFHVQDEVNGGEPDEDMMCAVFPWYAEITSTNGAPDIQVFTEQDDCWLSAHQFMFARDTVPSHEEFLVYFDSLNWRADVQKLLLNR

SEQ ID NO: 941 - DNA, 426 bp, Escherichia coli
atggaaactatcgaaatcaccgctcgctacatttctgaacacgcccgcattaacttcatgccagcagcctttcacagcgcctttttaagcgccgatctttatattcagtcctttcttaatcgttacgctaaagactaccaggggggatattgggagtttctacaggccagcaatggcgcatttttcctggaagcgcccgcctctctttggctctcgttgcctaactattttgaagatgaatgcagcccgcgcgaagtaggaattattgtttgtctgtacgcctacagctactttagcgcgctggcatatgaagaaggtaaagccgagctgacagaaacgatggctaaccggtatcacctgttgcgcgagtacgtgaatacgctggagaaagaaagccagaatcgcatttatcgtgccattgattaa

SEQ ID NO: 942 - protein, 141 aa, Escherichia coli
METIEITARYISEHARINFMPAAFHSAFLSADLYIQSFLNRYAKDYQGGYWEFLQASNGAFFLEAPASLWLSLPNYFEDECSPREVGIIVCLYAYSYFSALAYEEGKAELTETMANRYHLLREYVNTLEKESQNRIYRAID

SEQ ID NO: 943 - DNA, 381 bp, Escherichia coli
atgttagcgacacttcaacaccctaccgcctggcaattgccagcccggttaatgcttttggaactattaatgttcgattaccgtaattccgatcaggagcgctacggccagcaaatctatcaccactttcgcaaacagggtaatcatcgctgggatactgctgttcatcaggataatgacggcaagtttacggttattttccgccattcattcagcaaaaaacaggctgatggcgttaagcgaacgatgatccgcgatgaaaccattatacaggcaggaagcgcgcaggaactgacagaagcgacgttccccgcataccaggacagcgatattctgaaagcgtctgatttcttcacgtcgcttaaaaatgacaacatatga

SEQ ID NO: 944 - protein, 126 aa, Escherichia coli
MLATLQHPTAWQLPARLMLLELLMFDYRNSDQERYGQQIYHHFRKQGNHRWDTAVHQDNDGKFTVIFRHSFSKKQADGVKRTMIRDETIIQAGSAQELTEATFPAYQDSDILKASDFFTSLKNDNI

SEQ ID NO: 945 - DNA, 255 bp, Escherichia coli
atgctgaataaaaccgaaaataacaccgacattacaagtatcaccccctgctctgtagagggtttaatcgccatcaaggatgataagggccggacgcatattatccagcgagagttgatatcccatactgaggacagatcagatattgaaaggaaacctgcgacctccgttttcttagttaccggggaatttataagggtgtttttatctggcgaaaagctggcagaaaagctgaatttaaacgtacctgactaa

SEQ ID NO: 946 - protein, 84 aa, Escherichia coli
MLNKTENNTDITSITPCSVEGLIAIKDDKGRTHIIQRELISHTEDRSDIERKPATSVFLVTGEFIRVFLSGEKLAEKLNLNVPD

SEQ ID NO: 947 - DNA, 387 bp, Shigella boydii
atggatacgttttcctctggcactgcgaccggaaatcccgcctttcagcatattctcctggatggtctgataagcactccacaggtccttaccgtaatcctcccggcgtcgtggcgtcagaatgtcggtagtggtgacgggctgatgttcatcaccataacggtaagtcagcgccgcctgtgccagcgcctggcgtgccggtggcggcaggaccagcgactgcatggcatcacgcttttcctcaatcaggtcaaacacgcccaccacttcgtaagcaccttctatgaccctgtccaccacgtttccccggtgtggcacccggacttctcccagcgactgaccgcagaccaggccattggtacaaatggcacgaaaatatccgggtaa

SEQ ID NO: 948 - protein, 128 aa, Shigella boydii
MDTFSSGTATGNPAFQHILLDGLISTPQVLTVILPASWRQNVGSGDGLMFITITVSQRRLCQRLACRWRQDQRLHGITLFLNQVKHAHHFVSTFYDPVHHVSPVWHPDFSQRLTADQAIGTNGTKISG

SEQ ID NO: 949 - DNA, 1386 bp, Morganella morganii
atggatagtgtcagtagtgttgagcgtttaagaacaaaagctttttatcagttgcttgtggataggcttggaactgaggcctgggctgctcgcaaagctgcatatttcaagcgcataagagagaaggaggctaagtttaacatcaatctgccgatagagccccagctcttcataccagcagaagatgacatcgactggtacattctggcgtcgtatctgtctcatgattttccatatagtgatgctacttacagcagcagacgtatctacccctatgctatggccatcggagctgttgcagaccagcttcgcaaagtcccatacgtcgatgatgttctggacaaaatgctagcaaataacaataaaccagaaactcaaatttttgagctgctgacggcatcgttctacctaaagaacggctatgaggttgccttcatcccagaaagcagcattgtttggcccgatggaaagaccaaaaaatcaccggatatgctcgtcaagttaggtgatctggagttctacgtcgagtgcaaaaggtcggataagcaaaccaagtactcaaagacagaagagcaagcctgggccaacatctggcatcaattgagccaacatatgctcaaagtcgcaccatggaacattgtcgatataattttccatgagcaggtcgccagtgtgactccggcagacgttattaaagcggtgaatctagccattaaaggggggacgggaaaagctaatgaaggttcaatcagtgtgggaatacgagccatcgacaaattaggtctcagacgtcactacagaaaattttcagtcagagccaatagcccacagcatgaattgctggtatttggggatctagatagcaatgagaaacgaagtatctcgactatcgctcagagagttattcgtcctggcaccaataacgatattctcaacatttttgtagaggatgttgcaaagtgcgttggagctcagtggtgctgcgatcatgagatttctcttggcctcagatccaagcatttcaagagcttgctcaatgatggagtcatgcagattccccctgatcgtgctggcgtggtgcatatttggtatgagacttgcgaaggcatagatattgaagaactacgtagggataaaaacatggagcatatctcggcctacgatgcctctaaaacaaccgtgttgggtgctttcctgcatgccgttaattattacccattagaggacaactatgagtgggctgagactgttcaagactttgcccgtgtcccggatttgatggggctcttccttagacagccattgatgcttacatctgactcgacgcgtggggtcgaaggtgtcacacattgggagcaagataagaccgcaaaaagcatgcgttga

SEQ ID NO: 950 - protein, 461 aa, Morganella morganii
MDSVSSVERLRTKAFYQLLVDRLGTEAWAARKAAYFKRIREKEAKFNINLPIEPQLFIPAEDDIDWYILASYLSHDFPYSDATYSSRRIYPYAMAIGAVADQLRKVPYVDDVLDKMLANNNKPETQIFELLTASFYLKNGYEVAFIPESSIVWPDGKTKKSPDMLVKLGDLEFYVECKRSDKQTKYSKTEEQAWANIWHQLSQHMLKVAPWNIVDIIFHEQVASVTPADVIKAVNLAIKGGTGKANEGSISVGIRAIDKLGLRRHYRKFSVRANSPQHELLVFGDLDSNEKRSISTIAQRVIRPGTNNDILNIFVEDVAKCVGAQWCCDHEISLGLRSKHFKSLLNDGVMQIPPDRAGVVHIWYETCEGIDIEELRRDKNMEHISAYDASKTTVLGAFLHAVNYYPLEDNYEWAETVQDFARVPDLMGLFLRQPLMLTSDSTRGVEGVTHWEQDKTAKSMR

SEQ ID NO: 951 - DNA, 711 bp, Escherichia coli
atgaccaaatggacatttgaaaaaaatattgttgcacaaggaattgctgcaaaaaataaatctggacgtattccggcgattgacattcaaccaggctctggtcttttgaagcgtcatcaaatggcgttgtatgaaagcgcaatcaacttcagagcgccaattgaggaaaataaatgtgggcgatacaaccccccagggggatgtgtggcggtatggtatgcctctgactctgcgttaacggcggcggcagaagcttatgggcgtttgctccatctcgaagggacgatttcttatcctgaatcggtactttcacaacactatatgtgctctgtggatgtcatgaggccagtgaaagtgatcgatgttgtagcgctctgtgagttgttacatattcctttggatagcttagagaacgaggattacacttttactcaatggctaatggaacatctttatacacatttcgggcgtgactatgacgggatagcctatacctcaaggcataaacgctataaacgctgttatgccttttgggaacgaccggatagtacaccagcctttaccgatacccctcaggggatggtgccttatgccagttacatcgaaaatgacgaaggtatcttccctaaagggtggcacaaaggaacgatgtcaggtgaagagatgttcgaagaactgcttggattcgaaattacgccagaaccaatgtaa

SEQ ID NO: 952 - protein, 236 aa, Escherichia coli
MTKWTFEKNIVAQGIAAKNKSGRIPAIDIQPGSGLLKRHQMALYESAINFRAPIEENKCGRYNPPGGCVAVWYASDSALTAAAEAYGRLLHLEGTISYPESVLSQHYMCSVDVMRPVKVIDVVALCELLHIPLDSLENEDYTFTQWLMEHLYTHFGRDYDGIAYTSRHKRYKRCYAFWERPDSTPAFTDTPQGMVPYASYIENDEGIFPKGWHKGTMSGEEMFEELLGFEITPEPM

SEQ ID NO: 953 - DNA, 645 bp, Escherichia coli
atgatcaaacacaccgcagcagaaagggaaaccaacacttcagctaagctgaatgaataccagttgaaccttctgaaaagaattaacaacctcgctatttccctgatgcctgaatttgaagacaaaaaccaggcaattaatgctatcacgctggatgatagttcactgatgcaattgctctacaccgttcaactcgaacagaagactcgtgtcaatgactacgaactacgtaaagtgcgccgtcgtcgcgaaaatctggaacgattttatcgtgggcttcaggagttaggcggtacgctaaaggtaaatgacgtggtcgatattcttggaatcacccgccaggcgatcaacattcgcgttaagaagaacaagcttttagcattcaagcagaacggtgattttattttcccgaaatttcagttcacagataacgggctgattcccggctttgaagacgtaatggcggcatttgacgagaatacccatccaatgctgaggttgggtgtgctgaaatcaccaatagaggttaatagcgaaggcctgaaaaagacgccgattcaaatcatgcaggacggcgctaaaaatagtgaacttagtctggctatccgtgccgctaaacagttcggaaatcatgtatccagttaa

SEQ ID NO: 954 - protein, 214 aa, Escherichia coli
MIKHTAAERETNTSAKLNEYQLNLLKRINNLAISLMPEFEDKNQAINAITLDDSSLMQLLYTVQLEQKTRVNDYELRKVRRRRENLERFYRGLQELGGTLKVNDVVDILGITRQAINIRVKKNKLLAFKQNGDFIFPKFQFTDNGLIPGFEDVMAAFDENTHPMLRLGVLKSPIEVNSEGLKKTPIQIMQDGAKNSELSLAIRAAKQFGNHVSS

SEQ ID NO: 955 - DNA, 924 bp, Escherichia coli
atgttacataaaaaatcagcacaagaaaatgtagccttcgggcttgctgtacttaaatactatcttcgtttcaactccaaagagaatttacaagatgctaatgtgagttcggaggaattgataagcaatttaataaacattttgaaagatactaattttgtttgcacgtcagaaatttcagccacatatccaggaatagatgccttagacaaagaaaataaactaggccttcagataacacatacaaaaaatacttcaaaaataaataaaacaatagataaaatacgcattaataaagttaacgaagaaattgacaccttatattttttcattacatcggaaaggcagaaaaaatacactatcaaagcacaatgtccaaaactaaatgtcacaacaaataatatattagactttgatgacctagctaaactgttatcgaaaagtcaggataaactgagtaaagcagaatccgaacttatgaaagcaatgcctcgtctctaccaagaaggaaaagaacggtatcaagcaatgcttaataacattcttgaaaccagaaataaactagatcgaagagtattcactgctaacaaaatcttagaagaacctgaagaaatgctgttgtccctcaaagagatcaggatagatatacaaaaagatggcataatgaacaaagccaatcctgctgtctctgattcatttaataaaataataaatattattgatgatgtagagagtaaaattgctgtacaatatcccgatgaatacaaaaaatataaagcaaagatccttccatcgtggaattctccagaaaaagaagaatgcttagatattttaatggctataagaaaagatgttttggaacaaatagacaatattgatattgaggtaaataagctaaaaagcattcttgataataacatttag

SEQ ID NO: 956 - protein, 307 aa, Escherichia coli
MLHKKSAQENVAFGLAVLKYYLRFNSKENLQDANVSSEELISNLINILKDTNFVCTSEISATYPGIDALDKENKLGLQITHTKNTSKINKTIDKIRINKVNEEIDTLYFFITSERQKKYTIKAQCPKLNVTTNNILDFDDLAKLLSKSQDKLSKAESELMKAMPRLYQEGKERYQAMLNNILETRNKLDRRVFTANKILEEPEEMLLSLKEIRIDIQKDGIMNKANPAVSDSFNKIINIIDDVESKIAVQYPDEYKKYKAKILPSWNSPEKEECLDILMAIRKDVLEQIDNIDIEVNKLKSILDNNI

SEQ ID NO: 957 - DNA, 312 bp, Escherichia coli
ttgataaaggatactcatgcgtgtaaaacgcaaaataccctgagtaatcagggtattaaacgcggaaaagtaaaggttgagcgctttacattttccattcacaccagaggcgtgactaaatctaaaattgattctacggcaacgttcaatctacgtcaaatcgccaatggttttcctgttatgaaaattaccggaggcttcatgttgttaaccatcatcgacacctatcttcatgcttcattactgacacagatactggtaatcccgtttatctgtgcggtggtgtgggcggtaaagaaaatccgggtataa

SEQ ID NO: 958 - protein, 103 aa, Escherichia coli
MIKDTHACKTQNTLSNQGIKRGKVKVERFTFSIHTRGVTKSKIDSTATFNLRQIANGFPVMKITGGFMLLTIIDTYLHASLLTQILVIPFICAVVWAVKKIRV

SEQ ID NO: 959 - DNA, 1128 bp, Escherichia coli
atgacgattacggcctactccaaaacgttcaagcgtgaacttgatgccaggcagttgaaaaatctttttgatgaaaataatgccgattcagcgctgagtttccgggattttgtgaaagcagatattgaatgcccagcctgcaatgtttctggcggtcattatgttgcagaagctaaatcgcagtcgaaaggcaatgttgtaaagcaggctcattttgcatttcgcgacagccaaggaaaagatactcatcttcctttctgtgatttttacactggttcagacaagctaaatgtcgtttctaacgacgggcgtgttgatttcatgcgttctggctctgaagccacgcaactgatcggcttaatggtctgtgccgggattgaagccaatatattcactcagcaagacattcggaacatgcgacaatggttcctagacttgcgtgagcaaggttcgtttatcttcaatctgaatccacatatcgtacagattgccagagcttctctgataagaaacaaaagaaatagagatcaatacattgttgatatcagtgaaaccaagaatagttggtttgatattgataatgaagtctaccagtcgctttacttcaagtttcccgagttggctttggatcatcgggataatcccgaactatgggggataaggcttaaaggggttgtcactaaagctaaaagcattattgtgaaggactcgggtacatccacatttgataggtcaatcctttctgaaaaatatcagttggcaacacaaattgcatcactggttagaagtactcatccacggctacgcgtactgttaggatacacaaccaacgctctgaggagtagcaatccactgatggcatttgcagcgcttctgctgtttgtatctgattgggatgttacagtcgctgaaaagaagattaaagcgatattggccgtagaaacagtgactgacattaccgctggtaatgtggttggcatgaacccttttatccattatagcgcgtggatcttggttaaagccctgcatgaactacaatctgagctggggtacgaagttgattttgacgctgagtttaacttcgaaaaagaaagactgatgaaactatattttcctagtgagtcataa

SEQ ID NO: 960 - protein, 375 aa, Escherichia coli
MTITAYSKTFKRELDARQLKNLFDENNADSALSFRDFVKADIECPACNVSGGHYVAEAKSQSKGNVVKQAHFAFRDSQGKDTHLPFCDFYTGSDKLNVVSNDGRVDFMRSGSEATQLIGLMVCAGIEANIFTQQDIRNMRQWFLDLREQGSFIFNLNPHIVQIARASLIRNKRNRDQYIVDISETKNSWFDIDNEVYQSLYFKFPELALDHRDNPELWGIRLKGVVTKAKSIIVKDSGTSTFDRSILSEKYQLATQIASLVRSTHPRLRVLLGYTTNALRSSNPLMAFAALLLFVSDWDVTVAEKKIKAILAVETVTDITAGNVVGMNPFIHYSAWILVKALHELQSELGYEVDFDAEFNFEKERLMKLYFPSES

SEQ ID NO: 961 - DNA, 228 bp, Escherichia coli
atgagtggtattatttatagtatagatagtgttgaacctgataataaattaacaaaaaaaatgtattatgcaaaattatctgatgttgttgatgggctaaataaaaaagaatatataaagaaaatgattatggaaataacttcagcattgcattgtgatgtttttagctctaacaaagcattaatagagagaaaaaacaatgcgttaagtgatatatttggtatctag

SEQ ID NO: 962 - protein, 75 aa, Escherichia coli
MSGIIYSIDSVEPDNKLTKKMYYAKLSDVVDGLNKKEYIKKMIMEITSALHCDVFSSNKALIERKNNALSDIFGI

SEQ ID NO: 963 - DNA, 930 bp, Escherichia coli
atgttgtccgggggtgcggtcatccttgtcatgtttcggttctccagtgtccgttatcttgacaaaagcagtttcccaaaacatgacaaggatgtcaaaatattggacagaccccggtcaccagctatgtccgcacccccggtcaccagctatgtccgcacccccccccataagtcgttgatttacaagccttttgaaaatcgcccttctctcattctcttggtgcttgttttggcgctttcagcggggcacccctgcggggttcccccacgccttcggcgcggctccccctccggcataaagtgcccccccagcgggggggcgcatcggttccccccgactgcgcggccttcggccttgcccagcggggcgctgcccctctggactccccacactcgccgccgtgaggctcggggggcaggcgggcgggcttcgcccttcgactgcccccactcgcataggctgggtcgtttcagtcgcgtcaaggccaagccgctgcgcggtcgctgcgcgagccttgacccgccttccacttggtgtccaaccggcaagcgaagcgcgcaggccgaaggccgaaggcttttccctcctgaaaaaattaaaacttggtggagcaaggccgaaggccgcgcagttggagccggtgggtatgtgggcgaaggctggggagccggtgggcaatccctgtgggcaagctcgtgggcaggcgcagcctgtccatcagcttgtccagcagggttgtccacgggccgagcgaagcgagccagccggtggccgcttgcggccatcgtccacatatccacgggctggcaagggagcgaagcgaccgcgcagggcgaagcccggagagcaagcccgaagggcgctgcaaccggcgcagccggtcacgactttgcgaagcaaagtctagtgagtacactcaagtattga

SEQ ID NO: 964 - protein, 309 aa, Escherichia coli
MLSGGAVILVMFRFSSVRYLDKSSFPKHDKDVKILDRPRSPAMSAPPVTSYVRTPPHKSLIYKPFENRPSLILLVLVLALSAGHPCGVPPRLRRGSPSGIKCPPSGGAHRFPPTARPSALPSGALPLWTPHTRRREARGAGGRASPFDCPHSHRLGRFSRVKAKPLRGRCASLDPPSTWCPTGKRSAQAEGRRLFPPEKIKTWWSKAEGRAVGAGGYVGEGWGAGGQSLWASSWAGAACPSACPAGLSTGRAKRASRWPLAAIVHISTGWQGSEATAQGEARRASPKGAATGAAGHDFAKQSLVSTLKY

SEQ ID NO: 965 - DNA, 510 bp, Escherichia coli
atgggccaccagaacgccgtggtgatcggccaaaagaccttggccaagctgctgggtgtgagtgaacgaaccgtgcgccgcgccgtggcggatctggttgaagaacgctggattcaggttgtccggcttggccgtggcaaggaggccgcctacgtggtcaatgaccgcgtggcgtggggtcagcctcgcgaccagttgcgcctgtcggtgttcagcgccgccgtggtggccgacttcgacgaccaggaagaagctctgctaggccacggcgacctgcgccgcatcccgaccctataccccggcgagcagcagctaccaaccggccccggcgaggagccgcccagtcagcccgacattccgggcatggaaccagacctgcccgccttgaccgaaacggaggaatgggaacggcgtgggcagcagcgcctgccgatgcccgatgagccgtgttttctggacgatggcgagccgttggagccgccgacacgggtcacgctgccgcgccggtag

SEQ ID NO: 966 - protein, 169 aa, Escherichia coli
MGHQNAVVIGQKTLAKLLGVSERTVRRAVADLVEERWIQVVRLGRGKEAAYVVNDRVAWGQPRDQLRLSVFSAAVVADFDDQEEALLGHGDLRRIPTLYPGEQQLPTGPGEEPPSQPDIPGMEPDLPALTETEEWERRGQQRLPMPDEPCFLDDGEPLEPPTRVTLPRR

SEQ ID NO: 967 - DNA, 429 bp, Klebsiella michiganensis
atgtataaaactatcattatgccggttgatgtctttgaaatggagctgagcgacaaggctgtccgccatgcagagtttctcgcccaacaggacggtattattcatttacttcacgtcttacccggttcatccagcttcaccatgagccgttttaccgccgatctgcgccgctttgaagagcatttgcagcatgaagcggaaacccgcttgcagaccatggtcggccacttcagcatcgacccttcacgcatcaagagccatgtgcgtttcggcaacgtccgcgatatggttaatgaactggccaatgaaatcaaagctgacgtggtagtcattggttcacgtaatccgtcgatcagcacccatttgctgggttcaaacgcctcaagcgtgattcgtcatgcccatattccggtaatggtcgtgagataa

SEQ ID NO: 968 - protein, 142 aa, Klebsiella michiganensis
MYKTIIMPVDVFEMELSDKAVRHAEFLAQQDGIIHLLHVLPGSSSFTMSRFTADLRRFEEHLQHEAETRLQTMVGHFSIDPSRIKSHVRFGNVRDMVNELANEIKADVVVIGSRNPSISTHLLGSNASSVIRHAHIPVMVVR

SEQ ID NO: 969 - DNA, 141 bp, Citrobacter rodentium
atgcaggtactgaactcattgcgtagcgctaaacagcgccacccggattgccagatagtgaaacgcaaagggcggctgtatgttatctgcaaaagtaacccgcgctttaaggcggtgcagggacgtaaaaaacggcgttaa

SEQ ID NO: 970 - protein, 46 aa, Citrobacter rodentium
MQVLNSLRSAKQRHPDCQIVKRKGRLYVICKSNPRFKAVQGRKKRR

SEQ ID NO: 971 - DNA, 945 bp, Enterobacter cloacae
atgagactcaggaaatacaataaaagtttgggatggatgtcattaatcgcaggtactgtattactcagtggttgtgattctgcgctccttgacccaaaaggacagattggactggagcaacgctctttgattctgacggcattcggcctgatgatgattgtcgttattcccgccgtcttaatggcagtaggatttgcctggaagtatcgcgcgagcaataaagatgcgaagtatagcccgaactggtcacactccaacaaagttgaagctgtggtctggacggttcctattctgatcatcttgttcctggccgttctgacctggaaaaccactcacgctctggagccaagcaaaccgcttgtccacgacgagaaagcaatcaccatcgaagttgtatcgatggactggaaatggttctttatttacccggaacagggtatcgctaccgtcaacgaaatcgccttcccggcgaacgtaccggtacactttaaagtcacttccaactccgtgatgaactcgttctttattccgcgcttaggtagccagatttatgcgatggccgggatgcagactcagctgcacctcatcgctgatgaagcaggcacttatgacggtatctccgcaagctatagtggcccgggcttctctggtatgaagttcaaggctatcgccaccccggatcgtgcaaccttcgatcagtgggtagcaaaagcgaaacagtccccgaactccatggactccatggctgcattcgacaaagtggctgtgcctagcgaaaacaacaaagtggaatacttctctaacgtgaaaccggatttgttcaaagatgttgttaacaaattcatgtctcacgagagcatgaacatgtctaaacctgaaggcgagcacgctgcgcacgaaggtatggaaggcatggacatgagccacgcggaaaccgctcactaa

SEQ ID NO: 972 - protein, 314 aa, Enterobacter cloacae
MRLRKYNKSLGWMSLIAGTVLLSGCDSALLDPKGQIGLEQRSLILTAFGLMMIVVIPAVLMAVGFAWKYRASNKDAKYSPNWSHSNKVEAVVWTVPILIILFLAVLTWKTTHALEPSKPLVHDEKAITIEVVSMDWKWFFIYPEQGIATVNEIAFPANVPVHFKVTSNSVMNSFFIPRLGSQIYAMAGMQTQLHLIADEAGTYDGISASYSGPGFSGMKFKAIATPDRATFDQWVAKAKQSPNSMDSMAAFDKVAVPSENNKVEYFSNVKPDLFKDVVNKFMSHESMNMSKPEGEHAAHEGMEGMDMSHAETAH

SEQ ID NO: 973 - DNA, 903 bp, Enterobacter cloacae
atgcgtttaaaccttgatgtacttttgattcttgatgctctggataggcatggctcgttcgcgctggcggcggagtcgctatttaaaacccccgccgcgctgagctatatgatccaaaaactggaaaacgatctaaacatcagtctgctggatcgttccggacaccgggcgaaatttaccgataccggtaaaatgatgctggaaaaggggcgcctgttgctcaatgccgccaacgatctggaaaaacaggcgcagctgctgagttccggctgggagcgggatctggcgattgcgctggacgactcttttcctttccaggccctattgccgctgattgaaaagttttacgcgcaatatccgcaaacccggctcaactttacccaccataccctggcgggctcatgggaagagctgactcacaacggcgcggatattattcttggggcgattaacgaaccgccgacttcagcggaatggtcgtggaaaatgctcggcgcgatggacaacgtgttcgttgtcgcgcccggccacccgctggcggcaacgacccagccgctgaccaacaaacaactcagcctgcatcgcgcggtggttattagcgatagcgcccgctactgtcatccactgaacagcaacctgctcgatgagcaggagcaaatccgggtagatgatttcgccaccaaagtcgcgctcctgcgcgccggtttgggatgcggattcctgccccgccacatcgccctcccgtggctggagagcggtgagttgctggagaaaccggtgatttcgagccgtgagaaagatataacctatatggcctggcgtagcggcaataacggtctggctcagcgctggtggcgagaggctattctcgaagatagctgtctgagccagctctaccgttaa

SEQ ID NO: 974 - protein, 300 aa, Enterobacter cloacae
MRLNLDVLLILDALDRHGSFALAAESLFKTPAALSYMIQKLENDLNISLLDRSGHRAKFTDTGKMMLEKGRLLLNAANDLEKQAQLLSSGWERDLAIALDDSFPFQALLPLIEKFYAQYPQTRLNFTHHTLAGSWEELTHNGADIILGAINEPPTSAEWSWKMLGAMDNVFVVAPGHPLAATTQPLTNKQLSLHRAVVISDSARYCHPLNSNLLDEQEQIRVDDFATKVALLRAGLGCGFLPRHIALPWLESGELLEKPVISSREKDITYMAWRSGNNGLAQRWWREAILEDSCLSQLYR

SEQ ID NO: 975 - DNA, 885 bp, Enterobacter cloacae
atgagtcaatggcaacatcaaccggatatcgccgccagccgccgccagcatcaggcgctgtataagacccaagggcgatatctgcgctacgtcggcctgctggcgctggcgagcgtactttattacgtctggttctttatgcagttcggtatcagtagcgaacaactggctaccggactacagcagatggggcgctatctgctgcggatgtttgtctggcacgacttctggaactggccgtttgcctattacttcacgcaaatcgccattacgcttgccatcgtcttcgccgggacgattaccgcgacggtcatcgcgctgttgctgtcattcctggcggcgcgcaatattatgcgcggcgtgattcccggcattatcgccgtgttgatgcgccgcttgtttgacatgctgcgcggtatcgatatggctatctggggtctgattttcgtgcgcgccgtagggctcgggccgctggcgggggtactggcgattattatgcaggataccggcctgctgggccgcctgtatgctgaaggccacgaggcggtagaccgttcgccgggccgcggcctcaccgccgtcggcgctaatggtctgcagaaacaccgcttcggcattttcacccagtcgttcccgactttcctggcgctgagtttatatcagattgaatccaacacccgttccgccgcggtgttaggttttgtcggcgcgggggggattggcctcatttacgcggaaaatatgcgtttgtggaactgggatgtggtgatgtttattaccctgttgctggtcgcggtggtcatggtgatggacaccctctccgcctggctgcgccgccgttacatcggcggcagcgtagtgccgttgtatcaaagtccgcaataa

SEQ ID NO: 976 - protein, 294 aa, Enterobacter cloacae
MSQWQHQPDIAASRRQHQALYKTQGRYLRYVGLLALASVLYYVWFFMQFGISSEQLATGLQQMGRYLLRMFVWHDFWNWPFAYYFTQIAITLAIVFAGTITATVIALLLSFLAARNIMRGVIPGIIAVLMRRLFDMLRGIDMAIWGLIFVRAVGLGPLAGVLAIIMQDTGLLGRLYAEGHEAVDRSPGRGLTAVGANGLQKHRFGIFTQSFPTFLALSLYQIESNTRSAAVLGFVGAGGIGLIYAENMRLWNWDVVMFITLLLVAVVMVMDTLSAWLRRRYIGGSVVPLYQSPQ

SEQ ID NO: 977 - DNA, 1161 bp, Klebsiella aerogenes
atggaaaaatacttcatgatgaaaacatcccttacaggcgtactgctgctgggcgcctcattttcgacttttgccgcgccgcaaacggcggaacagctgcgcgaactggtcaatcagaccatcaccccgttaatgaaagaacaggcgataccgggcatggcggtggcggtgatctatcacggcaaaccctactatttcagctggggccaggccgatgttgccgggcagcgtccggtgacgcgacagacgttgtttgagctgggctctgttagtaagactttcaccggcgtgctgggcggcgatgcggtggcgcgcggtgaaattaagctcagcgatccggcgcagaagtactggccgcagctcaccggccagcagtggcaggggatcacgctgctgcatctcgccacttataccgcaggcggtctgccgctgcaggttccggacgaggtgacggatgaagcggcattactgcgttactatcagaattggcaaccgcagtgggcgccgggtagtaaacggctgtacgccaatgccagcattggcctgttcggcgcgctggcggtgaaaccttccggcatgagctttgaacaggcgatgagccagcgggtattgcagccgttaaaactgagccacacctggattaacgtaccgcccgcccagagcaaggactacgcctggggttatcgtgacggtaaagcggtacatgtttcgccggggcagctggacgctgaggcttacggcgtgaagtcgagcattgaggatatggcgcactgggtgctggcgaatatgaacagcgaggcggtgcaggataaaaatctgcggcaggggatccagctggcgcagtcgcgctactggcgggctggggagatgtatcaggggctcggctgggagatgctgaactggccggtgccggccgaggtgctgattaacggcagcgataataaggtagcgcttgccgcgacgccggtaacggcggtcaatccgcccgcgccgccggtgaaagcctcctgggtacataaaaccggctccaccggcggtttcggcagctacgtggcttttatcccgcaacaggatctcggcatcgtgatgctggcgaataaaagctaccccaacccggagcgggtgaaggcggcgtatcatattcttgaggcgctgcagtaa

SEQ ID NO: 978 - protein, 386 aa, Klebsiella aerogenes
MEKYFMMKTSLTGVLLLGASFSTFAAPQTAEQLRELVNQTITPLMKEQAIPGMAVAVIYHGKPYYFSWGQADVAGQRPVTRQTLFELGSVSKTFTGVLGGDAVARGEIKLSDPAQKYWPQLTGQQWQGITLLHLATYTAGGLPLQVPDEVTDEAALLRYYQNWQPQWAPGSKRLYANASIGLFGALAVKPSGMSFEQAMSQRVLQPLKLSHTWINVPPAQSKDYAWGYRDGKAVHVSPGQLDAEAYGVKSSIEDMAHWVLANMNSEAVQDKNLRQGIQLAQSRYWRAGEMYQGLGWEMLNWPVPAEVLINGSDNKVALAATPVTAVNPPAPPVKASWVHKTGSTGGFGSYVAFIPQQDLGIVMLANKSYPNPERVKAAYHILEALQ

SEQ ID NO: 979 - DNA, 879 bp, Klebsiella aerogenes
atgacacgcagctatcttcctctcaattcactacgggcctttgaagcggccgcccggcatctcagttttacccgcgcggcgattgagctcaacgtcacccactccgccatcagccagcatgtgaagacgctggaggaacatcttaactgtcagctgttcgttcgcgtgtcgcgcggcctcaagctcaccaccgaaggagaaggcctgttaccggtactcaatgagtcgtttgaaaggattgccgggatgctagaccgtttcaccggtcaccaggcgcaggagaagctcaagatcggcgtagtcggcactttcgccacgggtgtgctgttcccgctgctgccagccttctggcgcgagtgtccgcatatcgatttgcagatatccacccataataatcgcgtcgaccccgccgccgaggggctggattatgtgattcgctttggcggcggcgcctggcatgataccgccgcgcagtatctgtgcgccgccccactctccgctctgtgcgccccgtcgttagctgcccggctaaatacaccgaaggatattttgcagttcacgctgctgcgttcttatcgccgagacgaatggtcggcgtggatgcaggcagcgggagaattgccgccttcgccaacccatcgggttattgtcttcgactcatccgtgaccatgctggaagcggcgcaggcaggcttaggcgtggctattgccccggtaaaaatgttcagccatctgctggaagaaaaacgcattgtgcagccgtttaagattcatatcgatctcggcaactactggctgacacgtttgcaatcgcgtccggaaacgccggcaatgttgcatttttcccgctggctggcggaggccttaaaagggggttaa

SEQ ID NO: 980 - protein, 292 aa, Klebsiella aerogenes
MTRSYLPLNSLRAFEAAARHLSFTRAAIELNVTHSAISQHVKTLEEHLNCQLFVRVSRGLKLTTEGEGLLPVLNESFERIAGMLDRFTGHQAQEKLKIGVVGTFATGVLFPLLPAFWRECPHIDLQISTHNNRVDPAAEGLDYVIRFGGGAWHDTAAQYLCAAPLSALCAPSLAARLNTPKDILQFTLLRSYRRDEWSAWMQAAGELPPSPTHRVIVFDSSVTMLEAAQAGLGVAIAPVKMFSHLLEEKRIVQPFKIHIDLGNYWLTRLQSRPETPAMLHFSRWLAEALKGG

SEQ ID NO: 981 - DNA, 528 bp, Klebsiella aerogenes
atgaataagaaattactgcctgttgtagcactgatcctgtccgcgtccgccaccagtgcttacgcagttaacggcaaggtcaacttcaccggtgaaatcatccagtcaacctgtactgtgacttctaccgaccagaacaaagacgttttcatcggtaaatacccgactaccgcgttcaacgctgttggcgatgttaccgcttctaaagcgttcaccatcaacctggaaaaatgtgaagccggtgattactccctgcgcttcgacggtgcgaccgttgctggtaacccgaacctgctgtccgttgataacgcgaaaggcgtaggtatcgaaatcctgaccaacgacgaaaaaatcgtcccgatcaaccagagcgcagacgacaactccccgtgggttaacgttgcagcgtctgacgacaacagcggcactgcggtattcaatctgaaagctcgctacaaatctttcctgaaaaccgtggaagctggctctgctaacgcaaacgccacctttaccatcgagtacaaataa

SEQ ID NO: 982 - protein, 175 aa, Klebsiella aerogenes
MNKKLLPVVALILSASATSAYAVNGKVNFTGEIIQSTCTVTSTDQNKDVFIGKYPTTAFNAVGDVTASKAFTINLEKCEAGDYSLRFDGATVAGNPNLLSVDNAKGVGIEILTNDEKIVPINQSADDNSPWVNVAASDDNSGTAVFNLKARYKSFLKTVEAGSANANATFTIEYK

SEQ ID NO: 983 - DNA, 684 bp, Enterobacter cloacae
atgaaaaagttattaaccgctttattgttatttgtctcgctggatacttttgcgggtattcaggtcgatcagactcgggttatttataacggcggggaaaaatctgcggcgttatccattcacaatgataccgatgaaacatggatggttcagacctggcttgataccggtgacgccaccgcaacgccaaccaatttaccgatgcaggctattccgccgattttaaaactggcgggcaataaagacgctattttgcgctttgtttattccggcagcggattaccgaccgaccgcgaaaccgtgtactggattaacgtgcaggaaattccgccttcggcgaaacaagaaaacgtactgcagattgcgatccgtacccgcgtgaagctgttctaccgccctaccacgctgaaaaccaccttgcaaaaggaagcgcaggccctgacctggcgtaagcaaggtaacgatctggtcgtgactaacaaaggtccgctgcacgtgactttcggcgtactgacgctgaagagcggcgcgaagacctggaaagtgaatgctgacatggttaaacccatggactctctgaacatcaaattgccagccggcgcggcggcagcggatcagatgtcattcacttttatcaatgattttggcggacatacggaaattaaagatatccgcattcagtaa

SEQ ID NO: 984 - protein, 227 aa, Enterobacter cloacae
MKKLLTALLLFVSLDTFAGIQVDQTRVIYNGGEKSAALSIHNDTDETWMVQTWLDTGDATATPTNLPMQAIPPILKLAGNKDAILRFVYSGSGLPTDRETVYWINVQEIPPSAKQENVLQIAIRTRVKLFYRPTTLKTTLQKEAQALTWRKQGNDLVVTNKGPLHVTFGVLTLKSGAKTWKVNADMVKPMDSLNIKLPAGAAAADQMSFTFINDFGGHTEIKDIRIQ

SEQ ID NO: 985 - DNA, 2604 bp, Enterobacter cloacae
atggctagccataataaaataaggacgatccctggatgtctggcgcagcacgttcgctttgctgtttacgcctcgacaatgtcattactggcgacaccatttgtcaatgccgaagagcaattcaatacctctttcatccgcggggcgaataacgcctcgctggtgcaaaacctctctaccggcgacgatattttaccgggtaaatatgccttcgatatttacctgaataaaaatcgcgtcgatcaccgggaaatcgaatttaaaaaagatacgcttaacaccccgggttatttctgtttagatgccgacagttaccgttcatacggcgttctggtaccggacaccgccggcagcagcgcctgctacgatctggtaaaaaatattccaggcagtagcgtgagctggaacgccgcgctgcaggagctgaacatttccgtaccgcaaaccgaactcgaagcgcgaccacagggcgagatttcgccgctggtctatgacgacggcatcaacgccggtttcgttaactacgctttcagcggcagccactcccgtttctccagcggcagcagcaaacaggacagcgactactacttcctgaccctcaataacggccttaacgtcggcgcgtggcgttttcgcaacaactcttccctgtcaaaacagaccgggcaaaaagagcagtggaacccgatttccacctgggcggaaaccgacatcgcctcgtggcgcagccgtattcagattggccagagcaacaccaataataacgtgttcgatagcttccagttccgcggcgcgcagatttccagcgtcccggaaatgctgccggacagccgtcgcggctacgcgccggtcgtacgcggcgtcgccaataccaacgcccgcgtcgaagtgcgccagaacggctataccgtctacagcaccgtggtgccgccgggaccgttcgcgctgaccgatatttcgccaagcaccctcagcggcgacttagccgtgacggttatagaggcggatggctcacgccatagcttcaccctgccttactcctccgtgccgaatatgctgcgcgacgggatctgggagtatcaggtgaccgcgggtaaataccacgacggcaccaataattatcagccgcaatttatccagggcaccgtggcccacggcgccggctccgactatacgccatacggcgggattatcatggccgagcactatcgctccggcgtggtcgggctgggtaaaaacatgggcgaatacggggcggcctccgttgacgcctcatggtctgataccgatctggcttccggcgagaacaaacgcggcgccagcgtacgcttcctctattccaaatcgctcaacaccctcggtaccgacgtgcagatcgccggctaccgttattcgacgtcgggcttctatgacttctccgacgcggtagctgaacgtaacaactggcagaacggtttctaccacacccagtattacgatcagagcgacgataaaaccggcgcgccggattgggcgacgcaaaaccagcgccgtcgttactacgactcgcagcagtacaacaacaaacgccagcgcgtcgagatgacggtcaaccagcacatcgccggcgcttcgctgtacgcgacctttatccgtcagaactactggaacacctccgcatacgaccgcaccatccagaccggtttcaacaccacctggaatcgcgtcagcgtcggcgtgttttaccagaacagccgcagtaactacggctatagcgacaacagcgttaacctcaacgtctcggtgccaatcaacatctttggcccggaccacgaaagcacggttaactttaacgcctctaacagcaagcagagcggtagcggctacagcgccgggatgagcggcacactgcttgatgacaaccgtatgaattacttcgtacagagcggccacacccagcacggcggcgataccagcctggtcaacctgggttatctgggcagcatgggtaacgtcgatctgggctacagctacaacaacaactatcagcagacttcgctgaacgtctccggcggcgtggtcgcgcactccggcggcgtcaccctgtcgcagccgctgcagaacacctttgtggtggtgaaagcgaaaggggcgcagggtgtgcgtctggaaaaccagccaggggtcgcgattgaccgcttcggctacgcggtgctcacttctgcgatgccgtatcgccacaaccgcgtcgcgctgcgtacttcggatatcggcaacggcctggaaattccgctggcggcgaaagatatcgtgccgaccgagcgcgccatcggccgcgtgacctttgaaacgcatctcggccagagcctgcttatccacgccaaactggcggacggcagcgtgccggtgattggcgccaatatcttcggccagaacggcgaacatgtcggcgtggtcggtacccgcggcgaagcctacgtttccggcgttcagagcggcgaccgcctgcagatgaaatggggcgacgatgccgacgcctcctgcagcctgacggtgccagagttacctgctattcaagccgatcaacccggtggttatcaggtcgtctccctgacctgtaaataa

SEQ ID NO: 986 - protein, 867 aa, Enterobacter cloacae
MASHNKIRTIPGCLAQHVRFAVYASTMSLLATPFVNAEEQFNTSFIRGANNASLVQNLSTGDDILPGKYAFDIYLNKNRVDHREIEFKKDTLNTPGYFCLDADSYRSYGVLVPDTAGSSACYDLVKNIPGSSVSWNAALQELNISVPQTELEARPQGEISPLVYDDGINAGFVNYAFSGSHSRFSSGSSKQDSDYYFLTLNNGLNVGAWRFRNNSSLSKQTGQKEQWNPISTWAETDIASWRSRIQIGQSNTNNNVFDSFQFRGAQISSVPEMLPDSRRGYAPVVRGVANTNARVEVRQNGYTVYSTVVPPGPFALTDISPSTLSGDLAVTVIEADGSRHSFTLPYSSVPNMLRDGIWEYQVTAGKYHDGTNNYQPQFIQGTVAHGAGSDYTPYGGIIMAEHYRSGVVGLGKNMGEYGAASVDASWSDTDLASGENKRGASVRFLYSKSLNTLGTDVQIAGYRYSTSGFYDFSDAVAERNNWQNGFYHTQYYDQSDDKTGAPDWATQNQRRRYYDSQQYNNKRQRVEMTVNQHIAGASLYATFIRQNYWNTSAYDRTIQTGFNTTWNRVSVGVFYQNSRSNYGYSDNSVNLNVSVPINIFGPDHESTVNFNASNSKQSGSGYSAGMSGTLLDDNRMNYFVQSGHTQHGGDTSLVNLGYLGSMGNVDLGYSYNNNYQQTSLNVSGGVVAHSGGVTLSQPLQNTFVVVKAKGAQGVRLENQPGVAIDRFGYAVLTSAMPYRHNRVALRTSDIGNGLEIPLAAKDIVPTERAIGRVTFETHLGQSLLIHAKLADGSVPVIGANIFGQNGEHVGVVGTRGEAYVSGVQSGDRLQMKWGDDADASCSLTVPELPAIQADQPGGYQVVSLTCK

SEQ ID NO: 987 - DNA, 1041 bp, Enterobacter cloacae
atgtcgaagtttaacctcttaccccgcaccgggctgacgctgctggtactctcaagcgcgctgttctccaccagcagcttcgcgctgagctgtaagaagaacggtaccgaagtatcgcaaaccatcgcgctcaccgatcagattaacgtttcgaccgctaaccttaagccgggtaccctgctgtggcgttcgccgacgtttacctccacctttacctgtaccgatacggatcacatgcccaatggtgaagatgcgtatctgtactgggatccggaaacccggatgcagaatatccacaactcgctggaagtcggcgttacctatctcagcaccgatattaaaccggtaaaaggtcagaaaacggatatcgggccaggtacgctctgccgccgcaaccgtcccggcggtgcatgccagtctccggcgaccccgcagaccgtcacggtgacctactcggtttatattaaagccaccggtaatccgccgccgtcaaacggcgtgattaacgacaccaaccgctacgctatcttccaggttgacggtgttggcggcctcaacagccgcccgaatagtaacttccgcgcgtgggtcaccgggcttggtaatattcgctttatcgcctgcaacccgaaaatcaccgtctcggcgaacaatggttcaacggtcaacttcggcagcatcccggcgcgcaatgccgtcgtcggcgccattgagaaacaagttccgttcagcgtccgcgccgacctgaccggcgccggccaggattgccagggtcagaccttaatggccagcttcagtacccagcagccgactcaggacaccaacaccattctgccatctaacgatagcggttttggcatcctgctctcgcgcgccgatgcgccgacgacctggctttccatgaataccccgacgcagttgggcatgattaacggcagcgtggtagaaagcaacttcctggccagcctgaaatggctaagcgttaagcccaaaatcggcacctttaatgcgacggccaatatcgacgttacctttaaatag

SEQ ID NO: 988 - protein, 346 aa, Enterobacter cloacae
MSKFNLLPRTGLTLLVLSSALFSTSSFALSCKKNGTEVSQTIALTDQINVSTANLKPGTLLWRSPTFTSTFTCTDTDHMPNGEDAYLYWDPETRMQNIHNSLEVGVTYLSTDIKPVKGQKTDIGPGTLCRRNRPGGACQSPATPQTVTVTYSVYIKATGNPPPSNGVINDTNRYAIFQVDGVGGLNSRPNSNFRAWVTGLGNIRFIACNPKITVSANNGSTVNFGSIPARNAVVGAIEKQVPFSVRADLTGAGQDCQGQTLMASFSTQQPTQDTNTILPSNDSGFGILLSRADAPTTWLSMNTPTQLGMINGSVVESNFLASLKWLSVKPKIGTFNATANIDVTFK

SEQ ID NO: 989 - DNA, 705 bp, Enterobacter cloacae
atgccgctgaccaacaccgaaccgaccgggttacgctatgtatttcagccgatgttcaaccgcgaaggcaaaatgatcgcggtagaatgtttgacccggtttgctcatcacgagcctgctagtccgcaagatatagaacggtttttcagtgaggcatcggaatcactgcgcgcccgcatcctgctcgaacaaattgagctggtcaggcagcatcagcagtggttccgccagaacgacgtcatggtcacgctcaacgtcgacgagtcgacgttgcatatgctgcatgatgattttattgccgagtgtgtgaaaaccatcggctgcctgcattttgaggttaatgaattttccaacacgctggtgaaacgcaccccgaccatcgatgccctgacggacaaatactccttctggctggatgattttggcgccggttacgccgggttcgccgccctgacggcgcaaccctttcgttttatcaagaccgacaagaacctgttatggagcctgctggaaaagaaaaacggccagcaactgatggactcgctgctgcactattttcaggcgaatcagtatcaggtgatcgtcgaaggtattgaaaccgaagcccatcttcagtggctggaaaacatgccgtggtttgccctgcaggggcttctctggcgggaacaaaccattgaagccctggtggccagcgtcgagaaataa

SEQ ID NO: 990 - protein, 234 aa, Enterobacter cloacae
MPLTNTEPTGLRYVFQPMFNREGKMIAVECLTRFAHHEPASPQDIERFFSEASESLRARILLEQIELVRQHQQWFRQNDVMVTLNVDESTLHMLHDDFIAECVKTIGCLHFEVNEFSNTLVKRTPTIDALTDKYSFWLDDFGAGYAGFAALTAQPFRFIKTDKNLLWSLLEKKNGQQLMDSLLHYFQANQYQVIVEGIETEAHLQWLENMPWFALQGLLWREQTIEALVASVEK

SEQ ID NO: 991 - DNA, 978 bp, Enterobacter cloacae
atgaatgcactgaccgccgtaaaacctcatgctgatgatttggcccacagctacaccggtttttccttcgctccgtccgcacaatcgccgcgtctgctggagctaacgttcaccgccgaaacgaccgcgcaatttcttcaacaggtcgcgcagtggccggtgcaggcgctggaatataaatccttcttgcgctttcaggtcggcaagatcctcgacgatctgtgcggcaaccagctgcagccgctgctgatcaagacgctgctcaatcgcgcggagggcgcgctgctgatcaacggtatcggcattgacaacgtcgctcaggccgatgagatggtcaaactggcgaccgccgtggcgcatttgatcggacgctccaactttgatgccatgagcggccagtattacgcccgcttcgtggtgaaaaacgtcgataactcagacagctatctgcgtcagccgcaccgcgtgatggagctgcacaatgacggtacctatgtcgaagaaattaccgactacgtgctgatgatgaagatcgatgaacagaacatgcagggcggcaattcactgctgctgcatctggatgactgggaacatctcgacgaattcttccgcgatccgctggcccgccgtcctatgcgctgggcagcgccgccgagcaaaaacgtcagcaaagatgtctatcatccggttttcgacgtcgaccagcagggccgcccggtaatgcgctatatcgaccagtttgtgcagccgaaagatttcgaagaaggcacctggctgagccgcctctccgatgcgctggaaaccagtaaaaacattctttccgtaccggtgccggtggggaaattcctgttgataaacaacctgttctggctgcacggtcgcgaccgctttacaccgcatccggatttacgtcgcgaactgatgcgccagcgcggctactttgcgtattccacgaatcattaccagactcatcaataa

SEQ ID NO: 992 - protein, 325 aa, Enterobacter cloacae
MNALTAVKPHADDLAHSYTGFSFAPSAQSPRLLELTFTAETTAQFLQQVAQWPVQALEYKSFLRFQVGKILDDLCGNQLQPLLIKTLLNRAEGALLINGIGIDNVAQADEMVKLATAVAHLIGRSNFDAMSGQYYARFVVKNVDNSDSYLRQPHRVMELHNDGTYVEEITDYVLMMKIDEQNMQGGNSLLLHLDDWEHLDEFFRDPLARRPMRWAAPPSKNVSKDVYHPVFDVDQQGRPVMRYIDQFVQPKDFEEGTWLSRLSDALETSKNILSVPVPVGKFLLINNLFWLHGRDRFTPHPDLRRELMRQRGYFAYSTNHYQTHQ

SEQ ID NO: 993 - DNA, 1269 bp, Citrobacter koseri
atgtatgatttcgtgattatcggcggcggcattatcggcatgtcgaccgccatgcagttaattgagatttacccggatgcccgcattgccctgctggaaaaagagtccggtccggcctgccatcagaccggtcacaacagcggagtgatccacgccggcgtttactatactcccggcagcctcaaggcgcagttttgcctcgccggcaaccgcgccactaaagccttttgcgagcagaatgcgattcgctacgacgtctgcggcaagatgctggttgccacctcgccgctggagatggagcggatgcgcgcgctgtgggatcgcaccgccgctaacggcctgcaacgcgaatggctgagcgcgagcgagctgcgcgaacgcgagccgaacatcagcggactgggcgggatcttcgttccttcgagcggcattgtcagctatcgtgaagtagcggcggcaatggcgaagatcttcgaatccaaaggcggaacgatcgtttacgatgccgaagttagcgccctgaaagagcacgccagcggcgtggtcgtccacacccgccagggcggcgaatatgaggcatcgacgctgatcacctgctccgggctgatggccgaccggctggtgaaaatgatcggcgtcgatcccggctttatcatctgcccgttccgcggcgaatatttccaactggcgccgcagcacaaccagatcgttaatcatctgatctatccgatccccgatccggcaatgccgttcctcggcgtccacctgacccgcatgatcgacggtagcgtcaccgtcggccctaacgcggtgctggcgctgaagcgcgaaggctatcgcaagcgcgatatctcgctgaccgatacccttgagatcctgacctcgcccggcattcgccgggtactgcaaaacaacctgcgctccgggcttggcgaaatgaagaattcgctgtgcagaagcggctatctgcggctggtgcagaaatactgcccgagcctgacattaagcgatttgcgcccgtggcctgccggcgtgcgggcacaggcggtatcgccgcagggcaagctgatcgacgatttcctttttgttactaccgcgcgttccatccacacctgtaacgcgccgtcgccggcggccacgtcggctatcccgatcggcgcgcacatcgtcagcaaggtgcaaaccctgctggcaagccagagcaatcccggacgcacgctgcgtgcggcacgtagcgtggagacactacacgccgcttttactcgttaa

SEQ ID NO: 994 - protein, 422 aa, Citrobacter koseri
MYDFVIIGGGIIGMSTAMQLIEIYPDARIALLEKESGPACHQTGHNSGVIHAGVYYTPGSLKAQFCLAGNRATKAFCEQNAIRYDVCGKMLVATSPLEMERMRALWDRTAANGLQREWLSASELREREPNISGLGGIFVPSSGIVSYREVAAAMAKIFESKGGTIVYDAEVSALKEHASGVVVHTRQGGEYEASTLITCSGLMADRLVKMIGVDPGFIICPFRGEYFQLAPQHNQIVNHLIYPIPDPAMPFLGVHLTRMIDGSVTVGPNAVLALKREGYRKRDISLTDTLEILTSPGIRRVLQNNLRSGLGEMKNSLCRSGYLRLVQKYCPSLTLSDLRPWPAGVRAQAVSPQGKLIDDFLFVTTARSIHTCNAPSPAATSAIPIGAHIVSKVQTLLASQSNPGRTLRAARSVETLHAAFTR

SEQ ID NO: 995 - DNA, 1449 bp, Klebsiella michiganensis
atgcaacttaaagatgcaactctgtttcgccagcaggcgctaattgatggccagtggcgcgatgcgcaaaacggcgacgtgattgcggtgaccaaccccgccaacggccagcagctgggtagcgtgccgaaaatgggcgccgacgaaacccgcgaagcgattgaagccgccaaccgcgccctgccagcctggcgtgccctgaccgccaaagagcgcgccacgcttctgcgccgctggttcgatctgatgatggagaaccaggacgatctcgcccgtctgatgaccctcgaacaggggaaaccgctggcggaagccaaaggcgaaatcagctacgccgcctcctttattgagtggttcgccgaagaaggtaagcgcatttacggcgataccattcccggccatcaggccgacaagcgcctgatcgtcatcaagcagcccatcggcgttaccgccgccatcaccccgtggaacttcccggctgcgatgatcacccgtaaagcgggcccggcgctggccgccggctgcactatggttctgaaaccggcgagccagacgccgttttccgcgctggcgctggccgaactggcgaatcgcgccggtattcccgccggggtatttaacgtggttaccggctctgccggggccgtcggcaacgaactgaccagcaacccgctggtacgcaagctctccttcaccggctcaaccgaaattggccgccagctgatggaacagtgtgcgaaagacatcaaaaaagtgtcgttagaactcggcggcaacgcgccgtttatcgtctttgacgacgccgaccttgataaagccgtcgaaggggcgctggcgtcgaagttccgcaacgccgggcagacctgcgtctgcgccaaccgtctgtatgtacaggacggcgtctatgaccgttttgcagagaaactgcagcaggcggtggaaaagctgcgtatcggcgacggcctgcaggacggggtcaccaccggcccgctgatcgatgataaagcggtagctaaggtcgaagaacatattgccgacgcccttgcgaaaggcgcgcgcatcgtcaccggcggcaaaccacacgcgctgggcggcaacttcttccagcccaccatcctggtcaacgtcccgagcagcgccaaagtggcgaaagaagagaccttcggcccgctggcgccgctgttccgctttaaagatgaagccgatgtcattgcccaggccaacgataccgaattcggcctcgccgcctatttctacgcccgcgacctgagccgcgtcttccgcgtcggcgaagcgctggagtacggcatcgttggcatcaataccggcattatctccaacgaagtcgcgccgttcggcggtattaaagcctccggtctgggccgcgaaggttcgaagtacggcatcgaagattatttagaaatcaaatatatgtgtatcggcctttaa

SEQ ID NO: 996 - protein, 482 aa, Klebsiella michiganensis
MQLKDATLFRQQALIDGQWRDAQNGDVIAVTNPANGQQLGSVPKMGADETREAIEAANRALPAWRALTAKERATLLRRWFDLMMENQDDLARLMTLEQGKPLAEAKGEISYAASFIEWFAEEGKRIYGDTIPGHQADKRLIVIKQPIGVTAAITPWNFPAAMITRKAGPALAAGCTMVLKPASQTPFSALALAELANRAGIPAGVFNVVTGSAGAVGNELTSNPLVRKLSFTGSTEIGRQLMEQCAKDIKKVSLELGGNAPFIVFDDADLDKAVEGALASKFRNAGQTCVCANRLYVQDGVYDRFAEKLQQAVEKLRIGDGLQDGVTTGPLIDDKAVAKVEEHIADALAKGARIVTGGKPHALGGNFFQPTILVNVPSSAKVAKEETFGPLAPLFRFKDEADVIAQANDTEFGLAAYFYARDLSRVFRVGEALEYGIVGINTGIISNEVAPFGGIKASGLGREGSKYGIEDYLEIKYMCIGL

SEQ ID NO: 997 - DNA, 1224 bp, Escherichia coli
atggaaattattcttggcgtggtgatgttcacgctgatcgtgctggtcctgtcggggcttatcctggtggcgcgctcgaagctggtgaacgcgggcgacgtggttattgaaatcaataacgaagcggataaacatatccgcacgccggcgggcgacaaactgctgaacacgctctccagcaacggaatcttcgtctcttccgcctgcggcggcggcggctcctgcggccagtgccgggtgaccatcaaagaaggcggcggcgatattctgccgacagagctttcgcatatcaccaaacgcgaagccaaagaagggtgccgcctggcctgccaggtggcggtgaagcagaatatgaaaattgagctgccggaagagattttcggcgtgaaaaaatgggagtgcgaggttatctctaatgataacaaagcgaccttcattaaagagctcaaattacgggtgccggatggtgaagcggtgccgttccgcgccggcggttatattcagatcgaatgcccgtcgcataaagtggcctatgccgactttgatattcccgatgaatatcgctcagactgggacaagttcaacctgttccgctatgtctctgaggtgaaagagccgaccctgcgcgcctactcgatggctaactatccggaagaggagggcatcattatgctcaacgtgcgtatcgccacgccgccgccgaaggttccggatgcgccgccggggataatgtcgtcctatatctggtcgctgaagcctggcgataaggtgacgatttccgggccgtttggcgagttctttgccaaagagaccgacgccgagatggtgtttatcggcggcggcgcgggcatggcgccgatgcgttcgcacatctttgaccagcttaagcgcctgcacagcacgcgtaaaatcagcttctggtacggcgcgcgttcgctgcgcgaaatgttctatgacgatgagtttgaacagctggcgcgcgaaaaccccaattttaccttccacgtcgcgctctccgatccgctgccggaagataactggaccgggcatacgggctttatccataatgttctgtatgaaaactatctgcgcgaccatccggcgccggaagattgcgagttctatatgtgcgggccgccggtgatgaacgccgcggtgattaaaatgctcaaagatctgggcgtcgaagatgagaacatcatgctcgatgactttggaggctga

SEQ ID NO: 998 - protein, 407 aa, Escherichia coli
MEIILGVVMFTLIVLVLSGLILVARSKLVNAGDVVIEINNEADKHIRTPAGDKLLNTLSSNGIFVSSACGGGGSCGQCRVTIKEGGGDILPTELSHITKREAKEGCRLACQVAVKQNMKIELPEEIFGVKKWECEVISNDNKATFIKELKLRVPDGEAVPFRAGGYIQIECPSHKVAYADFDIPDEYRSDWDKFNLFRYVSEVKEPTLRAYSMANYPEEEGIIMLNVRIATPPPKVPDAPPGIMSSYIWSLKPGDKVTISGPFGEFFAKETDAEMVFIGGGAGMAPMRSHIFDQLKRLHSTRKISFWYGARSLREMFYDDEFEQLARENPNFTFHVALSDPLPEDNWTGHTGFIHNVLYENYLRDHPAPEDCEFYMCGPPVMNAAVIKMLKDLGVEDENIMLDDFGG

SEQ ID NO: 999 - DNA, 639 bp, Escherichia coli
atggctgaacagagcgatatgaaagaggtgaagcgcgtgctggtggggccgcttatcgccaataaccccatcgccctgcaggtgctcggcgtctgctccgcgctggcggtgaccaccaaactggaaaccgccttcgtgatgaccattgcggtgacgctggtaacggcgttctccagcatgtttatctctatgattcgccaccatattcccaatagcgtgcgcatcatcgtgcagatggcgatcatcgcctcgttggttatcgtggtggatcagctgctgcgggctttcgcctatgagacctctaagcagctgtcggtgttcgtcgggcttatcatcacgaactgtatcgtgatggggcgtgccgaagcttatgccatgaaatcgccgccgctggccagctttatggatggtatcggtaacggtctcggttacggcgcgatcctgattatcgtcggtttcctgcgcgagcttatcggcagcggtaagctgttcggtatcaccgtactggaaacggtgcagaacggcggctggtatcagccgaacggcctgttcctgctggcgccgagcgcgttcttcattatcggtttgctgatttgggccctgcgtagctggaagcctgaacagcaggaaaaggagtaa

SEQ ID NO: 1000 - protein, 212 aa, Escherichia coli
MAEQSDMKEVKRVLVGPLIANNPIALQVLGVCSALAVTTKLETAFVMTIAVTLVTAFSSMFISMIRHHIPNSVRIIVQMAIIASLVIVVDQLLRAFAYETSKQLSVFVGLIITNCIVMGRAEAYAMKSPPLASFMDGIGNGLGYGAILIIVGFLRELIGSGKLFGITVLETVQNGGWYQPNGLFLLAPSAFFIIGLLIWALRSWKPEQQEKE

SEQ ID NO: 1001 - DNA, 369 bp, Enterobacter cloacae
atgttagcgggttgccaggcacatcgtcaggctaacgctcccataacgccgccaatcgtcatcgccaccgatgcgcaacagaatgaaaagctgcgactggccgctgagcaggagcggcttaatgcctgccgccaggcgttggattcgttaaaagaagttaatccgaaagaagcctcaagactgggtagtgaattcaccgccctgataggtgcggcgtcgcaatataattcagtgcgaacgaaagtcgccgatccaacccgtcagggcatcgattccatgtatcaatttaaatccattaagctttgcgccgatattgaaaagtcgctgatcgatagtctggtcatgcgcggcgataatgcggtgaagtga

SEQ ID NO: 1002 - protein, 122 aa, Enterobacter cloacae
MLAGCQAHRQANAPITPPIVIATDAQQNEKLRLAAEQERLNACRQALDSLKEVNPKEASRLGSEFTALIGAASQYNSVRTKVADPTRQGIDSMYQFKSIKLCADIEKSLIDSLVMRGDNAVK

SEQ ID NO: 1003 - DNA, 870 bp, Enterobacter cloacae
atgaaaccacgtcgcagtatgctgttcatccctggcgccaatgccgccatgttaagcacttcattcgtttacggcgccgatgcggtgatgttcgaccttgaagatgccgtttcgctacgcgaaaaagataccgcccgcctgctggtgcatcaggcgctgcagcatccgctgtatcaggatatcgaaaccgtggtgcgcattaacccgctgaatacgccgttcggtcttgccgaccttgaagcggtagtccgcgcgggcgtggatatggtgcgtctgccgaaaaccgacagcaaagaagatatccatgagctggaagcgcatgttgagcggattgaacgcgagtgcggccgggaagtgggcagcaccaagttaatggcggcgatcgagtcggcgctgggcgtggtgaacgcggtggagatcgcccgcgccagcccgcgtctggcggcgatcgcgctggcggccttcgattacgtcatggatatgggcacctcccgcggcgacggtactgaactgttctacgcccgctgcgctgtactgcatgccgcgcgcgttgccggcatcgccgcctatgacgtggtgtggtcggatatcaataacgaagagggcttcctggcggaagcgaatctggccaaaaacctcggttttaacggcaaatcgttggttaacccacgacaaattgaactcctgcatcaggtctatgccccgacgcgcaaagaggtcgatcacgcgctggaagtgattgccgcggcggaagaagccgaaacgcgaggtcttggcgtggtatcgctgaacggcaagatgatcgatggaccgattatcgaccatgctcgcaaagtggtggcgctctcggcttccggtattcgtgattaa

SEQ ID NO: 1004 - protein, 289 aa, Enterobacter cloacae
MKPRRSMLFIPGANAAMLSTSFVYGADAVMFDLEDAVSLREKDTARLLVHQALQHPLYQDIETVVRINPLNTPFGLADLEAVVRAGVDMVRLPKTDSKEDIHELEAHVERIERECGREVGSTKLMAAIESALGVVNAVEIARASPRLAAIALAAFDYVMDMGTSRGDGTELFYARCAVLHAARVAGIAAYDVVWSDINNEEGFLAEANLAKNLGFNGKSLVNPRQIELLHQVYAPTRKEVDHALEVIAAAEEAETRGLGVVSLNGKMIDGPIIDHARKVVALSASGIRD

SEQ ID NO: 1005 - DNA, 294 bp, Enterobacter cloacae
atggaaatgaagattgacgccctggccggcacgctggagtccagcgatgtgatggtcaggattggaccggcggcgcagccgggcattcagctggaaatcgacagcattgtgaaacagcagtttggcgccgcaattgagcaggtagtcagagaaacgctggcgcagcttggcgtgaagcaggccaacgtggtggtcgatgataaaggcgcgctggagtgcgtactgcgggcccgcgtacaggccgcggcgctgcgcgcggcgcaacagtcccaattacaatggagccagctatga

SEQ ID NO: 1006 - protein, 97 aa, Enterobacter cloacae
MEMKIDALAGTLESSDVMVRIGPAAQPGIQLEIDSIVKQQFGAAIEQVVRETLAQLGVKQANVVVDDKGALECVLRARVQAAALRAAQQSQLQWSQL

SEQ ID NO: 1007 - DNA, 1029 bp, Enterobacter cloacae
atgactctgatattaaaacgcgttcagctattaaaagataaaccgcgcagagatgtgatcgatcggtttcttcgccagcatcagctgtcgttagaagccgattgtgaaatggcgatcgtcgccgagtatcaacagcggctggtcggctgcggtgctatcgccggcaatgtgctgaaatgtattgccatcgatccctcgctgcagggggaagggctgagccttaaattactgaccgagctcctgacgctggcctatgaactggggcgcagcgaactgtttttgttcactaaaccttgcaatgccgcgctattttccggcgccggcttctggccgatagcccaggcgggcgaccgcgccgtgctaatggaaaatagccgcgaacgactgactcgttactgccgacagctggcgatgtatcgtcagccgggaagaaaaatcggcgctatcgtgatgaacgccaaccccttcacccttggccaccgctggttggtggaacaggcggccagccagtgcgactggctacatctgtttgtggtcaaagaagatgcgtcctgcttttcctatcacgatcgcttcaaactcattgaacaggggattgccggcatcgataacgtgacgctgcaccccggttcggcgtatctgatctcgcgggcgacgttccccggctatttcctgaaagagcagggggtggttgatgactgccacagccagattgacctgcagctcttccgcgagcgcctggccccggcgctgcagatcacccatcgctttgttggcaccgagccgctgtgtcccctgactcgtaattacaaccagcgcatgaagtcactactggaagcgccaggcgaggcgccgcccattgaagtggttgagctggcgcgaatcgaaaaaaatggcgggcccgtgtcggcctcccgagtacgcgaactctatcgacagcgcaactggcaggcggtcgcggcgctggtaccgtcggggaccctctcttttctgatgcaactggcggaaagcgaacatcaaaccgcctga

SEQ ID NO: 1008 - protein, 342 aa, Enterobacter cloacae
MTLILKRVQLLKDKPRRDVIDRFLRQHQLSLEADCEMAIVAEYQQRLVGCGAIAGNVLKCIAIDPSLQGEGLSLKLLTELLTLAYELGRSELFLFTKPCNAALFSGAGFWPIAQAGDRAVLMENSRERLTRYCRQLAMYRQPGRKIGAIVMNANPFTLGHRWLVEQAASQCDWLHLFVVKEDASCFSYHDRFKLIEQGIAGIDNVTLHPGSAYLISRATFPGYFLKEQGVVDDCHSQIDLQLFRERLAPALQITHRFVGTEPLCPLTRNYNQRMKSLLEAPGEAPPIEVVELARIEKNGGPVSASRVRELYRQRNWQAVAALVPSGTLSFLMQLAESEHQTA

SEQ ID NO: 1009 - DNA, 630 bp, Enterobacter cloacae
atggcagcaacctttctcgatatcgctatcaccccggatgtcatggatgtgcaacatgaaatgggcagcgaccagctgtggcaaacgccgcacagccgccgtcaggcggatcgcttcggcgccagcgaagaggggatgatcgctacccgcgacagtttttatctggcgacggtgtcgcaaagcggctggccctacattcagcatcgcggcggcccgccgggttttctgcgcctgctggatgacaccacgctggccatggccgatttcggcggtaatcgccagtacatcaccaccggcaacctgcgcggcagcgaccgggcctgcctctttttgatggattatccgcgccgtgccaggctgaaaatctacgccaccgtcgaggtgctggcggcggaagagcagcctgagctgctggcattagtgacgccgacaaactatcgcgcccgcatcgaacgcctgtttcgttttcatctgcaggcttttgactggaactgcccgcagcacattacgccgcgctacagcgcacagcaggtcgcggaatacagccagagcctgcaagagcgtattcatgaactggagcaggagaatcagcgcctgcagcaacaattatccccaaaaggagagttttga

SEQ ID NO: 1010 - protein, 209 aa, Enterobacter cloacae
MAATFLDIAITPDVMDVQHEMGSDQLWQTPHSRRQADRFGASEEGMIATRDSFYLATVSQSGWPYIQHRGGPPGFLRLLDDTTLAMADFGGNRQYITTGNLRGSDRACLFLMDYPRRARLKIYATVEVLAAEEQPELLALVTPTNYRARIERLFRFHLQAFDWNCPQHITPRYSAQQVAEYSQSLQERIHELEQENQRLQQQLSPKGEF

SEQ ID NO: 1011 - DNA, 288 bp, Klebsiella oxytoca
atggctgatttgcattctaccccagatatcaccgctagcggaaccgaacgtcagttgctggttggctatcggcccaatggccgggataccagtacaccaagtcttaccctttccggcaagtggctacgcgaagcgggattcgataccgggaagccggtcacggttaaggtgatgaatggctgcattgtattgctgccgctcagcgataaagcagagaagctaacagccgaattacggcatattcaacaatcgctgaaaagcgtcaacggcacgctgcaacatacctga

SEQ ID NO: 1012 - protein, 95 aa, Klebsiella oxytoca
MADLHSTPDITASGTERQLLVGYRPNGRDTSTPSLTLSGKWLREAGFDTGKPVTVKVMNGCIVLLPLSDKAEKLTAELRHIQQSLKSVNGTLQHT

SEQ ID NO: 1013 - DNA, 609 bp, Enterobacter cloacae
atgaaactgatcggcagctataccagtccttttgtacgcaaaatttccgttatcttgctggaaaaggcgatccccttcgagtttgtgaacgaattcccctataacgacgtcaacggtgtggcgcagtacaacccgctgggaaaagtcccggctttgctgaccgatgacggcgcgtgctggtttgattcgcccattattgcgcaatatctggaactgctaaacgtcgcgccggcgatgctgcccgcggaacctctggcggcgctgaagatgcgccaactggaagccttgtctgacggcatcatggaggcggcgatcgcgctggtgcgggaaaaagcgcgtccggcggcccagcagtcagaaaccgaactgctccgccagcgggaaaaaatcgctcgcggccttgatatgttggaagggtacgccgccgacggtaccttgcgtcacggtgagctgaatctggcgaccattactgccgcctgcgctattgcttatctgaattttcgtcgcgtggcgcccggctggtgcgcgacgcggccaaaactggtcaaactggtcgagacgttgtttcagcgagccagttttgcccgtaccgaaccgccagggagttga

SEQ ID NO: 1014 - protein, 202 aa, Enterobacter cloacae
MKLIGSYTSPFVRKISVILLEKAIPFEFVNEFPYNDVNGVAQYNPLGKVPALLTDDGACWFDSPIIAQYLELLNVAPAMLPAEPLAALKMRQLEALSDGIMEAAIALVREKARPAAQQSETELLRQREKIARGLDMLEGYAADGTLRHGELNLATITAACAIAYLNFRRVAPGWCATRPKLVKLVETLFQRASFARTEPPGS

SEQ ID NO: 1015 - DNA, 1860 bp, Klebsiella oxytoca
atgattattgccaccgccggacatgtggaccacggcaaaaccacgctgctgcaggcgattaccggcgtcaacgccgatcgtctgccggaagagaaatcacgcggtatgactatcgatctcggctacgcctattggccgcagcctgatggccgggtgttgggttttatcgatgtgccggggcatgaaaagtttttgtccaacatgttggccggcgtgggcgggatcgatcacgcgctgctggtggtggcctgcgatgacggcgtgatggcgcaaacccgcgagcacctggcaattctgcagttaacgggaaaaccgacgttaaccgttgcgttgaccaaaacggaccgcgtggacgcggcgcgggttgccgaagtccgggcacaggtggaatccacgctgagcgagctggggttcgacgacgtggctttcttcgccaccgcggcgacggaaaacctcggcattgccgaactgcgcagtcatttgctccagctggccgagcgcgcgcatccgcaacagcagcgctttcgtctggcgctggatcgcgcctttaccgttaagggcgcggggctggtggtgaccgggacggcgttatccggcgaggtaaaaatcggcgataccctctggctgaccggcgccaataaacctatgcgcgtccgcgggctgcatgcgcagaatcagccggttgaacaggcgcaggccgggcagcgtatcgcgctgaatatcgtcggcgacgcgcaaaaagaggatctcagccgcggcgactggctgctctcggcgcagcccgcagaaccttgcgagcgggcgatcgtcgagctcacctgtcacgcgccgctcagccagtggcagtcgctgcatatccaccatgccgccagtcatatcaccggccgcgtttcgttactggaaggcaatctggccgagctggtgctggatacgccgctgtggctggcggataacgatcgcctggtgttgcgcgatatctccgctcgcttgacgctggccggcgcgcgggtggtgacgctgaatccgccgcgccgcggtaaacgcaagccggagtatctgcagtggctttacgcactggcggcggcgcggggcgacgatgcgcaggcgttggatattcatctgcagcgcgatgcggtgcgtcttgacgagtttgcctgggcgcggcagctgagcgccgacggcctgacggcattaattaaccgtccggactacctgcaggccgggaatagcctgcttagtgcgccgctggccgcccgctggcagaaaaaactgctcgacgcgctggcccgttatcacgaccagcatcgcgatgagccggggccggggcgtgaacgcctgcggcggattgcgctgccgatggaagatgaagcgctggtgctgttattgattgaacagatgcgcagcagcggcgtcattcaaagccatcacggctggctacacctgccggaacataaagccgggtttaccgatgagcagcaggccatctggcagcgtgcggaatcgctcttcgccgatgagccatggtgggtacgcgatctggcgcgcgatctgaacgtcgaagagtcgttgatgcgcgcggtgctgcgccaggcggcgcagcaggggatgattacggcgatcgtgaaagatcgttattatcgcaacgatcggattgttgaatttgcgcaattgatccgccgcctggatctgcagcgtggttccacctgtgcggcggattttcgcgatacgctgaatattggccgtaaactggcgattcaaattctcgaatatttcgaccgcattggctttacccgccgtcggggcaacgatcatcttctccgcgatgcgctgttattccctgaaaataaaaacggcgaataa

SEQ ID NO: 1016 - protein, 619 aa, Klebsiella oxytoca
MIIATAGHVDHGKTTLLQAITGVNADRLPEEKSRGMTIDLGYAYWPQPDGRVLGFIDVPGHEKFLSNMLAGVGGIDHALLVVACDDGVMAQTREHLAILQLTGKPTLTVALTKTDRVDAARVAEVRAQVESTLSELGFDDVAFFATAATENLGIAELRSHLLQLAERAHPQQQRFRLALDRAFTVKGAGLVVTGTALSGEVKIGDTLWLTGANKPMRVRGLHAQNQPVEQAQAGQRIALNIVGDAQKEDLSRGDWLLSAQPAEPCERAIVELTCHAPLSQWQSLHIHHAASHITGRVSLLEGNLAELVLDTPLWLADNDRLVLRDISARLTLAGARVVTLNPPRRGKRKPEYLQWLYALAAARGDDAQALDIHLQRDAVRLDEFAWARQLSADGLTALINRPDYLQAGNSLLSAPLAARWQKKLLDALARYHDQHRDEPGPGRERLRRIALPMEDEALVLLLIEQMRSSGVIQSHHGWLHLPEHKAGFTDEQQAIWQRAESLFADEPWWVRDLARDLNVEESLMRAVLRQAAQQGMITAIVKDRYYRNDRIVEFAQLIRRLDLQRGSTCAADFRDTLNIGRKLAIQILEYFDRIGFTRRRGNDHLLRDALLFPENKNGE

SEQ ID NO: 1017 - DNA, 1152 bp, Enterobacter cloacae
atggctgcatcgactttttatattccgccagtaaacgttattggcgctggttctgttactgaagcgatgaatactatccagcaatacggatatcgtcgggcattaattgtcaccgacgcgatgctgaataaattaggtatggcgggtgaagtacaaaaggcgttacaggagcgggatattttcagcgtggtgtatgacggcgtgcacccgaacccgacgactctgaacgtcgaaagcggtctggcgctgctaaaagagaataactgcgactgcgtgatttccctgggtggcggttccccgcacgattgcgcgaaaggtatcgcgctggtcgcggcaaatggcggcaacatccgtgactatgaaggggtggaccgttcggcaaaaccgcaattgccgatgatcgctatcaataccaccgccggtacggcttccgaaatgacccgcttttgcatcattaccgatgtcgatcgccacatcaaaatggcgattgtcgataagcacgtgacgccggttctgtcggttaacgactcctcgctgatgatggggatgccgaaatcgctgaccgccgccaccggtatggacgcgctgactcacgctatcgaagcctatgtttctatcgcggcgacgccgatcaccgatgcctgcgcgttgaaagcgatgaccatgatttcacagaatttaactcacgcagtggaagatggcggcaatgaacaggcgcgtgaagcgatggcctatgcgcagttccttgccggtatggccttcaacaacgcgtcgctgggctacgtccacgcgatggcgcaccagctgggcggcttctacgatctgccgcacggcgtctgcaacgccgtactgctgccgtttgtgcaggagtacaactgcagcgtcgccgccgcgcgtctgcgtgactgcgcgcaggcgatgggcgtgaacgttgccgggctgaacgataagcagggcgcggaagcctgcatcgcggccatccgcgagctggcgcgtaaagtcggcatcccggccggtctgcgcgatctgaacgttaaagaagaggatatcccgctgctggccagcaacgcgctgaaagatgcctgcggcttaaccaatccgattcaggcgactcacgaagaaatcatggcgattttccgcgccgcgatgtaa

SEQ ID NO: 1018 - protein, 383 aa, Enterobacter cloacae
MAASTFYIPPVNVIGAGSVTEAMNTIQQYGYRRALIVTDAMLNKLGMAGEVQKALQERDIFSVVYDGVHPNPTTLNVESGLALLKENNCDCVISLGGGSPHDCAKGIALVAANGGNIRDYEGVDRSAKPQLPMIAINTTAGTASEMTRFCIITDVDRHIKMAIVDKHVTPVLSVNDSSLMMGMPKSLTAATGMDALTHAIEAYVSIAATPITDACALKAMTMISQNLTHAVEDGGNEQAREAMAYAQFLAGMAFNNASLGYVHAMAHQLGGFYDLPHGVCNAVLLPFVQEYNCSVAAARLRDCAQAMGVNVAGLNDKQGAEACIAAIRELARKVGIPAGLRDLNVKEEDIPLLASNALKDACGLTNPIQATHEEIMAIFRAAM

SEQ ID NO: 1019 - DNA, 1017 bp, Enterobacter cloacae
atggcgaaagcggcgcgagcaaccatcagcgacgtggcgaaagccgcgaagaccggtaaaaccagtatttcacgctatctcaacggcgaaaagcatctgttatccgacgatctgttggcgcggattgaaaaagcgattgccgagctcaactaccgtcccagcctgatggcccgtggtctcaaacatggccgtacccgcctgattggcctgatcatcgccgatatcaccaacccttactccgtgaacgtgttaagcgggattgaagccgcctgccgcgaaaaaggcttcaccctgctggtgtgtaataccaacaacgaggtcgatcaggagctgcattaccttgacctgctgcgtagctatcaggttgaagggattgtggttaatgcagtcggcatgcgcgaagaaggcctcaaccgcctgcagcaatcctcgctaccgatggtgcttatcgaccgtaaaatccccgatttcgcctgtgatgtcgtggggctggataacactcaggccgccaccaccgccaccgaacatctggtggaaaagggttttgaagcgctgttgtttttaagcgagccaatcggctccgtaaacacccgccgcgagcgcctggacgcctttcgcgcgaccctacagcgctatgctggcgtggtggcggaaaacgccgaggtgccgctcaacgacggcgccatgatggataacgtcctgcgccagttccacgcccgccaccgcggaatgcgcaaagcggtgatttccgccaatggcgccctgacgttacaggtcgcccgttcactgaagcgcgttgacctcatctggggcagcgatattggcctgctgggcttcgatgagctggaatgggcggagctggcgggcgtcggtattaccaccctcaaacagccaacctggcagattggctatgcttcggtcgaacaggtcgtcaggcgtatcgaaggcggcagcgaccccatctgcgagcgggtcttctccggcgagcttattgtccggggatcaacgtctcgttaa

SEQ ID NO: 1020 - protein, 338 aa, Enterobacter cloacae
MAKAARATISDVAKAAKTGKTSISRYLNGEKHLLSDDLLARIEKAIAELNYRPSLMARGLKHGRTRLIGLIIADITNPYSVNVLSGIEAACREKGFTLLVCNTNNEVDQELHYLDLLRSYQVEGIVVNAVGMREEGLNRLQQSSLPMVLIDRKIPDFACDVVGLDNTQAATTATEHLVEKGFEALLFLSEPIGSVNTRRERLDAFRATLQRYAGVVAENAEVPLNDGAMMDNVLRQFHARHRGMRKAVISANGALTLQVARSLKRVDLIWGSDIGLLGFDELEWAELAGVGITTLKQPTWQIGYASVEQVVRRIEGGSDPICERVFSGELIVRGSTSR

SEQ ID NO: 1021 - DNA, 903 bp, Klebsiella oxytoca
atgtcacaaattacagaaaataaagttgtcgccgcaccggtgccaatgaccccgctgcaggagttctggcactatttcaaacgcaataagggtgccgtcgtcgggttggtgtacgtggcggtgatgattatcatcgcggtattcgccaactttctcgccccttataacccggcggatcagttccgtgattcgctgctggcgccgccgttctggcaggatggcggcagcctggcgcatctgcttggcaccgatgatgtgggtcgcgatattctctcacgcctgatgtacggcgcgcgcctgtcgctgctggtgggctgtctggtggtggtgctgtcgctgatcctcggcgtggtgctggggctggttgcaggctatttcggcggggtggtggactccatcatcatgcgcgtggtcgatatcatgctggcgctgccgagcctgctgctggcgttggtgctggtggctatcttcggaccatcaatcgtcaatgcttcgctggcgctcaccttcgttgccctaccgcactatgtgcgtctgacgcgcgcggcggtgctggtggaagtacaccgcgattacgttaccgcttcccgcgtggcgggcgccggcgcgatgcgccagatgttcgttaatattctccctaactgtcttgcgccgctgattgttcaggcgtcgctgggcttctctaacgccattctcgacatggcagcgctggggttcctcggtatgggcgcgcagccgccgacgcctgagtggggcactatgctttccgacgtattgcagttcgcgcaaagcgcctggtgggtcgtgaccttcccgggtgtggcgatcctgctgacggtgctggcatttaacctgatgggtgacggtctgcgtgacgcgctcgatcccaaactgaagcagtaa

SEQ ID NO: 1022 - protein, 300 aa, Klebsiella oxytoca
MSQITENKVVAAPVPMTPLQEFWHYFKRNKGAVVGLVYVAVMIIIAVFANFLAPYNPADQFRDSLLAPPFWQDGGSLAHLLGTDDVGRDILSRLMYGARLSLLVGCLVVVLSLILGVVLGLVAGYFGGVVDSIIMRVVDIMLALPSLLLALVLVAIFGPSIVNASLALTFVALPHYVRLTRAAVLVEVHRDYVTASRVAGAGAMRQMFVNILPNCLAPLIVQASLGFSNAILDMAALGFLGMGAQPPTPEWGTMLSDVLQFAQSAWWVVTFPGVAILLTVLAFNLMGDGLRDALDPKLKQ

SEQ ID NO: 1023 - DNA, 336 bp, Kluyvera intermedia
atgatcagcactgttgcgctgttttgggccctgtgtatcgtttgtgtggtgaatatggcacgttacttctcatcgttgcgtgcattattggttgtgctacgtggttgcgatcccttgctctatcaatatgttgatggcggaggttttttcacctcgcatgggcagcccagtaaacaaatgcggctggtttggtatatctatgcccaacgatatcgcgatcatcatgatgacgagtttattcgtcgctgtgagcgtgttcgccggcagttcatcctgaccagcgcgctgtgtggtctggtgctggtgagtatgattgcactgcttatctggcattga

SEQ ID NO: 1024 - protein, 111 aa, Kluyvera intermedia
MISTVALFWALCIVCVVNMARYFSSLRALLVVLRGCDPLLYQYVDGGGFFTSHGQPSKQMRLVWYIYAQRYRDHHDDEFIRRCERVRRQFILTSALCGLVLVSMIALLIWH

SEQ ID NO: 1025 - DNA, 1497 bp, Klebsiella oxytoca
atgctacatttatttgccggtctggatttacataccggactattattattgcttgctttagcttttgtactgttttacgaagcgattaacggttttcatgataccgcaaacgcagttgcaacggtgatttacactcgcgcaatgcggtcgcagcttgctgttgcgatggcggcactcttcaactttttcggcgttctgctgggcggtctcagcgtagcctatgccatcgtgcatatgctgccaacggacctgctgcttaacatgggttccgcacatggcctcgccatggtgttctctatgctgctggcggcaatcatctggaacctcggaacctggtatttcggcctaccggcctccagttctcacaccctgattggcgccatcatcggtattggtttaaccaatgcgctgatgaccggtacttcagtggtggatgcgctgaatatcccgaaagtcatcggcatttttgcctcacttatcgtctcgccgattgttggcctggtggtagcgggcggcctgattttcattctgcgtcgttactggagcggtaccaaaaaacgcgctcgtatacacctgaccccagcggaacgcgaaaagaaagacggtaagaaaaaaccgccgttctggacccgtatcgcgctgatcctgtccgctatcggcgtgtcgttctcgcacggcgccaacgatggacagaaaggcattggtctggtcatgctggtactgattggcgtcgcgccggcgggcttcgtggtcaacatgaacgcgtctggttacgaaatcactcgtacccgcgatgcagtcaacaacgtggaaaccttcttccaacagcgccctgagctgctgaagaaagccaccggcgttgatcaactggttccgtcaccggaaaccaataccgcggccaacggcgagtttcactgccatccggcgaacaccatcaacgcgcttgaccgcgtgaagacaatgctcaccggtacggaaagctacgatacactgtcagtggatcagcgcggccagctgcgtcgcattatgctctgcatctccgacaccactgacaaagtggccaagctgccggatgtgagcactgacgaccagcgcctgctgaagaaactgaaaaccgatatgctgagcaccatcgagtacgcgccaatctggatcattatggcggtcgcgctggcgctgggtattggcaccatgatcggctggcgccgcgtggcgaccactatcggcgagaagattggtaagaagggtatgacctacgcgcaaggtatgtccgcccagatgaccgccgcggtttctatcggccttgccagctacaccggcatgccggtttccaccacccacgtgctctcttcctcggttgcggggacgatgctcgttgatggcggcggtctgcagaagaaaaccgtcaccagcatcctgatggcatgggtactcaccctgccggcagccattttgctgtcaggcgtgctgtactggctggctctgaagcttatctaa

SEQ ID NO: 1026 - protein, 498 aa, Klebsiella oxytoca
MLHLFAGLDLHTGLLLLLALAFVLFYEAINGFHDTANAVATVIYTRAMRSQLAVAMAALFNFFGVLLGGLSVAYAIVHMLPTDLLLNMGSAHGLAMVFSMLLAAIIWNLGTWYFGLPASSSHTLIGAIIGIGLTNALMTGTSVVDALNIPKVIGIFASLIVSPIVGLVVAGGLIFILRRYWSGTKKRARIHLTPAEREKKDGKKKPPFWTRIALILSAIGVSFSHGANDGQKGIGLVMLVLIGVAPAGFVVNMNASGYEITRTRDAVNNVETFFQQRPELLKKATGVDQLVPSPETNTAANGEFHCHPANTINALDRVKTMLTGTESYDTLSVDQRGQLRRIMLCISDTTDKVAKLPDVSTDDQRLLKKLKTDMLSTIEYAPIWIIMAVALALGIGTMIGWRRVATTIGEKIGKKGMTYAQGMSAQMTAAVSIGLASYTGMPVSTTHVLSSSVAGTMLVDGGGLQKKTVTSILMAWVLTLPAAILLSGVLYWLALKLI

SEQ ID NO: 1027 - DNA, 477 bp, Enterobacter cloacae
atgaaccactatttatcgcccggcgactatctaccgcacgatgcaccgatgctgctgctggaagaggtcgtcaatgtgaccgatgaaaccgcgacctgccgggtcacggtctcgccccatagcgtcctggcgccatttctcgatgccgagggcaatctccccggttggttcgcccttgaattaatggcgcaaaccgtcggcgtctggtccggctggcaccgcctgcaaaaagggcaagcgtccatctcattaggtatggtgcttggcgcgcgagaattagtctgcgcggccggctccctgccgcgcggcaaagcactgtccattaccgttaaactgctcatgcaggacgagcgtttcgctagcttcgaaggcgccgtgatggcggacgatgacctgctggccagcggaagggttaataccttccagccaacgccaacagaacttaacaccctatttcaacaaggagcgtcagaatga

SEQ ID NO: 1028 - protein, 158 aa, Enterobacter cloacae
MNHYLSPGDYLPHDAPMLLLEEVVNVTDETATCRVTVSPHSVLAPFLDAEGNLPGWFALELMAQTVGVWSGWHRLQKGQASISLGMVLGARELVCAAGSLPRGKALSITVKLLMQDERFASFEGAVMADDDLLASGRVNTFQPTPTELNTLFQQGASE

SEQ ID NO: 1029 - DNA, 1350 bp, Enterobacter cloacae
atgatgcagcccctcacgctggcccagtggctcagcgccccgcgtccgccgcaaacgctgattgcgtggcaggaagcgcacagctggacgctggcgcatctgcgctatgatgtcgctcacctgcttaacaacctgcaacaacagccaggcgagcgttgggcgctctgttttgacaacagctacctgtttttggtcgcgctgttggccacgctgcatgcggggaaaacgccagtgcttcctggccatagccgagcggcgctattacacgaacagcgagcgcttttcgacggcatcctgagcgataagccgctgccatggcgcgggccgctgcgggttatccagtccgccatggcgaccgcatcccacgaatacgcgttcccggcgatcggcgataacgcctgcattgagctttttacctccggttctaccggtgaaccaaagcgaattagtaagcctgttaagagtctcgaccgcgaggcggcgctgatagccgcgcactatgccgggcgcctgacaggcagtcgggtagtggcatcagtggcgccgcagcacttgtacggcctgacgttccgtctgttcctgccaatggcgctggggttgccgctgcacgcggcgatgattgagtacgccgagcagttggcggcattaagccatgaccatcattatttatttatcagtagcccggcttttctcaaacgtctcgactatcggcttaccccgccgccggtcgcgatgattttgtccgccggcggcaagctgccctggcaggatgctatgcacaccgctaactggttcaattgctggccggatgaaatctacggcagcacggaaagcggggttatcgcctgccgccagcgcctgcaggataatgcgccgtggcagccgttcccaggcatccgctttcagccgcagggcaacacaattcgtctattttcgccgcttatcgccgacgataacggcctggttatcgatgatattttgcatttcaatgaaagcggtcaattccagctggcaggtcgtcgcgaccgggtagtgaaaattgaagagaagcgcatttcgctaagcgaagtggaataccggttactgcaactggatggcattcttgaggccgccgtcctgccgattacccgcggcagccgccagagcgttggcgcgttgttagtgctcgatcatgacgcccgtcgccgctgggggaaaagccaggaattacaatggcggaaagcgctgcgcgcctctctggaacctgtggccatccctcgctactggcgggtggttgacgagatccccgttaatagcatgaataagcgtgtctacgcgcaattacaggagttatttcatgaagccccatga

SEQ ID NO: 1030 - protein, 449 aa, Enterobacter cloacae
MMQPLTLAQWLSAPRPPQTLIAWQEAHSWTLAHLRYDVAHLLNNLQQQPGERWALCFDNSYLFLVALLATLHAGKTPVLPGHSRAALLHEQRALFDGILSDKPLPWRGPLRVIQSAMATASHEYAFPAIGDNACIELFTSGSTGEPKRISKPVKSLDREAALIAAHYAGRLTGSRVVASVAPQHLYGLTFRLFLPMALGLPLHAAMIEYAEQLAALSHDHHYLFISSPAFLKRLDYRLTPPPVAMILSAGGKLPWQDAMHTANWFNCWPDEIYGSTESGVIACRQRLQDNAPWQPFPGIRFQPQGNTIRLFSPLIADDNGLVIDDILHFNESGQFQLAGRRDRVVKIEEKRISLSEVEYRLLQLDGILEAAVLPITRGSRQSVGALLVLDHDARRRWGKSQELQWRKALRASLEPVAIPRYWRVVDEIPVNSMNKRVYAQLQELFHEAP

SEQ ID NO: 1031 - DNA, 246 bp, Escherichia coli
atgagcgaacttttttccagtcctgaccatacgctggacgccctggggcttcgctgcccggagccggtgatgatggtgcgtaaaaccgtgcgtaccatgccggtgggcgagaccctgctgattattgccgacgatccggccaccacccgcgatattcccggtttttgcctctttatggagcatgaactggtggcgcaggaaaccgaagccctgccgtaccgctacctgatccgcaaaagccactga

SEQ ID NO: 1032 - protein, 81 aa, Escherichia coli
MSELFSSPDHTLDALGLRCPEPVMMVRKTVRTMPVGETLLIIADDPATTRDIPGFCLFMEHELVAQETEALPYRYLIRKSH

SEQ ID NO: 1033 - DNA, 372 bp, Klebsiella aerogenes
atgggtacgcaaatgagtaaagttccgctattttttgtgctggtggtcgcggtgattgtggtggcggcctcgtttcgctacgtgcagcagcgccgggagaaaatggataacgacgccgcgccgctgctgcagaagcgggtggtggtcagcaataagcgggaaaaggtgattaacgatcgccgttcgcgccagcagacggtgacgccagccggcagcgagatgcgttatgaagcgagcttccgcccggaaaatggcgatctggaagtggtgttccgccttgatgcgccgcaataccacgcgctgagcgttggcgaccggggaatgctgagctataagggctctaaattcgtcgactttgttgccgataactga

SEQ ID NO: 1034 - protein, 123 aa, Klebsiella aerogenes
MGTQMSKVPLFFVLVVAVIVVAASFRYVQQRREKMDNDAAPLLQKRVVVSNKREKVINDRRSRQQTVTPAGSEMRYEASFRPENGDLEVVFRLDAPQYHALSVGDRGMLSYKGSKFVDFVADN

SEQ ID NO: 1035 - DNA, 2544 bp, Klebsiella oxytoca
atgagcaaagtcagaatcgctattatcggtaacggcatggtcggccatcgctttatcgaagagcttcttgataaggcgcctgccggacaattcgacattaccgtgttctgtgaagagccgcgtatcgcctatgaccgtgtccacctgtcgtcttacttctcccatcatactgcggaagagctgtcgctggtacgcgaaggtttctatgagaaacacggcgtcaaggtactggtcggcgaacgcgcgattaccatcaaccgtcaggaaaaggtgatccactccagcgctggccgtaccgttttctacgacaagctgattatggcgactggctcatacccgtggatcccgccgattaaaggcgcggaaacccaggattgcttcgtctatcgtactattgaagatcttaacgccatcgaatcctgcgcccgtcgcagcaaacgcggcgcggtggtcggcggtggtctgctcggtctggaagcggctggcgcgctgaaaaatctcggcgtggaaacccacgtgatcgagtttgcgccgatgctaatggccgagcagctcgaccagatgggcggcgagcagctgaagcgtaagattgaaagcatgggtgtgaaagttcacaccagcaaaaacaccaaagagatcgttcagcagggcaccgaggcacgcaaaacgatgcgcttcgccgacggtagcgaactgcaggtcgatttcatcgtcttctctaccggtatccgtccgcgcgacaagctggctacccagtgcggtctcgccgtcgcccaacgcggcggcatcctggtcaacgatagctgccagacctccgatccggatatctacgctatcggcgaatgcgccagctggaataaccgcgtatacggtcttgtcgccccaggctacaaaatggcgcaggttaccgttgaccatatcctcggcaacgacaatctgttcaccggcgccgacctcagcgccaagctgaagctgctcggcgttgacgttggcggtatcggcgacgcccacgggcgcacgccgggcgcgcgtagctatgtctatctcgacgaaagtaaagaggtctacaaacggctcattgtcagcgaagataacaaaaccctgcttggcgcggtactggtcggcgacaccagcgattacggcaacctgctgcagctggtgctgaatgccatcgagctgccggaaaacccggattcgctgatccttccggcccacgccggcagcggcaagccgtccatcggcgtggataaactgccggacagcgcgcagatttgttcctgcttcgacgtcagcaaaggcgacctgatcgccgctatcaataaaggctgccacaccgtggcggcgctgaaagcggaaaccaaagccggaaccggctgcggcggctgtattccgctggtgacgcaggtgctcaacgccgagctggcgaaacagggtatcgaagtgaacaacaatctgtgtgagcacttcgcctactctcgccaggagctgttccacctgatccgcgtggaaggcatcaaaaccttcgacgaactgctggaaaaacacggtcagggctacggctgtgaagtctgtaagccgaccgtcggttccctgctggcctcctgctggaatgagtacatcctcaaaccacagcacacgccgctgcaggacaccaacgataacttcctcgccaacatccagaaagatggcacctactcggttatcccgcgctccgcaggcggcgaaattacgccagaaggcctggttgccgtcggtcgcatcgcgcgcgaatttaatctgtataccaaaatcaccggctcccagcgtatcggcctgttcggcgcgcaaaaagacgacctgccggaaatctggcgtcaactgattgaagccggcttcgaaaccggccatgcctacgccaaagcgttacgtatggcgaaaacctgcgtcggcagtacctggtgccgctacggcgtcggcgatagcgtcggcttcggcgtagaactggaaaaccgctataaaggtatccgtaccccgcacaaaatgaagttcggcgtctccggttgtacccgtgaatgcgcggaagcccagggtaaagacgttgggatcatcgccaccgagaaaggctggaacctgtacgtgtgcggtaacggcgggatgaaaccacgccacgccgatctgctggccgcggacctcgatcgcgatacgctcatcaaatatctcgaccgctttatgatgttctacatccgcaccgccgataagcttacccgtaccgcgccgtggctggacaacatggaaggcggtatcgactatctgcgcagcgtcatcatcgacgataagctgggcctgaacgatcaccttgaagaagagctggctcgcctgcgcgccgctattgcctgcgaatggaccgagaccgtcaataacccggcggcgcagacgcgcttcaaacactttatcaacagcgatcagcgcgacccgaacgttcaggtggtgccggaacgtgaccagcatcgcccggccacgccctatgagcgcatcccggtcacgctggtggaggaaaacgtatga

SEQ ID NO: 1036 - protein, 847 aa, Klebsiella oxytoca
MSKVRIAIIGNGMVGHRFIEELLDKAPAGQFDITVFCEEPRIAYDRVHLSSYFSHHTAEELSLVREGFYEKHGVKVLVGERAITINRQEKVIHSSAGRTVFYDKLIMATGSYPWIPPIKGAETQDCFVYRTIEDLNAIESCARRSKRGAVVGGGLLGLEAAGALKNLGVETHVIEFAPMLMAEQLDQMGGEQLKRKIESMGVKVHTSKNTKEIVQQGTEARKTMRFADGSELQVDFIVFSTGIRPRDKLATQCGLAVAQRGGILVNDSCQTSDPDIYAIGECASWNNRVYGLVAPGYKMAQVTVDHILGNDNLFTGADLSAKLKLLGVDVGGIGDAHGRTPGARSYVYLDESKEVYKRLIVSEDNKTLLGAVLVGDTSDYGNLLQLVLNAIELPENPDSLILPAHAGSGKPSIGVDKLPDSAQICSCFDVSKGDLIAAINKGCHTVAALKAETKAGTGCGGCIPLVTQVLNAELAKQGIEVNNNLCEHFAYSRQELFHLIRVEGIKTFDELLEKHGQGYGCEVCKPTVGSLLASCWNEYILKPQHTPLQDTNDNFLANIQKDGTYSVIPRSAGGEITPEGLVAVGRIAREFNLYTKITGSQRIGLFGAQKDDLPEIWRQLIEAGFETGHAYAKALRMAKTCVGSTWCRYGVGDSVGFGVELENRYKGIRTPHKMKFGVSGCTRECAEAQGKDVGIIATEKGWNLYVCGNGGMKPRHADLLAADLDRDTLIKYLDRFMMFYIRTADKLTRTAPWLDNMEGGIDYLRSVIIDDKLGLNDHLEEELARLRAAIACEWTETVNNPAAQTRFKHFINSDQRDPNVQVVPERDQHRPATPYERIPVTLVEENV

SEQ ID NO: 1037 - DNA, 201 bp, Kluyvera intermedia
atggcggtacgtaaacgttttattgccggcgcaaaatgcccggcgtgccaggcgcaggattcactggcgatgtggcgcgagaataatgtcgatattgttgagtgcgttaagtgcggacatcagatgcgcgaggccgataaagaggtccgcgagcacgttcgtaaagaagagcaagtgatcggcatttttcatccggactag

SEQ ID NO: 1038 - protein, 66 aa, Kluyvera intermedia
MAVRKRFIAGAKCPACQAQDSLAMWRENNVDIVECVKCGHQMREADKEVREHVRKEEQVIGIFHPD

SEQ ID NO: 1039 - DNA, 435 bp, Enterobacter cloacae
atgcagcgtgtgctgatttttttagtgattgccggcggaatggggctgtccgtagaggcaggtctattggggccgctggcgggtcaggtcggtgatttatgggcaacaatgagtattttcgccattggcgcggcattaacgtttttactgatgcttttttttagcccgcgacaaagtccctcttttttttcgctccccggttggcaattaaccggtggtctattggggccaggttatgtgctgatattaacgattgttactccgacgatcggtatcgcaatgacgattaccggtattctcgccggtcaagtatgtaagagtctgttaatcgatcattttggctggtttggtagcccgcggcgaaaaatagatcgccgccgggttattgctctgttgttcattgtggcggcattagtgctgattgccgttgattga

SEQ ID NO: 1040 - protein, 144 aa, Enterobacter cloacae
MQRVLIFLVIAGGMGLSVEAGLLGPLAGQVGDLWATMSIFAIGAALTFLLMLFFSPRQSPSFFSLPGWQLTGGLLGPGYVLILTIVTPTIGIAMTITGILAGQVCKSLLIDHFGWFGSPRRKIDRRRVIALLFIVAALVLIAVD

SEQ ID NO: 1041 - DNA, 933 bp, Enterobacter cloacae
atggccgacgtaggtaacatcaatctccgcgccctccagctgtttatcgccgtgtatgacagccatagtttttccgttgtcgcgcgacgtgaaggcgtgtccccttctctgatttcacgagtcatccagcaacttgaggatgcgcttggccagcagctgttctaccgcaatacccgtgcggtcgttccaacggaggccggaaacctgtttgctgactatgcccgcgggatgaccgagcaattcgctcacgcgcaacgcgaattacaggatcgcgcccaacaacctggcggactcgtgcgcatcaacgccccggtctactttggccaacggcatatcgcgccatggttagcgggactggccgatcgttatcccgagctggagtacgaattaatcctgaccgatgactttgtcgatcctcatcgccaggcgactgatatcatttttcgcatcagcgccctgcctgatgccagctatcacgcaaaggtttttggcgcccagcgctattacctcgccgcagcgcctggttacctttcccgtttcggcgcgccgcaatcgccttctgagcttaatcaacaccgcacgctggtgtatcgcggttcacagggtgctaaccgttggctttttcgccagagggaagaagagtggacccattacccgcaaacaccgcggctaatctcaaacaacgccgatgcccttctcacttcagcgattggcggaatgggcattgttttgtttccggactggatggtgagcgacgcgctggcgcagggaacattagtagcgctgatgaatgactacagcgttggcattaaccatttgccctcttacattgccgcgatttatccgcatgctcgtcatccgtcgctcaatgtacgcaccgttattgattattttaccgacgttttcggcacgccactttactggcaacactaa

SEQ ID NO: 1042 - protein, 310 aa, Enterobacter cloacae
MADVGNINLRALQLFIAVYDSHSFSVVARREGVSPSLISRVIQQLEDALGQQLFYRNTRAVVPTEAGNLFADYARGMTEQFAHAQRELQDRAQQPGGLVRINAPVYFGQRHIAPWLAGLADRYPELEYELILTDDFVDPHRQATDIIFRISALPDASYHAKVFGAQRYYLAAAPGYLSRFGAPQSPSELNQHRTLVYRGSQGANRWLFRQREEEWTHYPQTPRLISNNADALLTSAIGGMGIVLFPDWMVSDALAQGTLVALMNDYSVGINHLPSYIAAIYPHARHPSLNVRTVIDYFTDVFGTPLYWQH

SEQ ID NO: 1043 - DNA, 1191 bp, Enterobacter cloacae
atgaccataaatctacggcgaatgggcgcgatcatcgcttttatccaatttaccaacgcgctcgaatatatgatttttaatccgttatttgtctatatggcgccaacttttcaggtgccggtgagctgggcaggttatgtcagcggtatttacacgctcgcgtcggtcatttctggaatcggcgcgtggcgcctggtgggaaagctaaatccgcgtaagtttctactggttaatatggccttactgggagcattaacgctgatggttctggctacccagcactttatattgttgctgatactgcgttttttggccgggctcctcggcggaatgacgatgggggtggccagcagtttactgatcaacgcggcggaccagaaacatcgcgcgcgattgttggccacggtcatctctgccttttcgctggtcagtattatcggcatgcccggcatgttgtttctctgcgaacgtttcggctggcagacggcgccggcattgattggcgttctctgcctgctggcgctcatcatgatctatgttggcctgccgaaggcttccggcggcgctggctctggtacaaagatacgcatcacgccaacgatgctgttatttgccagcggcaatgcgttaacccagtttagcccgatgctattactgccgatcctggtgcctttgctgctgggcaatatgcgggcaagcagcgaggcgctaccgtggttattctttctcggcggtatggcgggattcgcggcgacaaagttgagcggcagcctgtgtcaacgctttggcggctatcggctgagcctggcggcaaccgcagtttttatcatcagtttgctgatggtgctgtggctggacggcgcgagttggttgtttatgattaccttccttggggcatcttatagccggctggttgcctcctcggcggtggcgattcgtttcccggacgatgactggcgcgcgggatttaccactctgcaaggcggtgtcatgtcattcagtacggcacttgcttttatgctctgctcactgtggctggccgacggcgagatgagtcagcaggcgtctactgggttgattgcatttagcggcgctagcgccttgctgctgccatgtttactgcgctatcaagaaaaaatactcgtacgcaacgccgccgaacgggcaaccggcggcgttggtgagctttaa

SEQ ID NO: 1044 - protein, 396 aa, Enterobacter cloacae
MTINLRRMGAIIAFIQFTNALEYMIFNPLFVYMAPTFQVPVSWAGYVSGIYTLASVISGIGAWRLVGKLNPRKFLLVNMALLGALTLMVLATQHFILLLILRFLAGLLGGMTMGVASSLLINAADQKHRARLLATVISAFSLVSIIGMPGMLFLCERFGWQTAPALIGVLCLLALIMIYVGLPKASGGAGSGTKIRITPTMLLFASGNALTQFSPMLLLPILVPLLLGNMRASSEALPWLFFLGGMAGFAATKLSGSLCQRFGGYRLSLAATAVFIISLLMVLWLDGASWLFMITFLGASYSRLVASSAVAIRFPDDDWRAGFTTLQGGVMSFSTALAFMLCSLWLADGEMSQQASTGLIAFSGASALLLPCLLRYQEKILVRNAAERATGGVGEL

SEQ ID NO: 1045 - DNA, 903 bp, Enterobacter cloacae
gtgagtaaactggatttgaatgcactacgcgtgtttgtgaatgtcgtggaaaatggcagcttcagcggggcggcgcgggcattacgcatgccttcgtcaaatgtcagtcgccagatttctcaactggaagaaaaactgcaattgcgccttatccagcgcagcaccagacatatgcatctcaccgatgccgggcaggctttttttaatagtatgcgtcccctgcttgatcagctcgcggcaaccgaagcggccttaactcaacagcaggccgatcctgaggggctgttgcgcttatgtcttcccaacgagattggaccgaccctttttggccccatgctggcgcagttcgccatgcgttatcccaaaatcgaagtaagctgtgtggtcagccttgccggagccgacgcgcttaaagaagatatcgacattgccgtcgccatcgtccgaggcaaaatggaggatgccagctatatcgccatgccgttggcgacatttccctgttgtgttgtcgctgcgccttcgctgctggaaaaatgcggacagccagtacgttgcgagcagcttgcctcacttccctgcatcaccaccgtcagcgcgctgaaggggcaagcctggcaatttatcaccgcacgaaacgcgtttaaaaaagtgaacgtccaggctcattttcgggtgaatagcggagagatcgcccttcatgccgccgtcgccggcgtaggtttcgccatccttgcagaacaggcttgccgcccgtttatcgcctcaggtcagttaaaggtggttgaactggagctaccgccggcaccgctacatttagtggcgctgtatcgcgaacgccactttttacctgcccgatctcgcgtctggctcgatttcatgcagcagcatttggccgccaattaa

SEQ ID NO: 1046 - protein, 300 aa, Enterobacter cloacae
MSKLDLNALRVFVNVVENGSFSGAARALRMPSSNVSRQISQLEEKLQLRLIQRSTRHMHLTDAGQAFFNSMRPLLDQLAATEAALTQQQADPEGLLRLCLPNEIGPTLFGPMLAQFAMRYPKIEVSCVVSLAGADALKEDIDIAVAIVRGKMEDASYIAMPLATFPCCVVAAPSLLEKCGQPVRCEQLASLPCITTVSALKGQAWQFITARNAFKKVNVQAHFRVNSGEIALHAAVAGVGFAILAEQACRPFIASGQLKVVELELPPAPLHLVALYRERHFLPARSRVWLDFMQQHLAAN

SEQ ID NO: 1047 - DNA, 852 bp, Enterobacter cloacae
atgaaagtatctgccctggctatcgccaccgccctgttcagcactaccgcttttgccgcgccgttgaccctgcaaacctacaacccgcaggagaacgcgatcttcgcggtgaactccacgctggcctccggcccgcacgaagcggtgctgtttgacgcccagttcagcgttaaagatggcgaaaagctggttgagatgatcaacaaaagcggtaagaagctcacgcacattgtgatcacctctggcgatccggatttctattttggcctcgagccgctggtgaaagccttcccgcaggccaaagtggtggcaaccgagcaagtggttaagcatattgaagagaccaaagcggcgaagctggcatactggggcccacagatgaaagacggcgcgccgaagcaggtctatgttccacaggtattagccgcagatagcttcaccattgacggcgagaaagtggaaattcgtcagccgcagaactacgccgcgttcgtctggatcccggcgaataaagcgattcttggcggcaccggcgtcgcctggggcatgcacgtctggaccgccgatacccaaagcgcggcgagccgtcagcagtggcgccagacccttagcgatatggccgcgctgcatccgcaacaggtgatcccgggccactatctcggcacgccgccggcgggcgacaaggctatcgtctttacccgcgactatctggagaaattcgagcaggcgctgaaagcgcataaagattccgccagcgtcatcaaagccatgaaggcgcaatatccgggtctcgcggaagaaagctcgctggagctgagcgcgaaagtgaataccggcgaaatgaagtggtaa

SEQ ID NO: 1048 - protein, 283 aa, Enterobacter cloacae
MKVSALAIATALFSTTAFAAPLTLQTYNPQENAIFAVNSTLASGPHEAVLFDAQFSVKDGEKLVEMINKSGKKLTHIVITSGDPDFYFGLEPLVKAFPQAKVVATEQVVKHIEETKAAKLAYWGPQMKDGAPKQVYVPQVLAADSFTIDGEKVEIRQPQNYAAFVWIPANKAILGGTGVAWGMHVWTADTQSAASRQQWRQTLSDMAALHPQQVIPGHYLGTPPAGDKAIVFTRDYLEKFEQALKAHKDSASVIKAMKAQYPGLAEESSLELSAKVNTGEMKW

SEQ ID NO: 1049 - DNA, 141 bp, Enterobacter cloacae
atgaaatcgaaccatcaggcacgtcatcttctcggtctgaactacaagctttcccgccagaaaaaagtggtgctcgaaggcgacgaagaaactaccgttaaccatatccatgctacgggccgcaaacgccgcggtggttaa

SEQ ID NO: 1050 - protein, 46 aa, Enterobacter cloacae
MKSNHQARHLLGLNYKLSRQKKVVLEGDEETTVNHIHATGRKRRGG

SEQ ID NO: 1051 - DNA, 1698 bp, Citrobacter amalonaticus
atgcaattcatctataaaaaaaaccgctctctttatatcccctacgctggcccggttctgcttgagtttccgttactcaacaaaggaagcgccttcagcatggaagagcgtagcagcttcaacctgctgggcctgctgccggaagtggtcgaaaccatcgaagaacaagctgaacgcgcgtggatccagtatcagggatttaaaactgagattgataagcacatttatctgcgcaacatccaggacaccaacgaaaccctgttttatcgcctgattggcaaccatcttgatgagatgatgccggttatctatacccccaccgtcggcgccgcctgtgagcgtttctcggaaatctaccgtcgcgcgcgcggcgtgttcatctcctaccagaatcggcacaacctcgacgatatcctgcaaaacgtaccgaaccataacgtcaaagtgatcgtggtgaccgacggcgagcgtattctcggtctcggcgaccagggtatcggcggtatgggcatccctatcggtaagctgtcgctctatactacctgcggcggtatcagcccggcctacaccctgcctatcgtgctggatgtcggcaccaacaaccagcaactgctcgacgacccgctgtatatgggctggcgtcatccgcgcgtgaccgacgacgagtattatcaattcgttgatgacgttatccaggccatcaaaaaccgttggccggacgtgctgctgcagtttgaagatttcgcgcagaaaaacgccatgccgctgcttaaccgctatcgtaacgagatttgctcgtttaacgatgatattcagggcaccgcggcggtcaccgtcggcacattaatcgccgccagccgtggcgcgggcagccagctcagcgagcaaaaaattgtcttcctcggcgcgggatccgccggttgcggtattgctgaacagatcatcgcgcaaatcatgcgcgaagggttaagcgaagaagaagcccgccaacgcgtatttatggtggaccgcttcggcctgttgaccgacggtatgccgaatctgctgtcgttccagagcaagcttgtgcagaaacgcgaaaacctgcaaggttgggatacgaccaacgaagcgctctcgctgctcgacgtggtgcgtaacgtgaagccgaatatcctgattggcgtctccggccagccggggctgttcacggaagaaattattcgtgaaatgcacaagcactgcccgcggccgatcgtcatgccgctgtcgaacccgacctcccgcgttgaagccacgccgcagaacatcctgacctggaccgacggcgaagcgctggtggccaccggcagcccgttcaccccggtgacggttaagggcaagcagtacgccatcgcgcagtgtaacaactcctatatcttcccgggcatcggccttggcgtgatcgctgcgggagcatcacgcgtcaccgacgaaatgctgatggcggcaagcgaaaccttagctaaccactcgccgctggtgaataacggcgaaggcccggtactgccggaactgaaagatattcaggccgtatcgcgcgctatcgcgtttgcggtcggtaaagtggctcaggaacagggcgtggcggtgaaaacatcggccgaagcgctgctgcaggccattagcgataatttctggcagccggaatatcgcaactatcgccgaacctcaatttaa

SEQ ID NO: 1052 - protein, 565 aa, Citrobacter amalonaticus
MQFIYKKNRSLYIPYAGPVLLEFPLLNKGSAFSMEERSSFNLLGLLPEVVETIEEQAERAWIQYQGFKTEIDKHIYLRNIQDTNETLFYRLIGNHLDEMMPVIYTPTVGAACERFSEIYRRARGVFISYQNRHNLDDILQNVPNHNVKVIVVTDGERILGLGDQGIGGMGIPIGKLSLYTTCGGISPAYTLPIVLDVGTNNQQLLDDPLYMGWRHPRVTDDEYYQFVDDVIQAIKNRWPDVLLQFEDFAQKNAMPLLNRYRNEICSFNDDIQGTAAVTVGTLIAASRGAGSQLSEQKIVFLGAGSAGCGIAEQIIAQIMREGLSEEEARQRVFMVDRFGLLTDGMPNLLSFQSKLVQKRENLQGWDTTNEALSLLDVVRNVKPNILIGVSGQPGLFTEEIIREMHKHCPRPIVMPLSNPTSRVEATPQNILTWTDGEALVATGSPFTPVTVKGKQYAIAQCNNSYIFPGIGLGVIAAGASRVTDEMLMAASETLANHSPLVNNGEGPVLPELKDIQAVSRAIAFAVGKVAQEQGVAVKTSAEALLQAISDNFWQPEYRNYRRTSI

SEQ ID NO: 1053 - DNA, 1134 bp, Enterobacter cloacae
ttgcccgcctgttcgctcaccgataaattagcaaacagataccgcggcgctgaaataagcgcgcagcagaaaacagaaggtttaagtatggcgaatattcgtgatgtcgcccggcgggctggagtttcaattagtagcgtgtccaacgtacttaataatcgcacgcaacagatgcgcgaagagacccgacagcggatagtcaaaacgatggctgagctaaattaccgccctgcgcgttgcgctccgccggtcgccgattcagcaaccaaaatgctcggcctgatggtaccgtctatcgtcaatcccagcttttcagcgctggcgcatgaactggatactgcggcacgcgcgtttcgccaccggctgttattaggcatttgctgccgcgatgccgacgaggagtcagcctttatcgcggatatgttctcccacggcgtgcgcgggttgatagttgccgccagcgacgtacgcaaaacccactttgtgcgcgcagcggaacaaggcatgaccattattagctatgacaaccggctggccgaaagcgtcccgcctcgggcgcgctacttcgatagtgtctcaatggacaacgttgaagcgggacgtctggcggcgcaacatctgctggacaacggttgccgtaatatcgtctttgccaccgaaagcgggttaacgctgggacgcagccataaaatcctcggctttcagtcggcgctttcccaaagcggtacagcggccagaggcgtggtgatagaaggcaaaggcaatcgggaattcggcgacgccgagatgttcgaactgggcgtaagcctggcgcaaaaaattagcgccttaacgccgcgagtggatggcgtggtagcgattaacgatgctttagccatcggcctgatggttgggctacgcgcgcagggcctgaaaatagcggaagatatttcggtgattggcatcgataacatctccctgtcggcgttatcgtcaccgggcctcacctcggtaatggccccgctttcggcaatggcgtcgatgatggttgagcggcttgtccagagaattactgagccgggattacaaaccgacgaatttatctttgcaccggaagtgatacagcgtcagtcggtaaaaataaagcaaccctag

SEQ ID NO: 1054 - protein, 377 aa, Enterobacter cloacae
MPACSLTDKLANRYRGAEISAQQKTEGLSMANIRDVARRAGVSISSVSNVLNNRTQQMREETRQRIVKTMAELNYRPARCAPPVADSATKMLGLMVPSIVNPSFSALAHELDTAARAFRHRLLLGICCRDADEESAFIADMFSHGVRGLIVAASDVRKTHFVRAAEQGMTIISYDNRLAESVPPRARYFDSVSMDNVEAGRLAAQHLLDNGCRNIVFATESGLTLGRSHKILGFQSALSQSGTAARGVVIEGKGNREFGDAEMFELGVSLAQKISALTPRVDGVVAINDALAIGLMVGLRAQGLKIAEDISVIGIDNISLSALSSPGLTSVMAPLSAMASMMVERLVQRITEPGLQTDEFIFAPEVIQRQSVKIKQP

SEQ ID NO: 1055 - DNA, 1716 bp, Enterobacter cloacae
atgagcacacttttaagcgcacaatctctccacgttgatacggcctttggcccacttttcaacgacctctcctttaccctgaaaaaaggcgatcgcattggcctgattggctataacggttgcgggaaaagcacgttattgcaggtgctggacggcactctcacgccgaattctggcagcgtatcgcgggctaatcactgcctgctggcgcgcgtagaacaacatctgcctgacgccctactcagccaaccgctattgcaggtggtactggaaaaactggcgcctggcgaacgggattcgctgcgctggcaagcggagcgactgctcgctgaaatgggttttaccgttcaacagacccaacagcaagccgccaccctgagcggcggacaacatactcgtctgttgctcgcccgcgcgttgatccaacagcccgatttgctgttgctggatgagccaggcaaccatctcgatctgccgaccctgctgtggctggaaagcttcttgcaaacctggcaggggagcttcgtggtggtgtcgcacgataacctcttactggatgctgtaactaataccagttggattttacgcgacaaaacgctgcacgctttctcgctaccctgcagcgccgcccgtcaggcgctggaggagcaagatgcaagcgatgctctgcgccacaaagcggaacaaaaggagatcgaccgcgtcgctgccagcgccaaacggctggccatctggggtcgggtttacgataacgaagatctggcgcgtaaagccaagcagatggaaaagcaggtttcacgcctgaaggatagccagacggaactcaccgccggcacgccgtggcgtcttgaggtgcatggcgacgccgttcgcgccgaccgtctgctggagatggaaaatctccccgtgccgccggcgcccggtctccccgccctgttcaccaccggtctggcgcggctgcaaagcggcgaccgggtagcgataatggggcgcaacggcggtgggaaatcgtcgctgctgcgcctgttatggcgacaaatgcagcaaccggctagcgaagccgggctgcgtttacatcctcgactacatccgggttattacgatcaaaccctgcatcaactggcggatgaggccagcctgctggaggcgctggagccctttgagccttcgccggaaacgcgcaagcgggcgctgatttccgccggcttcggctgggcgcgacacgggcagaaggtcagcaccctcagcggcggcgaacgttcacggctgctgtttgtcggcctgtcgctggcgagctatagcctgctgctgctcgatgaacccaccaatcatctggatatggagggaaaagaggcgctggcggcgacgttgcgggagtatcccggggggctgctgctggttagccacgaacgacagctcctcagccagagctgtaaccgcttctggttaattgatgaaaacgggttaagcgagtggcacgacgtcgacgaggtgtacgcccgtctgcgcggcaacgagcgccttcaaagcccggcgacgcaaacgccgccgcaggcgccgcccgtcgacgacctgcaagaggatttgctggaacgtctggtgatgctggaacagctattggcggacgatctgcagcgtaagccgaagcatcagaagccgcagctacaggcgctgtggcgtcaggagattgaggagataaatacccatctgagttaa

SEQ ID NO: 1056 - protein, 571 aa, Enterobacter cloacae
MSTLLSAQSLHVDTAFGPLFNDLSFTLKKGDRIGLIGYNGCGKSTLLQVLDGTLTPNSGSVSRANHCLLARVEQHLPDALLSQPLLQVVLEKLAPGERDSLRWQAERLLAEMGFTVQQTQQQAATLSGGQHTRLLLARALIQQPDLLLLDEPGNHLDLPTLLWLESFLQTWQGSFVVVSHDNLLLDAVTNTSWILRDKTLHAFSLPCSAARQALEEQDASDALRHKAEQKEIDRVAASAKRLAIWGRVYDNEDLARKAKQMEKQVSRLKDSQTELTAGTPWRLEVHGDAVRADRLLEMENLPVPPAPGLPALFTTGLARLQSGDRVAIMGRNGGGKSSLLRLLWRQMQQPASEAGLRLHPRLHPGYYDQTLHQLADEASLLEALEPFEPSPETRKRALISAGFGWARHGQKVSTLSGGERSRLLFVGLSLASYSLLLLDEPTNHLDMEGKEALAATLREYPGGLLLVSHERQLLSQSCNRFWLIDENGLSEWHDVDEVYARLRGNERLQSPATQTPPQAPPVDDLQEDLLERLVMLEQLLADDLQRKPKHQKPQLQALWRQEIEEINTHLS

SEQ ID NO: 1057 - DNA, 279 bp, Enterobacter cloacae
atgactttaaaaaaattaattattattgccttcagcgcgctttctattaacgcctgcgccttcgcggcggggagtctcgccgaccagttacactatacgccgccggaaccggcagaccttgccgctaatccacctacagaatcgcctgaatcgaaaacggaacaaccaaaattaacgatgacccccgacgttaacgcctacacctattacaacgaaaaggtgaaccccgttaccaatgatattgaccgtattgaacaaggcggcgtcgtcgaattctga

SEQ ID NO: 1058 - protein, 92 aa, Enterobacter cloacae
MTLKKLIIIAFSALSINACAFAAGSLADQLHYTPPEPADLAANPPTESPESKTEQPKLTMTPDVNAYTYYNEKVNPVTNDIDRIEQGGVVEF

SEQ ID NO: 1059 - DNA, 546 bp, Enterobacter cloacae
atgaatattgcgcaacatctggcaacgacgctgaaaagcctgcgtcagcagcgcggctggagtttgtcgcggctggcggaagaaaccggggtatcgaaagcgatgctcgggcaaattgaacgtaatgaatccagtccaacggtcgcgacgttgtggaagatagccaccggccttaatgtggcgttttcgacgttcatcgttgccgatgagacggctgcgcccgccgccttcgacccgcagcagcaggcgatggtagtgacgccgatttttccctgggatcctgagctacgttttgaccatttttcaattaccctcgccccaggcgcgctgagcgaatcgacgccgcatgagaccggcgtcattgaacatgtcgtggtcattagcggttcgctggatttatgtctgcaggggcaatggcagacgttgcaggcgggagaagggcggcgctttgccggcgacctgacgcacgcttaccgcaatagcggcgcgcagacggcgcactttcattcactgattcattatccaaaagaaaaagccgcggactaa

SEQ ID NO: 1060 - protein, 181 aa, Enterobacter cloacae
MNIAQHLATTLKSLRQQRGWSLSRLAEETGVSKAMLGQIERNESSPTVATLWKIATGLNVAFSTFIVADETAAPAAFDPQQQAMVVTPIFPWDPELRFDHFSITLAPGALSESTPHETGVIEHVVVISGSLDLCLQGQWQTLQAGEGRRFAGDLTHAYRNSGAQTAHFHSLIHYPKEKAAD

SEQ ID NO: 1061 - DNA, 1167 bp, Enterobacter cloacae
atgcgctcctttacccttcccatccccacgctgctcgcgggatttgtcgccgtgctggtaggctatgccagttctgccgccattatctggcaagcggccgccgccgctggcgccgatgccgcgcaaatagccggctggatgaccgcccttggcctggcgatgggcgtcagcacgctggtattaacgctatggcgtaaagtccccatcctcaccgcatggtcaactccaggcgcggctttactggtcagtggattacagggagcgacgctagcgcaggcggtgggaatatttgttttcgccaacgcgctgatcctgctatgcggcgtgacgggactgtttgcccgcctcatgaagatcattccgcattcgctggcggcggcaatgctggcggggatcctgttgcgttttggtctgcaggcatttggcagtttgcaggataatctcccgctatgcggcgggatgttcgccgcctggctgttatgcaaagcgctctacccacgttttgcggtcgttgcggcgttagtggcaggcgggatcattgccctgctaaccggcgcgctgtcgccagtggcaaacgatatggtttttgttgctccgcagtggattacgccgcagttcaccccttcgctactgctcagcgtcggtgtaccgtttttccttgtcaccatggcgtcacagaatgcgcccggcctggcgaccattcaggcatcaggctatcgggttccggtctcgccgctaatcgtatttaccggcgcgctggcgttgttattctcaccatttggcgtctattccgtgtgcatcgccgccattaccgccgcgatctgccaaagtccggatgcgcatccggatgcggataagcgctggctcgccgcagcggcggccggtgtgttttatctattggcggggctatttggcggttcgataaccgcgcttatggcggcgctaccgccggtgtggatccagatgctggcggggctggcattgttaggaaccattagcggcagcctctatcaagcgctggggcaagaaaacgagcgcgatgccgcagtggtaacctttttagtcaccgccagcggcgtctctctggcaggcgtcggctcggccttttgggggctggtcctcggcggtatcagctatatgctgttaaccacgctgcgccgcacgtag

SEQ ID NO: 1062 - protein, 388 aa, Enterobacter cloacae
MRSFTLPIPTLLAGFVAVLVGYASSAAIIWQAAAAAGADAAQIAGWMTALGLAMGVSTLVLTLWRKVPILTAWSTPGAALLVSGLQGATLAQAVGIFVFANALILLCGVTGLFARLMKIIPHSLAAAMLAGILLRFGLQAFGSLQDNLPLCGGMFAAWLLCKALYPRFAVVAALVAGGIIALLTGALSPVANDMVFVAPQWITPQFTPSLLLSVGVPFFLVTMASQNAPGLATIQASGYRVPVSPLIVFTGALALLFSPFGVYSVCIAAITAAICQSPDAHPDADKRWLAAAAAGVFYLLAGLFGGSITALMAALPPVWIQMLAGLALLGTISGSLYQALGQENERDAAVVTFLVTASGVSLAGVGSAFWGLVLGGISYMLLTTLRRT

SEQ ID NO: 1063 - DNA, 879 bp, Enterobacter cloacae
gtgaaggctatggcatacgggacgttcgaaacattacaacaacaaaatgcggtgctgcgggggaccgtggaactcaattccgggatccagcttgccgcgtggtacaacgaccttgaccggatcacggtgcgcagcgaccaccacacgttgagcctgtatgtcgccgatggttacgaaagctaccaaaaaacaccgtacggctggaagaatggcggcgggccggaccgtttttgtctgatgccaaagggcgatgaaagcacctgggatattcgcggcgatctctctttcgttcatctctattgcaccgatgagcacctgcgtcgcgtcggcgagcaaatttgggatcgcagcccggcgtctttcaccttgcaggaaaaaacctttgccagcgatgacaaaattaccgcggtgtatcgtcagtttctgcttgataacgactggcgccagcaggctaatcaactgctattaagctccgccagtacgttgctgttaacacatctgattcaaaactattcgaacgtgcagtggcgcctgccgacggttaccggtggcctggcgccgtatcttttgcgtaatctgttggcgtggattgaggagcatctcgagcagccgcttacgcttgccgatcttgccgcccaggcgtcacttagcgagtaccattttgcgcggatgttccgccagtcaatgaatatggcgccgcaccagtatgtgatgcagcggcggatgatcaaggcgcaaaatctgatttgccatactcaacagccgttgaccgagattgcgctggcctgcggatttagctccgccagccactttagccaccgggttaagagcgccacgggtcttacgccaagccagctacgtgcggcgcagcgtggttaa

SEQ ID NO: 1064 - protein, 292 aa, Enterobacter cloacae
MKAMAYGTFETLQQQNAVLRGTVELNSGIQLAAWYNDLDRITVRSDHHTLSLYVADGYESYQKTPYGWKNGGGPDRFCLMPKGDESTWDIRGDLSFVHLYCTDEHLRRVGEQIWDRSPASFTLQEKTFASDDKITAVYRQFLLDNDWRQQANQLLLSSASTLLLTHLIQNYSNVQWRLPTVTGGLAPYLLRNLLAWIEEHLEQPLTLADLAAQASLSEYHFARMFRQSMNMAPHQYVMQRRMIKAQNLICHTQQPLTEIALACGFSSASHFSHRVKSATGLTPSQLRAAQRG

SEQ ID NO: 1065 - DNA, 897 bp, Klebsiella aerogenes
ttgaacgcattactctacgggctggtggtggttatctggggtaccacatggattgcaatctttttacaacagggccccgtcgccgcgccggtatcgattttctggcgttttgccgtcgccagcgtcaccatgctgacaattttgctgatgacccgccgcctgcgcccgctggcgatgcgcgatcatctcttttgcatgctgcaaggctgctgcgtcttttgctttaacttctggtgtttttataccgccgcggcgcatatcaataccggccttgagtcggtgatcttttcgatggcggtattatttaacgcgatcaacagttttattttcttccgccagcagcccccgggccgcttttggctggcagcggcgctggggcttgcaggaattgtcaccctcttctgggacgatctcctcgccaatggtctgaacgcgtcgctgctgtggggaatcggcctgagcgccctgggaacgtacggtttttcattgggcaacatgctgagtattcgtcaccaacgccacgggcttgagacattgaccaccaatagctgggccatgttttacggcaccctggtcatgggcgcgatcgcgctgctgcgcggcgataactttacgccgcagtggacctggagttatatgggcgccctgctgtatctggcgttgttcggttcggtgatcgcgttcggcgcttatttcactctggtaggccgtatcggggccagcaaagcggcctatagcacgctgcttttcccactggtggcgttaactatctccaccttctacgaaggttacgtctggcatagcaatgcggtgattggtctggcgttaatactggtaggaaatctggtgatgttcgcccgccccgaacagctgtttatgcgccgccggctggcttaa

SEQ ID NO: 1066 - protein, 298 aa, Klebsiella aerogenes
MNALLYGLVVVIWGTTWIAIFLQQGPVAAPVSIFWRFAVASVTMLTILLMTRRLRPLAMRDHLFCMLQGCCVFCFNFWCFYTAAAHINTGLESVIFSMAVLFNAINSFIFFRQQPPGRFWLAAALGLAGIVTLFWDDLLANGLNASLLWGIGLSALGTYGFSLGNMLSIRHQRHGLETLTTNSWAMFYGTLVMGAIALLRGDNFTPQWTWSYMGALLYLALFGSVIAFGAYFTLVGRIGASKAAYSTLLFPLVALTISTFYEGYVWHSNAVIGLALILVGNLVMFARPEQLFMRRRLA

SEQ ID NO: 1067 - DNA, 669 bp, Enterobacter cloacae
atgcgtacaaaaatgttatttaaagtagccgctctggccgggctactggcattaactggttgtgcatccaaactggcgcaaccggagcagtattccgggtttttaaaagattattctaagttaaaagagaccacttcggcttccggcaaaccagaactgcgctggatctccccggactacaatccgagcaactatgacaacgtcgtctaccgtccaatcacctactacccggtgccgaaaccaacgacccaggtaggggagaaagcgctgcaggacatcctcaattacaccaacaagcagatgaaacaggccatcagcgaacgtaagccgttggcgaccacggctggcccgcgcagcctgattttccgcggcgcaatcaccggtgttgataccagtaaagaagggctgcagttctatgaagtgatcccggtggcgatgattgtcgcgggtacccaggcggcaaccggccatcgcacgatggacacgaatctctacttcgaaggcgaactgatcgacgcgaagaccaataagccggttattaaggtagtgcgtaagggcgaaggtaaaacgctgtctaatgagagcacgccgctgaccgctgatacgttgaagcaggtgattgatgatatggcgatcgatgcggtgaaattcgatccgtcgcagaagtaa

SEQ ID NO: 1068 - protein, 222 aa, Enterobacter cloacae
MRTKMLFKVAALAGLLALTGCASKLAQPEQYSGFLKDYSKLKETTSASGKPELRWISPDYNPSNYDNVVYRPITYYPVPKPTTQVGEKALQDILNYTNKQMKQAISERKPLATTAGPRSLIFRGAITGVDTSKEGLQFYEVIPVAMIVAGTQAATGHRTMDTNLYFEGELIDAKTNKPVIKVVRKGEGKTLSNESTPLTADTLKQVIDDMAIDAVKFDPSQK

SEQ ID NO: 1069 - DNA, 924 bp, Escherichia coli
atggaaaaaaatggtctcttcagtcagcgcattcgcttgcgccatttacatactttcgtcgccgtcgcacagcagggaaccctggggcgggcggcagaaaccctgaatcttagccaacctgcgctatcaaaaacgctcaacgagctggagcagttgaccggtacccgtctctttgagcgcgggcggcttggcgcgcagttgacgctggtgggcgaacagtttcttacccacgcggttaaggtactggatgccctcaataccgcaggccaggctctcaatcgtaaagaaggcatgaatagcgatgtggtgcggattggcgccctgccaaccgcggcgctcggtattttacctacggtgattggtcaatttcataaacagcaaaaagacatcaccttacaggtcgccaccatgaataacaccatgctgctggcggggctaaaatccggcgatgtcgatattggtatcgggcgcatgtctgatccggaactgatgagcggcctcaactatgaactgctgtttcttgaatcgctaaagctggtcgtccgccccggccacccgctgctgcaggagacggtaacgctcagccgggtgatggaatggccggtggtggtctcaccgaaagggacaatcccgcggcagaatgcggaaacgctactgcaaagccagggttgtaaaattccccccggctgtattgaaacgctgtcggcctcgctttcacgccagctcaccgtcgattacgactatgtctggttcgtcccttccggcgcggtgaaagacgacctgcgtcgcggtttgttaacctcattacctatcgccaccgaaggcgccggcgagccgatcggtattcttacccgggtggacgccagcctgtcgcagggggcgcaaactctactgagcgcgatacgcaaatccatgcctggctga

SEQ ID NO: 1070 - protein, 307 aa, Escherichia coli
MEKNGLFSQRIRLRHLHTFVAVAQQGTLGRAAETLNLSQPALSKTLNELEQLTGTRLFERGRLGAQLTLVGEQFLTHAVKVLDALNTAGQALNRKEGMNSDVVRIGALPTAALGILPTVIGQFHKQQKDITLQVATMNNTMLLAGLKSGDVDIGIGRMSDPELMSGLNYELLFLESLKLVVRPGHPLLQETVTLSRVMEWPVVVSPKGTIPRQNAETLLQSQGCKIPPGCIETLSASLSRQLTVDYDYVWFVPSGAVKDDLRRGLLTSLPIATEGAGEPIGILTRVDASLSQGAQTLLSAIRKSMPG

SEQ ID NO: 1071 - DNA, 276 bp, Klebsiella oxytoca
gtgccacattcaccagaagacaagaagcgtgcgcttagccgcgtacgccgtattcgcgggcaggttgaagcgctggaacgtgcgctggagtccggcgaaccctgcatgactatcctgcaacagattgcctccattcgcggcgccgccaacggtttgatgggcgagctggtggagatgcatctgcaggatgaactggttagcggcgataccaccccggaccaacgcgccgcccgcatggcggaagtcggtcacctgctacgatcctatttaaagtaa

SEQ ID NO: 1072 - protein, 91 aa, Klebsiella oxytoca
MPHSPEDKKRALSRVRRIRGQVEALERALESGEPCMTILQQIASIRGAANGLMGELVEMHLQDELVSGDTTPDQRAARMAEVGHLLRSYLK

SEQ ID NO: 1073 - DNA, 315 bp, Enterobacter cloacae
atggcgattcagggtattgaaggcgtactgcaacagatgcaggcgatggcgattcaggcgggaaataacgggcagaatagcgtaccgcagggagtcagttttgccagtgaattgaccgccgcgctgggtaaaatcagcgatacccagcaggccgcgcgtcaacaggcgcaaaacttcgagctgggcgtgccgggtatcagcctgaatgatgtgatggtcgatttacagaaatcttcagtttcgttgcagatgggcgtgcaggtgcgtaataagctggtggcggcctatcaggacatcatgaatatgccggtttag

SEQ ID NO: 1074 - protein, 104 aa, Enterobacter cloacae
MAIQGIEGVLQQMQAMAIQAGNNGQNSVPQGVSFASELTAALGKISDTQQAARQQAQNFELGVPGISLNDVMVDLQKSSVSLQMGVQVRNKLVAAYQDIMNMPV

SEQ ID NO: 1075 - DNA, 723 bp, Enterobacter cloacae
gtgagcgatttgtataccgccgaaggcgtgatggacaaaaattccctctggctgcgctacgttccgttagtgcggcacgaggcgttacgcctgcaggtcaggctgcccgccagcgtcgagcttgacgatctgctgcaggccgggggaatcgggttgttgaacgccatcgagcgttacgactcgctacagggaacggcctttaccacctatgcggtacaacgtatccgcggcgcaatgctcgatgaactgcgcagccgcgattgggtgccgcgcagcgtgcggcgtaacgcccgcgaagtcgcccaggcgatgcagaagctggagcagcatctgggccgcccggccacggaaagcgaacttgcgcagacgctgggtatctcccttgccgagtaccgacaaatcctgctggataccaataacagccagctgttctcctacgatgaatggcgggaagagcagggcgagaatgccgaacgactactggaagggcacgaagaggccaatccgttgcatcatctgctggaaggcagcctgcgccagcgggtcatcgaggccattgaagccttgcctgaacgcgaaaaaatggtgcttaccctctactaccaggaagagctcaaccttaaagagatcggtgcggtgctggaggtgggggaatcccgcgttagccagctgcacagccaggcgattaagcgcctgcgcgcgaagctggccaacgaaggctaa

SEQ ID NO: 1076 - protein, 240 aa, Enterobacter cloacae
MSDLYTAEGVMDKNSLWLRYVPLVRHEALRLQVRLPASVELDDLLQAGGIGLLNAIERYDSLQGTAFTTYAVQRIRGAMLDELRSRDWVPRSVRRNAREVAQAMQKLEQHLGRPATESELAQTLGISLAEYRQILLDTNNSQLFSYDEWREEQGENAERLLEGHEEANPLHHLLEGSLRQRVIEAIEALPEREKMVLTLYYQEELNLKEIGAVLEVGESRVSQLHSQAIKRLRAKLANEG

SEQ ID NO: 1077 - DNA, 285 bp, Enterobacter cloacae
gtgattccggttaattctcatacgctaacccgctatgccgcccatgccagtttgatctacaccatgaaaaatcatcatgccccagccctctctttaatgatgattttctcggatctctgcgtgcgctccacgcgcgatgcctacagcgaacaaggatgggaaatatcagaacgtaaaagcggactggtgctgcgtacctttgtcgctatccatcgcgacggcggagaactggagatcacgccaaaggattatatcgcccgctataatcaactccttccgctctga

SEQ ID NO: 1078 - protein, 94 aa, Enterobacter cloacae
MIPVNSHTLTRYAAHASLIYTMKNHHAPALSLMMIFSDLCVRSTRDAYSEQGWEISERKSGLVLRTFVAIHRDGGELEITPKDYIARYNQLLPL

SEQ ID NO: 1079 - DNA, 591 bp, Enterobacter cloacae
atgacggcggaaggccacctcttcttttctatcgcctgtgcggtatttgcaaaaaatgcagaattaacccccgtgctggcgcagggggactggtggcatatcgttccttccgccgtgctgacctgcctgctgcccgatatcgaccatccgaaatcgttcctcgggcagcgtttaagctgggtctccaaaccggtagcccgcgcctttggccatcgcggttttacccacagcctgctggcggtattcggcgcgctggcgctgttctatcttaaagtgcctgagagctggattatccctgccgatgcgctgcagggtttagtgctcggctacctcagtcatatactcgccgatatgctcaccccggccggcgtaccgctgctgtggccctgccgctggcggttccgcctaccgatcctcgcgccgcgcaaaggcaatcagctcgagcgcgcgctgtgcatggcgctgttcatttacgccgtctggatgccgcaaagcatggccgaaaatagcgccgtgcgctggtcatccaatatgattaattcgctgcaaataacctttaatcgctttattagccatcaggctgaacgataa

SEQ ID NO: 1080 - protein, 196 aa, Enterobacter cloacae
MTAEGHLFFSIACAVFAKNAELTPVLAQGDWWHIVPSAVLTCLLPDIDHPKSFLGQRLSWVSKPVARAFGHRGFTHSLLAVFGALALFYLKVPESWIIPADALQGLVLGYLSHILADMLTPAGVPLLWPCRWRFRLPILAPRKGNQLERALCMALFIYAVWMPQSMAENSAVRWSSNMINSLQITFNRFISHQAER

SEQ ID NO: 1081 - DNA, 978 bp, Enterobacter cloacae
gtgaaatatatctcaattagtcacccgggcggcccggaggttcttcagattggtgaaggcgacatcccttcggttggtgataacgacgtcctgatccaggtgaaagccgctggcgtcaatcggccggatatcttacagcggcagggcgtttatccgatgccggaaggagtaacgccgatacccgggctggaagttgctggagtggtcgcggcggtaggagcgcaggtgacggattttcatcccggcgataaagtttgcgctctgaccaacggcggaggctatgcggagtattgcgcggtaccggcggggcaaacgttgccaataccgcctgggctgagttttagcgaagcggcggcgatacctgaaactttctttaccgtgtgggccaacctgtttcagatgggcagggcgcaacctcatgaaagcgtgctgattcacggcggggccagcggcatcgggacaacggcgatcctgctgtgtcatgagttaggtatgaaagtctataccaccgttgggcaggaagaaaaagtggcggcgctgcgtccttatgccacggctatcaattacaaaaccgatgatttcgctgagaaaatcaatcagttgaccgatggtaaaggcgtcgacgttattctcgatatcgtgggtggcccctattttaatcgtaatctggaactgctgaagcgagatgggcggctggtgattatcggctttatgggcgggcgaatcgcccatgatgttgatattcaaaccttgatgctcaagcgcgcgaccgtgaccggttcaacgatgcgcggacgaagcgcggaagaaaaaaggcagatcgctcaggcgctacagcgccatgtctggccgctgctgtcgcagggtaaatgtaaaccgctgatttacgccagctatccgatggctgaaatcgcgcaggcgcatgcctgcctcgatagcggtaatcacctggggaaagtggtgattaccatggagtag

SEQ ID NO: 1082 - protein, 325 aa, Enterobacter cloacae
MKYISISHPGGPEVLQIGEGDIPSVGDNDVLIQVKAAGVNRPDILQRQGVYPMPEGVTPIPGLEVAGVVAAVGAQVTDFHPGDKVCALTNGGGYAEYCAVPAGQTLPIPPGLSFSEAAAIPETFFTVWANLFQMGRAQPHESVLIHGGASGIGTTAILLCHELGMKVYTTVGQEEKVAALRPYATAINYKTDDFAEKINQLTDGKGVDVILDIVGGPYFNRNLELLKRDGRLVIIGFMGGRIAHDVDIQTLMLKRATVTGSTMRGRSAEEKRQIAQALQRHVWPLLSQGKCKPLIYASYPMAEIAQAHACLDSGNHLGKVVITME

SEQ ID NO: 1083 - DNA, 852 bp, Enterobacter cloacae
atgagcgaacaaatcagtaaacaaccgcaagttgaccacgctgaagagaatgcttttttcccttcagcctactcccttagtcagtttaccagcccggtgtccgatctcagcggcgctgattatgcatcagggtatcgcgggcggcggaaagtgctggttatcgccgccgatgaacgttacctgcctaccgataacggcacgctcttttcgaccggtaatcatccggtagagacgctgctgccgatgtaccatctgcacgccgcaggtttcgattttgatattgcgacgctctccgggcaaatggtcaagttcgaatactgggcgatgccgcgcgaagaccaaaagattatgccgttcttcgagcgttatctgccgcagttccgccagccgctggcgctttcagatgttgtggggcaactgggggctgatagcgactatgcggcggtatttattcccggcggccacggtgcgcttatcggcctgccggagagcgaagccgtcgccgaaacgctgcgctgggcgctgcggcacgatcggtttgtgatttcgctctgtcacggcccggcggcgtttctcgcattacgtcatggggagaatccgttaaacggttatgccatttgcgcgtttccggatgctgccgataaacaaacgccggatatcggctatatgcccggtcacctgacctggtattttggcgaagcgctgaaagcgatggggctggaaatcgtaaacagcgatattaaaggtcgtgtgcatcaggatcgtaaagtgctgaccggggacagtccttttgcggcaaatgcgctcggtcaactggcggcaaaagcgttgctcgacgaatatgcaaagtaa

SEQ ID NO: 1084 - protein, 283 aa, Enterobacter cloacae
MSEQISKQPQVDHAEENAFFPSAYSLSQFTSPVSDLSGADYASGYRGRRKVLVIAADERYLPTDNGTLFSTGNHPVETLLPMYHLHAAGFDFDIATLSGQMVKFEYWAMPREDQKIMPFFERYLPQFRQPLALSDVVGQLGADSDYAAVFIPGGHGALIGLPESEAVAETLRWALRHDRFVISLCHGPAAFLALRHGENPLNGYAICAFPDAADKQTPDIGYMPGHLTWYFGEALKAMGLEIVNSDIKGRVHQDRKVLTGDSPFAANALGQLAAKALLDEYAK

SEQ ID NO: 1085 - DNA, 2460 bp, Klebsiella oxytoca
atggatgtttacgaattaatagatattgaagtaaaaaaaagcattttacactccagtgactatgatacaactgaactactaagacttttagatattgtctatgattatatttatgagtgtcgagatgctgatctaattagaaagtccataaataaaatatcaaatatttttcattctgtgggcgataattctgttgtggttttgacgtttgtattaatgaataagttgagtgatcttaatggaattaaaatactgaaatattcagagagtcatgtagaacctgatttggataagcttaaagagtttattaaaaatgaaataattgaaaataatggtgtgtttgattttttcaatcacaagaaaggttcaacaaccctcggtaagaataagttgtacgcttctgttttgtctatgttaagacataatctacaaagtaccattaaagatgatgtcgatataaattgttccttggtgttattaataaatatgtggatattatcaccgaaagtagataggctttatgaattctacataattttttgctcttttttgcataaactacaccttagtcagaaaacacaaatggtaagggatttagcagaaactgcacttgtattaggttttcgagacaagaggttgaattattcattttatgtaagaatggctgtttattctcggcaatacaatgttattgactcgcttttgtcagcacagcttatgttgcacggatataattatattcaccaggaaaatgaaatttttctttcgaagtctcttctggagttggctataacgttacgtaacttccggctttaccctttcgttgaacgagttaaacaagcgcatgatcaattaaatattgaagatagatatgataaacatcagtttgatatggcaatatttaatatgaaattattaatggaggatgaagggctatttgaattggttgatgagtatctaaatgataatgatgttttggaattcgatgttgcttctggaataccatggatagttttattattgaacttaaagagaagtgatatttcacggttcgaaaattatcagaatttaattcagtcactgagtagactcgaatcaaatgaggaaatttataataaccctgtggtagaggattataggaaggccatgtccagtacagtctctgaaaacaaagaagcagtacagaaaggcatttcaaacatacttcaatctcgaagctttactgacgtaaattatgagcttactatgctacagccagctgtcataaatctactcaaaaattcgatcgcatcagatgatatagaaggggttttaatcgcgcattctttgtcctctggtgcctcagggttcgatattagcactgaagaagcaatgacggagtttagccctctaaaaaaagtgttcaatatatcttcgccaacaatatttgatggttatttgagccatctatcaaaactgatagagcaatcagatatgtcagtttttatatgggtcggatgctgtgatgatttttgttatagcgtcagtctaaaagaaagacgattttctctatatataaacgatacttttaataaaaatgatttaagaaattgggaggctacgcaaacagaattacttgcttttaatgatcagcctaatctagagtccatattggattctaacatcaatcactgggagttagagtctcgtgtaataattgaaagtctgccagctttgactgatatacatgaggctagaaatatagttttgtttcgtgatgttaatatgtcgcatttgccgtctaaccttataaaaacaaccgcgggaatattactcgctgatttggcccctttgcatactccctctacagttgagtcgtatattaaaagcgagtcatttattgttgggtacaaaaatatcaagctttgggctcctgtcgaagagggtgatttcgcaatcaatattgcttatgataaaattcaatctttatttaatgatgcatcattgttaaaaataacttcgcttgattctagaattgaacttaatacagatatcaatatatttatttcgcatggaggaaaggatgggttatatggatttaaaagtatctcccctgccgaaggtaaatattttataaatgaaaatgatgtttttggacgaggcaaagtagctattttatttatatgtcattcaggaagttctaaatcatctatgtttgctacgaaaccagatgggctggttagtaaaattttagagttaggttatgaatgtgtattagctccagcttggagttataatgttattcttactggtatctggacaagaagcttcgtcgatgctttaaatgatggtaagaatctgtctgaatcaacatattatgctaataagtccgttaagtctgagtaccctggcgtgggagcctatgctgcgatgcacctatttggtaatgatggtttaattttagttaacgatcggagctga

SEQ ID NO: 1086 - protein, 819 aa, Klebsiella oxytoca
MDVYELIDIEVKKSILHSSDYDTTELLRLLDIVYDYIYECRDADLIRKSINKISNIFHSVGDNSVVVLTFVLMNKLSDLNGIKILKYSESHVEPDLDKLKEFIKNEIIENNGVFDFFNHKKGSTTLGKNKLYASVLSMLRHNLQSTIKDDVDINCSLVLLINMWILSPKVDRLYEFYIIFCSFLHKLHLSQKTQMVRDLAETALVLGFRDKRLNYSFYVRMAVYSRQYNVIDSLLSAQLMLHGYNYIHQENEIFLSKSLLELAITLRNFRLYPFVERVKQAHDQLNIEDRYDKHQFDMAIFNMKLLMEDEGLFELVDEYLNDNDVLEFDVASGIPWIVLLLNLKRSDISRFENYQNLIQSLSRLESNEEIYNNPVVEDYRKAMSSTVSENKEAVQKGISNILQSRSFTDVNYELTMLQPAVINLLKNSIASDDIEGVLIAHSLSSGASGFDISTEEAMTEFSPLKKVFNISSPTIFDGYLSHLSKLIEQSDMSVFIWVGCCDDFCYSVSLKERRFSLYINDTFNKNDLRNWEATQTELLAFNDQPNLESILDSNINHWELESRVIIESLPALTDIHEARNIVLFRDVNMSHLPSNLIKTTAGILLADLAPLHTPSTVESYIKSESFIVGYKNIKLWAPVEEGDFAINIAYDKIQSLFNDASLLKITSLDSRIELNTDINIFISHGGKDGLYGFKSISPAEGKYFINENDVFGRGKVAILFICHSGSSKSSMFATKPDGLVSKILELGYECVLAPAWSYNVILTGIWTRSFVDALNDGKNLSESTYYANKSVKSEYPGVGAYAAMHLFGNDGLILVNDRS

SEQ ID NO: 1087 - DNA, 1086 bp, Enterobacter cloacae
atggcaggagaaccacaaacgccgcattcccggctgagcccgcggctggagcgggatattcagcgcataaacttttaccgtttctgccagttactggaaaaatcgcgacctggcgcgccggcattaggcagcacgctaaacccggcggatgatccggtacgctttcgcccgcatccggggatgggttttccggtcagcgaactcaaagcggtggagtatgatgaggcgcatcccgacgcgccgccgacgctgcgcaccaccttcatggggctatacggtgtcgattcgccgttgcccaccgcctggctggatgatattgcgcagcaaagagaagggcatgaggcgcaggaagcatttctcgatatttttaaccaccgcattctgagccagttttatcgcatctggcgcaaatactcgtatccggcaacctttgaagacggcggtcgcgaccgtacttcacagagcctgctggggctgatcgggctgggcattcccggcaccgctcagcatattgccgcgccggtatctcgctttctggcattactcagcgtgatgcgcctgcccgcgcgtaccgaagaggggattcaggcgctggtacgattgttggcgccccatacgcgggcggaagcgtcgccgcactgcccacggacggtgtacccggcgcagccgctgggtttttacggcgataacgatttcctgcttgatggctacacggtgctgggcgatgaaacgaccgagattgccagccagttgctgatcgcgctgtacaccgatgatatcgccgaggccgcaggctggatgccggaggggcaaatctatgcggactttctggttctgctgcgggtttatctcggctggcgctataaggccaaaatcaccttaacgcttcccacgccgctgttacccgcgccggtacttggcgaaacgccgtttatgctcggcataagcggcgttctgggcatggagggggacgcggttccgccggatttaccggccacgtttaccacggaactgggcggctaccgcggcatgccgcttgcatcattatcacaaggaaaccaacgtgttgcatatcacttcgcttaa

SEQ ID NO: 1088 - protein, 361 aa, Enterobacter cloacae
MAGEPQTPHSRLSPRLERDIQRINFYRFCQLLEKSRPGAPALGSTLNPADDPVRFRPHPGMGFPVSELKAVEYDEAHPDAPPTLRTTFMGLYGVDSPLPTAWLDDIAQQREGHEAQEAFLDIFNHRILSQFYRIWRKYSYPATFEDGGRDRTSQSLLGLIGLGIPGTAQHIAAPVSRFLALLSVMRLPARTEEGIQALVRLLAPHTRAEASPHCPRTVYPAQPLGFYGDNDFLLDGYTVLGDETTEIASQLLIALYTDDIAEAAGWMPEGQIYADFLVLLRVYLGWRYKAKITLTLPTPLLPAPVLGETPFMLGISGVLGMEGDAVPPDLPATFTTELGGYRGMPLASLSQGNQRVAYHFA

SEQ ID NO: 1089 - DNA, 987 bp, Enterobacter cloacae
atgtctattttaagttacctttggctccagcaggtggcaaacgcccccgacccgcaggcgatgatgcagcagctggcgcagaccgtgttccagggtaaaagcgtcgacctgaccgacacccaggagtacggcagcctggtggcggccagcctcggcgaagagtggagcggtttcggccagaccatgttcgtccagccgctgacgcaggcctgggaaacggtgctgcagccatcggctgccagcctgaacgaggcgtggcagcgttctgtggtcgctaactggcattcggctttcgacggccgctatccgtttgccgcgggcaaaaacgatgtctcgctaccgatgctggcggcattcatccgtcgcgatagcgggcgaatcgaccagtttcttgcccgacagttgggcggcgtgctcaaccgggagggtagccgctgggtggccgatagcgcgcacagtcaggggctgactttcaatccggccttcctgaaggcgattaatcaactgagttccttgtccgacatcctgtttaccgacggcagtcagggaatggggtttgaactacagggggtggcgacgccggggatcgttgaaacgcaactcaccctcgacggccagaatctgcactactttaaccagcttgccgaatggaaaagtttccgctggccggggactatcaacaaacccggcgcgatgctgagctggagctcagtggcggcgggcgcccggctattggcgaacgacagcggcccgtggggcacgctgcgtatgctggagagaatgaagcgccagcagatcggcgatgggctgtttcgtctgacggtcaatacgccggataaccggcaactgcagtggctgctgcgtaccgaactcggcgatggcccgctggcgttgctgaaactgcgaaacttcacgttgccgacacagattttcatcgtggaggcctcccgtgcggaaccgtttgctgacggtgacgtagaggaataa

SEQ ID NO: 1090 - protein, 328 aa, Enterobacter cloacae
MSILSYLWLQQVANAPDPQAMMQQLAQTVFQGKSVDLTDTQEYGSLVAASLGEEWSGFGQTMFVQPLTQAWETVLQPSAASLNEAWQRSVVANWHSAFDGRYPFAAGKNDVSLPMLAAFIRRDSGRIDQFLARQLGGVLNREGSRWVADSAHSQGLTFNPAFLKAINQLSSLSDILFTDGSQGMGFELQGVATPGIVETQLTLDGQNLHYFNQLAEWKSFRWPGTINKPGAMLSWSSVAAGARLLANDSGPWGTLRMLERMKRQQIGDGLFRLTVNTPDNRQLQWLLRTELGDGPLALLKLRNFTLPTQIFIVEASRAEPFADGDVEE

SEQ ID NO: 1091 - DNA, 291 bp, Enterobacter cloacae
atgcaattcaagaaaggctggttagggctggcggccatttcactgttcacaattggcggcgcgcgggctcacactgccggtaatatccaattttttggcaatgtagttactgaaagttgctggaacgaaacggaaagtagcgagattttgtgccagcgcgccgatcgcatcgaacgccacgtgattgtggaaaatatcaccacttcgctggcttcggcttacgcaacggtggagaaaagttatctcgatgccgacaagcagctcactctgctgcgggtggtctatgattaa

SEQ ID NO: 1092 - protein, 96 aa, Enterobacter cloacae
MQFKKGWLGLAAISLFTIGGARAHTAGNIQFFGNVVTESCWNETESSEILCQRADRIERHVIVENITTSLASAYATVEKSYLDADKQLTLLRVVYD

SEQ ID NO: 1093 - DNA, 768 bp, Enterobacter cloacae
gtgatctactcggtaggtattgattccggctccaccgccaccaaaggcatcctgctggcagacggcgccatcgtgcgccgtttcctcagtccgacgccctttcgccccgccgatgccattcacgaggcctgggagacgctgcgcgcggacctcgcggcaacgcctttcttaaccctcaccggctatggtcgccagttggtcgatttcgccgataaacaagtcaccgagatttcctgtcacgggctcggcgcgcgcctgctggcgccggaaacccgcacggtgattgatatcggcggccaggacagcaaagtcattcagttggatgcgcagggcaacctcagtgattttctgatgaatgacaaatgcgccgctggtaccgggcgctttctggaagtgatttcacggaccctcggcgccagcgtcgaccagttggacgccattaccgaaggtgtagaaccgcacgccatcaccagcatgtgtacggtgttcgccgagtcggaagtcatcagcctgcgttccgccggagtcgcgccggagtcaattctggccggagttatcaatgccatggcgcggcgcagcgcgaactttattggccgtttatcggcgcagggaccgctgctgtttaccggcggcgtcagccactgcgccgccttcgcccgcatgctggagacacatgttggcatgccggtcgcgacccatcccgacgcccagtttgccggggcaatcggcgcggcgctgatcggccagcgccagcggaggcgcggatga

SEQ ID NO: 1094 - protein, 255 aa, Enterobacter cloacae
MIYSVGIDSGSTATKGILLADGAIVRRFLSPTPFRPADAIHEAWETLRADLAATPFLTLTGYGRQLVDFADKQVTEISCHGLGARLLAPETRTVIDIGGQDSKVIQLDAQGNLSDFLMNDKCAAGTGRFLEVISRTLGASVDQLDAITEGVEPHAITSMCTVFAESEVISLRSAGVAPESILAGVINAMARRSANFIGRLSAQGPLLFTGGVSHCAAFARMLETHVGMPVATHPDAQFAGAIGAALIGQRQRRRG

SEQ ID NO: 1095 - DNA, 1068 bp, Citrobacter koseri
atgatgacgccagaacaaaaatttgcccgctgggtaagggtaagtattgccgctttcctggtgatattcgcctggtttatcgttgccgatatctggatcccgctaaccccggattccaccgtgatgcgcgtggtgactccggtctcgtcgcgggtctccggctacgtctcgcacgtctacgtgcacaacaatagccaggtgaaaaaaggcgacctgctgtatgagctcgatcccacgccattcattaataaagttgaagcggcgcaaatcgcccttgaacaggccaaactgagtaaccagcagctggatgcgcaaatcgccgccgctcgcgccaacctgcgcaccgcgcagtacaccgcgcgtaatgacaaagtcactctcgaccgctaccagcgcctgagcaccatgcaaaacgtgtcgcaatcggatctcgataaggtgcgcacgacatggcagaccagcgaacaatcggtcagcgccctgaatgcgcagattcagaacctgctgatccagcgcggcgagcgcgacgacaagcgcaacgtgacgctgcagaaatatcgcaacgcgctggaagaggcgcagctcaacctcggctggacccaggtgcgcgctgagaccgacggtatggtcagcaacctgcagcttaatccgggaatttacgccaccgccgctaccgccgtgctggcgttggttaacaacaataccgatatcgtcgccgactttcgtgaaaaaagcctgcgccatacggcggtgaataccgatgcggcggtggttttcgatgccctgccgggtaaagtcttcccggcgcacgtgaccagcagcgacgccggtattcttgccggtcaggaagcggtgaatggccaactgtcgcagcctgagcagtctacccgctgggtgcgcgatgcgcagcgcatgcggattcacgtcgcgctggatcaacctctggataagccgctgccgaccggcgcccgcgccaccgtccagttgtacaatagcgacggccccttcgcccgcacctttgccggcctgcagatccacctggtgagctggttgcactatgtctattaa

SEQ ID NO: 1096 - protein, 355 aa, Citrobacter koseri
MMTPEQKFARWVRVSIAAFLVIFAWFIVADIWIPLTPDSTVMRVVTPVSSRVSGYVSHVYVHNNSQVKKGDLLYELDPTPFINKVEAAQIALEQAKLSNQQLDAQIAAARANLRTAQYTARNDKVTLDRYQRLSTMQNVSQSDLDKVRTTWQTSEQSVSALNAQIQNLLIQRGERDDKRNVTLQKYRNALEEAQLNLGWTQVRAETDGMVSNLQLNPGIYATAATAVLALVNNNTDIVADFREKSLRHTAVNTDAAVVFDALPGKVFPAHVTSSDAGILAGQEAVNGQLSQPEQSTRWVRDAQRMRIHVALDQPLDKPLPTGARATVQLYNSDGPFARTFAGLQIHLVSWLHYVY

SEQ ID NO: 1097 - DNA, 258 bp, Klebsiella oxytoca
atgattctcgcaaaggtaaccggccatgtcgtcgccacgcagaaatgcgatgagctacgcggcagcaacctgctgttgatcacccgcttagatgacaaacagcagccgatgaaagaccagacctgggttgccgtcgataacgtcggcgccggcatgcacgacatcgtgctggcggaagagtacttcgcgctcaataaagaccgctacaaagcgatgtcggtggtcgccattgtcgagaacgtgtttcgggacgcctaa

SEQ ID NO: 1098 - protein, 85 aa, Klebsiella oxytoca
MILAKVTGHVVATQKCDELRGSNLLLITRLDDKQQPMKDQTWVAVDNVGAGMHDIVLAEEYFALNKDRYKAMSVVAIVENVFRDA

SEQ ID NO: 1099 - DNA, 399 bp, Enterobacter cloacae
atgaaaagtttaggcgtaattgaaacgcgaggatgggtcgccgccattcaggccgtcgacgccgcctgtaaagctgcgggagtgacctgcattggctatcgcaaaccaggctccgggctggtgagcgtctgctttgaaggggagatcagcgccatccacaccgctattgaacgcggcgtggcggtggcaggcgccgagcacaccgtgaagtcgctggtgattgcccgcccggagcgctgcgtggttgaagcgttaagcaacctcaaaggcaacccgccgcgcgagcaaaaaacggccgaaccggtggttatccccgccccggaacctatcgtcccccctgccgccccgaacgaaacggaagataaacatccggcgctgaagaaagggaagaagtcatga

SEQ ID NO: 1100 - protein, 132 aa, Enterobacter cloacae
MKSLGVIETRGWVAAIQAVDAACKAAGVTCIGYRKPGSGLVSVCFEGEISAIHTAIERGVAVAGAEHTVKSLVIARPERCVVEALSNLKGNPPREQKTAEPVVIPAPEPIVPPAAPNETEDKHPALKKGKKS

SEQ ID NO: 1101 - DNA, 690 bp, Citrobacter braakii
atgattttaagcgatcccgaatggcaggcggtactgctgagcctgaaagtttcatccctggcggtggtttgcagcttaccttttgggatctttttcgcctggctgctggtgcgccgccattttcccggcaaagcgttactcgatagcattatacatttaccgctggtgctgccgccggtggtggttggctatctgttgctgatttccatggggcggcgcggctttatcggtagttggttatacgactggtttggtctgaccttcgccttcagctggcggggggcggtgctggcggcggcggtgatgtcatttccgctgatggtgcgggcgatacgcctcgcgcttgaaggggtggacgtgaagcttgaacaggcggcgcgcaccctcggggctaatcgctggcgggtatttttcaccatcacgctgccgttgaccctgccgggcattattgtcggtacggtgctggctttcgcccgttcgctgggagagtttggcgcgacgatcacctttgtctcaaacattcctggcgaaacgcgcaccattccttccgcgatgtataccctgattcaaacgcccggcagcgaaggcgccgccgcgcggttatgcatcatctctattgtcctggcgctggtatcgctgctggtgtctgaatggctggcgcgccttagccgtaagcggatgggaaaataa

SEQ ID NO: 1102 - protein, 229 aa, Citrobacter braakii
MILSDPEWQAVLLSLKVSSLAVVCSLPFGIFFAWLLVRRHFPGKALLDSIIHLPLVLPPVVVGYLLLISMGRRGFIGSWLYDWFGLTFAFSWRGAVLAAAVMSFPLMVRAIRLALEGVDVKLEQAARTLGANRWRVFFTITLPLTLPGIIVGTVLAFARSLGEFGATITFVSNIPGETRTIPSAMYTLIQTPGSEGAAARLCIISIVLALVSLLVSEWLARLSRKRMGK

SEQ ID NO: 1103 - DNA, 249 bp, Enterobacter cloacae
gtgaaaattaacattactgataatgattatcattgttgcttttatttttattttggtgctatgacgcgtatggataacactgccacagctgagaaaacgaaagacaatgctccctatccccttgccagcgatcgccaaatcagcagccggacgctgttgggtgcggaaggtcgcgtggtgatcgaacatgacggtcagcgctatctgctgcgccagacccacgccggtaagctaattttgaccaaataa

SEQ ID NO: 1104 - protein, 82 aa, Enterobacter cloacae
MKINITDNDYHCCFYFYFGAMTRMDNTATAEKTKDNAPYPLASDRQISSRTLLGAEGRVVIEHDGQRYLLRQTHAGKLILTK

SEQ ID NO: 1105 - DNA, 777 bp, Enterobacter cloacae
atggtaagtgcccagacaatttcgaccggtgcggcggtggcggtacgtcatcttcatcatgcttttacgttgggcaaacagacggtgccggtgctggacaatatcagcctgcaactgcggccaggggagagtgtcgccctgcttggcccctcaggctgtggtaaatcgacgctgctgcgcctgctggcggggctggagccactgcaaagcgggcatattgagattgacgatgcggcgatgggcgggccggggccggaacggatcctggttttccaggacccgacgctttatccgtggctgacggtgcggcagaacgtgctgctggggccgcaggcgcaggggaaaaaggggctggagccgaaggccgacgcgctgatttcgcgcatcgggctgcagtcgttcagcgaggcgtggccgcggcagctttccggcgggatggcgcagcgtgcggcgctggcgcgcgcgttgctgaatgaaccgcgtttactgttgcttgatgagccgctgggtaagctggattcgcttacccgcatcagcatgcagcgcgagctgattgcactgtggcagcagcagggttataccagcctgctggtgactcatgatattgaagaagcgttgctgctttgcgagagagtactggtgatgtcgccgcggccggggcgcattatcgctgaatttacgcttcctttggcgtttccccgccatcgcgacaatccactgttattgcagcatcggcaggatattttgcgtatcctcggccaggaagaggattggtaa

SEQ ID NO: 1106 - protein, 258 aa, Enterobacter cloacae
MVSAQTISTGAAVAVRHLHHAFTLGKQTVPVLDNISLQLRPGESVALLGPSGCGKSTLLRLLAGLEPLQSGHIEIDDAAMGGPGPERILVFQDPTLYPWLTVRQNVLLGPQAQGKKGLEPKADALISRIGLQSFSEAWPRQLSGGMAQRAALARALLNEPRLLLLDEPLGKLDSLTRISMQRELIALWQQQGYTSLLVTHDIEEALLLCERVLVMSPRPGRIIAEFTLPLAFPRHRDNPLLLQHRQDILRILGQEEDW

SEQ ID NO: 1107 - DNA, 2154 bp, Enterobacter cloacae
atgactcaaccccatgtcgcctgcaggacattgcaagggcgcgcgcttttttcgcttctttttttagcctcaccgggattaatggccgcagaaaataacgcggcaaagaatacaaaggatgttgaggacactattaccgtggtggctgacggccgccagcagaacgccaccagcggttatcagccgctgagttcgtccacggcgacattgacctcaatgccgctgctggatattccgcaggtggtgaataccgtcagcgaccgggtgctggaagatcagcacgctacctcgctggatgaagcattgtataacgtcgccaacgtagtgcagaccaataccctcggcggtacccaggatgcctttacccgccgcggcttcggcgccaatcgcgacggttctatcatgaccaacggcctgcgtaccgttttgccgcgcagctttaacgccgctaccgagcgggttgaagtcctgaagggcccggcctcgacgctgtacggtattctcgaccccggcgggctgattaacgttgtcaccaaacgccccgagcgccagttctctggttcggtttccgccacctccagcagttttggcggcggcacgggtagcttcgacgtgaccggaccgatagaaggaactcgtctggcctatcgactgatcggcgaatatcaaaatgaagattactggcgtaatttcggcaagaacaaaagcagctttatcgccccttccctgagctggtttggcgatagcgcgaccattaccgcttcgtattcacatcgcgattacagcgccccttttgaccgcggcaccattttcgacctcgataccggccacgcggtcaacgtcgatcgtaaaacccgtttcgatgaagcctttaatatcaccgatggttattccgatattgcccaactgaatgccgagtaccgtcttaacagcgcctggaccgcgcgctttgattacagttacagtcaggatcactacaacgataaccaggccagggtaatggcctatgattctgcgaccggcaacctgactcgccgggtcgacggcacgcacggctcgacgcaaaagatgcattccacccgcgccgatctacaaggcaatgtggtcatcggcggcttttataatgaactgctgaccggcgtcgcctatgagaattacgatctgctgcgtaccgatatgctgcgttgtaagaacgtgaaaggctttaatatttatcatccggtttacggcactcttgatacctgtaataccgtttccactgccgatagcgatcagcgcatcaagcaggagagctatgcgacctatctccaggacgccctgtatctgaccgacaactggattgccgtggccggcgtacgctaccagtattacacccagtacgccggtaaaggccgtccgtttaacgtcaataccgatagccgcgatgagaaatggacgccgaaggctgggctggtttacaaggtaacgccaaacgtgtcgctgtttgctaacgtcgcccagtcgtttatgccgcagtcgtcgattgccagctatatcggcgaactgccgccggaagagtccacctcttacgaagtcggcgcgaaattcgaccttttagagggtattaccgccaatatcgcgttatttgatattcataaacgtaacgtgctgtataccgaaagtatcggcgacgaaacggtggcgaagaccgcgggtaaggttcgctcgcgcggcgtggaggtggatctggcgggctcgctcaccgataacctcagcgtcatcgccagctacggctataccgatgccaaagtgctggaagatcccgattatgccggtaaaccgctaccgaacgtgccaaaacataccggttcgctgttcctgacctatgacattcataacgtctataacagcaacaccctgaccgttggcggcggcggccacgcggtcagcaaacgttccggcaccaacggcgcggattattatctgcagggctatgcggtggccgacgtcttcgcggcctatagaatgaagctgcagtatccggtaacgctacagatgaatgtgaagaacctgttcgataagacctattacacctcgtcaatcggcaccaataatctcggcaaccagattggcgacccgcgtgaagtgcagtttacggtgaaaatggatttttaa

SEQ ID NO: 1108 - protein, 717 aa, Enterobacter cloacae
MTQPHVACRTLQGRALFSLLFLASPGLMAAENNAAKNTKDVEDTITVVADGRQQNATSGYQPLSSSTATLTSMPLLDIPQVVNTVSDRVLEDQHATSLDEALYNVANVVQTNTLGGTQDAFTRRGFGANRDGSIMTNGLRTVLPRSFNAATERVEVLKGPASTLYGILDPGGLINVVTKRPERQFSGSVSATSSSFGGGTGSFDVTGPIEGTRLAYRLIGEYQNEDYWRNFGKNKSSFIAPSLSWFGDSATITASYSHRDYSAPFDRGTIFDLDTGHAVNVDRKTRFDEAFNITDGYSDIAQLNAEYRLNSAWTARFDYSYSQDHYNDNQARVMAYDSATGNLTRRVDGTHGSTQKMHSTRADLQGNVVIGGFYNELLTGVAYENYDLLRTDMLRCKNVKGFNIYHPVYGTLDTCNTVSTADSDQRIKQESYATYLQDALYLTDNWIAVAGVRYQYYTQYAGKGRPFNVNTDSRDEKWTPKAGLVYKVTPNVSLFANVAQSFMPQSSIASYIGELPPEESTSYEVGAKFDLLEGITANIALFDIHKRNVLYTESIGDETVAKTAGKVRSRGVEVDLAGSLTDNLSVIASYGYTDAKVLEDPDYAGKPLPNVPKHTGSLFLTYDIHNVYNSNTLTVGGGGHAVSKRSGTNGADYYLQGYAVADVFAAYRMKLQYPVTLQMNVKNLFDKTYYTSSIGTNNLGNQIGDPREVQFTVKMDF

SEQ ID NO: 1109 - DNA, 822 bp, Enterobacter cloacae
atgccacagcgggtaaaccctgcagaaaaggggatcgtcctggaatccctgtcggccggatatggccagacgcttatcgtcgatgacattaacctgacgatccccagcggtaaaatgacggtgcttgccggggctaacggctcaggcaaatcaacgctgttatcgaccatcgcccggatgctaaaaccgctcggcggctgcgtgcgtctggacggaaaggccatccacgacatgccgaccaaaacggtttcccgccagctggggatcctgccgcaatcgccactgacgccggaagggctcacggtgttcgaactggtatcgcgcgggcgctacccgtggcaggggctgatgcgccagtggtctgcagccgatgaacaggcggtggaagaggcgctgctattaaccggcaccgccgaattcgcccatctggcggtcgatagcctttccggcggccagcgtcagcgctgctggatagcgatggcgctggcccagcagacgaaaaccatattactggatgagccgactacctggctcgacctgcgctatcaggtcgaaattcttgaactgctgcaaagcctgacccgcgaacatggccgcacggtagtgacggtgcttcacgacctgaactttgcggtgaactatgccgacctgctggtatttctcaaaaaggggcggatagccgggaccatttcagaacaggaaatctgcagccccgaactgattaaaaacgtctttgatgttgatgtgcagatgtcaatcaatccgcaaaccggcaaacctttctttatgccgtttcgcgcaccccaggccgttgcccgatga

SEQ ID NO: 1110 - protein, 273 aa, Enterobacter cloacae
MPQRVNPAEKGIVLESLSAGYGQTLIVDDINLTIPSGKMTVLAGANGSGKSTLLSTIARMLKPLGGCVRLDGKAIHDMPTKTVSRQLGILPQSPLTPEGLTVFELVSRGRYPWQGLMRQWSAADEQAVEEALLLTGTAEFAHLAVDSLSGGQRQRCWIAMALAQQTKTILLDEPTTWLDLRYQVEILELLQSLTREHGRTVVTVLHDLNFAVNYADLLVFLKKGRIAGTISEQEICSPELIKNVFDVDVQMSINPQTGKPFFMPFRAPQAVAR

SEQ ID NO: 1111 - DNA, 747 bp, Salmonella enterica
atgaatttccagaataaagttgctgtcatcacaggaagcacgacagggataggtgaggcagtcgcagagcaattacaccaacatggtgctaaggtcgttattgtctcccgctcgccagagcaggccatccaaaaagcgaaacaattatcttcacaggggcaacaggcgctggggatcggatgcgatgtgtcgcaacctgaacaagtacagaaaatgattgctgaagtgatcaaacatttcggcagacttgattatgctgtaaataatgcgggcataacaggtgagcatggtaaaaatataacagaacagacggttgaaaactgggacaaagttattgccacttcattgagcggcgttttttactgcctaaaatacgaaatacctgcaatgatgaagtttggcggctctatcgttaatttatctgcagtcaatggtctggttggcattccaggattagcgccctacaccgtggctaaacacggtatcatcggtttgacccaagccgcagcattagagtttgcaacgcaaggcattcgaatcaatgccgttgctccgggctacgtccaaacgccacgaatgagtgaattccctgacaatatcgtatgtagtttcgccaatagccacccaatgaagaggatggcaaaaatgcgagaaatagcagacttcatactgtttttgctgtcagaaaatgcggcgttctgtaccggcggcgtttatcccatcgatggtggttatttagctgagtga

SEQ ID NO: 1112 - protein, 248 aa, Salmonella enterica
MNFQNKVAVITGSTTGIGEAVAEQLHQHGAKVVIVSRSPEQAIQKAKQLSSQGQQALGIGCDVSQPEQVQKMIAEVIKHFGRLDYAVNNAGITGEHGKNITEQTVENWDKVIATSLSGVFYCLKYEIPAMMKFGGSIVNLSAVNGLVGIPGLAPYTVAKHGIIGLTQAAALEFATQGIRINAVAPGYVQTPRMSEFPDNIVCSFANSHPMKRMAKMREIADFILFLLSENAAFCTGGVYPIDGGYLAE

SEQ ID NO: 1113 - DNA, 900 bp, Enterobacter cloacae
atggcaagacgcaacctcaacgatttactctctttcgtcaccgtggcgcgggaaggcagcttcacgcgtgccgccgcgcagcttggcctgacccagcctgcgctgagccaggcgatttccgggttggaagagcgaatgcaaatccgcctgctgacgcggaccacccgcagtgtgtccccgacggcggccggggaacgcctgttgcaatcggtgggccatcgtattgatgagatagaggctgagctggacatgctgactgaactgcgggacaagcctgcaggaatcgtccgcatcacctgcgggccgaacgtgctgaaaacgactctgctgcccaagctggcgccgctgctccgcgaatatccggatattcatattgagttcgatgctaatcacggattccgggatatcgtggcggatcggtttgatgcgggcgtgcggcttggcgatacgattgataaagatatgatagcgatgccaatcggcccgaaactgcgcatggcagcagccgcctcgccagattatttcgtacgatacccggtgccgaaaacgcctcatgatctgacgcagcatcagtgtattaatatgcgcatggtccgctccggcgggatttatgtctgggaattcgatcacgagggaggagagttgaaggtccgggttaatggacagttgacgtttaacacgtcggatcatgttgtcgacgccgccctggccgggttaggcatcgcctttttacctgaagaggaattcggctcacacatcagagaaggtcgtctcgtacgcgtgcttgagtcctggtgtcatccttttccgggctactatctttattatcccagccgcaaacagccttccccagccttctcactcgttgttgatgcgctgcgcatgaacgggaaactttaa

SEQ ID NO: 1114 - protein, 299 aa, Enterobacter cloacae
MARRNLNDLLSFVTVAREGSFTRAAAQLGLTQPALSQAISGLEERMQIRLLTRTTRSVSPTAAGERLLQSVGHRIDEIEAELDMLTELRDKPAGIVRITCGPNVLKTTLLPKLAPLLREYPDIHIEFDANHGFRDIVADRFDAGVRLGDTIDKDMIAMPIGPKLRMAAAASPDYFVRYPVPKTPHDLTQHQCINMRMVRSGGIYVWEFDHEGGELKVRVNGQLTFNTSDHVVDAALAGLGIAFLPEEEFGSHIREGRLVRVLESWCHPFPGYYLYYPSRKQPSPAFSLVVDALRMNGKL

SEQ ID NO: 1115 - DNA, 1230 bp, Enterobacter cloacae
atgcgtaatcagaaaactgaaaccaaaaaccagaacggagcaagtgaaaaacaacaggcgcactggggcggcgtgtttgctatgacgctgtgtgtcttcgccctaatcgcctccgagtttatgccggtcagccttctgacatcgatggcgcactccctaaacgtcaccgaaggcatggccgggcaggggatcgctatttccggcgcgtttgcggtggtgaccagcctgtttatttcccgactggcaggcacgcttaaccggaaaaagctgctgcttggcctgacgtgcatcatggcactttcggggggcgtcattgcgatggcacctaattacctgacctatatgaccggccgggccctgattggcatcgtggtcggcgggttctggtcgatgtcggcggcgacagcgatgcgtctggtgccggtgcaccgtgttccgctggccctggccatttttaacagcggcaacgcgctggcaaccgttgtggccgcgcctctgggcagctggctgggttccgtcatcggctggcggggggcctttttgtgcctgttacccgtcgccatcgtcgcgtttatctggcaactgcttagcctgccctcgatgccggttacccgccagccagcgggggccggcaacgtctttgcactgttacgccgtcgggtggtcatgctgggcatgctgggggtggggatcttctttatggggcagttcacgctctttacctatatccggcctttccttgagacggtcacgaaggtggacgcctcagcggtgactctcatcctgctggtcatcgggagcgcgggtttcatcggcaccacgctgattggccgggtactgaagcgcggattctacccgacgctaatggctattcctgtgctgatggcgatcgtcgcgctggccctgatcgcgtttggcagccaggcggccatcgtgacggccttgctcgggctgtgggggtttatttcaaccgccgcgcccgtgggatggtgggcatgggttccacgcacgttcccgcagaatgccgaagcgggcggcgggctgatggtggcgatggtgcagttgtccatagcgctgggatccaccgtggggggcgtgctgttcgaccatcatggctaccagagcaccttcctggccagcgccgcgatgttgattatcgcaaccgtactgattttcctgacctcacgtgcagacgcgtctgccgagggtctttcatcacactcgtcctga

SEQ ID NO: 1116 - protein, 409 aa, Enterobacter cloacae
MRNQKTETKNQNGASEKQQAHWGGVFAMTLCVFALIASEFMPVSLLTSMAHSLNVTEGMAGQGIAISGAFAVVTSLFISRLAGTLNRKKLLLGLTCIMALSGGVIAMAPNYLTYMTGRALIGIVVGGFWSMSAATAMRLVPVHRVPLALAIFNSGNALATVVAAPLGSWLGSVIGWRGAFLCLLPVAIVAFIWQLLSLPSMPVTRQPAGAGNVFALLRRRVVMLGMLGVGIFFMGQFTLFTYIRPFLETVTKVDASAVTLILLVIGSAGFIGTTLIGRVLKRGFYPTLMAIPVLMAIVALALIAFGSQAAIVTALLGLWGFISTAAPVGWWAWVPRTFPQNAEAGGGLMVAMVQLSIALGSTVGGVLFDHHGYQSTFLASAAMLIIATVLIFLTSRADASAEGLSSHSS

SEQ ID NO: 1117 - DNA, 1029 bp, Citrobacter koseri
atgaataaatttgcgttagccctgggaatgttcattagcgcatttgccgcctcggcggcggatatgtccagaggcgctgataacttttataaaagcgaaaaggtgacgcagcagaaagtcacctttaaaaatcagtatcaaatgaacgtggtcggcaatctgtttatcccgaaaacgatgaatcagaacgccaaaaacccggcgatcgtcgttggccatccaatgggcgcggtcaaggaacaaagcgcaaacctgtatgcgcagaagctggcggagcaggggtttgttacgctggcgatcgatctctcgttctggggggaaagcgaaggcaagccggggcacctgatttcaccagaaatctacgcggatgatttcagcgcggcggtggattacctcagtacacaatcgtttattgatccagataatatcggcgtgctgggcatctgcggcagcggaagttttgtcatcagcgccgcgaaaattgacccgcgtatgaaagctatcgccaccgtcagcatgtatgacatgggcgccgcgtttcgtaacggccttaaccactcccagacgctggaacagcgtaaggcctttatccagtcggccattgagcagcggtttgccgaattcaaaggaggagagaaaacttatattccgggcactgtgaataagctggacgcttccacgccggaaattcagcgcgagttctttgatttctatcgcaccgaacgcggcggttataccccgcagggcgagaaagaggaactgacgacaaaaccaatgctgagcagtatcggtaagtttatgaacttctatccatttaacgatattgaaaccatttcgccgcgtccgatgctctttattaccggtgaccaggcccattcaaaagagttcagcgaggacgcctttaaacgcgccggtcagcctaaagagctgtatgtcgttccgggggcagggcacgtcgatctgtatgaccgcacggatgtgatccccttcgacaagctgacggactttttccgcaacaacctgaaataa

SEQ ID NO: 1118 - protein, 342 aa, Citrobacter koseri
MNKFALALGMFISAFAASAADMSRGADNFYKSEKVTQQKVTFKNQYQMNVVGNLFIPKTMNQNAKNPAIVVGHPMGAVKEQSANLYAQKLAEQGFVTLAIDLSFWGESEGKPGHLISPEIYADDFSAAVDYLSTQSFIDPDNIGVLGICGSGSFVISAAKIDPRMKAIATVSMYDMGAAFRNGLNHSQTLEQRKAFIQSAIEQRFAEFKGGEKTYIPGTVNKLDASTPEIQREFFDFYRTERGGYTPQGEKEELTTKPMLSSIGKFMNFYPFNDIETISPRPMLFITGDQAHSKEFSEDAFKRAGQPKELYVVPGAGHVDLYDRTDVIPFDKLTDFFRNNLK

SEQ ID NO: 1119 - DNA, 714 bp, Enterobacter cloacae
atgttatttgcatggataaccgatcctaacgcctggctggcgctcggcacgctgacgctgctggagatcgttctcgggatcgataatattatttttctctctctggttgtcgctaagttgcccaccgcccaacgcgcccatgcgcggcgtatcgggttaatgggagccatgctgatgcgtctcggcctgctggcgtctatcgcctgggtcgttaagctcaccaatccactcttcaccgtattcagtcaggagatctcatttcgcgacctgatcctgctgctcggtggcctgttcctgatctggaaagcgagtaaagagatccacgaatcgattgaaggcgaggaagaaggtcttaaaagcaacgtccactccttctttggcgccatcgtgcagatcatgctgctggatatcatcttcagccttgattcagtcatcaccgccgtcggcctctccgatcatctgttcattatgatggccgcggtggtgattgcggttggggtgatgatgtttgccgcacgtccgatcggcgacttcgttgaccgtcacccgtcggtcaaaatgttggcgttgtcgtttctgatcctggtcggtttcaccctgatgctggagagcttcgatgtgcatgtgccgaaaggttacatctacttcgcgatgttcttctccattgcggtcgaaaccctcaacctgatgcgcaataagaaaaacccgctgtaa

SEQ ID NO: 1120 - protein, 237 aa, Enterobacter cloacae
MLFAWITDPNAWLALGTLTLLEIVLGIDNIIFLSLVVAKLPTAQRAHARRIGLMGAMLMRLGLLASIAWVVKLTNPLFTVFSQEISFRDLILLLGGLFLIWKASKEIHESIEGEEEGLKSNVHSFFGAIVQIMLLDIIFSLDSVITAVGLSDHLFIMMAAVVIAVGVMMFAARPIGDFVDRHPSVKMLALSFLILVGFTLMLESFDVHVPKGYIYFAMFFSIAVETLNLMRNKKNPL

SEQ ID NO: 1121 - DNA, 1242 bp, Escherichia coli
atgatgaagatgcatcactctcacagctaccccttactcagtgccttactgtttttcttttttgttacctggtcttcttccggctcgctgctttccatctggctacatcaggaagtggggctgaaagccggggataccggcattatctacgcggtgctgtcggtctcggcgctattcgcccagatttgctacggctttatccaggataaactggggctgcgcaaaaatttactctggtatatcaccgtcttactgatcctttccggcccggcctatctgctgtttggctatctgctgaaaatcaacgtgctgctcggcagtatttttggcgggatctatatcggcctgacctttaacggcggcattggcgtgctggagtcctataccgagcgcgtggcgcggcaaagccagtttgaattcggcaaagcgcggatgtggggatcgctgggctgggcggtggcgacctttttcgccgggctgctgttcaacattaacccacaactgaacttcgccgtcgccagctgttctggtctggttttcttcatgctgctggcgcggcttaaggtctcttcagcgccgcacgccatgcaggaggcggtcagtggcggtaaagtcacgctagaagacgcgctgcgcctgctgacgctgccgcgcttttgggcgctggtgtttttcgtcgttggcacctgtatttacggcgtttacgaccagcagttcccggtctacttctcctcgcagttcgccacgttgcatgaagggaacgccatgtatggctatctcaactccttccaggtgttcctcgaagcggcgggaatgttctgcgccccgtggctggtcaatcgcatcggcgcgaaaaacggcctgatcttcgccggcatggtgatggcgatgcgcatggtggcctccgggctggtggaaggcccggttctgatctcgattacgaaactgctgcacgccgtggaattgccggtgctgctggtgtccatcttcaaatacaacagcctgaactttgataaacgcctttcttccaccctgtacctggttggtttcgcctgcaccagttcggtcatcgccaccgtactgtcgccgctggcgggctatagctacgaaaaatacggcttcgccgactcctatttgatcatgggacttctggtgttctgcaccaccttcatctccatcttcctgctgcgatccaataagccctcttcggattcgctcatgtcgcagccatccactatctga

SEQ ID NO: 1122 - protein, 413 aa, Escherichia coli
MMKMHHSHSYPLLSALLFFFFVTWSSSGSLLSIWLHQEVGLKAGDTGIIYAVLSVSALFAQICYGFIQDKLGLRKNLLWYITVLLILSGPAYLLFGYLLKINVLLGSIFGGIYIGLTFNGGIGVLESYTERVARQSQFEFGKARMWGSLGWAVATFFAGLLFNINPQLNFAVASCSGLVFFMLLARLKVSSAPHAMQEAVSGGKVTLEDALRLLTLPRFWALVFFVVGTCIYGVYDQQFPVYFSSQFATLHEGNAMYGYLNSFQVFLEAAGMFCAPWLVNRIGAKNGLIFAGMVMAMRMVASGLVEGPVLISITKLLHAVELPVLLVSIFKYNSLNFDKRLSSTLYLVGFACTSSVIATVLSPLAGYSYEKYGFADSYLIMGLLVFCTTFISIFLLRSNKPSSDSLMSQPSTI

SEQ ID NO: 1123 - DNA, 1107 bp, Enterobacter cloacae
atgaacgaattcttacctttacttcagcagggcaatgcctggttctttatccccagcgccattctgttaggcgcgctacatggcctggaaccgggccattcaaagaccatgatggcggcgttcatcatcgccattaaaggcacggtacgtcaggcggtgatgctgggcctcgccgcgaccctttcgcataccgccatcgtctggctgatcgcctttggcggcatgtattttagccagaaatttaccgccgaagcggctgaaccctggctacagctggtttccgcgttcatcattctcggtaccgcaatatggatgttctggcgcacctggcgcggtgaacgtaactggctgcaggccatgcaggatcgggatgcgcatcatcatgatgatgaaacgcaaatcgtcgacaccggccacggtcaaatcgccctttccatcttcgaagaaggagaaccgccgcgctggcgcattcgcacgctaagtggcaaccaatgggccgctggcgatgtctcactggcgacacggcgcagcgggagcagcttcgcgcagatgttctcttttgttgataaaggcgattatttagaatccgcgcagaccatcccggaaccgcatgactttaacgtacgcctgacgctcggccaccagcgccatacccacgattatgatctggcgtttcatgaacatcatcatcatgaactggacggccttgaggaaggaagtcaggcctatcaggacgcccacgagctggcccatgcgaacgatattcaacgtcgattcgacggccgggaggtcaccaactggcagatcttactgttcggcctgaccggcggattgattccctgcccggcggcgatcaccgtactgcttatctgcatccagctcaaagccctgaccttaggtgcgacgctggtcctctctttcagcatcggcctcgcgctgacactggtcaccgtcggcgttggcgcggcggtaagcgttcgccaggtggccaaacgctggagtggttttaacattctcgcccgtcgggccccctacttttccagcgtgctaatcggcgcggtggggatctatatggcgatccacggctatctcggcgtgagaggttaa

SEQ ID NO: 1124 - protein, 368 aa, Enterobacter cloacae
MNEFLPLLQQGNAWFFIPSAILLGALHGLEPGHSKTMMAAFIIAIKGTVRQAVMLGLAATLSHTAIVWLIAFGGMYFSQKFTAEAAEPWLQLVSAFIILGTAIWMFWRTWRGERNWLQAMQDRDAHHHDDETQIVDTGHGQIALSIFEEGEPPRWRIRTLSGNQWAAGDVSLATRRSGSSFAQMFSFVDKGDYLESAQTIPEPHDFNVRLTLGHQRHTHDYDLAFHEHHHHELDGLEEGSQAYQDAHELAHANDIQRRFDGREVTNWQILLFGLTGGLIPCPAAITVLLICIQLKALTLGATLVLSFSIGLALTLVTVGVGAAVSVRQVAKRWSGFNILARRAPYFSSVLIGAVGIYMAIHGYLGVRG

SEQ ID NO: 1125 - DNA, 885 bp, Enterobacter cloacae
atgtttaccggattgtgtgcttttccgctgacgccactgcgcaataatgaggtggatagccgcgcgctaataaaaatcatcgatcgtctggtctcggcgcgagttgattcgctgggcattctgggctcaaccggcagctacgcctatttgagccgcgagcaacgcaaaatggtggtcctggcggcaaaacaacatgcgcaaggggtcccgatgatggtcgggataggcgcgatggcgacggatatgattctacgtcttgctgaggatgctcagcaggcgggtgcggatgctgtgctgctaccggtgctgaactaccagcctctgacggatgatgaggtgtttacactgttccagacggttaaccgccatgtgtcggtacctatttgtatctatgataacccgcgcaccacccacagagccttttctgatgcgcttgttaagcgtattgcttcgttatccaatatcgcatcaatcaagatccccggtttgccggccgaccaggctggcgtcagagtggcgacgcttcgtcagcgattgccgcagcgagtgagtattggcgtcagcggcgacgcttttgccgcggcagggttaaacggcggctgtaatctgtggtattccgtttgcgccggtctgttcccgcaaattgcccaaaatattaccgcagcagcgttaagtggcgagcggcagcaggcatcggcactaagcgaacggctggagccattatgggcattgttcagacagcacggtagtctcaaagtgattgccgctgccgcctctattcttgaactagccgaagtagagtgtttaccgcgaccgttggccccgctctccgcggaggccattaacgatgtcaaatcggtcatggataagctggatctacgctga

SEQ ID NO: 1126 - protein, 294 aa, Enterobacter cloacae
MFTGLCAFPLTPLRNNEVDSRALIKIIDRLVSARVDSLGILGSTGSYAYLSREQRKMVVLAAKQHAQGVPMMVGIGAMATDMILRLAEDAQQAGADAVLLPVLNYQPLTDDEVFTLFQTVNRHVSVPICIYDNPRTTHRAFSDALVKRIASLSNIASIKIPGLPADQAGVRVATLRQRLPQRVSIGVSGDAFAAAGLNGGCNLWYSVCAGLFPQIAQNITAAALSGERQQASALSERLEPLWALFRQHGSLKVIAAAASILELAEVECLPRPLAPLSAEAINDVKSVMDKLDLR

SEQ ID NO: 1127 - DNA, 1131 bp, Enterobacter cloacae
atgttccagttatctgtacaggatatccatcccggccagcaggccgcgaataaagaagaggcaatacgtcagattgctggcgcgctggttagcgcgggtaatgtggctgacggctacgttaacggtatgcttgcccgcgagcagcagacctccactttcctcggcaatggcatcgctattccgcacggcaccaccgatacccgcgaccaggttctgaaaacgggcgtacaggtgtatcagttcccgcagggcgtgacctggggagaaggacaaaccgcttatgtggcgatcggtattgccgccagctccgacgagcacctcggtctgctgcgtcagttgacgcacgtcctgagcgacgactcggtggctgaacagttgagaaccgtcaccaccgcagaagaactgcgcgctctgctgatgggcgaaaagcaaagcgaagcgctgaagctcgacaacgaaacgttgagcctcgacgtggtcgccaacgatctgctgacgctgcaggcgctgaacgccgcgcggctgaaagaggcgggggcggtaaacgccgatttcgtcagccgcactattaacgatgtgccgcttaacctgggccaggggatctggttgaacgactgtgcggaaggcaacctgcgcagcgctatcgccgtgagtcgcgccgccaatgcgtttaccgctgacgggcagccggtggcgctgctgatcaccgtcgcgatggccgatgagcagccgaccgcggtgcttaatcgcctgagcaatctgcttattgataaaaaagcggagcatctgctgaaagccgacgccgccacgctgctggcgctgctgaccagcgacgacgccattgctgaagacgtgctgaacgccgagtttgtggtacgcaacgagcacgggctgcacgcacgtccgggcacgatgctggttaatacgattaaacaattctccagcgacattaccgttaccaacctcgatggttccggcaagccggccaatggccgcagcctgatgaaggtcgtggcgctgggtgtgaaaaaaggtcaccgtctgcgttttaccgcgcagggtgaagatgcgcaacaagcgctggatgcgattggcgaagcgatcgccgcaggccttggggagggcgcataa

SEQ ID NO: 1128 - protein, 376 aa, Enterobacter cloacae
MFQLSVQDIHPGQQAANKEEAIRQIAGALVSAGNVADGYVNGMLAREQQTSTFLGNGIAIPHGTTDTRDQVLKTGVQVYQFPQGVTWGEGQTAYVAIGIAASSDEHLGLLRQLTHVLSDDSVAEQLRTVTTAEELRALLMGEKQSEALKLDNETLSLDVVANDLLTLQALNAARLKEAGAVNADFVSRTINDVPLNLGQGIWLNDCAEGNLRSAIAVSRAANAFTADGQPVALLITVAMADEQPTAVLNRLSNLLIDKKAEHLLKADAATLLALLTSDDAIAEDVLNAEFVVRNEHGLHARPGTMLVNTIKQFSSDITVTNLDGSGKPANGRSLMKVVALGVKKGHRLRFTAQGEDAQQALDAIGEAIAAGLGEGA

SEQ ID NO: 1129 - DNA, 465 bp, Enterobacter cloacae
atgaaatttaaccgcaagatggctggcgtgctggccgtatctgttctgctggcggccctcgccggctgcgataataaaaaagaagagagtaaaacctttgcgctgaataccaacggcgtcgaactcagctttacctaccactatgacggcgacaaagtattgcgtcaggatgccgacaacaccattccctataaatcgatcggcgccgaaaataaagaacaggcgcgggccattattgagccgattagcagcgtgtatcgtaatctacagggcgtagaacagaccatcgactataaagattcctatgcgcttgagcatctgaccgtggattttagcaaagcgaaaatcagcgagctgtgcaaactgccgggctcgatgttcaccgactgctcacagcagtttgtttcactatcggtgtcaactaaattgctggaatcgcagggttttaaagaggtgaagaagtaa

SEQ ID NO: 1130 - protein, 154 aa, Enterobacter cloacae
MKFNRKMAGVLAVSVLLAALAGCDNKKEESKTFALNTNGVELSFTYHYDGDKVLRQDADNTIPYKSIGAENKEQARAIIEPISSVYRNLQGVEQTIDYKDSYALEHLTVDFSKAKISELCKLPGSMFTDCSQQFVSLSVSTKLLESQGFKEVKK

SEQ ID NO: 1131 - DNA, 387 bp, Enterobacter cloacae
atgcgtaaaaaactgttagcgatgctggccgtctctgcttttgcgctcggttcggcatcggcgttcgccgaccttggcgaagacatggacacccttgcggaaaacctgcaggtggtacaaaaaacctctgacattggcgagctgaaagcggcgctgaataagatgcgcaccgctgcggttgacgcgcagaaagagacgccgccaaaactggaaggcaaagcggccgatagcccggagatgaaagatttccgccacggtctggaaacgctggtcggccagatcgacggcgcgctgaagttagctgacgctggtaagctgaaagaggcgcaggctgccgcggaggacttcaaaactacccgcaatacttaccataagaagtatcgctaa

SEQ ID NO: 1132 - protein, 128 aa, Enterobacter cloacae
MRKKLLAMLAVSAFALGSASAFADLGEDMDTLAENLQVVQKTSDIGELKAALNKMRTAAVDAQKETPPKLEGKAADSPEMKDFRHGLETLVGQIDGALKLADAGKLKEAQAAAEDFKTTRNTYHKKYR

SEQ ID NO: 1133 - DNA, 1014 bp, Enterobacter cloacae
atgtcactcaaattaggtgtcatcggcgcaggcgccatcggtaaagaacatatccgtcgctgcacccaggtcttacagggggcgaccgtggtcgccgtttccgatatcaacgccgaaaacgcccgtgcggcagtagcgctgccgggcgtgcaggcggaagtctacgccgacggtcatgatgtgattaaagccagcgacgttgacgccgtgctggtgacctcctgggatccaacccatgaagagtacaccctggcggctattgaggccggtaagcccgtcttttgcgaaaagccgttggcgatgagcgcggaaggctgccgccgcatcgttgatgctgaaatgaaagccgggcgtcgcctggtgcaggtcggctttatgcgcccgtacgatgaaggctatctggcgctgaagaaagtcattgatgacggcgatatcggcgcgccgctgatgctgcgctgcgcccaccgcaaccagtcggtcggcgagaactacaccaccgatatggcgatcaccaacaccctgatccacgagctggacgtgctgcgctggctgctaaatgacgactaccgctccgtacaggtacgcttcccgcgctcgacctcccatacccatgcgcggctgaaagaccctcagatagtctcgttcgaaacgaaaaagggcaccctgatcgacgtcgaagtcttcgtaaattgccagtacggctacgacattcagtgtgaggtggttggcgaaacgggcattgcgcgcctgccggaaccgtcggcggtggagatgcgtaaagccgccagcctgtcgacagccatcctcaccgactggaaagaccgtttcatcaaagcctacgacgtcgaactgcaggcatttatcaatgatgtgaaagccggcaagctgcagggcccctccgcctgggacggctatgcggcatcggttgccgccgacgcctgcctgaaggcgcaggagtgcaacgaaccggtagctgtgtcgctgcctgagtgcccggcattctaccaacgctaa

SEQ ID NO: 1134 - protein, 337 aa, Enterobacter cloacae
MSLKLGVIGAGAIGKEHIRRCTQVLQGATVVAVSDINAENARAAVALPGVQAEVYADGHDVIKASDVDAVLVTSWDPTHEEYTLAAIEAGKPVFCEKPLAMSAEGCRRIVDAEMKAGRRLVQVGFMRPYDEGYLALKKVIDDGDIGAPLMLRCAHRNQSVGENYTTDMAITNTLIHELDVLRWLLNDDYRSVQVRFPRSTSHTHARLKDPQIVSFETKKGTLIDVEVFVNCQYGYDIQCEVVGETGIARLPEPSAVEMRKAASLSTAILTDWKDRFIKAYDVELQAFINDVKAGKLQGPSAWDGYAASVAADACLKAQECNEPVAVSLPECPAFYQR

SEQ ID NO: 1135 - DNA, 387 bp, Citrobacter amalonaticus
atggcaaaacatttgaacaggagtgaaataaaggcaattaaaaacattatactgacttgggacggtaaaatcacatggagtgatttatgtgaatcagtttataagaatctaaacagaactatcacaaggcaatctttaagtgctcatgatgaagttgttgaagcatatagaacaaagaaaaatttgtccaatttgaaaaaatctggtctaaagaaaccagctaacttaactattgcggcacaacaaataataaaccttaaagccgaaaatgaaatgttgaaaaaacagaacaatagatacaaagagcaatttagctattggcagtacaatgcttatagacacggccttactatggaacagttgaataggccatttaataaaaaataa

SEQ ID NO: 1136 - protein, 128 aa, Citrobacter amalonaticus
MAKHLNRSEIKAIKNIILTWDGKITWSDLCESVYKNLNRTITRQSLSAHDEVVEAYRTKKNLSNLKKSGLKKPANLTIAAQQIINLKAENEMLKKQNNRYKEQFSYWQYNAYRHGLTMEQLNRPFNKK

SEQ ID NO: 1137 - DNA, 426 bp, Citrobacter amalonaticus
atggacaagaacattatctatccagagtttactctggaagagcaacttatcattatcgtcgataaatatatctcaaaacgataccagccaggtgataaaagtttctcatatcaactttacctaatttttgtgggataccatttaaaatatttctaccctaaaaggatttattccaaatccaatcgtaatattgataacataatgactatgtttagctcggtatacaaaagtctgacaagcaatcttctacaacgattaaataacaaggaaggagttattagggaactaaactcgcttgttaattacatagataacaatcaagaaaaagcagaggaaatctatgctactgtcagagcacaatatgaaatgaaagtaattgagaaagagttaacccatgaagttcgcgtaagaaccgtcaggttatag

SEQ ID NO: 1138 - protein, 141 aa, Citrobacter amalonaticus
MDKNIIYPEFTLEEQLIIIVDKYISKRYQPGDKSFSYQLYLIFVGYHLKYFYPKRIYSKSNRNIDNIMTMFSSVYKSLTSNLLQRLNNKEGVIRELNSLVNYIDNNQEKAEEIYATVRAQYEMKVIEKELTHEVRVRTVRL

SEQ ID NO: 1139 - DNA, 273 bp, Citrobacter rodentium
atggaaaacgaaacaataaagtgcccgttctgctttacacaaagtcctcatggtgtgcggatttgcaaaggctgtcatgcaaaggtcgcttacggtgaaagcccgctcagtgtggcattcctgtttcaattcgtggcatttggtctcgcgtggttagcattttcgtggaccggcagcactcttgtatcagtcattacgtttttcgtaagcatcattattcttatctataaaatcaaaagaatgtatgcagacagagttgtttttatacggtga

SEQ ID NO: 1140 - protein, 90 aa, Citrobacter rodentium
MENETIKCPFCFTQSPHGVRICKGCHAKVAYGESPLSVAFLFQFVAFGLAWLAFSWTGSTLVSVITFFVSIIILIYKIKRMYADRVVFIR

SEQ ID NO: 1141 - DNA, 909 bp, Klebsiella michiganensis
atgtactcattagccccttactttatccgttgctacaacaagaataatgaatcgaaaaatgttgaagaacgttacgattttttgaacagaataggccagtatgatttattctctttactcgaacaatttatgttgttgcataaagattttgaaaaaattgacgatagcaaagaaacatataagtttcatcatgtcacttcgaaacctaaagaaagattcatttcgggctggatgagtttaggccattatggtattaaaaatgatattattaatactgatgataatcaattagctttctctaaggaagaaaatcatgctgatgtcaaaaactattatttccggttttatattcctttagagtcaagaaagggtatctgtctattatatgcttataagaaggatggtataaaatcgattttccagacagagttctctaagtttttcaatgccatgacaaataaaaacattcaaataaatccacttacatatgataaagccgtgcttccctggctggaagccgaaacaaaagaaataagagttattggatttactgcccccaggtctattgaagatagtatttcatcgcttggtgacattgatagagaatatgttttaaaaccgaaaaagaatggtacctttggtaaatttaaaaagttcaaaaataaagggagtgagcaaggcaaactgatcgagatgttgagtgaagaatcaactcaaattaaagttaaagttgttatggaagggggaactaaaactttcaatgttgggaaatcagaaagaagcactatgtgccaaattgagattgatttagaaaaggttaaagtaattgcgggtaatcctgagtttgactcattggattcctgggcatctgatttaataaaagacttacgtaaacaaattggtctataa

SEQ ID NO: 1142 - protein, 302 aa, Klebsiella michiganensis
MYSLAPYFIRCYNKNNESKNVEERYDFLNRIGQYDLFSLLEQFMLLHKDFEKIDDSKETYKFHHVTSKPKERFISGWMSLGHYGIKNDIINTDDNQLAFSKEENHADVKNYYFRFYIPLESRKGICLLYAYKKDGIKSIFQTEFSKFFNAMTNKNIQINPLTYDKAVLPWLEAETKEIRVIGFTAPRSIEDSISSLGDIDREYVLKPKKNGTFGKFKKFKNKGSEQGKLIEMLSEESTQIKVKVVMEGGTKTFNVGKSERSTMCQIEIDLEKVKVIAGNPEFDSLDSWASDLIKDLRKQIGL

SEQ ID NO: 1143 - DNA, 1299 bp, Enterobacter cloacae
atgcgagtcgtcatactgggaagtggggtggttggggtagcgagcgcctggtatttaagccaggcgggacatgaggtgacggttatcgaccgtcagccagggcccgctgaagaaaccagcgccgccaacgccgggcagatctctcccggctacgcggcgccgtgggcggcgccgggcgtgccgctgaaggcgattaaatggatgttccagcgccatgcgccattggcgattggccttgacggcacgcagttccagctcaagtggatgtggcagatgttgcgtaactgcgatacccgccactatatggaaaacaaagggcgtatggtgcgcctggcggaatatagccgtgattgcctgaaagcgctgcgtgaaaccaccggtatccagtatgaaggccgccaggggggcaccctgcagcttttccgcaccgaaaaacagtatgaaaacgccactcgcgatatcgccgtgctggaagaggccggtgtgccgtatcaactgctggaagccaatcgcctgcgcgaagtcgaaccggcgctggcggaagtcagtcataaactgaccggcggcctgcgcctgccaaacgatgaaaccggcgattgccaactcttcaccacccgtctggcggcgatggccgaggcggcaggggtgactttccgctttaataccgccgtcgatgcgctgctttacgaaggcgatcaaatcgccggtgtgaaatgcggcgaggaaattattaagggcgacgcctacgtgatggcgtttggttcttactccaccgcgatgctcaaagggctggtggatatcccggtctatccgctgaaaggctactcgttgactattccgattgccgaagagagcggcgcgccggtatcgactatccttgatgagacttacaaaatcgcgattacccgtttcgataagcgtattcgcgttggcgggatggcggaaattgtcggcttcaataaagagttgctgaagccgcgccgcgagacgctggagatggtggttcgcgatctgttcccgcgcggcggctacgttgagcaggctaccttctggaccggcctgcggccgatgacgccggatggtacgccggtggttggccgtacgccgtacaaaaacctgtggctgaacaccgggcacggtacgctgggctggaccatggcctgcgggtccgggcagcttctgagcgacctgatctccgggcgtacgccggcgatcccttatgatgatctggccgtggcgcgttacagcccgggctttacgccggctcgcgctcagcatctgcacggcgtgcataactaa

SEQ ID NO: 1144 - protein, 432 aa, Enterobacter cloacae
MRVVILGSGVVGVASAWYLSQAGHEVTVIDRQPGPAEETSAANAGQISPGYAAPWAAPGVPLKAIKWMFQRHAPLAIGLDGTQFQLKWMWQMLRNCDTRHYMENKGRMVRLAEYSRDCLKALRETTGIQYEGRQGGTLQLFRTEKQYENATRDIAVLEEAGVPYQLLEANRLREVEPALAEVSHKLTGGLRLPNDETGDCQLFTTRLAAMAEAAGVTFRFNTAVDALLYEGDQIAGVKCGEEIIKGDAYVMAFGSYSTAMLKGLVDIPVYPLKGYSLTIPIAEESGAPVSTILDETYKIAITRFDKRIRVGGMAEIVGFNKELLKPRRETLEMVVRDLFPRGGYVEQATFWTGLRPMTPDGTPVVGRTPYKNLWLNTGHGTLGWTMACGSGQLLSDLISGRTPAIPYDDLAVARYSPGFTPARAQHLHGVHN

SEQ ID NO: 1145 - DNA, 798 bp, Enterobacter cloacae
atgaaaaaattatttctgggtgtcttaatggcagttactgccattaccagtccactgctgatggcgaacacgaatgataaaaatgaccagcaggaggtcatcaatatttattttgcgcgccatggtaaaacgctgcttaattcgtttgatcgcgtgcaaggttggattgattccccattgacgaaggatggggtgcaggttgctcaatatttaggtgagggactcaaagggataaaatttgatcgtttttattccagtgatgcggggcggcagcgcgaaaccatggcagtgattcttaaacaggctggcgtaacggattatcatttaacagaaatgacaggtctgcgagaggcgttttttggtggttttgaaggcggttataatgtcgatatggccaatgcaggcgcacacacgctaggaatgacggacagcaaagcgctttttaaagcgatgaaagcaggcacgctctcggtaaaggaaagccagaacgcgctggccaaatccgatcctaaacagctagcggaaaactatgagcaagtaaaagtacggacacaagctgcgctggcaactattgtagaaaatgctcaaaaagagggtgataaaaatattctggccatttcttcaggcacggcgattcagataatgatttccgatctgacggacgacccggccaaaaatctgccattgtcgaatgctgcagtggtgaaaatcacgtatcacgatggtaaatacagcgtgccagaaattggcaccatgaaatacgttgaagcaggcaaaaaatcactaaatcacaaataa

SEQ ID NO: 1146 - protein, 265 aa, Enterobacter cloacae
MKKLFLGVLMAVTAITSPLLMANTNDKNDQQEVINIYFARHGKTLLNSFDRVQGWIDSPLTKDGVQVAQYLGEGLKGIKFDRFYSSDAGRQRETMAVILKQAGVTDYHLTEMTGLREAFFGGFEGGYNVDMANAGAHTLGMTDSKALFKAMKAGTLSVKESQNALAKSDPKQLAENYEQVKVRTQAALATIVENAQKEGDKNILAISSGTAIQIMISDLTDDPAKNLPLSNAAVVKITYHDGKYSVPEIGTMKYVEAGKKSLNHK

SEQ ID NO: 1147 - DNA, 870 bp, Enterobacter cloacae
atgaacaagtcatgtattgccgctgcgctgatctctgcattcgcttttaccgcaagcgccgcaccgctaaaaattttgattgtcaacgacgatggttgcgaatccacgggcagtatttcgcttcaggaaaaactcacgcaaaaaggttttgaggtgtggatggttgctccagccaccaatcagagcggcatcggttcagccattaccttcaaaacgggtaaaatctttgatgtaaagaaggctgctgataaacgctactgcttcccgggaacacccgccgatgcggttgattttggcttacggggattactcattaataatccgccggacctggttatttctggcgtcaacgatggcccgaatacaggaatggctcaggtcaattcagggacggtaagtgcggcagccagggctgtacgttatggtttcccggcgattgcggccagcattgggtatatctttaccgaagatgaaatgaagaataaatggccaagtacacataaatattggcctgatgcggtggattatgtggttgatgttgttgaaacgctgaatcataaacaggtttctggaacacctttattgcctaaagggtcgggcttaagcattaactatccgccgctgccaaaatcaaaaattaaaggtgtgcgctatgttgaaaatgagatgttccctaccccacagattggttatgatattttgcctgatggacgcgctaaacaaaccatcaatccggaatcgttaaagacagtagagaacgataccgattccggctggcttaataaaggttatatcacctatagcctctttgatggggcaatgaacgccccgcaattccaggcgcaatatgaagaactgttgagtaaataa

SEQ ID NO: 1148 - protein, 289 aa, Enterobacter cloacae
MNKSCIAAALISAFAFTASAAPLKILIVNDDGCESTGSISLQEKLTQKGFEVWMVAPATNQSGIGSAITFKTGKIFDVKKAADKRYCFPGTPADAVDFGLRGLLINNPPDLVISGVNDGPNTGMAQVNSGTVSAAARAVRYGFPAIAASIGYIFTEDEMKNKWPSTHKYWPDAVDYVVDVVETLNHKQVSGTPLLPKGSGLSINYPPLPKSKIKGVRYVENEMFPTPQIGYDILPDGRAKQTINPESLKTVENDTDSGWLNKGYITYSLFDGAMNAPQFQAQYEELLSK

SEQ ID NO: 1149 - DNA, 885 bp, Enterobacter cloacae
atgcatcattccattcgcggcgtgttaaccgccattgttaccccctttaccgccagcggtgaacttaatttgacggcgctgtgccaacaggtagaacgacagctggccgccggtaatggcattttttgcggcggaaccaacggcgagtttttcgtcctcaatgaagcggaaaaaatagctgttgccgaaacctgcgtcgaggcggttgccggacgcgcgccggtggtggcgcatattggcgaagtgtcgacgcgggaaaccattcgtcttggccagcagatagcaaagtcaggcgtcgacgcggtgtccgtcatcaccccgtggttcgtgccgctgaaacaagatgagctggtaagccactacacggcgatcgccgatgcgctgagcgtaccggtatttctgtataacatcccggcgcgcaccggtaacaccattgaaccgcaaaccgcacgtcagctggctgcgcatggcaacatcattggcatcaaagatagcgccggtagttatgagagtcttaaggactttcttgatgcggtgaaagatatcgacggttttaatgttctgaacgggccggattcgttgattcatcagggtttcgttgacggttgttcagcctgcatttccggattggctaacgttgcgccacgggagattaacgcgatttggtcaaccttccaggcaggcgatattgaagcctccaggctggcgcaggaaaacgtcaccggcctgcgtaccgatctctacaaagtcgccttttcccccgccgcggtgaaaaaagcattgcagctgatgggccatgaggtcggcgatagccgctacgcggtgcagtttagcgcatctcaactgcagcaaatacgtggaatcatcgcgcagtatcttaattaa

SEQ ID NO: 1150 - protein, 294 aa, Enterobacter cloacae
MHHSIRGVLTAIVTPFTASGELNLTALCQQVERQLAAGNGIFCGGTNGEFFVLNEAEKIAVAETCVEAVAGRAPVVAHIGEVSTRETIRLGQQIAKSGVDAVSVITPWFVPLKQDELVSHYTAIADALSVPVFLYNIPARTGNTIEPQTARQLAAHGNIIGIKDSAGSYESLKDFLDAVKDIDGFNVLNGPDSLIHQGFVDGCSACISGLANVAPREINAIWSTFQAGDIEASRLAQENVTGLRTDLYKVAFSPAAVKKALQLMGHEVGDSRYAVQFSASQLQQIRGIIAQYLN

SEQ ID NO: 1151 - DNA, 1413 bp, Citrobacter freundii
atgaatcattttaccactgaagatacctttattattgttggcattgtcatcgcctatatcttatttaccacctggctgacgttccgtattagaagtaaaaactccggggattttatggagggctcgcgcgcgatgccggcctttattgtcggtatcctgctgatgtcggaatatatcggcgccaagtccactatcggaaccgcacaggccgcctttgagagcgggattgccgcctcctggtcggtgttgggcgccgccattggctttccactatttggcctgatactggttaagcgcatctataacactggcaaaattactatttccggggcgattgccgagaaatacggcaccagcaccaagaatattatttccatcattatgatttacgccctgttgctggtgaacgtcggtaactacgtcagcggcgcggcggccatttctacggtattaaaaatcaatttacccctcgcggcgtttattaccgccattgttagtactttctattttgcctttggcggtatgaaaggcgtagcctgggtcaccatgctgcacagcgcattaaaatatgccggtctactcattattatgggcttcgcgctggcaaaaaccggcggtttcacgccgatgatcgagaagatgccggattactactggacctgggatggcaattttggcgccggcacgatctgcgcctggcttatcggcaccatcggctccatcttctgtactcagtttgtcattcaggctatcagctcgacaaaaaacgtaaaatcggcgaaacgctctacctggattgcctttttcttctgcctgcctatcgccttcgcgatcgccattatcggcgtggcggcgaagtttttacacccggaaatcaacagcctgtacgccctgccggtgttcctgcaagatatgaacccgtggcttgccgggttagtgacaacgtcacttattgcttcaattttcgttagcgtcagtaccgttgccctggcgattgcctcgctggtggtaaaagatttttacgtgccgtggcgcaatccaacgccggagcaggagtttaaagccacccgttgggcctcgctgatcatcggttttctgccgcttatttttgtgctgctggtaccggaagtgctgaagctctccttctttacccgcgccatcaggctctctatcaccgtcgtcgcggtcatcgccttctatgcgccgttctttaagagcgcccgcggcgcgaacgctggccttatcggcgcctgcgtggtgacttcggcgtggtatttgctcggcgatccgttcggcatcaataacatgtacatcgcgctgatcaccccggccctgattatggttatcgaccgcctgatccccaataaagcgcaacaatcatccccggcccccattgaacaacgtggagtgtaa

SEQ ID NO: 1152 - protein, 470 aa, Citrobacter freundii
MNHFTTEDTFIIVGIVIAYILFTTWLTFRIRSKNSGDFMEGSRAMPAFIVGILLMSEYIGAKSTIGTAQAAFESGIAASWSVLGAAIGFPLFGLILVKRIYNTGKITISGAIAEKYGTSTKNIISIIMIYALLLVNVGNYVSGAAAISTVLKINLPLAAFITAIVSTFYFAFGGMKGVAWVTMLHSALKYAGLLIIMGFALAKTGGFTPMIEKMPDYYWTWDGNFGAGTICAWLIGTIGSIFCTQFVIQAISSTKNVKSAKRSTWIAFFFCLPIAFAIAIIGVAAKFLHPEINSLYALPVFLQDMNPWLAGLVTTSLIASIFVSVSTVALAIASLVVKDFYVPWRNPTPEQEFKATRWASLIIGFLPLIFVLLVPEVLKLSFFTRAIRLSITVVAVIAFYAPFFKSARGANAGLIGACVVTSAWYLLGDPFGINNMYIALITPALIMVIDRLIPNKAQQSSPAPIEQRGV

SEQ ID NO: 1153 - DNA, 1167 bp, Enterobacter cloacae
atgaccaccaccccaacttttgacggcgtaattcgccaacaccaacaggatcctcatctggcatgggcaatgttgccctccggctgcccgcaaaaccatgccgccaatcttttgccgctgcccgatggcacgctgctgtgcgtatggttcgggggttcacaggaaggaaaagcggatatttcagtctggggggcgcgtttagcgccgggcgccacaacgtggagcgaagcagtaaagttatccgacgatccgcagcgttcggaacagaacccggtgctgtttcaggctccagatggcgtgctgtggctgttatggaccgcgcaacacgccggcaatcaggacaccgctattgtgcgttatcgccagtcgcgcgatggaggaaagcactggggcgcaatcgccaccctgctcgatgaacccggcacctttattcggcaacccatcagcgtgatgcccaacggcaactggttgctgccggttttctattgtcgtacccggccgggggagaaatgggtcggtaacgatgatgtgagtgcggtaaaaatctcagccgatggcggcaagagctggcgcgacgtggcggtaccgcagagcctcggctgcgtgcatatgaatatcaccccgctggccgatggctcgctggtcgccttcttccgcagccgctgggccgatcatatctggtacagccggtcgacagattttggcgaaagctggtcagcgccgatccccaccacgctgccaaacaataactcgtccattcaggttaccacgttgagcaacggcgatctggcactggtgttcaataacatgagcgcagcaggcgccagcgagcgtcgggcatcgttatacgatgaaatagaagatgatgacggtcgtaaagagcctgaacgcactggcaaaaccgccttctggggcgcgccgcgtgcgccaatgaccgtggcgatttccgctgacggcggtaaaagctggccatggatgcgcaaccttgatgagggcgacggctactgtatgaccaacaattccgaacaaaaactgaaccgcgaattgtcctaccccagtattaaacagggtgaagacggtaatttacacattgcctatacctggtaccgacaggccatcaagtatatccgcgtatcgccgcagtgggtgaaaggagaaatcgcatga

SEQ ID NO: 1154 - protein, 388 aa, Enterobacter cloacae
MTTTPTFDGVIRQHQQDPHLAWAMLPSGCPQNHAANLLPLPDGTLLCVWFGGSQEGKADISVWGARLAPGATTWSEAVKLSDDPQRSEQNPVLFQAPDGVLWLLWTAQHAGNQDTAIVRYRQSRDGGKHWGAIATLLDEPGTFIRQPISVMPNGNWLLPVFYCRTRPGEKWVGNDDVSAVKISADGGKSWRDVAVPQSLGCVHMNITPLADGSLVAFFRSRWADHIWYSRSTDFGESWSAPIPTTLPNNNSSIQVTTLSNGDLALVFNNMSAAGASERRASLYDEIEDDDGRKEPERTGKTAFWGAPRAPMTVAISADGGKSWPWMRNLDEGDGYCMTNNSEQKLNRELSYPSIKQGEDGNLHIAYTWYRQAIKYIRVSPQWVKGEIA

SEQ ID NO: 1155 - DNA, 678 bp, Enterobacter cloacae
atgaagcaggcactggtcacaggcgccagttcggggatcggcgcggcgattgtggggcaactgctggcggagggctggcaggtgctcgggctaagccgctccgcgccgccattcgctcatgaaggcttcaggcatctggcagtcgatttgagcgaccgccaggagctggttgatgctctgtcgtcggtaccgacgccgcaggcgattatccatgccgccggtatgatggcggcggcgccgctaggagaacttgacgcactgcgtggcgagacgttatggcgtctgcatgtggatgcagcgcagaccttagccaaccgctttgcgcccgttatgagccgcggcggtcggattatccttttgggtagccgaacctctcgcggagcggcaggccgttctcagtatacggcaaccaaagcggcgctggtggcgctggcgagaagctgggcggcggaacttgccgcggcgggcattaccgttaacgtggtcgcccccggcgccaccgatacgccaatgctgcgccagccagggcgggagagttcgccgccgaagacgccgccgctcggtagattgattaagccacaggaagtggtgtcgctggtgagctggcttcttagcgaagaggccgcggccatgaccggacaagagctggtaatgtgcggcggcgcctcacttagttag

SEQ ID NO: 1156 - protein, 225 aa, Enterobacter cloacae
MKQALVTGASSGIGAAIVGQLLAEGWQVLGLSRSAPPFAHEGFRHLAVDLSDRQELVDALSSVPTPQAIIHAAGMMAAAPLGELDALRGETLWRLHVDAAQTLANRFAPVMSRGGRIILLGSRTSRGAAGRSQYTATKAALVALARSWAAELAAAGITVNVVAPGATDTPMLRQPGRESSPPKTPPLGRLIKPQEVVSLVSWLLSEEAAAMTGQELVMCGGASLS

SEQ ID NO: 1157 - DNA, 876 bp, Enterobacter cloacae
gtggcgcggctcaataaaatcgcgatatcgctctgtgcattactgtttacatctatctcgcttacgccattggcgcatgcttcagggcatacgcacgcttcggctacgccgaaggcgcacccggcgaaaggctccaccgccgagcgtaagaagaaagcaacgcaaaataaatccaaatccacggctaaaactacccgtaaaaaaacctcaagcgcgaagtcccctactcgtattaccgcagcaagccaaaccgcgcttaatcgtcaagtcgccggcgccactaaaaaatgcgtgttgcgtaaaggctataaaaagcagtgtgcgaaaacggtaaaatccagcgaagcatcgacgctggcgctgaacagcgtgaaaagcaaatgcgtggtgcgtaaaggctacaaaaaacgttgtaaacctgtcgctgatgaaccgaatctgacgattgccgatgcgcacaaagcccgagtgcaaaaagcgcaaagcactgccatgaataaactcatggatcagctaggcaaaccttatcgctggggaggctcctcaccgcgtaccggtttcgactgcagcgggctggtttattacgcctataaagatctggtaaaaattcatattccgcgcaccgctaacgaaatgtaccacctgcgcgatgcccgcccggttgaccgcgatgaactgcaaagcggcgatctggtcttcttccgcacccgcggacgcggcaccgccgaccacgtaggcgtttacgttggaaacggtaagtttatccagtcgccgcgtaccggccgtgatattcagataacctccctaagcgaagattattgggttcgtcactacgtcggcgcgcgccgcgtaatgacgccaaaaaccattcgttaa

SEQ ID NO: 1158 - protein, 291 aa, Enterobacter cloacae
MARLNKIAISLCALLFTSISLTPLAHASGHTHASATPKAHPAKGSTAERKKKATQNKSKSTAKTTRKKTSSAKSPTRITAASQTALNRQVAGATKKCVLRKGYKKQCAKTVKSSEASTLALNSVKSKCVVRKGYKKRCKPVADEPNLTIADAHKARVQKAQSTAMNKLMDQLGKPYRWGGSSPRTGFDCSGLVYYAYKDLVKIHIPRTANEMYHLRDARPVDRDELQSGDLVFFRTRGRGTADHVGVYVGNGKFIQSPRTGRDIQITSLSEDYWVRHYVGARRVMTPKTIR

SEQ ID NO: 1159 - DNA, 2223 bp, Enterobacter cloacae
atgtttaagttattttccgctttccgaaaagacaagatctgggacttcaacggcggtattcatccgccggaaatgaaaactcagtccaacggcacgccgctgcgtcaggttcctctgccgcagcgttttgtcattccgctgaagcagcatatcggtgctgaaggcgaactgtgcgtccaaccgggcgacaaagttttgcgcggtcagccgttaacccgcggctttggcaggatgctgccggttcatgccccgacttccggaacggtgacggctattgccccccattccaccgcccacccttccgcgctggcggaactcagcgttattatcgacgccgatggcgaagactgctggatcgagcgcgacggctggagcgactaccacaacaagtcgcgtgaagagctgatcgagcgtattcaccagtttggcgtcgccggactcggcggcgccggcttccccacgggaacaaaactgcgcggcggcggcgataaaatcgataccctgattatcaatgctgcagaatgcgaaccctatatcaccgcagacgatcgcctgatgcaggattgcgcggcgcaggttgttgaagggatccgcatccttgcgcatattctgcaacccaaacaggtgctgattggtatcgaagataacaaaccgcaggccatttccatgctgcgcgcggtgttatccgacgcccacggcatagcgctgcgggtgattccaaccaaatatccctccggcggtgcgaagcaacttacgcaaattctcaccggtaagcaggtgccgcatggcggccgctcctccgatattggcgtcctgatgcagaacgttggcaccgcttatgctgttaaacgcgcggtgatcgacggcgagccgttaaccgagcgcgtcgtcacgttaactggcgaagcgattagccggccgggcaacgtttgggcgcgcctgggtacgccggtgcgccatctgctgaacgatgccggtttctgcgccagcgccgagccgatggtcatcatgggcggcccgttgatgggcttcactctgccctggctcgacgttccggtcgtgaaaatcactaactgtctgctggcgccgtcggtgactgagatgggcgaaacacaggaagagcaaggctgtatccgctgtagcgcctgcgctgatgcctgcccggcagatctcctcccccagcagctgtattggttcagtaaaggccagcagcacgacaaagccactacccataacttagccgactgcatcgaatgcggcgcctgcgcctgggtctgtccgagtaatattccgctggtgcaatatttccgccaggaaaaagcggaaattgccgccatccgtcaggaagaacagcgcgcagccgaggcgaaagctcggtttgaagcgcgacaggcgcgtcttgaacgtgaaaaagcggcgcgccaggagcggcacaaaaaagcagccgtacaaccggcggcaaaagatcaggatgccattaacgccgcattagcccgcgtgcgtgaaaagcagcgtgatgcggcgcagccgattgtcattcaatccggcagcaaaccagataacagcgaagcgattgccgcccgcgaagcgcgtaaagccgaggcccgggcgcgcaaagctgaacagcaagccgctgttgaatcgacaaccgatgcaagcgatccgcgtaaagccgccgttgaggccgctatcgcccgcgccaaagcgcgtaaagccgcgcagcagggtgaaaacgccgcaccctctgctgaaagtgaaaccaccgctgaagctgcgcccgcggtcgatccgcgtaaagccgccgttgaggccgctatcgctcgcgccaaagcgcgcaaagccgcgcagcagggtgaaaacgccgctccctctgccgaaagtgaaaccaccgctgaagctgcgcccgcggtcgatccgcgcaaagccgccgttgaagccgctatcgctcgcgccaaagcgcgtaaagccgcgcagcaggttgaaaacgcagctccctctgccgaaagtgaaaccacggttgagacagcgcccgcggtcgatccgcgtaaagccgccgttgaggccgctatcgcccgcgccaaggcgcgtaaagccgcccaacaagcagaacaacaaaccgcgccggacgccgccaatgacgatccgcgtaaagcggccgtcgcggcagctatcgctcgcgttcaggcacgtaaagcaacacagcaggcagttaacgaggaataa

SEQ ID NO: 1160 - protein, 740 aa, Enterobacter cloacae
MFKLFSAFRKDKIWDFNGGIHPPEMKTQSNGTPLRQVPLPQRFVIPLKQHIGAEGELCVQPGDKVLRGQPLTRGFGRMLPVHAPTSGTVTAIAPHSTAHPSALAELSVIIDADGEDCWIERDGWSDYHNKSREELIERIHQFGVAGLGGAGFPTGTKLRGGGDKIDTLIINAAECEPYITADDRLMQDCAAQVVEGIRILAHILQPKQVLIGIEDNKPQAISMLRAVLSDAHGIALRVIPTKYPSGGAKQLTQILTGKQVPHGGRSSDIGVLMQNVGTAYAVKRAVIDGEPLTERVVTLTGEAISRPGNVWARLGTPVRHLLNDAGFCASAEPMVIMGGPLMGFTLPWLDVPVVKITNCLLAPSVTEMGETQEEQGCIRCSACADACPADLLPQQLYWFSKGQQHDKATTHNLADCIECGACAWVCPSNIPLVQYFRQEKAEIAAIRQEEQRAAEAKARFEARQARLEREKAARQERHKKAAVQPAAKDQDAINAALARVREKQRDAAQPIVIQSGSKPDNSEAIAAREARKAEARARKAEQQAAVESTTDASDPRKAAVEAAIARAKARKAAQQGENAAPSAESETTAEAAPAVDPRKAAVEAAIARAKARKAAQQGENAAPSAESETTAEAAPAVDPRKAAVEAAIARAKARKAAQQVENAAPSAESETTVETAPAVDPRKAAVEAAIARAKARKAAQQAEQQTAPDAANDDPRKAAVAAAIARVQARKATQQAVNEE

SEQ ID NO: 1161 - DNA, 921 bp, Enterobacter cloacae
atgaaagcttatgtgattaaaaaactgctttctttgccgctgatcctactgggggcatcgctgattgtctttctggcgatcaggatgctccccggtgacccggcccgcctgatggccgggccgcaggccacccaggatgatgtcagccgtatgcatacgcgcctcggtctggacgatccgctggcggtgcagtatggccatttcgttagcggaatgctgaagggggattttggcacttcgctgaagtccggtcagccggtctccgccgaaatgagcgaacgggttccttatactttaggcctggcgctgctggcgtggatgatggcggtgatcctcggtattcccatggggatgtgcgcggccatttaccgcaaccatgtagccgaccatgtgctgatgctggtagcgattgccggcgcgtcgatagccaatttctggctggcgctgatcgccatggataccttttcggtgaagctgggctggctaccgctactgggcgccgaaggctggaaaagctatatcctgccgtcggtttgcctggggattttcccgatggcggtgatgtcgcggatgacccgctccagtatggttgatgtgttaggcgaggattacatccgcaccgcgagggccaaagggctggcaccgtttcaggtctatttcaagcatgcgctgcgcaatgcgctgatccccatcgtgacgattatcgcactgaacttcggcagcctgatcggcggcgcggtggtgaccgagtcggtgtttaactggccggggataggccgctatctggtggattcggtacgctatcgcgattatcccgtcattcagggagtgacgatgattacggtggcaagcgtggtggtgatgaacctggttggcgagatgattatcgccagaatcaacccgaaaataaggtttgactga

SEQ ID NO: 1162 - protein, 306 aa, Enterobacter cloacae
MKAYVIKKLLSLPLILLGASLIVFLAIRMLPGDPARLMAGPQATQDDVSRMHTRLGLDDPLAVQYGHFVSGMLKGDFGTSLKSGQPVSAEMSERVPYTLGLALLAWMMAVILGIPMGMCAAIYRNHVADHVLMLVAIAGASIANFWLALIAMDTFSVKLGWLPLLGAEGWKSYILPSVCLGIFPMAVMSRMTRSSMVDVLGEDYIRTARAKGLAPFQVYFKHALRNALIPIVTIIALNFGSLIGGAVVTESVFNWPGIGRYLVDSVRYRDYPVIQGVTMITVASVVVMNLVGEMIIARINPKIRFD

SEQ ID NO: 1163 - DNA, 567 bp, Enterobacter ludwigii
atgggcaagaaaattttaatgctggtgggtgattacgctgaagattacgagaccatggtaccgtttcaggcattacagatgatcggccatcaggttgatgccgtctgtccggataagagcaaaggcgactatattatgacggcgattcatgattttgacggtgctcagacctacagcgaaaaacccggtcaccgcttcgtactgaacgccgattttgccagtgccagagaacaggactacgacgccctgctgatccccggcggccgcgcgccagaatatctgcgcctgaatgagcaggtgattaaactggtccaggctttcgacgccgcgcataaaccgattgccgccgtttgccatggcccgcagcttctggccgccgcgggtattcttaaaggccgtacctgtagcgcttacccggcttgcgctcccgaagtgcgactcagcggcgggcattatgcggatattggcatcgaccaggcgcacgttgacggcaatctggtcaccgcccccgcctggcccgcccatccgcaatggcttgctaaatttgccgaggtgctgcagcggtaa

SEQ ID NO: 1164 - protein, 188 aa, Enterobacter ludwigii
MGKKILMLVGDYAEDYETMVPFQALQMIGHQVDAVCPDKSKGDYIMTAIHDFDGAQTYSEKPGHRFVLNADFASAREQDYDALLIPGGRAPEYLRLNEQVIKLVQAFDAAHKPIAAVCHGPQLLAAAGILKGRTCSAYPACAPEVRLSGGHYADIGIDQAHVDGNLVTAPAWPAHPQWLAKFAEVLQR

SEQ ID NO: 1165 - DNA, 372 bp, Enterobacter cloacae
gtgtttagtggttttgtggtgttttttcgcagcctgagctttctgcgctactggtttagcggcagttttgtggtgctttttggcagcctgggctttctgtgcagccggtttagtggcggctttgtggtgttttttcgcagcctgagctttttgctctacagcgggtttcgccgcggcttttttgtgtttcttggcagcctgggctttctgttctgcagccggtttggcggcagctttgtgatgttttttatggtgagttgtcttggcagtggtgctgtgagttgcagcagcaggtgcctgagtggtgcttgctgcatcagcagcgaaagcagcggaagacagacccatagcagcggcaacgaccagagctaa

SEQ ID NO: 1166 - protein, 123 aa, Enterobacter cloacae
MFSGFVVFFRSLSFLRYWFSGSFVVLFGSLGFLCSRFSGGFVVFFRSLSFLLYSGFRRGFFVFLGSLGFLFCSRFGGSFVMFFMVSCLGSGAVSCSSRCLSGACCISSESSGRQTHSSGNDQS

SEQ ID NO: 1167 - DNA, 687 bp, Enterobacter cloacae
atgattgataaaagcgtgtcgacgctgagtgaggccattgccgggatccacgacggcgcgaccatcatgattggcgggtttggccccgccgggcagccgacgtacctgattgatgctctgattgaacagggcgcccgcgacctaaccattattaataacaacgcgggcaatggcgaagtggggctggcggcgctgctcaaagccggacgggtgcgcaaaatgatctgctcattcccgcgtcaggtggattcacaaattttcgatgacctctatcgccgcggcaaggttgagctggaactggtgccgcagggcaatctggcggcgcggatccaggccgctggcgcggggctcggcgcggtctttaccccaaccggctacggcacgccgctggcggaaggcaaagaaacccgggaaatagatggccgccattatgtgcttgagtatccgattaaagctgacttcgccttgattaaggcccaccagggagaccgctggggcaacctggtctaccgtaaagcggcgcgcaacttcggcccgatcatggcgaccgccgccaaaaccaccattgttgaagtctcgcagctggtcgcccttggcgaactcgacccggaaaacatcatcaccccggggattttcgtccagcgtgtattctcgctggaaaatctgtccgtcgcgcaaagcgcctga

SEQ ID NO: 1168 - protein, 228 aa, Enterobacter cloacae
MIDKSVSTLSEAIAGIHDGATIMIGGFGPAGQPTYLIDALIEQGARDLTIINNNAGNGEVGLAALLKAGRVRKMICSFPRQVDSQIFDDLYRRGKVELELVPQGNLAARIQAAGAGLGAVFTPTGYGTPLAEGKETREIDGRHYVLEYPIKADFALIKAHQGDRWGNLVYRKAARNFGPIMATAAKTTIVEVSQLVALGELDPENIITPGIFVQRVFSLENLSVAQSA

SEQ ID NO: 1169 - DNA, 492 bp, Enterobacter cloacae
atgtcaaattatcgccgtagttatatccccggcggctgctggttcttcaccgtaaacctgcaaaatcgccacagcgatctgctgacacgacatattgatcatcttcgtgccgcgatagcctgtgctaaacgtaaaagacctttccagattaacagttgggttgtgttacctgaacatattcactgtatctggacgttgccggaaggcgattctgattattctggtcgttggcgggaaattaaaaagtcttttacgcgtgcgttagcgcaaaaccagatctggcagccgcgtttttgggaacatgccatccgtaatgatgaagattatcggcgccatatggattacgtttatatcaatccagtgaaatatcggcttgttggatgcgtgagggattggccatattcaacgttccaccgcgatgtgaggaaagggttatatcctgaagattgggctggggatacggtcgaaatagatgccggagagcggcggtaa

SEQ ID NO: 1170 - protein, 163 aa, Enterobacter cloacae
MSNYRRSYIPGGCWFFTVNLQNRHSDLLTRHIDHLRAAIACAKRKRPFQINSWVVLPEHIHCIWTLPEGDSDYSGRWREIKKSFTRALAQNQIWQPRFWEHAIRNDEDYRRHMDYVYINPVKYRLVGCVRDWPYSTFHRDVRKGLYPEDWAGDTVEIDAGERR

SEQ ID NO: 1171 - DNA, 399 bp, Enterobacter cloacae
atgacaaataaaatgacagtcatcatcctggcggcaataattaccggatgttcatcgccgccgcctcccgttcctgtagcgtgggataaagccgctgagccattaaacacccgtttaccgcaatggcgtgacaataacgttacagtcccgtccccgacagttaacggtaaatggacattatcagtcagcacacatagtttccacgacacaacatggacgccagcagtattttacgctgccgcccactcaacacgaattgtcgtctctgcacaatccggtactgatttctttaatgccagaaactggcttcgccagaatggcgcaaaaggcgtcattgaataccagcctgtttttaattgcctgacgtgcagggaaaccaccatttatttctctcgctaa

SEQ ID NO: 1172 - protein, 132 aa, Enterobacter cloacae
MTNKMTVIILAAIITGCSSPPPPVPVAWDKAAEPLNTRLPQWRDNNVTVPSPTVNGKWTLSVSTHSFHDTTWTPAVFYAAAHSTRIVVSAQSGTDFFNARNWLRQNGAKGVIEYQPVFNCLTCRETTIYFSR

SEQ ID NO: 1173 - DNA, 1434 bp, Escherichia coli
atgatgaaaattgctcgtatcgcacttgctttgggtctggtcgcttcagttagctcgcaggtatatgcagctggactagtgcaaaatgataatgaacttcgtaacgatctggcttggctttccgatcgtggggtcattcatctcagtctttccacctggccgctcagtcaggaagaaatcacccgagcgttgaaaaaagcaaaaccttcatattcttccgaacaagttgtgctggcgcgcatcaatcaacggctttctaatttgaaggcggattttcgcgttagcggctatacctcgactgaccaaccaggcacgccacagggctttggtcaaacccagccggcagataactcgctctctcttgcttttaataacagcggtgagtggtgggatgtgcatttgcagggcaacgttgaaggcggcgaacgcattagcaacggttcacgttttaatgccaatggtgcatacggcgccgtcaagttctggaaccagtggctgtcgttcggtcaggtgccgcaatggtgggggccgggttatgagggtagcctgattcgcggggatgcagccagaccaatgaccggtttcttaatgcagcgcgctgaacaagctgccccggagacatggtggttgcgctggattggtccgtggcagtatcaaatttccgccagtcagatgaaccagtatacggcagtgcctcataccaaaatcattggcggccgtttaactttctcaccgttccagtcacttgaacttggcgcttcacgcataatgcagtggggcggggaagggcgaccagaatcatttagtagcttttgggatggctttaccggacaggataataccggtactgacaatgaaccaggtaaccaacttgcaggcttcgactttaaatttaagctagaacctacattagggtggcctgtgagcttctatggccagatgattggcgaggatgaagctggtggcttaccttcggcaaatatgtaccttgggggtatcgaaggtcatcatggctggggcaaaaatgcgattaactggtatgtagaagcacatgatacgcgtacgaatatgaatcgtacgggttacagttatacccatcacatctataaagatggttactaccagcagggttatcctctcggtgatgcaatgggtggcgatggccaattatttgccggtaagattgaactggtaacagaggataatcagcgctggagcacccgtttggtgtacgcaaaggtgaatccggaaaatcagtctatcaataacgcgtttccgaactcagatacgttaaaaggtatacagttaggctggagtggcgatgtttataaatctgttagattgaatactaatctttggtacaccaatgccgataatagcgatagcgatgatgttggtgccagtgcagggatagagattccatttagtttatag

SEQ ID NO: 1174 - protein, 477 aa, Escherichia coli
MMKIARIALALGLVASVSSQVYAAGLVQNDNELRNDLAWLSDRGVIHLSLSTWPLSQEEITRALKKAKPSYSSEQVVLARINQRLSNLKADFRVSGYTSTDQPGTPQGFGQTQPADNSLSLAFNNSGEWWDVHLQGNVEGGERISNGSRFNANGAYGAVKFWNQWLSFGQVPQWWGPGYEGSLIRGDAARPMTGFLMQRAEQAAPETWWLRWIGPWQYQISASQMNQYTAVPHTKIIGGRLTFSPFQSLELGASRIMQWGGEGRPESFSSFWDGFTGQDNTGTDNEPGNQLAGFDFKFKLEPTLGWPVSFYGQMIGEDEAGGLPSANMYLGGIEGHHGWGKNAINWYVEAHDTRTNMNRTGYSYTHHIYKDGYYQQGYPLGDAMGGDGQLFAGKIELVTEDNQRWSTRLVYAKVNPENQSINNAFPNSDTLKGIQLGWSGDVYKSVRLNTNLWYTNADNSDSDDVGASAGIEIPFSL

SEQ ID NO: 1175 - DNA, 354 bp, Enterobacter cloacae
atgaaacgttacgcaaccgctctgtttttttgcacgctggcgctgagcagccaactggcccatgccgatattattgacgacgctattggcaatattcagcaagccatcaacgatgcctacaatccgggcagcagccgttccgacgacgacgacgggcgctatgacgacggacgctacgatgacggcagctatcagggcagccgccagcagcgtagggataaccagcagcaatataacgatcgccagcgccagcttgacgaccgccgtcgccagctggatgaacgccagcgccagcttgatagcgatcgtcgccagctggagagcgaccagcgccgtctcgacgacgattactga

SEQ ID NO: 1176 - protein, 117 aa, Enterobacter cloacae
MKRYATALFFCTLALSSQLAHADIIDDAIGNIQQAINDAYNPGSSRSDDDDGRYDDGRYDDGSYQGSRQQRRDNQQQYNDRQRQLDDRRRQLDERQRQLDSDRRQLESDQRRLDDDY

SEQ ID NO: 1177 - DNA, 258 bp, Enterobacter cloacae
gtgaaccaggcgatccaatttcccgatagagaagagtgggacgctgaacggcagtgcatcgttttccccgcgttggtcaatggcatgcagttaacttgcgcgattcggggtcagacactgcagcaacggttcggtggcgatgagccagcgcgatggctggctctctttagcgaacatcgctgggatttggaagatgaagcggaagcgttgattcgcgatcggcaagaagaccatcagggttggctctggctttcctga

SEQ ID NO: 1178 - protein, 85 aa, Enterobacter cloacae
MNQAIQFPDREEWDAERQCIVFPALVNGMQLTCAIRGQTLQQRFGGDEPARWLALFSEHRWDLEDEAEALIRDRQEDHQGWLWLS

SEQ ID NO: 1179 - DNA, 684 bp, Klebsiella oxytoca
gtgaagattttgattgtcgaagatgagaagaaaaccggggagtatctgaccaaagggcttaccgaagccggattcgtcgtcgacctggccgacaacggccttaacggttatcacctggcgatgaccagcgactacgatctgctgatcctcgatatcatgctgccggacgtcaacggctgggatatcgtgcgcatgctgcgcgccgccaataaagggatgccgatcctgctgctcaccgcgcttggcactatcgagcatcgggtgaaggggctggagctgggcgccgacgactatctggtaaagccctttgcttttgcggaactgctggcgcgggtgcgcactctgctgcgtcgcggggcggcggtaatagtagaaagccagtttcaggcggccgatctcagcgttgatttggtgagccgcaaggtgacgcgtggcgcgactcgtatcaccctgaccagcaaagagtttaccctgctggagttcttcttgcgccatcagggcgaggtgctaccccgctcgctgatcgcgtcgcaggtgtgggatatgaatttcgacagcgacactaacgccatcgacgtggcggtgaagcggctgcgcgccaaaatcgataacgacttcgagccgaagcttatccagaccgtgcgcggcgtcggctatatgcttgaggtgccggatggccgctaa

SEQ ID NO: 1180 - protein, 227 aa, Klebsiella oxytoca
MKILIVEDEKKTGEYLTKGLTEAGFVVDLADNGLNGYHLAMTSDYDLLILDIMLPDVNGWDIVRMLRAANKGMPILLLTALGTIEHRVKGLELGADDYLVKPFAFAELLARVRTLLRRGAAVIVESQFQAADLSVDLVSRKVTRGATRITLTSKEFTLLEFFLRHQGEVLPRSLIASQVWDMNFDSDTNAIDVAVKRLRAKIDNDFEPKLIQTVRGVGYMLEVPDGR

SEQ ID NO: 1181 - DNA, 264 bp, Klebsiella pneumoniae
atgcgactaatcggcaagcaaaggcttcaagtgctaagtggtactaaccctgaaacggatgtttggctttccgcttgggttgcagagctcactaacgcttactggaaagatgctaagggagttttagatgctttccccagagcacaacagattgataatttgtgctatgtgttctttgttcgaggcattaaatcgcagggcataaaagtaacatttcagtttgaaaggagcattgcggtgattaaccaggtggtatctaaatga

SEQ ID NO: 1182 - protein, 87 aa, Klebsiella pneumoniae
MRLIGKQRLQVLSGTNPETDVWLSAWVAELTNAYWKDAKGVLDAFPRAQQIDNLCYVFFVRGIKSQGIKVTFQFERSIAVINQVVSK

SEQ ID NO: 1183 - DNA, 1230 bp, Klebsiella pneumoniae
atgagtaaacttactgaagttcgggttattcgaactgaagaacaatatcatgcggccctttcagaagttgagagattactcagattggaacttcctgcaggttctgaagaatcagaacgtcttgatttacttatagttgttattgaaaattatgaaaatgctaactatccagtaacaccggtagatccaatcgaggcaatcaaattccgaatggacgaacagggcttacgccaagcggatctgaccccatattttggaacaaaaagtcgtgtatcagaggtgttatcgggaaaacgtcctttaaccgttgctatgatcaaagccttatcaataggtttaggtatgtctcctcaaacgttattgggcttagaaacagaaactggatatgcaaatcgttctccagttgaggaggttaattggtcaaaatttcctataaaagaaatgctttccaaaggttggatagaaaatgttgtctcgcaaacaaagacgacaacagaagaaaaagtcaaaaatttcattgagggtttgggagcgaatttttctacagcagccttcaagcgaacacttaacggagagtcttactcacctacaactgtttataaattacatgcatggattgcaagagttgtccagaaagctagggaaaaaaacctcgctactaaatttaggcaagatggcataactaaagattttttaaaagagatcgcacatttaagttggtccgaatatgggcctctattagcggtggagttcttagaaaaaaatgggatttgtgtgatcattgaaccttgtctgactggtactgctgttgatggggctgctctgagggatattgacggtagaccaattattgcactcactttaagacaagatcgtttagataatttctggtttacacttttacatgagttagtccatatctggaaacatgcagattctactaacacatttatcgatgatattgaaacactcaagaatagtacagacaaaatggaagcagaggctaatcggatagccagagatactctcattcctcgcgtcatttggaaacggagttcagcttacttaaatcccagcacaatcacgatagatgagctttcaagagaattaagaattcatcctgcaataatagcaggaagaattagaagagaaactggaaaatacaatcaattttctgatttagttggtcaaggtgaagtaagaaagcatttccctaatcatatttggtag

SEQ ID NO: 1184 - protein, 409 aa, Klebsiella pneumoniae
MSKLTEVRVIRTEEQYHAALSEVERLLRLELPAGSEESERLDLLIVVIENYENANYPVTPVDPIEAIKFRMDEQGLRQADLTPYFGTKSRVSEVLSGKRPLTVAMIKALSIGLGMSPQTLLGLETETGYANRSPVEEVNWSKFPIKEMLSKGWIENVVSQTKTTTEEKVKNFIEGLGANFSTAAFKRTLNGESYSPTTVYKLHAWIARVVQKAREKNLATKFRQDGITKDFLKEIAHLSWSEYGPLLAVEFLEKNGICVIIEPCLTGTAVDGAALRDIDGRPIIALTLRQDRLDNFWFTLLHELVHIWKHADSTNTFIDDIETLKNSTDKMEAEANRIARDTLIPRVIWKRSSAYLNPSTITIDELSRELRIHPAIIAGRIRRETGKYNQFSDLVGQGEVRKHFPNHIW

SEQ ID NO: 1185 - DNA, 747 bp, Klebsiella pneumoniae
atgtaccctaaatatatgccgattttaaaagctaagaaaggtgagttagatgccattgagtctatgcttccttatccccacgttataagggacatgcttccgatttttgaaatcccatatctgtcgaaaaaacagagagcaaataaaaaatattctaacataggtaatcctgttgagttttttctaaacaatacaattaaaacattgtccgaaagaatgcaaaagctccctatggggattgacataagcagatggcctccaaactcttctcttgaaacaggggagcatattttaagtcatctcaccagtgccttaagaaatgctgggtgcaatatcattcctgtcgtcggttatgaccgatgggaagatgatgagtatgcaactactttgcaacaattaggtacaagctatactgactttgtaattcggttaaactcttttgcttttgaagatatgatcgaagaagaaccgtttattgaaacaatagaaggtattttaacctcgctgggtgcaatgccagaaaattgctctgtcatgatagatttagaagatattactaaaacatcaatagttgatctaaatgaaacagtacagagagcactggattcattgtacaagtataattttaaatttatttcaattgcgggaagttcaataacaagtgatattaatggaatggttcctacccacaattcagaaggtatagttattcgtaaagaagctaaggtatggaaagcattcaaataa

SEQ ID NO: 1186 - protein, 248 aa, Klebsiella pneumoniae
MYPKYMPILKAKKGELDAIESMLPYPHVIRDMLPIFEIPYLSKKQRANKKYSNIGNPVEFFLNNTIKTLSERMQKLPMGIDISRWPPNSSLETGEHILSHLTSALRNAGCNIIPVVGYDRWEDDEYATTLQQLGTSYTDFVIRLNSFAFEDMIEEEPFIETIEGILTSLGAMPENCSVMIDLEDITKTSIVDLNETVQRALDSLYKYNFKFISIAGSSITSDINGMVPTHNSEGIVIRKEAKVWKAFK

SEQ ID NO: 1187 - DNA, 501 bp, Klebsiella aerogenes
gtgccgcatcgaacggccggttgcggaaagtcctccctgcgtccgctgatggccggcagcagcccgtcgttgcctgatggatccaacccctccgctgctatagtgcagtcggcttctgacgttcagtgcagccgtcttctgaaaacgacaatggaggtggtagccgagggtgtggaaacacccgactgccttgcgtggttgcggcaggcgggttgcgacacggtgcagggtttcctgttcgccaggccgatgccggcggcggccttcgtcggcttcgtcaaccaatggaggaacaccaccatgaacgccaatgaaccgagcaccagttgctgcgtgtgctgcaaggaaatcccgctcgatgccgccttcacgccggaaggggccgagtacgtggagcatttctgcgggctggagtgctatcagcgcttccaggcgcgggccagcactgcgaccgaaaccagcgtcaaaccggacgcttgtgattcgccgccgtcaggttga

SEQ ID NO: 1188 - protein, 166 aa, Klebsiella aerogenes
MPHRTAGCGKSSLRPLMAGSSPSLPDGSNPSAAIVQSASDVQCSRLLKTTMEVVAEGVETPDCLAWLRQAGCDTVQGFLFARPMPAAAFVGFVNQWRNTTMNANEPSTSCCVCCKEIPLDAAFTPEGAEYVEHFCGLECYQRFQARASTATETSVKPDACDSPPSG

SEQ ID NO: 1189 - DNA, 1014 bp, Klebsiella aerogenes
atgaaaaccgccactgcgccgttaccaccgctgcgttcggtcaaggttctggaccagttgcgtgagcgcatacgctacttgcattacagtttacgaaccgaacaggcttatgtccactgggttcgtgccttcatccgtttccacggtgtgcgtcacccggcaaccttgggcagcagcgaagtcgaggcatttctgtcctggctggcgaacgagcgcaaggtttcggtctccacgcatcgtcaggcattggcggccttgctgttcttctacggcaaggtgctgtgcacggatctgccctggcttcaggagatcggaagacctcggccgtcgcggcgcttgccggtggtgctgaccccggatgaagtggttcgcatcctcggttttctggaaggcgagcatcgtttgttcgcccagcttctgtatggaacgggcatgcggatcagtgagggtttgcaactgcgggtcaaggatctggatttcgatcacggcacgatcatcgtgcgggagggcaagggctccaaggatcgggccttgatgttacccgagagcttggcacccagcctgcgcgagcagctgtcgcgtgcacgggcatggtggctgaaggaccaggccgagggccgcagcggcgttgcgcttcccgacgcccttgagcggaagtatccgcgcgccgggcattcctggctgtggttctgggtttttgcgcagcacacgcattcgaccgatccacggagcggtgtcgtgcgtcgccatcacatgtatgaccagacctttcagcgcgccttcaaacgtgccgtagaacaagcaggcatcacgaagcccgccacaccgcacaccctccgccactcgttcgcgacggccttgctccgcagcggttacgacattcgaaccgtgcaggatctgctcggccattccgacgtctctacgacgatgatttacacgcatgtgctgaaagttggcggtgccggagtgcgctcaccgcttgatgcgctgccgcccctcactagtgagaggtag

SEQ ID NO: 1190 - protein, 337 aa, Klebsiella aerogenes
MKTATAPLPPLRSVKVLDQLRERIRYLHYSLRTEQAYVHWVRAFIRFHGVRHPATLGSSEVEAFLSWLANERKVSVSTHRQALAALLFFYGKVLCTDLPWLQEIGRPRPSRRLPVVLTPDEVVRILGFLEGEHRLFAQLLYGTGMRISEGLQLRVKDLDFDHGTIIVREGKGSKDRALMLPESLAPSLREQLSRARAWWLKDQAEGRSGVALPDALERKYPRAGHSWLWFWVFAQHTHSTDPRSGVVRRHHMYDQTFQRAFKRAVEQAGITKPATPHTLRHSFATALLRSGYDIRTVQDLLGHSDVSTTMIYTHVLKVGGAGVRSPLDALPPLTSER

SEQ ID NO: 1191 - DNA, 423 bp, Klebsiella aerogenes
atgggactgatgacacgcattgccgataaaaccggcgcgctcggcagcgtcgtttccgcgatgggctgcgccgcctgctttccagccctcgccagcttcggcgcggccatcgggctgggcttcttgagccagtacgagggactgttcatcagccgcctgctgccgctgtttgccgcgctggccttcctggcgaacgcgctgggttggttcagtcatcggcaatggctgcgcagtctgctcggcatgatcggcccggccatcgtgtttgcggccacggtctggctgctcggcaactggtggacggcgaacctgatgtacgtcggcctggccttgatgattggggtgtcgatctgggacttcgtgtcgccggcgcatcgccgttgcggaccggacggctgcgaactccccgccaagcgcttgtga

SEQ ID NO: 1192 - protein, 140 aa, Klebsiella aerogenes
MGLMTRIADKTGALGSVVSAMGCAACFPALASFGAAIGLGFLSQYEGLFISRLLPLFAALAFLANALGWFSHRQWLRSLLGMIGPAIVFAATVWLLGNWWTANLMYVGLALMIGVSIWDFVSPAHRRCGPDGCELPAKRL

SEQ ID NO: 1193 - DNA, 363 bp, Enterobacter cloacae
atgagcgcctacacggtatcgcaactggcccataacgctggggtgagcgtacatatcgtgcgcgactacctggtgcgcggcttgttacggccggtggcctgcaccacgggcggctacggcgtgttcgacgatgcggccttgcaacggctgtgcttcgtgcgcgcggccttcgaggcgggtatcggcctggatgccctggcgcggctgtgccgtgcgctcgacgcagcggacggcgcacaagccgcagcgcagcttgccgtgctgcgccagttggtcgagcggcggcgcgcggcgttggcccatctggacgcgcaactggcctccatgccagccgagcgggcgcacgaggaggcattgccgtga

SEQ ID NO: 1194 - protein, 120 aa, Enterobacter cloacae
MSAYTVSQLAHNAGVSVHIVRDYLVRGLLRPVACTTGGYGVFDDAALQRLCFVRAAFEAGIGLDALARLCRALDAADGAQAAAQLAVLRQLVERRRAALAHLDAQLASMPAERAHEEALP

SEQ ID NO: 1195 - DNA, 237 bp, Enterobacter cloacae
gtgaacgcccctgacaaactgccgcccgagacgcgccaacccgtttccggctacctgtggggtgcgctggccgtgttgacctgcccctgccatctgccgattctcgccgccgtgctggccgggacgaccgccggtgccttccttggcgagcattggggtgttgccgcgctcgcgctgaccggcttgttcgttctggccgtaacgcggctgctgcgcgccttccggggcggatcatga

SEQ ID NO: 1196 - protein, 78 aa, Enterobacter cloacae
MNAPDKLPPETRQPVSGYLWGALAVLTCPCHLPILAAVLAGTTAGAFLGEHWGVAALALTGLFVLAVTRLLRAFRGGS

SEQ ID NO: 1197 - DNA, 708 bp, Enterobacter cloacae
atgacgagttcgcagcccgccggatggacggcggccgagttggcgcaggcggcggcgcgcggacagcttgacctgcattaccagccgctggtcgatctgcgcgatcaccggatcgctggcgcggaagcgttgatgcgctggcggcatccgaggcttggcctgttgccgcccggccagttcctgccgctggccgagtcgttcggcctgatgccggaaataggcgcgtgggtgctgggcgaggcctgtcgccagatgcacaagtggcaaggaccggcatggcaaccgttccgtcttgccatcaatgtgtccgccagccaggttgggccaacgttcgacgacgaggtaaagcgggtgctggccgatatggccctgcccgccgagcttctggagatcgaactgaccgaatcggtcgcattcggcaatccagccctgttcgccagtttcgacgccttgcgcgccatcggcgtgcgcttcgccgccgacgacttcggcaccggctattcctgcctgcaacatctgaaatgctgccccatcaccacattgaaaatcgaccaatcctttgtcgccaggctcccggatgatgcccgtgaccaaactatcgtgcgggcggtgatccagctcgcgcacgggctgggcatggatgtcattttcagaagacgactgcaccagttgattgggcgtaatggctgttgtgcagccagctcctga

SEQ ID NO: 1198 - protein, 235 aa, Enterobacter cloacae
MTSSQPAGWTAAELAQAAARGQLDLHYQPLVDLRDHRIAGAEALMRWRHPRLGLLPPGQFLPLAESFGLMPEIGAWVLGEACRQMHKWQGPAWQPFRLAINVSASQVGPTFDDEVKRVLADMALPAELLEIELTESVAFGNPALFASFDALRAIGVRFAADDFGTGYSCLQHLKCCPITTLKIDQSFVARLPDDARDQTIVRAVIQLAHGLGMDVIFRRRLHQLIGRNGCCAASS

SEQ ID NO: 1199 - DNA, 1269 bp, Klebsiella aerogenes
atggcgacggacaccccacggattccagaacaaggcgtggccactctgcctgatgaggcttgggagcgtgcgcgccgtcgtgcggagatcatcagtccgttggcgcagtcggagacggtcgggcacgaagcggccgatatggcggctcaggcgctgggcttgtctcggcgccaggtatacgttctgatccggcgtgcccggcaaggcagcggcctcgtgacggatctggtgcccggccagtccggtggaggtaaaggtaaggggcgcttgccggaaccggtcgagcgcgtcatccacgagctactgcaaaagcggttcctgaccaagcagaagcgcagcctagcggcctttcaccgcgaagtcactcaggtgtgcaaggctcaaaaactgcgagtgccggcgcgcaataccgtggccttacggatcgctagccttgacccgcgcaaggtcatccgccggcgggaaggccaggatgccgctcgtgacctacaaggtgtgggcggcgagcctcctgccgtgaccgcgccgctggagcaggtgcagatagaccatacggtcatcgacctgatcgtggtcgatgaccgcgaccggcaacctattggccgcccgtacctgaccctcgccatcgacgtgttcacccgctgcgtgctcggcatggtcgtcacgctggaagcgccgtctgccgtttcggttggcctgtgcctcgtgcatgtcgcctgcgacaagcgcccttggctggaaggactgaacgtggaaatggattggcagatgagcggcaagcccttgctgctctacctagacaacgcggccgagttcaagagcgaggccctgcgccggggttgcgagcagcatggcatccggctggactatcgcccgctgggacagccgcactatggcggcatcgtggaacggatcatcggcacggcgatgcagatgattcacgacgaactgccgggaacgaccttctccaaccctgaccagcgcggcgactacgattccgaaaacaaggccgccctgacgctgcgcgagctagagcgctggctcacattggcggtcggcacctaccacggttcggtgcacaacggcctgctccaaccgccggccgcgcgctgggccgaggccgtggcgcgtgtcggcgtaccggccgtcgtcacacgcgctacttcgttcctggtcgattttctgccgatcctccggcgcacgctgacccgcaccggctttgtcatcgaccacatccactactacgccgatgggcactgttgcaaatag

SEQ ID NO: 1200 - protein, 422 aa, Klebsiella aerogenes
MATDTPRIPEQGVATLPDEAWERARRRAEIISPLAQSETVGHEAADMAAQALGLSRRQVYVLIRRARQGSGLVTDLVPGQSGGGKGKGRLPEPVERVIHELLQKRFLTKQKRSLAAFHREVTQVCKAQKLRVPARNTVALRIASLDPRKVIRRREGQDAARDLQGVGGEPPAVTAPLEQVQIDHTVIDLIVVDDRDRQPIGRPYLTLAIDVFTRCVLGMVVTLEAPSAVSVGLCLVHVACDKRPWLEGLNVEMDWQMSGKPLLLYLDNAAEFKSEALRRGCEQHGIRLDYRPLGQPHYGGIVERIIGTAMQMIHDELPGTTFSNPDQRGDYDSENKAALTLRELERWLTLAVGTYHGSVHNGLLQPPAARWAEAVARVGVPAVVTRATSFLVDFLPILRRTLTRTGFVIDHIHYYADGHCCK

SEQ ID NO: 1201 - DNA, 420 bp, Acinetobacter baumannii
atgttcggacgcgccgttgatgtggtgtcccgcaatgccgtcaatcccgacttcttaccggacgaggacaagagtacgccgcagctcgatcttttggctcgtgtcgaacgagagctaccggtgcggctcgaccaagagcgcaccgatatggttgtttgccatggtgatccctgcatgccgaacttcatggtggaccctaaaactcttcaatgcacgggtctgatcgaccttgggcggctcggaacagcagatcgctatgccgatttggcactcatgattgctaacgccgaagagaactgggcagcgccagatgaagcagagcgcgccttcgctgtcctattcaatgtattggggatcgaagcccccgaccgcgaacgccttgccttctatctgcgattggaccctctgacttggggttga

SEQ ID NO: 1202 - protein, 139 aa, Acinetobacter baumannii
MFGRAVDVVSRNAVNPDFLPDEDKSTPQLDLLARVERELPVRLDQERTDMVVCHGDPCMPNFMVDPKTLQCTGLIDLGRLGTADRYADLALMIANAEENWAAPDEAERAFAVLFNVLGIEAPDRERLAFYLRLDPLTWG

SEQ ID NO: 1203 - DNA, 837 bp, Enterobacter cloacae
atgttcatgccgcctgtttttcctgctcattggcacgtttcgcaacctgttctcattgcggacaccttttccagcctcgtttggaaagtttcattgccagacgggactcctgcaatcgtcaagggattgaaacctatagaagacattgctgatgaactgcgcggggccgactatctggtatggcgcaatgggaggggagcagtccggttgctcggtcgtgagaacaatctgatgttgctcgaatatgccggggagcgaatgctctctcacatcgttgccgagcacggcgactaccaggcgaccgaaattgcagcggaactaatggcgaagctgtatgccgcatctgaggaacccctgccttctgcccttctcccgatccgggatcgctttgcagctttgtttcagcgggcgcgcgatgatcaaaacgcaggttgtcaaactgactacgtccacgcggcgattatagccgatcaaatgatgagcaatgcctcggaactgcgtgggctacatggcgatctgcatcatgaaaacatcatgttctccagtcgcggctggctggtgatagatcccgtcggtctggtcggtgaagtgggctttggcgccgccaatatgttctacgatccggctgacagagacgacctttgtctcgatcctagacgcattgcacagatggcggacgcattctctcgtgcgctggacgtcgatccgcgtcgcctgctcgaccaggcgtacgcttatgggtgcctttccgcagcttggaacgcggatggagaagaggagcaacgcgatctagctatcgcggccgcgatcaagcaggtgcgacagacgtcatactag

SEQ ID NO: 1204 - protein, 278 aa, Enterobacter cloacae
MFMPPVFPAHWHVSQPVLIADTFSSLVWKVSLPDGTPAIVKGLKPIEDIADELRGADYLVWRNGRGAVRLLGRENNLMLLEYAGERMLSHIVAEHGDYQATEIAAELMAKLYAASEEPLPSALLPIRDRFAALFQRARDDQNAGCQTDYVHAAIIADQMMSNASELRGLHGDLHHENIMFSSRGWLVIDPVGLVGEVGFGAANMFYDPADRDDLCLDPRRIAQMADAFSRALDVDPRRLLDQAYAYGCLSAAWNADGEEEQRDLAIAAAIKQVRQTSY

SEQ ID NO: 1205 - DNA, 378 bp, Klebsiella aerogenes
atgaaggattatctctgtaaaaagttattcaaccggctttccggtaccctggtgatcagagcgcgctgcggcaataacattactggcctggcatgttgcaatattctttatccctcgccccgatacagcggtcagctgcatattaaagagctgtatgtttctcagtgcgatcgaaataagggcacgggtaaagcgataatgcgctttatagcccggcttgcgcttgaacaggaatgccttagccttagctggaacgctgaaaaatccaaccccggcgctaaccgtttttatcaggctctgggaggcagaataaatgatcatatcgtcaattattacctccacggggagagcctgagcaaactggcctcaggcatttga

SEQ ID NO: 1206 - protein, 125 aa, Klebsiella aerogenes
MKDYLCKKLFNRLSGTLVIRARCGNNITGLACCNILYPSPRYSGQLHIKELYVSQCDRNKGTGKAIMRFIARLALEQECLSLSWNAEKSNPGANRFYQALGGRINDHIVNYYLHGESLSKLASGI

SEQ ID NO: 1207 - DNA, 1173 bp, Klebsiella aerogenes
atgctcacaactatcatttaccgtagtcatgctcatagtagcatttcaagaacctcaatcatggaaatgattgagctcgcaaatgcatgtaatataaaaagtgatgtcactggaatattactttttaatgggattcactttctgcaactgctggaaggtcctgaggctcaggttaacgaaatttacagcagaatctgtagagacactcgtcactttaatattgttgaactattaaatgacgttgcacctttccgacgatttggtaatgccgggatggaactaattgatgtagatttacacagtcatgaagattgcctaagaacaattctgaaccgtggaacagcaaaacatcaacttctttataatgacagagcattgcgtttttttagaacattcatagagtccatacaacaagaaaaatactatgaattaccgcccgctactgaatggcagttttccagagagcctttaatacctgaaaacccttatttttctagccccttcattatacatccagtggtagaccctctcgcgagaaaggtccattcgttccagttcagaaatcccgtggcgactggtttgtatggaatgggcttgttacagcatgatctggaatcaaaacgtattgctcttcttgaagctggtagtttccttcactctggacaaagggtttcaattagtctattaccattgactataattaaaattagtgatgccccttgcacgctgcttaagtatattcagcaaagcggccttatccctgaacaaattatcatcgaatttttagaaaaagatctgttcgccaatattggtgattttttacatgcactacgaatacttaaaagtgcaggtataagcgttgctattaatgactttgggtctggacatgcaggattactccttctaacaaaattccagcctgaaaaaatcaaaattcatagtgagctcataagaaatatccacatggatggtgcgaaacaagccgtagttcaaagcataatcaattgctgtgatactctcgagataagaatatgcgctacaggaatcgaaaaaactgaagaatggatgtggctggagtcagctggtatcgcttacttccagggtccccttttttctggctactcagatgacggcttaccatttgtaagctggccggatcctgtggagatttag

SEQ ID NO: 1208 - protein, 390 aa, Klebsiella aerogenes
MLTTIIYRSHAHSSISRTSIMEMIELANACNIKSDVTGILLFNGIHFLQLLEGPEAQVNEIYSRICRDTRHFNIVELLNDVAPFRRFGNAGMELIDVDLHSHEDCLRTILNRGTAKHQLLYNDRALRFFRTFIESIQQEKYYELPPATEWQFSREPLIPENPYFSSPFIIHPVVDPLARKVHSFQFRNPVATGLYGMGLLQHDLESKRIALLEAGSFLHSGQRVSISLLPLTIIKISDAPCTLLKYIQQSGLIPEQIIIEFLEKDLFANIGDFLHALRILKSAGISVAINDFGSGHAGLLLLTKFQPEKIKIHSELIRNIHMDGAKQAVVQSIINCCDTLEIRICATGIEKTEEWMWLESAGIAYFQGPLFSGYSDDGLPFVSWPDPVEI

SEQ ID NO: 1209 - DNA, 387 bp, Escherichia coli
atgctccggcgattttttaacatggaagagtattttaatgaagctactagagaggatttagataactttatcggtaatgatatatttcatgtagaaaatgctgaagattttatgacgtttgcagattctgcaattaaaaagaaagtatctttgataataagttctggaattctaaacgatcagcctattgaaaatctaattgagtgtgctcagaagattggatatcaattaggtataactaatgtgaatggtgataataaaatcactatgccaaactctaaaagagaagtgaagcaactattatatttccttgatcagggctacttcaattcaataatcacaaatgagctaatgctgacgaattcgaagcgaccaataagaatttga

SEQ ID NO: 1210 - protein, 128 aa, Escherichia coli
MLRRFFNMEEYFNEATREDLDNFIGNDIFHVENAEDFMTFADSAIKKKVSLIISSGILNDQPIENLIECAQKIGYQLGITNVNGDNKITMPNSKREVKQLLYFLDQGYFNSIITNELMLTNSKRPIRI

SEQ ID NO: 1211 - DNA, 2313 bp, Klebsiella aerogenes
atgaaaatcgcgccttacctgataacactgacgctaccgtttatctcgttatctgccaaagctgattaccacactcaaattaacgccggaaataccgtttctggcgatattgttgatggctcaaagggtaatcagcatgtctatggcacgctgactaactccaccatcactggtccctatgcctatagctacgttggcgatggtgggcaaaccaatcacatcacggttaccgatcacggtgaactgtttctggaatcgggcggcagcgcttatgacacacagataaccgacgatggtgatctacaggtgaacgggtatgctgaaaacacctatgtggatagtggcggacaggtttacgttaacgccggaaataatggcattgaagatccagaacaaggcggacagattgtgaataccacggttggtgcaggtggccaggtcgttaatcgctacggcattgacacaaatacggtcgttgaagctggcggcgaactggataccggctggaattacccttatgaaattcgcaacaccgctatttcccggaatgccgttatacaaaacggcggcattcagcaggtcagcaacggcgggacaagcgaaggcagcaaggtcaatgatggcggcacattaatcgtcaccggcacatggcactacaatgttgtcaccgacagccagccttcggcctggtatagcggcaccgcagatgacagcgctgtttatggcacgatgcaaaatcagggcggactcgatgaaaacactacggtgcagtccggtgggcaatacacgctaagcggctatggtctctcccaccagctcaccgtagcacagggcggcagcgcccaaatcaataatggtgttctggatagcttctggctttatgggatgatgaacgtcagcagccaggctacgctaacaggtactggcactgtgggtagtagtggcgaactggtactcaacgaaggcgcaaaaacatccggcctgaccttagcgctggatggcgtactatccctgcaaaacagcagtgatgctggtccgcataattatcagattgcaggtctggagatggatggcggtacagtgctgtttgacccagcctctttcgccacactgaatatgaaaacgctctctggcaacggcaatttctggatgaataccgatatagccacgcaacagggcgatatgattaacgtctctggggaagccaacggcgattttgggatctggataaatgatactggcgacccccccgcagatccgcagtcgctacaggttgtacaaaccggtggtggcgacgcgcagtttacgctgttgaacccaaaccagcaggtagacatcggcacctgggaatatggcctgacacccgacggtcagggcaactggtcactgacgccgcaggcaactcccacgccatcaactgaagccgttctggcgatggcaaacgtcactcccactatttttcaggccgaagccagtgcgttgcaaacccgcctggacgttactcgttcccgtccgcatcagggagagctatggatgcaggcgctgagtaatcgctttgatgttaaccgcacaggcaatgcagcttatcgccagcggctcggtgggctgatgatgggctatgacagaagtcttcctcgccagactggcctgcttacactaggtattgcaggcggttacagccgttccgatcttgatctcatcaacgacagcgatggttcagtagacagctacagtgccgcgttatacgccagctattatgatcaaagtcgtttctggctggacgggatgctgaaaggcaacctgtttaaccagcaccttaatgtccgcatgagttccggcggctatgccgacggcagttacaccatccccggcttgggtagcagcctggttgccgggtatgacgccagattcgccaataccaaactttctccctttgtcggtttcacaggcttcatttcacaaagtgataattactggctatcgaacggtatgcaggcacatcccggcacggctaaatctgcgctggggcaagttgggttccgtctgcgtcagaatataacgactcatcatggaatgcagttcattccgtggctgaaagtcgcgctggagcaggagtttgtgcataacaacctggtcagggttaatgacgataacttcaataacgatatcgccggaacacgaggaagctaccaagctggcatcagcgccgctcttacgcagcacacgcatatttacgccagcataaattatgagaaaggtgacgggatggaatcgccgtggactggaaacattggctttaattatagtttctaa

SEQ ID NO: 1212 - protein, 770 aa, Klebsiella aerogenes
MKIAPYLITLTLPFISLSAKADYHTQINAGNTVSGDIVDGSKGNQHVYGTLTNSTITGPYAYSYVGDGGQTNHITVTDHGELFLESGGSAYDTQITDDGDLQVNGYAENTYVDSGGQVYVNAGNNGIEDPEQGGQIVNTTVGAGGQVVNRYGIDTNTVVEAGGELDTGWNYPYEIRNTAISRNAVIQNGGIQQVSNGGTSEGSKVNDGGTLIVTGTWHYNVVTDSQPSAWYSGTADDSAVYGTMQNQGGLDENTTVQSGGQYTLSGYGLSHQLTVAQGGSAQINNGVLDSFWLYGMMNVSSQATLTGTGTVGSSGELVLNEGAKTSGLTLALDGVLSLQNSSDAGPHNYQIAGLEMDGGTVLFDPASFATLNMKTLSGNGNFWMNTDIATQQGDMINVSGEANGDFGIWINDTGDPPADPQSLQVVQTGGGDAQFTLLNPNQQVDIGTWEYGLTPDGQGNWSLTPQATPTPSTEAVLAMANVTPTIFQAEASALQTRLDVTRSRPHQGELWMQALSNRFDVNRTGNAAYRQRLGGLMMGYDRSLPRQTGLLTLGIAGGYSRSDLDLINDSDGSVDSYSAALYASYYDQSRFWLDGMLKGNLFNQHLNVRMSSGGYADGSYTIPGLGSSLVAGYDARFANTKLSPFVGFTGFISQSDNYWLSNGMQAHPGTAKSALGQVGFRLRQNITTHHGMQFIPWLKVALEQEFVHNNLVRVNDDNFNNDIAGTRGSYQAGISAALTQHTHIYASINYEKGDGMESPWTGNIGFNYSF

SEQ ID NO: 1213 - DNA, 201 bp, Enterobacter cloacae complex
atggagtttaagaaaggggatgttgttacgtggtcaggccaggccgcgagcagctggaagacgaaaactggagtgattacggaagtgtgggaatacaagaaacaaacgcgttacaccgtaaaagttgatccgaaggaaggttctacggcgaaaccaaagttttattacccccgcacatcagcactacagaaagtgtcatga

SEQ ID NO: 1214 - protein, 66 aa, Enterobacter cloacae complex
MEFKKGDVVTWSGQAASSWKTKTGVITEVWEYKKQTRYTVKVDPKEGSTAKPKFYYPRTSALQKVS

SEQ ID NO: 1215 - DNA, 1449 bp, Enterobacter hormaechei
gtgaacgaaagcgaaaataaacaactcgccacgaacgccagcatcgaccgcgagcggatgcgttacgtcaacgcgctgttcaatggcaccagtaacaccaagcgccagcgactgtaccaggagtttgggtaccctaaagagctttgcttcgatgacttttaccgggcgtaccgccgcaacgcaattgctggcgccgcggtgacgcgcatggttgatggctgctgggaagattacccggaggtttacgaaggggaccagacgaaggatgccacccagcaaacagcatgggataagcgcgttaacaagctgcttaagcgatgctggaaacagattaagggcgctgacaaacgcaatctcgtagggcgctactctgctttgctgctccaggttaaagatagcaagccatggtctgaacctgttgataagtcgatggtcggcaagctgcaggaaagggcgcttgtccggctcattccagtttgggaggctcaactagacccggtcagctataacgaggatcagaacagcgagaactatggcgctgtcagcatgtactcgttcacagagataccagttcagcaacaacgcagtgcccagcccgggcgcatcatcaatgtccaccccgaccgcgtcatcatcctggctgaaggctcggatgacgggtgtcttgattccggcgagtcgctgctggaagaaggctttaacaaactgctggacctggaaaaggtgtctggtggcgctgctgaggggttcctgaagaacgccagccgacagctcaacttcaacttcagtgccaagacaagctttgcgcagctggctagagcactgggcgttagcgaagctcaactctcagaagggatggatgaccaggttcgccgactcaatgacagcacagacagcgcagtcattatgcaggagggtgataccagcgttctttcagtggcggtagccgaccccgagccaacatggcgcaccgcgctgagcgagttctgcgcgacggttcctattccagtgaaagagctggttggcatgcagacaggtgagcgagccagcactgaagatgcaaaaggctggggccgcaccaggatgagtcgccgaaaagggttcctgactgacgttatcaccgatgtggtttctcgattctggacgctcgggattattcctccggcgcggaatgaagaaattaccgtaggatggtcagatctcctggcgccgagccaggcagagaagattgccaacatggacaaactcgcggatgtggccgtgaagtcgacgaacgcgtttggccgctcagctatcaccgaaaacgagatacgcgcggcgggtgaactgcaagccctgccagaacttgatgatgaggtgccgccagatggcaaccagccaaagcctgaccctctggccgacccagaatcagaagccgaagagtccggtgataccacggtcgaaagttga

SEQ ID NO: 1216 - protein, 482 aa, Enterobacter hormaechei
MNESENKQLATNASIDRERMRYVNALFNGTSNTKRQRLYQEFGYPKELCFDDFYRAYRRNAIAGAAVTRMVDGCWEDYPEVYEGDQTKDATQQTAWDKRVNKLLKRCWKQIKGADKRNLVGRYSALLLQVKDSKPWSEPVDKSMVGKLQERALVRLIPVWEAQLDPVSYNEDQNSENYGAVSMYSFTEIPVQQQRSAQPGRIINVHPDRVIILAEGSDDGCLDSGESLLEEGFNKLLDLEKVSGGAAEGFLKNASRQLNFNFSAKTSFAQLARALGVSEAQLSEGMDDQVRRLNDSTDSAVIMQEGDTSVLSVAVADPEPTWRTALSEFCATVPIPVKELVGMQTGERASTEDAKGWGRTRMSRRKGFLTDVITDVVSRFWTLGIIPPARNEEITVGWSDLLAPSQAEKIANMDKLADVAVKSTNAFGRSAITENEIRAAGELQALPELDDEVPPDGNQPKPDPLADPESEAEESGDTTVES

SEQ ID NO: 1217 - DNA, 189 bp, Klebsiella aerogenes
atgccgatatgcacgctttcagtagaagtaaaaagccgctggtggctgccgctctatctcaaaatactgacgttattctgccaggtggtacagcgagagccggattacgaaaaggtgtctgcattcatcgtgaagtatggcgtcagccagagcgtgaaggtgcagccagcacaaaagaaaacggagtaa

SEQ ID NO: 1218 - protein, 62 aa, Klebsiella aerogenes
MPICTLSVEVKSRWWLPLYLKILTLFCQVVQREPDYEKVSAFIVKYGVSQSVKVQPAQKKTE

SEQ ID NO: 1219 - DNA, 813 bp, Enterobacter cloacae
atgaaccttgaatccatcgctaaatactttgcgcctaaatcaccaatgttcagcgattccccgcgcgcgaccgcatctgattcattgaccggaacggatgtgatggccgcccttgggctggttaaagctaaatgtggctttggtttcgatctttacctggcaaaaattggcatcagcaacccggagcccgctattgaggctctttttaatgcttccattgaaatatccagagggtttaaagcagtcactcaactcaatgaggacgctcgccgccgggtactcgaaatcatgtgtgcttttgcataccaggattatgccagaagcgcggccagcgtgcggcagtgtacctgctgtaatggtgctggtttcattgatgcggaggtctttactaccaaggttcattacccggacggaaagccccccaaatgggcggccattaccaaaggtgttttcccttcccactgggaggagtggaaatcagtacgtgaaggggttcgtgtgttgtgctcggtctgcaacggaaagggcgttatcagtaacgcatgccgctgtcatggaaaggggaaagtggttgatcagaaagaaagccaactgcaaggcgtccctgttatgaaggagtgcgggaaatgttctggccgtggctatgctcgcatcccggcagaaaacgtgcgtaaggcgctgtgttcagaagtgatggaaataagccagccgacatggtcccgcaattttaaaccgctatatgaactgctggtgactcgctgtcatgccgaagaatcgcaagcagatgcagaattaaaaaacgtaacacgataa

SEQ ID NO: 1220 - protein, 270 aa, Enterobacter cloacae
MNLESIAKYFAPKSPMFSDSPRATASDSLTGTDVMAALGLVKAKCGFGFDLYLAKIGISNPEPAIEALFNASIEISRGFKAVTQLNEDARRRVLEIMCAFAYQDYARSAASVRQCTCCNGAGFIDAEVFTTKVHYPDGKPPKWAAITKGVFPSHWEEWKSVREGVRVLCSVCNGKGVISNACRCHGKGKVVDQKESQLQGVPVMKECGKCSGRGYARIPAENVRKALCSEVMEISQPTWSRNFKPLYELLVTRCHAEESQADAELKNVTR

SEQ ID NO: 1221 - DNA, 228 bp, Klebsiella aerogenes
atggctgttgcaagaatgctttgcgttagctcaactgagccagcctggtttactccgggcaccgtatacgattcagaacctcgcggtgccgatacctgcatttgtggagacaacctcgtttcagacctcaacaaagatgactggtacgaaatgagccagcgcgctgatgggctgtggttcttaatcggttttcaacagtcaattttattccggggggccaaccaatga

SEQ ID NO: 1222 - protein, 75 aa, Klebsiella aerogenes
MAVARMLCVSSTEPAWFTPGTVYDSEPRGADTCICGDNLVSDLNKDDWYEMSQRADGLWFLIGFQQSILFRGANQ

SEQ ID NO: 1223 - DNA, 909 bp, Klebsiella aerogenes
atgcccgttgactttctgaccactgagcagactgaaagctatggcagattcaccggtgaaccggatgagcttcagctggcacgatattttcaccttgatgaagcagacaaggaatttatcggaaaaagcagaggtgatcacaaccgtctgggcattgccctgcaaattggatgtgtccgttttctgggcaccttcctcaccgatatgaatcatattccttccggcgtccggcattttaccgccagacagctcgggattcgtgatatcaccgttcttacagaatacggtcagagggaaaatacccgccgtgagcatgcagcgctgatacgtcagcactatcagtatcgtgaatttgcctggccctggacatttcgccttacccgtcttttatatacccggagctggataagcaacgaacgtcctggcctgcttttcgatctggcgacagggtggcttatgcaacatcgtattattctccccggagccactacgctgacccggttgatttcagaggtaagggaaaaggcgacgttgcgcctgtggaacaaactggcactgataccgtcagccgaacagcgttcacagctggagatgctgctggggccaactgattgcagccgcctgtctttactggaatcactgaaaaagggccctgtgaccatcagtggtccggcgtttaatgaagcaattgaacgctggaaaactctgaacgattttggcctgcatgctgaaaacctgagtacactcccggctgtgcgcctgaaaaatctcgcacgttatgctggtatgacttcggtgttcaatattgccaggatgtcaccgcagaaaaggatggcggttctggttgcctttgtccttgcatgggaaacgctggcgctggatgatgcattggacgttctggggttctaa

SEQ ID NO: 1224 - protein, 302 aa, Klebsiella aerogenes
MPVDFLTTEQTESYGRFTGEPDELQLARYFHLDEADKEFIGKSRGDHNRLGIALQIGCVRFLGTFLTDMNHIPSGVRHFTARQLGIRDITVLTEYGQRENTRREHAALIRQHYQYREFAWPWTFRLTRLLYTRSWISNERPGLLFDLATGWLMQHRIILPGATTLTRLISEVREKATLRLWNKLALIPSAEQRSQLEMLLGPTDCSRLSLLESLKKGPVTISGPAFNEAIERWKTLNDFGLHAENLSTLPAVRLKNLARYAGMTSVFNIARMSPQKRMAVLVAFVLAWETLALDDALDVLGF

SEQ ID NO: 1225 - DNA, 759 bp, Klebsiella aerogenes
atggctgactattattcagaatgcgcttgtcttattgaagcaaatcctactcaaactgctatattacttgaagcaatgaatgaattgtttgaacctgacgataattttattcaaaaactcatttcatgtgataacacaaacgacctttcagaaatggagattattgtacgtcactgtgtgctaaaccacccaggcagaactgttgctaatattcctgaagacctggactggcattttgacggggataaatgccctgaaggttttcttattaacagtgatctcggagatttcaattctgaacatgctgcgctgtttgctcaggcggcacttattgcatttgacagaaacgaattgatagagttcaaaatcgcttttacatgcagtaactcaaaaaggcctgacgggtttggaggcgctgcctgtgtcgtgagcaaggattttgtccgatggacaggtctacacaattttctggaggctgaacgaaccgctttcgccgagaagatgaattacttcttttgtgaatttacagaggtcgtcggtgagcttgaatatccagtatcgtttatattgcgttgcctggacagcgttaatgcagcgcatagatatgatgagattcagcttaactatcgcgaagggggggaaagaaatagcgaaggagggatacaatttaactctggatcggccataaaaaaagccagtatgaaaccgatcactccggatgagttccgggtgatgaaatcgtatctgaacgtcatgtga

SEQ ID NO: 1226 - protein, 252 aa, Klebsiella aerogenes
MADYYSECACLIEANPTQTAILLEAMNELFEPDDNFIQKLISCDNTNDLSEMEIIVRHCVLNHPGRTVANIPEDLDWHFDGDKCPEGFLINSDLGDFNSEHAALFAQAALIAFDRNELIEFKIAFTCSNSKRPDGFGGAACVVSKDFVRWTGLHNFLEAERTAFAEKMNYFFCEFTEVVGELEYPVSFILRCLDSVNAAHRYDEIQLNYREGGERNSEGGIQFNSGSAIKKASMKPITPDEFRVMKSYLNVM

SEQ ID NO: 1227 - DNA, 393 bp, Klebsiella aerogenes
atgacaaagcaaatattacccaatgaactggctgaaatcgtcaccggtcttcttattaaacctgaactgctaggtgagcttgactcccgtgaggcgcaccaggccttcatgctggatattggacgggttattgctgatcactgcggtggactggtcaacggtattacggatggtgacctagcaaaaccctatctttcagacattgagtgtacccccattctccacatcgaacctgatgaccgcctgccttcgactgaacgtaacgtatggtcaaattatcatgttgaagcgtgggcagacgagggacacgaaactatcctcgacacggcgatccgagagtctgacagagctgccctgcaaactctccttattgtagctgcgcaaaaaggatga

SEQ ID NO: 1228 - protein, 130 aa, Klebsiella aerogenes
MTKQILPNELAEIVTGLLIKPELLGELDSREAHQAFMLDIGRVIADHCGGLVNGITDGDLAKPYLSDIECTPILHIEPDDRLPSTERNVWSNYHVEAWADEGHETILDTAIRESDRAALQTLLIVAAQKG

SEQ ID NO: 1229 - DNA, 648 bp, Klebsiella aerogenes
atgaacgtcattcagccccgcatgctctctgtatttgactttgacggtacgttaacgcggcatgatagctttatcccttttctgcggtttgcctttggcaatcgggcgttttcgcgacgtatcgtcagcatggctctacccacgttacgctgtatgggtaagcagatgacgcgtgatgagctaaaagaaacgctcattacaacttttcttactggtgttgaggaaaagtgggtgtcttctaaagcagaggaattctgtcagctctactggcatcgcctcatgcgcccggcaggtttgattgctgtggcgaatgaagtcacttccggcgcgatcgtcaccttatgttctgcgtcgccggaaattgtactcagaccctttgccgaaaaacttaggatcaaactgattggtacacaattagagacaaaagacggcattctgaccggcagaatcagtggtcataattgcaggtgctcacagaaaattatccggcttgaaaaagaatatggacctctgactgactatcatcttcgggcatggggtgatacgcggggtgattatgaactcctttccgcagcgactgagcctcactggcgtcacttccatcaaggtttccgtcgtaaacttccgtcgaagctaatcatcagataa

SEQ ID NO: 1230 - protein, 215 aa, Klebsiella aerogenes
MNVIQPRMLSVFDFDGTLTRHDSFIPFLRFAFGNRAFSRRIVSMALPTLRCMGKQMTRDELKETLITTFLTGVEEKWVSSKAEEFCQLYWHRLMRPAGLIAVANEVTSGAIVTLCSASPEIVLRPFAEKLRIKLIGTQLETKDGILTGRISGHNCRCSQKIIRLEKEYGPLTDYHLRAWGDTRGDYELLSAATEPHWRHFHQGFRRKLPSKLIIR

SEQ ID NO: 1231 - DNA, 1242 bp, Klebsiella aerogenes
atgcaattacaatcagggcagaacattccgcttcacacagctacactgactctccggcttgattatccccccagcccaggattccacagtacccctgagacttgcctgtttatgctgaatgctgagggaaaagtgacaggcgatgccgattttatcttttacaacaatctcagtgctgccggtggcagtgtgaaactcaaccccggtcaccagcacgcagtcgttcattttgcgcttgaccagatcccggatacgattcagaagattgcaatctctatggtgatagatggcagtgatacgataagcggcctcgcgcaactgaaactttctgctgaaagtcaggccaccttttttgtcgatctcaatggccgcacagaaaaggctgtaattatgggggaagtttaccgacaccagggcaactggaagctcagggcgcttgggcagggatttaatggcgggcttgagccactggcagtcagctatggtgtggacgtggaacctgcagcagaagttgtaccgcaaccagcccggatcagccttgaaaagaaactcgaaggtaaagcgcctgcgcttatcagcctggctaagaaagccagtatttcgctggcaaaacacaaactggataccgttgaagcacgagtcgcttttgttctcgatgcctcaggctctatgaccggccagtttaaaaaagggcatgtacaggccgttcttgaccgtatagctgtcctgtctgtccagttcgacgatgacggcacgatggatgtatggggctttgctgagcgtcacaagaaatatcctgacgtcacactggacaatcttgacggatacattgctgccattcagaacacaggtaaacgatctgcctgggaaatccttcccggccttggcgggacgaacaatgagccgccagtcatgaatgaggttatcgattatttcaaggacagcaccttacctgtttttgttgtgtgcattacagatggcgggatcagcaaaacacgagaaattaaagaggccatccgccgctcagccaactatcctgtcttctggaagttcgttggactgggcggatcaaattatgggattctggagaggctggacacctttagcgaccgtcgggtagacaacagcaacttttttgcgatcgataattttgcccacataaaggacgaagagttgtatgaaaaacttctcgaagagttcaaagactggcttggactggcaaaaaaggaaggcattatctga

SEQ ID NO: 1232 - protein, 413 aa, Klebsiella aerogenes
MQLQSGQNIPLHTATLTLRLDYPPSPGFHSTPETCLFMLNAEGKVTGDADFIFYNNLSAAGGSVKLNPGHQHAVVHFALDQIPDTIQKIAISMVIDGSDTISGLAQLKLSAESQATFFVDLNGRTEKAVIMGEVYRHQGNWKLRALGQGFNGGLEPLAVSYGVDVEPAAEVVPQPARISLEKKLEGKAPALISLAKKASISLAKHKLDTVEARVAFVLDASGSMTGQFKKGHVQAVLDRIAVLSVQFDDDGTMDVWGFAERHKKYPDVTLDNLDGYIAAIQNTGKRSAWEILPGLGGTNNEPPVMNEVIDYFKDSTLPVFVVCITDGGISKTREIKEAIRRSANYPVFWKFVGLGGSNYGILERLDTFSDRRVDNSNFFAIDNFAHIKDEELYEKLLEEFKDWLGLAKKEGII

SEQ ID NO: 1233 - DNA, 576 bp, Klebsiella aerogenes
atggctgtttctctcgttaaaggcggtaatgtttctctgactaaagaagccccgagcatgaatgttgctctggttggcctgggctgggatgcacgcgttactgatggtcaggcatttgatctggatgcatcagtattccttgttggcgaaaacggtaaagtgctgtccgattcgcatttcgtattttataacaacaccaccagcccggatggcgcagtacagcatcagggtgacaaccgtaccggtgaaggcgacggtgacgatgagcaggtcaaaattgatctgacaaaagtggccgcagacgttaagaaactcgtattcgcagtcaccattcatgaagcagacagccgtaagcaaaatttcggcatggtcagtaacagctttatgcgtgtggtgaacaacgataatggcgccgagattgcacgctttgacctgtcagaagatgcctctactgaaaccgcaatgattttcggtgaactgtatcgccatggcgcggaatggaagtttaaggctgtaggacagggctttgctggtggcctggctgcgctggcaacccagcacggcatcaacatctga

SEQ ID NO: 1234 - protein, 191 aa, Klebsiella aerogenes
MAVSLVKGGNVSLTKEAPSMNVALVGLGWDARVTDGQAFDLDASVFLVGENGKVLSDSHFVFYNNTTSPDGAVQHQGDNRTGEGDGDDEQVKIDLTKVAADVKKLVFAVTIHEADSRKQNFGMVSNSFMRVVNNDNGAEIARFDLSEDASTETAMIFGELYRHGAEWKFKAVGQGFAGGLAALATQHGINI

SEQ ID NO: 1235 - DNA, 627 bp, Klebsiella aerogenes
gtggttgtctggcaaaagatacctctgcagaatgagacaatcacctttaaacatgaccttaattttagccatcacaggctactgaacccggatccggtgagcgctctggctcacataagaaagaagcatatagaagaccaggctatgcgtactcataaactgaacaagtcacgtaaactatatcgcagtgacaatacaactacgcggcattattcaattaatccggggggggagtatcgctgggggcgaaatcgtaaaaaagccgaagacgagctgctggcaaagcgcgagacaatgcatggcaggcaaaagagaggccgtgactataccccattgttttactttctcgtcaaacagattggccaaccgtgggataaggtattcagcgaagtatgtggtcgtcttgatacaacagagcctgttttctggttggtcgcgcggcatgagcatcagaaaagagatttggtacgtatcggtgacagcagcttttatccgggcctgtttgttgatggtaatggaatcttacaacaggtaaacccttcgattacgggaaaggacgttaaggtaacctgccgttgctgtacccacacctatatgggggagccagtcccagggaagtatgagtaa

SEQ ID NO: 1236 - protein, 208 aa, Klebsiella aerogenes
MVVWQKIPLQNETITFKHDLNFSHHRLLNPDPVSALAHIRKKHIEDQAMRTHKLNKSRKLYRSDNTTTRHYSINPGGEYRWGRNRKKAEDELLAKRETMHGRQKRGRDYTPLFYFLVKQIGQPWDKVFSEVCGRLDTTEPVFWLVARHEHQKRDLVRIGDSSFYPGLFVDGNGILQQVNPSITGKDVKVTCRCCTHTYMGEPVPGKYE

SEQ ID NO: 1237 - DNA, 789 bp, Klebsiella aerogenes
atggctgagaacgcatccccaaaaactgaaccgcgcaatcaacgtaacgctggcaataaccgcccgttagggatggtcatttcaaaattaaagccactttcaagtgagttctatacgcattttcatgaaaaaaacagaacctgcctgcgccagtttaacgccatttccaatgcaatttataatattttccaactggtagaaggtgaccaggcgacaagcactaaagttcagaaatggctctccggtgtttacgatgaactgtcgggtaatgtaaataccttcaaggagcagattgacaaaaatgtcgccagactgcctctggatgattcatcattcgaagggtttgactatggtgaatttgaaattcgctggaaccacccaatgacctataaattactggatattatccagaccatcaacgtcctgactcgtcaggcacatcagttgtggttatacggtcagatatcacaacaggttcatgaccgaattatcctgcaactcctgagctcactgcgggttgcgatggacaacatcactaaaatactgaacactgaaaaccgcgtgaatggaaaatacgacgcattgccattcatccagagcattaagcggtttaaatcggtggaactttatattgccagtctcgaaactaaagcccctcttcagtccggtcacagtaacagttctgctgatgctggcagtgagccgacattaaaacaagaagaagcagctggctccggtaaaccatctgacaaaacacagccttctgccactcctgtttcggtacaataa

SEQ ID NO: 1238 - protein, 262 aa, Klebsiella aerogenes
MAENASPKTEPRNQRNAGNNRPLGMVISKLKPLSSEFYTHFHEKNRTCLRQFNAISNAIYNIFQLVEGDQATSTKVQKWLSGVYDELSGNVNTFKEQIDKNVARLPLDDSSFEGFDYGEFEIRWNHPMTYKLLDIIQTINVLTRQAHQLWLYGQISQQVHDRIILQLLSSLRVAMDNITKILNTENRVNGKYDALPFIQSIKRFKSVELYIASLETKAPLQSGHSNSSADAGSEPTLKQEEAAGSGKPSDKTQPSATPVSVQ

SEQ ID NO: 1239 - DNA, 642 bp, Klebsiella aerogenes
atggaagcgaaaactaaaaccttcataaaaacgtctgttgatgataacggcatgtggctactgaccgtcccggcggggagcgcgggcaacgaaacaatggttgtggccgtcagacgggtggaggaatgtcgttacgggtctgaggactcgccaggggcacatgtgtcgatcacctgtagcctgacgctgtacggtgacggacaaagtacaccgcagaccattgtcgcgaagttcgagcacggccgtgtggaactgttcagtgttgaatttatgctgaatgaatttttaccccgtggccggggagtgggcagctggatcatgcagcagatggtgctctggacccgctccctgccgccggaaacgctggtcagacaaatccacatttcgtccgtggatgcgaaaaacattcacaatctgatccgccggagcagactgtggcgcgggctgggtttccggttcccgccgggggaaaccagctcaatgccactgcgggcagacgaactgcagttgccacggggcaggtgttcaacgctccgggtggagtccctggtatccgcggtacgccggctggaagactgttatcgcgggctgcagaaaaaaatcgtgcagatcgaaggcaaaaaaggtcgcaaaaacagttaa

SEQ ID NO: 1240 - protein, 213 aa, Klebsiella aerogenes
MEAKTKTFIKTSVDDNGMWLLTVPAGSAGNETMVVAVRRVEECRYGSEDSPGAHVSITCSLTLYGDGQSTPQTIVAKFEHGRVELFSVEFMLNEFLPRGRGVGSWIMQQMVLWTRSLPPETLVRQIHISSVDAKNIHNLIRRSRLWRGLGFRFPPGETSSMPLRADELQLPRGRCSTLRVESLVSAVRRLEDCYRGLQKKIVQIEGKKGRKNS

SEQ ID NO: 1241 - DNA, 207 bp, Klebsiella aerogenes
atgatcaccggcaccacaaactacgacgatgttccaggtgttcgctgcactttatgcggaggctattacaaagccgatgatccgggaagtcacgaatgcgctgaagaagcgcaactccattacgaaattgaatgtgatatctgcggcttcaaaagtacagacgccgacggtgctcactactgctgcgaggataactctgatgactga

SEQ ID NO: 1242 - protein, 68 aa, Klebsiella aerogenes
MITGTTNYDDVPGVRCTLCGGYYKADDPGSHECAEEAQLHYEIECDICGFKSTDADGAHYCCEDNSDD

SEQ ID NO: 1243 - DNA, 471 bp, Klebsiella aerogenes
atgagttatctcgtccgggcttcccgttgttatgctaacccatcgcgaaatcagataacccatgtaatagtcacaaaacttaatcgtagagatacatactcttctgagcaaagtattaagaaatctatatctgagccgtcattaagttcggaaatatcgtcaacagcactatcttgtggcggtgctctgttaactgcgggtgtttttattatcggtactggtgctactgcagttactgctggtgcatcaagcgcatttgcgatattagggtatgcaggtgcggtggcaacaactgcgcaatgtatcaatggtgtgataaggctatgggatattgagttcaataattctgcgttaacaggttggttggattcggaagattggtatacatcaacgtcaacggcgttggatgtcatctctcttgcttctgctgctggtgcattgcttgatgttttaaaaacttataaagtatga

SEQ ID NO: 1244 - protein, 156 aa, Klebsiella aerogenes
MSYLVRASRCYANPSRNQITHVIVTKLNRRDTYSSEQSIKKSISEPSLSSEISSTALSCGGALLTAGVFIIGTGATAVTAGASSAFAILGYAGAVATTAQCINGVIRLWDIEFNNSALTGWLDSEDWYTSTSTALDVISLASAAGALLDVLKTYKV

SEQ ID NO: 1245 - DNA, 159 bp, Enterobacter hormaechei
atgaaactgccgcgaaacactctgctcgggtgcgtattaatagtgtgcctcacactgctgatattcacttacctcacccggaaatcactttgtgaaatccggtacagggacacgaacagggaggtggcggcttttctggcttacgaatccgctaagtag

SEQ ID NO: 1246 - protein, 52 aa, Enterobacter hormaechei
MKLPRNTLLGCVLIVCLTLLIFTYLTRKSLCEIRYRDTNREVAAFLAYESAK

SEQ ID NO: 1247 - DNA, 435 bp, Klebsiella aerogenes
atggaacggattgaacatcacgtctgtttcggcggcagccaggaagtctggcgtcaccactctgcggtgaccggcacgccgatgactttttccgtgtttctgccgccgcaggcaaaaacagagaaatgtcctgtgctgtactggctttccgggctgacctgcaacgagcagaattttatcaccaaagccggggcacagcgttacgcagcggaacacggcctggtgattgtcgcgccggataccagtccgcgcggcagtcaggtggcggatgataaagagtacgatctcggccagggtgccgggttttatgtcaatgccacacaggagccgtggaaagcgcattatcagatgtatgattatattctgaatgagctgcacaccctggtaagcgggcatttcggcacatcggaaaaacgggcactgttgcaaagttag

SEQ ID NO: 1248 - protein, 144 aa, Klebsiella aerogenes
MERIEHHVCFGGSQEVWRHHSAVTGTPMTFSVFLPPQAKTEKCPVLYWLSGLTCNEQNFITKAGAQRYAAEHGLVIVAPDTSPRGSQVADDKEYDLGQGAGFYVNATQEPWKAHYQMYDYILNELHTLVSGHFGTSEKRALLQS

SEQ ID NO: 1249 - DNA, 1110 bp, Klebsiella aerogenes
atgaaatcacgcgcagcagtcgccttcgggccgggtttaccccttgaaattgttgaaattgatgtggcaccgccgaagaaaggtgaagtgctggtgaaaatcagtcacaccggggtatgccataccgatgcctacacgctttccggtgatgatccggaaggtctgttcccggtggtgctcggccatgaaggtgccggggtggtggttgaggtcggtgagggcgtgaccagtgtgaaaccgggcgaccatgtgatcccgctgtacaccgccgagtgcggcgagtgtgatttctgtacctccggtaaaaccaacctctgtgttgccgtccgcgaaacccagggcaaaggcgtgatgccggacggcaccagccgtttttcgtataacggtcagccgctctatcactatatgggctgctcgacattcagcgaatataccgttgtggcggaagtatcactggcgaaaatcaatccgcaggccaatgcggagcaggtttgcctgctcggctgcggcgtgaccaccgggatcggcgcggtacacaataccgcgaaggtacaggaaggggattctgtggcggtattcggcctcggcggtatcgggctggccgtggtgcagggcgcacgtcaggcaaaagcggggcgcatctttgccatcgataccaatccatccaagtttgagctggcaaaacagttcggcgccacagactgcattaatcccaatgattatgacaaacctgttcagcaggtgctggtcgaaatgaccaaatggggtgtggatcatacctttgaatgtatcggcaatgtcaatgtgatgcggtcggcgctggaaagtgcgcaccgtggctgggggcagtcggtaattatcggggtggcgggtgccggaaaagagatttcaacccgtccgttccagctggtgaccggccgggtctggaaaggcacggcgttcggcggcgtgaaagggcgtacccagttgccgggaatggtggaagatgccatgagcggcaaaatcgagctggcgccgtttgtcacgcacaccatggaactggataaaatcaatgaagcttttgatttgatgcacgacggcaaatccatccgcacagtcattcattactga

SEQ ID NO: 1250 - protein, 369 aa, Klebsiella aerogenes
MKSRAAVAFGPGLPLEIVEIDVAPPKKGEVLVKISHTGVCHTDAYTLSGDDPEGLFPVVLGHEGAGVVVEVGEGVTSVKPGDHVIPLYTAECGECDFCTSGKTNLCVAVRETQGKGVMPDGTSRFSYNGQPLYHYMGCSTFSEYTVVAEVSLAKINPQANAEQVCLLGCGVTTGIGAVHNTAKVQEGDSVAVFGLGGIGLAVVQGARQAKAGRIFAIDTNPSKFELAKQFGATDCINPNDYDKPVQQVLVEMTKWGVDHTFECIGNVNVMRSALESAHRGWGQSVIIGVAGAGKEISTRPFQLVTGRVWKGTAFGGVKGRTQLPGMVEDAMSGKIELAPFVTHTMELDKINEAFDLMHDGKSIRTVIHY

SEQ ID NO: 1251 - DNA, 1185 bp, Klebsiella aerogenes
atgaataaacccgctgtcatcgcgctggtgattacactgctggacgcgatgggaattggtctgatcatgccggtattaccgtcactgctgcgggaatatctcccggaagcggatgtggcaaaccattacggcattctgctggcgctgtatgcggtgatgcaggtctgttttgctccgctgctgggcagatggtcagataagctggggcgcagaccggtgctgctgttatccctggcgggtgccgcgtttgattacacactgctggcactgtccaatgtgctgtggatgttgtatctcgggcggattatctccgggatcactggtgccaccggcgcggttgcggcttcggtagtggcggacagcacggcggtcagcgagcgtaccgcctggttcggccgtctcggtgcggcctttggtgccgggctgattgccgggccggctatcggcggactggcgggggatatctcaccgcatctgccgtttgtcattgcggcaatactgaatgcctgcacctttctgatggtcttttttatctttaaaccggcggtacagacagaagaaaaaccggcggagcagaaacaagaaagcgcaggtatcagctttatcacactgcttaaacctctggcgctgttgctgtttgtcttttttaccgcgcagcttatcgggcagatcccggccactgtctgggtattgtttacggagagccgctttgcctgggacagcgcggcggtcggtttttcactggcgggactcggggcgatgcatgcactgtttcaggcggtggttgccggggcgctggcaaaacggctgagtgagaaaaccattattttcgccggatttattgccgatgccaccgcgtttttactgatgtctgctatcacttccggatggatggtgtatccggtcctgatcctgctggcaggcggcggaattgcactgcctgcattgcagggcattatctctgccggggcatcggcggcaaatcagggaaaactacagggtgtgctggtcagcctgaccaatctgaccggcgtggcgggcccgctgctgtttgcttttattttcagtcagacacagcagagtgcggacggtacggtgtggctgattggcacggcactgtacggtctgctgctggcaatctgtctgctgatcagaaaaccggcaccggtggcggccacctgctga

SEQ ID NO: 1252 - protein, 394 aa, Klebsiella aerogenes
MNKPAVIALVITLLDAMGIGLIMPVLPSLLREYLPEADVANHYGILLALYAVMQVCFAPLLGRWSDKLGRRPVLLLSLAGAAFDYTLLALSNVLWMLYLGRIISGITGATGAVAASVVADSTAVSERTAWFGRLGAAFGAGLIAGPAIGGLAGDISPHLPFVIAAILNACTFLMVFFIFKPAVQTEEKPAEQKQESAGISFITLLKPLALLLFVFFTAQLIGQIPATVWVLFTESRFAWDSAAVGFSLAGLGAMHALFQAVVAGALAKRLSEKTIIFAGFIADATAFLLMSAITSGWMVYPVLILLAGGGIALPALQGIISAGASAANQGKLQGVLVSLTNLTGVAGPLLFAFIFSQTQQSADGTVWLIGTALYGLLLAICLLIRKPAPVAATC

SEQ ID NO: 1253 - DNA, 657 bp, Klebsiella aerogenes
atggcacggctgaacagagaatcggttattgatgcggcactggaactgctgaatgagacagggattgacgggctgacgacccgcaagctggcgcagaagctgggaatagaacagccgacactttactggcatgtgaaaaataaacgggcgttactggatgcgctggcggtggagatcctggcgcgtcatcatgattattcactgcctgcggcgggggaatcctggcagtcatttctgcgcaataatgcaatgagtttccgccgggcgctgctgcgttaccgtgacggggcaaaagtgcacctcggcacccgccctgatgaaaaacagtatgatacggtggaaacccagttacgctttatgacagaaaacggcttttcactgcgcgacgggttatatgcgatttcagcggtcagtcattttacccttggtgccgtactggagcagcaggagcatactgccgccctgaccgaccgccctgcagcaccggacgaaaacctgccgccgctattgcgggaagcgctgcagattatggacagtgatgatggtgagcaggcctttctgcatggcctggagagcctgatccgggggtttgaggtgcagcttacggcactgttgcaaatagtcggtggtgataaacttatcatccccttttgctga

SEQ ID NO: 1254 - protein, 218 aa, Klebsiella aerogenes
MARLNRESVIDAALELLNETGIDGLTTRKLAQKLGIEQPTLYWHVKNKRALLDALAVEILARHHDYSLPAAGESWQSFLRNNAMSFRRALLRYRDGAKVHLGTRPDEKQYDTVETQLRFMTENGFSLRDGLYAISAVSHFTLGAVLEQQEHTAALTDRPAAPDENLPPLLREALQIMDSDDGEQAFLHGLESLIRGFEVQLTALLQIVGGDKLIIPFC

SEQ ID NO: 1255 - DNA, 228 bp, Klebsiella aerogenes
atggatttcaggacaaaacacgatgggaccgaggctgcaactggcttttggctccaaatctatgaagaccttggtgaggataaaggcgttaacatggccgacctggaaatctgggttgatagatttatcgactcgcgcgcagagctgaatgctgaaataaagaaaaatgctctcgaatttcttaagagagccgtcatttcccttgaggctgagctaaaaggcagctga

SEQ ID NO: 1256 - protein, 75 aa, Klebsiella aerogenes
MDFRTKHDGTEAATGFWLQIYEDLGEDKGVNMADLEIWVDRFIDSRAELNAEIKKNALEFLKRAVISLEAELKGS

SEQ ID NO: 1257 - DNA, 378 bp, Klebsiella aerogenes
atggccattggtgcattttggacagagaaagtaccggatatggcggttctaaacttaacaacatatgttaaatatatgaaccttgaaggtgctgaattacgagtcgataacaagatcatcaaacttcagcctgtagatacattaaccaagtttgaacaaatgatgcccggcgataacgtagttaatatgccaacgtcgacgcgaggctttgccctgcctctttcagatttaaaacaagttatggccgcgaaaacgtcaatgattaggcttaccaccctttcagatggggcgattgttggcacgattaaagacgggcagagcgacaccaaagcctattatgctttgcaaaggttcttaaaccagatccctaataaataa

SEQ ID NO: 1258 - protein, 125 aa, Klebsiella aerogenes
MAIGAFWTEKVPDMAVLNLTTYVKYMNLEGAELRVDNKIIKLQPVDTLTKFEQMMPGDNVVNMPTSTRGFALPLSDLKQVMAAKTSMIRLTTLSDGAIVGTIKDGQSDTKAYYALQRFLNQIPNK

SEQ ID NO: 1259 - DNA, 1293 bp, Klebsiella aerogenes
atgagtaatgtattcctaaaagatactcgtctagggactctttatatcaaaaatatatatgagttttttgaaggccccaaactgttttctgtactgaatgaagtcgatggtttgtatgttgtttattggattggagatgaggatgattttgataaatggataatattacccatatctaaaactcgcctggagcatcttgagcgtaaaagattagatattaatagtatgctctcttatcaagagcaaaagttttgcttccaaattaaccttccttatgatgaaagtttggaacctgtatttataaaattaagtacagatgagatgaagcagtcaataaaacttccaaaggttgggctttacataagttcggttactcctatgcttgctactggtaagctaggagaatgtatcgaattttcaacacatgaaattcatgtggaaaaaactgcgacatcaactgaaccgttagtattaaagggtgtatctaaactctttgagtgttttaacgatttatattcatcaattttgagttcttttgatgaaaaagacgcaatgagaccagtatctggacgccctggttcatttgttttgtcttttcaagctgaaaaaatgcagcaaatagaaccgttgctcaaagaattgaacgctttgatattggcaagaggtaatctcgtcgatttcattgaaagaaaaaaaattgatgttcagatgctttctgcattgtttgagagtgtcattgagacaagctctagttttgaactgaaaagtaatgtaactgacgaactagtactggtagtccgtaaaacagacgctgaatattataatgcttcgttagcaaaactgtcgactcaagtagtcggtggttatcaggttcctcaggcaaacttaattgaaaaagtatttaaaatagttgagttgaaatggcaagataagcacttaaacagggttagcactggtttagatgaaaggcatattaattattatatacatgctgccaaaatacttggttttatccaaagcaatggatctgtttctgcgctagggcagcagttagctgaatctgaacctgaaaaaaggcttagaattgccgctcgcagctttgaatccagtcactgtggttgggcatggattatgtggagtcaggtaaaaaacctttcagaactggatccaattacagctgaagccttcttgctggagaagtgtaattcactgagtgctaaaactattaatagaagagcttctacgttacgtcagtggtgtgatgctttgaaaccggcatatcaagagatttaa

SEQ ID NO: 1260 - protein, 430 aa, Klebsiella aerogenes
MSNVFLKDTRLGTLYIKNIYEFFEGPKLFSVLNEVDGLYVVYWIGDEDDFDKWIILPISKTRLEHLERKRLDINSMLSYQEQKFCFQINLPYDESLEPVFIKLSTDEMKQSIKLPKVGLYISSVTPMLATGKLGECIEFSTHEIHVEKTATSTEPLVLKGVSKLFECFNDLYSSILSSFDEKDAMRPVSGRPGSFVLSFQAEKMQQIEPLLKELNALILARGNLVDFIERKKIDVQMLSALFESVIETSSSFELKSNVTDELVLVVRKTDAEYYNASLAKLSTQVVGGYQVPQANLIEKVFKIVELKWQDKHLNRVSTGLDERHINYYIHAAKILGFIQSNGSVSALGQQLAESEPEKRLRIAARSFESSHCGWAWIMWSQVKNLSELDPITAEAFLLEKCNSLSAKTINRRASTLRQWCDALKPAYQEI

SEQ ID NO: 1261 - DNA, 234 bp, Klebsiella aerogenes
atgaaagttgaaatcacgatcgaccgtaagaagaaattgcctgatggagcagagcctgcattagaggctgagttgctgcgacgattaaatcaaaaatatgacaactgcaaattgacgatccgccgtacaggggctgatgggctcagtgtgttcggtgccatggccggcgataaagaagctatcgaagagatccttcaggagacgtgggaaagcgctgacgactggttttactaa

SEQ ID NO: 1262 - protein, 77 aa, Klebsiella aerogenes
MKVEITIDRKKKLPDGAEPALEAELLRRLNQKYDNCKLTIRRTGADGLSVFGAMAGDKEAIEEILQETWESADDWFY

SEQ ID NO: 1263 - DNA, 915 bp, Klebsiella aerogenes
atgatgaaaccgacttttaatcaattaataagcttttgtactgtggcagaagtggggaacattggtcgtgcggcggagaggctgagcatttcacagcctcccttgagcaggcagatcgcacagcttgaaagcaatgtaggggcgaaactttttacccgggatgcgaaaggcgtgaggctgacaattgccggtgaacaatttttaacagacgctcacgcaatcttggcccttatgcaacaggcctgtaataacgtgcgagcagtagcggatggacaacagggatttttgaagcttgcggcgactatgtacgcgtcctacagcgtggtaccgcaggtcgccatgcgacacaaggccagttaccccgacgttaagttgctattcaaagagctggtgccaacggacttaattagcgccttacaggatgggagcattgatgcggcaatctcatttggagagcccaccacatcagatattaattctcttgtgattttgcaggagccattaatagcagctttaccggccaaccaccatttcgctgatagcgaagcgttaaacctggcttgcttggtggacgatcagtttattaccgtgcctcgagctatggcacccatgctgtacgacactattctaagccagtgtcagaaagcgggttttagccctcatatcggattagaggtatcaagtcagcagacgatcgttaatttcgtggctaacggatttggggtagcgcttattccggcaagtatgcagcatgcgcaaatacgaggagtggtttacaaagaactcgcaggagcaaatacggtacagaatgttttaatgtggaatgcgagaaacaaaaacccgagcctaaagcggtttttaagcctgtgccgcgaaatccgtgacgaactgaacgcagcacaggctggagagtaa

SEQ ID NO: 1264 - protein, 304 aa, Klebsiella aerogenes
MMKPTFNQLISFCTVAEVGNIGRAAERLSISQPPLSRQIAQLESNVGAKLFTRDAKGVRLTIAGEQFLTDAHAILALMQQACNNVRAVADGQQGFLKLAATMYASYSVVPQVAMRHKASYPDVKLLFKELVPTDLISALQDGSIDAAISFGEPTTSDINSLVILQEPLIAALPANHHFADSEALNLACLVDDQFITVPRAMAPMLYDTILSQCQKAGFSPHIGLEVSSQQTIVNFVANGFGVALIPASMQHAQIRGVVYKELAGANTVQNVLMWNARNKNPSLKRFLSLCREIRDELNAAQAGE

SEQ ID NO: 1265 - DNA, 1695 bp, Klebsiella aerogenes
atgtctaatacattaacaaaagtacaggatgcaaacgcacgccgtggtggtgatgtactattagaagttcttgaaagtgaaggcgttgaatacattttcggcaacccgggcaccacggaattaccgttaatggatgcacttttacgccgtcctaaagtgtcctatattctggctctccaggaggctagtgccgtagcaatggctgacggttatgcccaggcatccggcaagcctggtttcctcaacctccacacggcgggcggcttgggtcacggcatgggcgctttacttaatgcggcctgctctcaaactcctttagtggtcacggctggccagcaggatacgcggcactttatgaccgaccccctgctgcttggcgatctgtgtaatatcgcaaaacctgccgttaaatgggcgcgtgaagtgaccagcgcggatcagcttcccgtgttgctgcgtcgtgcatttcatgatgccgacgccgccccgaaaggcgcggccttcctgtcgctgccaatggatgtaatggaggaattgagcactgttaacatcggctctccgtctaatatcgaacataaatctgttgcgagttctctgcctctgctagctgaaaaactcgcggcgtttgcccctggtaaagtggcaatcattgcaggcgacgagatcagtcagtcccaggcggctaaacaggttgtcgatctagctgaaatgctcgcggctgacgtgtacggctcaacgtggcctagccgtattccataccctaccgcccatccattatggcgtgggaacctcacgacgaaagcaacggaacttaataaggcgctctccggatatgatgcgatctttgcgctgggtggaaaatcccttatcactatcctgtattcagaaggtgacgcggtgccagcatcctgtcaggtgttccaactatccgccgattctggcgatctggggcgcacttacgttagtgaattgtctgttgtgggtgatattgcgctttctctcgatgcgctgttacctcacctgcacaaaaccaccgcggatcgtcgctctggttacctgcgccgttttgatgaggccaaggcaaaatttaacgctgacaaagcgaatcatgaggagctggttaacgaacaatacaacgcagctgtaatcactccggtagtggctgcattcgaggctgcgcgtgcaatcggtccagatgtggcgatcgtggatgaagctatttcgacgtcgggaggcttacgtaaagcactgaacagtcctaaagccgatcaatatgctttcatgcgtggcggcggtctgggctggggcatgcctgcagcggttggttactccctgggattaggtaaagctccggtggtgtgttttgtcggcgatggggctgccatgtactccccacaggcgctgtggacagctgcgcatgagaaattacccgtcacgtttatcgtgatgaataatactgaatataacgttcttaaaaacttcatgcgctcgcaggatgaatacacttcagcccagacagatcggttcatcgctatggatttaatcgcacctgccattaattaccaggctctgggcgcttcgatggggctggaaacctgcaaaatccatcgcgcctgtgatatagctcctgcagtcgaagccgcgattgccagcggtaagcccgggttgattgaaatcatgatcagcaaaggttaa

SEQ ID NO: 1266 - protein, 564 aa, Klebsiella aerogenes
MSNTLTKVQDANARRGGDVLLEVLESEGVEYIFGNPGTTELPLMDALLRRPKVSYILALQEASAVAMADGYAQASGKPGFLNLHTAGGLGHGMGALLNAACSQTPLVVTAGQQDTRHFMTDPLLLGDLCNIAKPAVKWAREVTSADQLPVLLRRAFHDADAAPKGAAFLSLPMDVMEELSTVNIGSPSNIEHKSVASSLPLLAEKLAAFAPGKVAIIAGDEISQSQAAKQVVDLAEMLAADVYGSTWPSRIPYPTAHPLWRGNLTTKATELNKALSGYDAIFALGGKSLITILYSEGDAVPASCQVFQLSADSGDLGRTYVSELSVVGDIALSLDALLPHLHKTTADRRSGYLRRFDEAKAKFNADKANHEELVNEQYNAAVITPVVAAFEAARAIGPDVAIVDEAISTSGGLRKALNSPKADQYAFMRGGGLGWGMPAAVGYSLGLGKAPVVCFVGDGAAMYSPQALWTAAHEKLPVTFIVMNNTEYNVLKNFMRSQDEYTSAQTDRFIAMDLIAPAINYQALGASMGLETCKIHRACDIAPAVEAAIASGKPGLIEIMISKG

SEQ ID NO: 1267 - DNA, 642 bp, Klebsiella aerogenes
atgacacacaataaaaaatgggtgttttctgagttagttaaggattcgaacgacctaagccagcttatcgcctatgcgatttataaggctgataaggacggcgtagccattggttaccgagctcagggaaagagtgaggcagagattcaagccaaactagatgattatcatgattctgtagctacgacacctcggctgcagcagagctgccatgaacgggcagcttctctcatttttacgcttgttaatgatattgctgctgagacgcaacaaaaagcagccgagcaaataactgccattaatgccgaatataaaaagtctcttaccaaagaaggcaaaaaggcagtcgaggaatatcataaaaaaataaaacaaaacgttgcagaaaaacaaaccaaatgggaatggttgaaggaattcactgtatctggtttttctggtgtgtgggcgacaatccttcttattctcgctgtctggctactaagcatggcagctgcacctaaaagtgaaagagatcaccttacggggaacttgttccagcggatgtggaactatgtgaattcgtcaccactgcccgaggcagaggctgcgaaaggtgcagatacaccaaaagcaacgttaggccaaccgacgaagccataa

SEQ ID NO: 1268 - protein, 213 aa, Klebsiella aerogenes
MTHNKKWVFSELVKDSNDLSQLIAYAIYKADKDGVAIGYRAQGKSEAEIQAKLDDYHDSVATTPRLQQSCHERAASLIFTLVNDIAAETQQKAAEQITAINAEYKKSLTKEGKKAVEEYHKKIKQNVAEKQTKWEWLKEFTVSGFSGVWATILLILAVWLLSMAAAPKSERDHLTGNLFQRMWNYVNSSPLPEAEAAKGADTPKATLGQPTKP

SEQ ID NO: 1269 - DNA, 840 bp, Klebsiella aerogenes
atgcgccgggtatcggatgatgccaggttgctggcgctgtacctgctcaccgggcaacacacgaacatgattgggtgtttccggctgcctgatgggtatgtttcggaagacttagcctggactcctgaaagggtttcgaaagggtttgatgaactatcggctaacggtttcgcaacgcgtgattcgtcatcgaaatgggtgctaattcgtaactttctgacctggaattcagttgaaaacccaaaccagggaattgcagcactgcgtttgtttgatcaggtcccggacacatctacggttaagccagagctggcgcgggttttagcctcggcaatatcccacatcggcatcgcaaaactaaagggttccgaaagggttcttgaaccgttccttaaccaggaacaggatcaggagcaggaacaggatcaggaagaagatagttcggggcatggctccgccacacccccagccgatcagaaccgggacgaaggggataaacctgattcccaaaaaatatacccgaatgatttcgagcaggtctggtcggtttatcccaggcgggcagggggtaacagcaaatccgatgccttcaaagcttggaatgcccgaatcagggatggaaccactacggcggaaatcctcgcaggtgtggagcgttacgcggctttcgttaaagccgagggaatgctgaacacgcagtacgtgaaacaagcgaaaactttttttggccctggtatgcatttcagcgaaccgtgggcgattcagcaggcgccaggaactcgagatcccaatcagatttcggaacctgacaaaaccatcccagcgggattcagggggtag

SEQ ID NO: 1270 - protein, 279 aa, Klebsiella aerogenes
MRRVSDDARLLALYLLTGQHTNMIGCFRLPDGYVSEDLAWTPERVSKGFDELSANGFATRDSSSKWVLIRNFLTWNSVENPNQGIAALRLFDQVPDTSTVKPELARVLASAISHIGIAKLKGSERVLEPFLNQEQDQEQEQDQEEDSSGHGSATPPADQNRDEGDKPDSQKIYPNDFEQVWSVYPRRAGGNSKSDAFKAWNARIRDGTTTAEILAGVERYAAFVKAEGMLNTQYVKQAKTFFGPGMHFSEPWAIQQAPGTRDPNQISEPDKTIPAGFRG

SEQ ID NO: 1271 - DNA, 1608 bp, Klebsiella variicola
atgccaaaccaactttttgaattcaaaagctatcctatcgtattcattggttcaggtatatctaaaagatatctaaaaaattaccctacttgggaagatttactaaatgagtattggcaaaaaataaatcctgaaatagatttctacaattatcttctgacaataaaagagaaatttcgagccagcattggcgatgattctgatttagatcataaaatatacaccgaagcagcaactaaaatagagaatgactttaacaagctttttactggcaacgcaattaaacttgaagggctagacgcaaaacgtgtgtttagtgaaaacatttcacctttcaaatactcaatatgtcaacgattctcttctcctacgcttaaggatgaggtagacctagatgaattaaattctttcaaagaactattaaaaaaagcaaaaatgatcattactactaattatgatgcatttatagagcatctacttaatgatcaaggcgtcacccctaaactatatattggaaataatggtttcttcgaagacaccattggatggtgtgagttatacaagatacatggagatatcaaggaaccgaaatcaattgtaattagcgctgaggactatgagaaatatgatgatagtgcaattctcataagtgcaaaaatactatcgaatatgattaaaaatccaattctctttatagggtattcgttaacagatagaaatgtgaaaaaactattgtcagacttctcatcacaattaccaaaagaagatggaaggaaatcagctgaaagaataattcttattcaacacaaaccaaatgaagagcaagtaatcataaagcaaatcactgatcagcaacttcaggttacttacacctctgttgaaacagacaattacaaacagatttatgatgagataagcactgttgatgaaggattgtctccttatgatgtcttacgatatcagagagcaattaagacacttattgttaatgaaggcgaaaaaggcaatctcgacacattactagtatctccatcagacttagataaacttgaagaaagcgttaaacagggaaaaaacctggttgtagctttaggtgataaaaaatacgttttcactcaaataaaagaacttaattatctagaggactatttgtttgagaaaaatgaaatatccaacaagttagcaattgagtttatcattgatgcaaaaaatacaataagattaccattttcaaagattatatccaattgcaacttccgtgatttaaatttgcagcaaaaggcattaactcgacttaatcaaagaatcgagcgccatggtaacctagataatataattaactctatagcattagataaagcaaatgcagaacgaatctttaccacaattacagagataaaaaacgcaggatttagcaagcgaaaagagccagttgtcgttataaaaaacattagacacatagatgtgcgtgaattatctgcctatgtaaaagaagatatattttcacaatttatatcatgtgataatgaaaacttaaagactgtttataggaagttgtttttagcctacgatttgcttataaatggtgatattatgaaacctctctga

SEQ ID NO: 1272 - protein, 535 aa, Klebsiella variicola
MPNQLFEFKSYPIVFIGSGISKRYLKNYPTWEDLLNEYWQKINPEIDFYNYLLTIKEKFRASIGDDSDLDHKIYTEAATKIENDFNKLFTGNAIKLEGLDAKRVFSENISPFKYSICQRFSSPTLKDEVDLDELNSFKELLKKAKMIITTNYDAFIEHLLNDQGVTPKLYIGNNGFFEDTIGWCELYKIHGDIKEPKSIVISAEDYEKYDDSAILISAKILSNMIKNPILFIGYSLTDRNVKKLLSDFSSQLPKEDGRKSAERIILIQHKPNEEQVIIKQITDQQLQVTYTSVETDNYKQIYDEISTVDEGLSPYDVLRYQRAIKTLIVNEGEKGNLDTLLVSPSDLDKLEESVKQGKNLVVALGDKKYVFTQIKELNYLEDYLFEKNEISNKLAIEFIIDAKNTIRLPFSKIISNCNFRDLNLQQKALTRLNQRIERHGNLDNIINSIALDKANAERIFTTITEIKNAGFSKRKEPVVVIKNIRHIDVRELSAYVKEDIFSQFISCDNENLKTVYRKLFLAYDLLINGDIMKPL

SEQ ID NO: 1273 - DNA, 633 bp, Klebsiella aerogenes
atgagtgaacaacgacctcctccgtcacgcccggcacagggaccggttggctggctactgtctctgaccgggcggcttatcgggctggttatcggcgcgctggtgcttcgggtagtgctggagctggcagggctatatttctggtggccgcaggaggggagcaggcacgcttttcaggtgatgaagcaggagcaggctgaactggttattgcgttgcagccgcaccctctggggaatgaaattctggtgctgctggaaaaaggggcaactcgcatacttatggtcaataagctcctgcgaaagccgttcaccgccctggcttacacgctggtgagttttatgcagcgcctgatatggctggccgccatgctccccctgctctgcctgtgtgttttaatcgggctgacagaaggtctggtgcggcgagatttacggcggtttggctccgggctggaatccgtttttctccatcgttatatcatcaggtccggcagttcagtctccaccacgctgtgggtgttttatctggcgcagccgctgtttctacctgtgacgctggttttgctgcctgcaaccttattagctggggttacggtatggatggtggcaggtagctttaagcgctggttataa

SEQ ID NO: 1274 - protein, 210 aa, Klebsiella aerogenes
MSEQRPPPSRPAQGPVGWLLSLTGRLIGLVIGALVLRVVLELAGLYFWWPQEGSRHAFQVMKQEQAELVIALQPHPLGNEILVLLEKGATRILMVNKLLRKPFTALAYTLVSFMQRLIWLAAMLPLLCLCVLIGLTEGLVRRDLRRFGSGLESVFLHRYIIRSGSSVSTTLWVFYLAQPLFLPVTLVLLPATLLAGVTVWMVAGSFKRWL

SEQ ID NO: 1275 - DNA, 1167 bp, Klebsiella aerogenes
atgggctcgacaaaatcgcctaagctcccgcgcggcgtaaccatcaggaagcatcgcaacggtgaaaccatcaatattaccttcacttataagggggttaaatgccgagaacccctttctaatctggaggtaagccataaaaatatcaaatatgccgagcgcacactcggcgaaatccataacaagatcgaaagggggactttcgtttatgcggaatattttcctcgttccacccggttaaaaattttcggtaacgctgctgcaggtaaaactgtgaagatgtacctggacgagtatctggttatatgtgaaacgaggaaactatccccttcaacaattggtggatacaagaaatgccgaagcgcactgtcatcacttcatatttttcccgcaagtgagttgacgccggcagtattgaagacgtggatccagagccagaaaacaactttgaagactattcgaaaccagctgtcattcctgcgctctgctttggatgaggccgtgacggatggtgtgcttcagattaaccctgtatcactggtaacagcatcacggtaccaaagtgataaatcgaaggcagaaagtagttatgtggttgatccgctatcaccagcagaagtagatgctttgctctccgctgctggtaacaagcagtgggagaatcttttcaggttcgcgatacaaaccgggctacgtagttctgaactgtgtgctcttcgttggagtgatatcgacttcataggaaaaacagcccacgttcagaacgccagcgtagttggtgtcatcaaaggaacaaaaacaaaagccggtacgcggaaagtagagctgactgaagaggcattcgctgctctgaccagccagaaacagttcacttttatgaaggatgaaacgatattcgaagatccaaaaaataacaaaccatgggccagtgctgatgcaattagaaaaaaagcatgggttccgacattgcgaaaggcagggattcgatacagaaacccatatcagactaggcatactttcgccacaagccatatcagtcgaggtacaaacttgttctggcttgcgactcagatgggacataaaggacctgagatgcttttccgtcactacggctcatatctgaaggaatatgatggacaaacaagcctgaagaagataaaaatataa

SEQ ID NO: 1276 - protein, 388 aa, Klebsiella aerogenes
MGSTKSPKLPRGVTIRKHRNGETINITFTYKGVKCREPLSNLEVSHKNIKYAERTLGEIHNKIERGTFVYAEYFPRSTRLKIFGNAAAGKTVKMYLDEYLVICETRKLSPSTIGGYKKCRSALSSLHIFPASELTPAVLKTWIQSQKTTLKTIRNQLSFLRSALDEAVTDGVLQINPVSLVTASRYQSDKSKAESSYVVDPLSPAEVDALLSAAGNKQWENLFRFAIQTGLRSSELCALRWSDIDFIGKTAHVQNASVVGVIKGTKTKAGTRKVELTEEAFAALTSQKQFTFMKDETIFEDPKNNKPWASADAIRKKAWVPTLRKAGIRYRNPYQTRHTFATSHISRGTNLFWLATQMGHKGPEMLFRHYGSYLKEYDGQTSLKKIKI

SEQ ID NO: 1277 - DNA, 282 bp, Klebsiella aerogenes
atggcttacttgcagatcaccctggatatcagcgaacagaaccgtgcagcagcagcagcggtttatcagaaatataaggcaccattcctctcgactattgaaggcgcggtctcaaaagagttgctggtacgtgcagaagatgtgcaggtgctgcatggctttgaaacgaccaaacaggccgaagcgtatctcggatcccagctgtttaacgcggatgtagttgaagccttgaagccttatcttaacagcgcgccagacgtgcgtatctatgccgttgcctga

SEQ ID NO: 1278 - protein, 93 aa, Klebsiella aerogenes
MAYLQITLDISEQNRAAAAAVYQKYKAPFLSTIEGAVSKELLVRAEDVQVLHGFETTKQAEAYLGSQLFNADVVEALKPYLNSAPDVRIYAVA

SEQ ID NO: 1279 - DNA, 1296 bp, Klebsiella aerogenes
ttgaataattcagccataccgtcacgtctgacggttgtcttttctgtgagcggcgacaaaaacacgatcccggtcaattccacctctgaaacgctggctgatggcctggcggcgatggactccgggttcccgcccctgacccgcatcgcactctctgccggcggtaagccgccaaaggggcaggactttaacgggattttcaatgacgtttacacgcgcctgcaatggtcggctgccgggatggggtacccctttaacgcggatttcagaacggcaatttccggctacccgaaaggcgcggtgatcccatccagcgattactcggtgtcatggctcaacaccatcgactccaataacaccgcaccggaaaaaaccgatgccactgcatctggctggatgccttcatggggctgcggatcggcgagcatttcaatatcgacggctaacgttaatgccaccgatctgcaggcggctaacccccggctcattctcaccggcgcgctaactggtaaccgggtcctttatcttccgccatgggtgaaagactggaccattgaaaataattgcaccggcagcgcttactacgttcagatccgcaccagggctgcgggcgcgaccgttgtcagcaagccggggacagtcacccaaattcattctgacggaaccaacgtaacctccctttcaaagccgcacggaaacatcgcttacgcagtcaacgggacgtattcgttcgtcgtgcctgcaggggtaacgcgcattcgttacaccgtgacaggtgcaggcggatcaggaagcggttgtcaggcgtcatcctcaagtgagtcctatagcggcggcgggggcggggctggcggtacagctttaggctggctggatgttgttccgggaacgacgttatccgttgtcgtaggcaaaggcggcgcagcggtatcaggcgccgtgtccggcaatgacggcggtgactcttctttgggcgggatcatattcggacggggcgggaaaaaatccaacaaggccagcatcgtgaacagcgccgggggtgatggcggtgttgcgtcaggtggcgatgtcaacattcagggaggtaccggtcaggacggccaggccgcaaccaacatgcttaccggttctggtggagcttcgttctggggtggtggtggccgtagcggcgcaaccggcggcgtgaaagggaaagcggcaggctccggtggtggtggtgcatacgatattgatttcagcggaatagcttacccatcaggcgatggcgccgatggcattgtgcatatcgagtggtaa

SEQ ID NO: 1280 - protein, 431 aa, Klebsiella aerogenes
MNNSAIPSRLTVVFSVSGDKNTIPVNSTSETLADGLAAMDSGFPPLTRIALSAGGKPPKGQDFNGIFNDVYTRLQWSAAGMGYPFNADFRTAISGYPKGAVIPSSDYSVSWLNTIDSNNTAPEKTDATASGWMPSWGCGSASISISTANVNATDLQAANPRLILTGALTGNRVLYLPPWVKDWTIENNCTGSAYYVQIRTRAAGATVVSKPGTVTQIHSDGTNVTSLSKPHGNIAYAVNGTYSFVVPAGVTRIRYTVTGAGGSGSGCQASSSSESYSGGGGGAGGTALGWLDVVPGTTLSVVVGKGGAAVSGAVSGNDGGDSSLGGIIFGRGGKKSNKASIVNSAGGDGGVASGGDVNIQGGTGQDGQAATNMLTGSGGASFWGGGGRSGATGGVKGKAAGSGGGGAYDIDFSGIAYPSGDGADGIVHIEW

SEQ ID NO: 1281 - DNA, 357 bp, Klebsiella aerogenes
atgaaaacaatctctctcaaactcgatcccgacacctgggaccttgtccttgatgagctgggtaatatcgccacggtagaaaacccctacgcctgcgctcaggacgtagcgacggcatgcctggctatacgcggcgaatgcatttacgaaaaagacaccggcgttaattacaaagagctgctgaacgttaaggccagcaccggagccatggcggccgcgcttcaggttgaagcgttgcgaatgagctatatcgcgcgagctgagccgacgctgattaacaaccgagatacgcgccgcactaccggcgttattgcgatcgtggataccaacggcctggattccagcgtcaccctgtga

SEQ ID NO: 1282 - protein, 118 aa, Klebsiella aerogenes
MKTISLKLDPDTWDLVLDELGNIATVENPYACAQDVATACLAIRGECIYEKDTGVNYKELLNVKASTGAMAAALQVEALRMSYIARAEPTLINNRDTRRTTGVIAIVDTNGLDSSVTL

SEQ ID NO: 1283 - DNA, 1068 bp, Enterobacter cloacae
atgagaaaatgttcggtgcctaaaaacgacgaaaccccagtcgcgccaacgactgaggtttctaaattaccagttaactacgagaaaactgacatgactagtttagcaattgcagatcgtacaatcaacgtgcctttctacggcaactccctttttgtagttgagcataacggcgaggcctacacgccgatgaaaccaattgttgaggggatggggctggactggaaatctcagcacaaaaagatttctcagcgcttttacaaaggtatggtggaaatcaccataccctcagttggtggtattcagtcaatgatttgcctcgccctgcgcaagctagcagcatggctgaacagcatcagccccaacaaagtccgtcctgaaattcgcgataacgtcattcgctaccaggaagagtgcgacgacgttctttacgagtactggacgaaaggcgaggttaagaacccgcgcaaggctaaaaagtcactacccggcaaaatcacccctgagcagcaggaagccattaagcagctggtaatgactcgcggcaaggcgctgccgaaagagaatcaggccaaagcgatgatcaccatgtggtcttcactgaaatctcactttggttgcagttacaaagaaatcagcgacgaccagtttaccgaggccctttctatcgctgcgcgcgtacctcttgagggggaattccttggcaagcaggaaacactgccagcgccgaagtttgacgttaacattccgcttcaatggtggatcgataacaacccgttggttcgcagtggcaacctgtcatttgggaagtctctaacggccccgtcctttgacgtgacgatggagatgctttgtggtgacaactcgacatctgcggccattcgcctgattaacattctggaggaggctggctttgatgtatcagcgccgaaggccgaaattgtagcgatgcgaaaacatctgggtaatgtcgagtacggcatgaaggctatcgcagacgcttgccgccgggcgggaaataaaaccatctcgttccgcggcggaaaggctgaatatctgattggttaa

SEQ ID NO: 1284 - protein, 355 aa, Enterobacter cloacae
MRKCSVPKNDETPVAPTTEVSKLPVNYEKTDMTSLAIADRTINVPFYGNSLFVVEHNGEAYTPMKPIVEGMGLDWKSQHKKISQRFYKGMVEITIPSVGGIQSMICLALRKLAAWLNSISPNKVRPEIRDNVIRYQEECDDVLYEYWTKGEVKNPRKAKKSLPGKITPEQQEAIKQLVMTRGKALPKENQAKAMITMWSSLKSHFGCSYKEISDDQFTEALSIAARVPLEGEFLGKQETLPAPKFDVNIPLQWWIDNNPLVRSGNLSFGKSLTAPSFDVTMEMLCGDNSTSAAIRLINILEEAGFDVSAPKAEIVAMRKHLGNVEYGMKAIADACRRAGNKTISFRGGKAEYLIG

SEQ ID NO: 1285 - DNA, 177 bp, Klebsiella michiganensis
atgaaagacctgttacatagccagcgcgtgatcgagcagttctcactgagactgccggaaagagtcaagaaagcagttcaggaaaaagcagaagaagaggggttgtcattgaatgcagcgatcgttcagcggttggtttggagcttaaaaaacgatgagaaaatgttcggtgcctaa

SEQ ID NO: 1286 - protein, 58 aa, Klebsiella michiganensis
MKDLLHSQRVIEQFSLRLPERVKKAVQEKAEEEGLSLNAAIVQRLVWSLKNDEKMFGA

SEQ ID NO: 1287 - DNA, 204 bp, Klebsiella michiganensis
atggaatggattattggtgtaatcgtaatagtatttctcgttaaccttttcaaaccaaggcgttgcgatgtatgcggcatagggtttaagcggaactactacacctggaagatcgacggcaaaaatcaacacctttgtccgaactgcaatagcaaaatgaaaaaaagaaaaagcgacatcagctttaaagacagattcggctaa

SEQ ID NO: 1288 - protein, 67 aa, Klebsiella michiganensis
MEWIIGVIVIVFLVNLFKPRRCDVCGIGFKRNYYTWKIDGKNQHLCPNCNSKMKKRKSDISFKDRFG

SEQ ID NO: 1289 - DNA, 591 bp, Klebsiella aerogenes
atgctaactaatcagaagccgatggacatgtcgtgtcaggggaatgctgttctttcgcttatagccggagccataaagggctgcgtatttgccgatatcgtcttagtcaaaaaagtgaatgggaagacccttaccgtttttcctctggttactggaacaaacgcttctggcggatcaattgaaaaccaggatgtttacaatgttccattcattcagtaccaggctggaaatagttcggtaaaaatgacgcccagagtaggtgatattggcttggtgattgcctgtgataaagacatcacaaatgtgaaaaaaactaaaggcggaggccctccaccaactcagcgccgtcactcgtactcagatgctgtttatatcacggcgatcgctagcctaaatgatgagccgacggagcttgcagagttcaccggtagcggcataaacatcaagagccctggcgtagttaacatcaacggcctgaaagtacacccagacgggaaacttgagcttgtcgatggctctatcgttgatggacatgaccatggcggggtaatatcagggggaagccgaaccgatcctctgggggcggcatag

SEQ ID NO: 1290 - protein, 196 aa, Klebsiella aerogenes
MLTNQKPMDMSCQGNAVLSLIAGAIKGCVFADIVLVKKVNGKTLTVFPLVTGTNASGGSIENQDVYNVPFIQYQAGNSSVKMTPRVGDIGLVIACDKDITNVKKTKGGGPPPTQRRHSYSDAVYITAIASLNDEPTELAEFTGSGINIKSPGVVNINGLKVHPDGKLELVDGSIVDGHDHGGVISGGSRTDPLGAA

SEQ ID NO: 1291 - DNA, 867 bp, Klebsiella oxytoca
atgagttacaaggaaagagagttaacggttgagtttactctggccaatggcacctttgacggtaaaaaaggtaacacgctcatagccgaagggttcaagtgcgagctttctgtttcggcttatgggggagctaccgggacgatgatggagcttagcctgtggggcttatcccttgataacatggctaaattgaccaccaactccgaaaaattctttgatgaagaacagaatgcaatccgagttttcacaggtgatgtgtgtgtgtttactgggacaatagttgcatctcgaataaactttaaccagactcctgatgctccaattgagataacagcgtcagcaataggaaaggaaaagttaataccctgcgaaccaacctcaatagaaggtgacatatcggtatccgatatgatacaggcactagcggctaaggttggcctgaagttcgtaaatgttgacgttaaggcagtacacagcaacccttactacgagggaaatgctatagagcagatacagaaaattgctgctgatcacaatattactgcagatatagattttggcaccgtgacaatttacacgggtgacaaccctatcgactcagtagtgcctttcatttctcctgagcatggattaattgggtatccaatattctataactttggtattaattttcgttgcatatactcaccagcggttcagatagctcgaaaaataaaacttgagacatctcttcctcacgcgagtggagaatgggttgttcagcatggaactactcattacctttcatgcaaagtgcctggcggattatgggagacctttgttgtcgcttatccgggatttattttaggggatgggtatgctaactaa

SEQ ID NO: 1292 - protein, 288 aa, Klebsiella oxytoca
MSYKERELTVEFTLANGTFDGKKGNTLIAEGFKCELSVSAYGGATGTMMELSLWGLSLDNMAKLTTNSEKFFDEEQNAIRVFTGDVCVFTGTIVASRINFNQTPDAPIEITASAIGKEKLIPCEPTSIEGDISVSDMIQALAAKVGLKFVNVDVKAVHSNPYYEGNAIEQIQKIAADHNITADIDFGTVTIYTGDNPIDSVVPFISPEHGLIGYPIFYNFGINFRCIYSPAVQIARKIKLETSLPHASGEWVVQHGTTHYLSCKVPGGLWETFVVAYPGFILGDGYAN

SEQ ID NO: 1293 - DNA, 306 bp, Klebsiella aerogenes
atgcaggaaattagcttatcaccgtcactttctcaaaaggtgtatgtcacgcttggcggccaaaactgcgcgatcaagcttcatcagcgctcaactggattctacatagacctgtatgttgatgacactgcaattatgcagggtgttctctgcctaaactgtatatatcttgtcagatataagtaccttggatttaagggagatctcatttttgtagacacaaaaggagattccgatccggtttatgacgaaatagggacacgctttaaactttattatgcgtcaagtgatgaggtggaccgatga

SEQ ID NO: 1294 - protein, 101 aa, Klebsiella aerogenes
MQEISLSPSLSQKVYVTLGGQNCAIKLHQRSTGFYIDLYVDDTAIMQGVLCLNCIYLVRYKYLGFKGDLIFVDTKGDSDPVYDEIGTRFKLYYASSDEVDR

SEQ ID NO: 1295 - DNA, 843 bp, Klebsiella aerogenes
atgtcgttttctctgaatgtctcgacagtgctatccgccattcagggaggaagcctgttatccgtccttaacagcgccctgtcgccaacgtaccggatcacctacaacaccgttgacaagtcgcttttgacggctgcagccgggcaggaggttttctctccttccggctgggttagcgttgatcgctacggtgatgcggcggtgactaaggggccggtagaaaatgggcagtatacttcgtacaacaaggtccggcagccatcggagttaagggtgatcctggcacttgagggatggactgcatatacaggtgcgcttccaaacctgacaaacttatctcttcttagccgaagtaatttcattcagaaactggatgagatgaaaaacacggccagtacctacaacattgagacgccggacacggtgtattatagctacgatcttactcactttgattactttgtgggatcatatcgcgggcagacgttgttgatggcaaactgcaccttcgaagagataatggatagcggtgaagtaattatcgctaatggggtttcaggtaaggctccgacagataacgacaaaacaaacaataagggcgctgcaaaaacagaggtaatcactgcttcaactaaagaagtaacgcttactgacgcaaaaaacgcatggacaagcggaaatacatcgctatcaagcgcccttgatcttaccgggagcgccatagtttcaggtgtcaattcggcggccaaatcggtatctcaagtatgggataactcatcaacagctgtcgcaaaacagatcaaaagtacggtggctgattttcttaaaaataaggtgatgtga

SEQ ID NO: 1296 - protein, 280 aa, Klebsiella aerogenes
MSFSLNVSTVLSAIQGGSLLSVLNSALSPTYRITYNTVDKSLLTAAAGQEVFSPSGWVSVDRYGDAAVTKGPVENGQYTSYNKVRQPSELRVILALEGWTAYTGALPNLTNLSLLSRSNFIQKLDEMKNTASTYNIETPDTVYYSYDLTHFDYFVGSYRGQTLLMANCTFEEIMDSGEVIIANGVSGKAPTDNDKTNNKGAAKTEVITASTKEVTLTDAKNAWTSGNTSLSSALDLTGSAIVSGVNSAAKSVSQVWDNSSTAVAKQIKSTVADFLKNKVM

SEQ ID NO: 1297 - DNA, 477 bp, Klebsiella aerogenes
atggctcgtaaaagcatcgtattcacggttgaagcagataaccgtgacaagggtaagcagttcaaaatcaccgaaatgccggcgagaaaggccgaagagtgggcgatccgcctggcgtgtgccgtaattggcgccggcgttaccgttcccgacaatatgatgatggccatcggtgctgcggtggcgccagccccagccgaggataacgcagaagctcgcgagctgtacgaaagcgtgatggccagcggcatggcaggtctggctcagtggggtatcacttcactggctaaagttccgttcgaacagtcaaagcccctgcttgatgagttgcttggctgcgtgaaattcctcggcggtaacggtatcgaaacagcgcttgttgacgaagggcagatcgaagaaattagcacctggtcacgcctgaaaatcgaagccttcaaactccatatcgcttttgtagcagccaccgcaagttag

SEQ ID NO: 1298 - protein, 158 aa, Klebsiella aerogenes
MARKSIVFTVEADNRDKGKQFKITEMPARKAEEWAIRLACAVIGAGVTVPDNMMMAIGAAVAPAPAEDNAEARELYESVMASGMAGLAQWGITSLAKVPFEQSKPLLDELLGCVKFLGGNGIETALVDEGQIEEISTWSRLKIEAFKLHIAFVAATAS

SEQ ID NO: 1299 - DNA, 444 bp, Klebsiella aerogenes
atgtccggtcaaaatattacgtcggcagacgcgatcattgagctggtaatcgctgagctctacccatcagggtttaacctggaacagttcgaagcacaaaacatcttcgaaatgggtgataccgacatggcagagtaccagcgtactgctgacggtaaactgctgggtggttttgtttatggtgatctgccgtggacgtttcatctggcggcatcctccccgtcgattaagtacatcgacaactggcaaaccacgcagatgaccacgcggtctgtgctgcgtgttaatgggactgtgatcctgccgtcgctgggcaaaaagtacatcatgaccaacggtatcctgcagcgcgcacgccgcatgccgtctgccggccgtgtgcttcagccggtaactggactcatccagtgggaaactgtcaccccggcagactactcagcgtaa

SEQ ID NO: 1300 - protein, 147 aa, Klebsiella aerogenes
MSGQNITSADAIIELVIAELYPSGFNLEQFEAQNIFEMGDTDMAEYQRTADGKLLGGFVYGDLPWTFHLAASSPSIKYIDNWQTTQMTTRSVLRVNGTVILPSLGKKYIMTNGILQRARRMPSAGRVLQPVTGLIQWETVTPADYSA

SEQ ID NO: 1301 - DNA, 144 bp, Klebsiella aerogenes
atgcgcaccactggaatcctaatggcggaaattacgcttcgcccatacatgaagccgctgctcatcctttcagtgcttttgcgctggggttggctcactaagaagtgcatccggattggccctgtaattggcaagcaggcgtaa

SEQ ID NO: 1302 - protein, 47 aa, Klebsiella aerogenes
MRTTGILMAEITLRPYMKPLLILSVLLRWGWLTKKCIRIGPVIGKQA

SEQ ID NO: 1303 - DNA, 1032 bp, Klebsiella oxytoca
atgtccggtggtatttttgttggtatggacaaaaacatcatggatggactgaatgtcgtgctggaaggtcagtcttccacttacggcaccatgatcagtgtcatcattgtcagctctttcactttgtttattctctatcgcggttatcagacgctgggtggcaaactgaggacgccggttgaagatgtcgtctgggatgtggggcgaatgctgctgatcaccacctttgtgttaaaccttgatggctggctggatatggcaatagcggccatcgaagggcttaaagacggtatcagcggcgatgataatatctgggcgctgctggacaccgtctgggaaaaggcacagacactggggcaaacgctgttcagtatggacacctcaacttacgtcaaactgaatggcggctttgccgaggtgctggtatggggcggcgcgattgtcctgctgatggccgccacttttgccaacctgctcgccgaaatcaccatcctgttaatgacgactaccgcgccgctctttattttctgcctgctgtacggttttcttaaaccgatgtttgataactggctgaaaacgattttcgcggcaatactgacgatcatgttttccgccttatccatccgtatcgccattaattacctgaataaaatactggataccgcagcaaaaacatccgcagaaaccaatatggtgacgctggcggcgcagtgcctgctggccgggacagcggcgggtgtggtggtctggttctccgcaaaactcgccagcgcactcagcggagccgccgtacaggcggtactgcagggcgcagtcatgagtggcttgggcggactggcgaataaatccgccgatctcgccggacccggtataaaaggcggtgcccggatggccgccagaggtggaatggccgccgccacggtggctggcaggctcatcagcgcaggcgcgggtaaaaccgtgaacgcctggcagaaacgcgccgccgctatcgaaagcatgaaacgcctgaaccggcagcgtcaccgttaa

SEQ ID NO: 1304 - protein, 343 aa, Klebsiella oxytoca
MSGGIFVGMDKNIMDGLNVVLEGQSSTYGTMISVIIVSSFTLFILYRGYQTLGGKLRTPVEDVVWDVGRMLLITTFVLNLDGWLDMAIAAIEGLKDGISGDDNIWALLDTVWEKAQTLGQTLFSMDTSTYVKLNGGFAEVLVWGGAIVLLMAATFANLLAEITILLMTTTAPLFIFCLLYGFLKPMFDNWLKTIFAAILTIMFSALSIRIAINYLNKILDTAAKTSAETNMVTLAAQCLLAGTAAGVVVWFSAKLASALSGAAVQAVLQGAVMSGLGGLANKSADLAGPGIKGGARMAARGGMAAATVAGRLISAGAGKTVNAWQKRAAAIESMKRLNRQRHR

SEQ ID NO: 1305 - DNA, 2748 bp, Citrobacter pasteurii
atggctacgctgaataaagcactgacgcggcctgccaccattatgggcattcctctcgtgccgttcgttctcgtcagcggggccatcgtcctgctggcagtctatgtcagttattaccttgcggttctgctcattcctgcctgggcggaaatgaaaaataaagcccgaaaggacattcattatttcagtctgctctggctggcgtttaaaacccgcggacgacttttcaccaatacccattttggctcgaatgcccttctggcgaaccagtacgataacgttgatgtgtcggagtttattcagaagatgaaattaaacgagcgtattacactggataaatatattccgtattcctcccatattcacccttacgtcatcagaaaccggcacagcgatctggttgccacctgggagctgggcggtacggtctttgaatgtgaagacgaacatcacctgaccttaatggcgacgcacctgaataatattattcgttcgtatgaaggtctgccggtgacattctatattcaccggctgcgtgaaaaataccatgatgcctttgaggcgaattccggcattcccttttccgatgaggtgatccggcggtattaccggccggtaaaagataaaccgctctggcggcaccggctgtttttcaccgtctgctatgcgccgttctctcgggttgagaagaaaaccctgaaagcgcagtcgcccggtaaacgccgggcggcgctggatgaggcgctcaaagtcatgctggaataccgcgaagcgctggcgtcagcgttatcgcgctatacggcaacgccgctgggggtatatgaagaaaacggtcgcgtgtattcctcgcaactggccttcttccaccgcctgatcaccggccagtggcagaaagtggccgtaacgcgctcaccattttatgaaacattaagcacgccggacgtctttttcaccaccgaaaccggtgaatgccagacggtcagcggttcccgcttcttccgcagcctggagattaaggattattccccggaaacccataccgggatgctggatgcgctgctgtacgccgaaagcgagtatgttctgacgcagtcctttacctgcatggcacgggatgaggcgcaggatcatatccggctggcggaaaaacggcttaactccacggacgacgacgcgacttcccagcgcgaagagctgattgtcctgcgcgatctgctccagtccgggcatgtgtcctgcgggaaattccacttttccctgctggtttcctcagacaatgctgaccaggtggtgaaggacactaacacgctagcccagcccttcgccgatctgggcattatgacgacgctctccaccctgtcgctgcccgctgcgtatcttgcgcaactgccgggcgtctatacgctgcgcccccgactggtggccgtcagcagccagaatttcgctgatatggcctgcctgcataatttccatccccacaaacgcagcggtaatccgtggggagaagctctcgccatccttaaatcgccgggcgggggcgggtattacctgaacctgcacgacagccaggccgggcgggacgataccggagaaaaaacgccggggaataccgcgattatcggcaaaaccggctccggtaaaaccctgctgatgactgtcatgcagcagctgatgcagaagtaccgcaacccggcaacgtttgcgccttctgccaccctcaaacggctgaccacggtgtatttcgataaggaccgggcggcggagatggcgatccgccaggcgggcgggcgttatttccgtatccgtaccggcgagcccaccggtttcaacccgtttgcgctggagccgacccgccggaacatcagtttcatcaaacggctggtgcggatgctgtgccgccgcaacggtaagccgctcgatccgcgcgacgaggagcggataagcgctgccgtggataccatcatgcaggactacccgccggaataccaccagttcgggatcacccggctgctggaagtgctgccggagccgccgaccccagacgcccgtaccaacgggctgcgtatccgcctgaaacagtgggcgcaggggggcgagttcggctgggtgtttgataacgcggccgataccttcaccatcagcgatgtcgataactttggtatcgacggcaccgaatttctggatgatgacgatattcgcggccccgtgaccttttacctgctgtaccgtgtgaccggtctgctggatggtcgccgcctggtgatgtttatggatgagttctggcgctggctggccgatgtcgaattttcccgcttctcgctcaatatgctgaaagtcatccgcaagctgaacggtatcttcgttccggcaacacagtcaccggatgaaatcgtcagacaccccatcgccccggcgattattgagcagtgcggcacccagattttcctcgccaacccgaaggccagccatgcggattacgtggagaaaatgaaagtgtcggaaagcgtttatgacacggtcagaaacctggatccgggcgagcattatatggtcgttctgaaaacaccgttgcaggccggggaaacccgcccgtttgtggcgatggcgaaaatggatctgtcggggctgggtaaactcacccgtcttctcagcggcagtgaggacaacctgaaaatattcgatgccatttatcaggacggtatgcgaccagatgaatggaaagacaccttccttgagcgggcaatctga

SEQ ID NO: 1306 - protein, 915 aa, Citrobacter pasteurii
MATLNKALTRPATIMGIPLVPFVLVSGAIVLLAVYVSYYLAVLLIPAWAEMKNKARKDIHYFSLLWLAFKTRGRLFTNTHFGSNALLANQYDNVDVSEFIQKMKLNERITLDKYIPYSSHIHPYVIRNRHSDLVATWELGGTVFECEDEHHLTLMATHLNNIIRSYEGLPVTFYIHRLREKYHDAFEANSGIPFSDEVIRRYYRPVKDKPLWRHRLFFTVCYAPFSRVEKKTLKAQSPGKRRAALDEALKVMLEYREALASALSRYTATPLGVYEENGRVYSSQLAFFHRLITGQWQKVAVTRSPFYETLSTPDVFFTTETGECQTVSGSRFFRSLEIKDYSPETHTGMLDALLYAESEYVLTQSFTCMARDEAQDHIRLAEKRLNSTDDDATSQREELIVLRDLLQSGHVSCGKFHFSLLVSSDNADQVVKDTNTLAQPFADLGIMTTLSTLSLPAAYLAQLPGVYTLRPRLVAVSSQNFADMACLHNFHPHKRSGNPWGEALAILKSPGGGGYYLNLHDSQAGRDDTGEKTPGNTAIIGKTGSGKTLLMTVMQQLMQKYRNPATFAPSATLKRLTTVYFDKDRAAEMAIRQAGGRYFRIRTGEPTGFNPFALEPTRRNISFIKRLVRMLCRRNGKPLDPRDEERISAAVDTIMQDYPPEYHQFGITRLLEVLPEPPTPDARTNGLRIRLKQWAQGGEFGWVFDNAADTFTISDVDNFGIDGTEFLDDDDIRGPVTFYLLYRVTGLLDGRRLVMFMDEFWRWLADVEFSRFSLNMLKVIRKLNGIFVPATQSPDEIVRHPIAPAIIEQCGTQIFLANPKASHADYVEKMKVSESVYDTVRNLDPGEHYMVVLKTPLQAGETRPFVAMAKMDLSGLGKLTRLLSGSEDNLKIFDAIYQDGMRPDEWKDTFLERAI

SEQ ID NO: 1307 - DNA, 645 bp, Klebsiella oxytoca
atgctttccaccactgcctttctggcactggcggtgcagtgcgccgccagtattcacccgtccacgtcacttgatgtcgcacgggtcgaatccggtttccacccttacgccattgctgaaattctgccagacagccggggcgtgatttcacatttccccacgagtctgccggaggcgatccacctcaccagacagctggcgacacaggagcgacgctattcggtcggcctgatgcaaatcaccagcaccaatttccgccattacggcgtcacggccagcgacctgcttaacccttgcatcaatctgtcgatatttgaacgcattctcgccgactgttaccggcgcggcggaacactgaaacgggcgctcagttgttactactctggcaactttgaaaccggacagcgaccggaatccacctttaaccagaccagctacgtgcagcgcattggttatgtcgtcccgtccacgcgggaagaccgacaaagcgaccctgaccggaacgcacagccgtctgtccattatcccgctgttgtgctgcgcggcgagcctgccggtgccactgcgccggtcctgacttctctgcattatcccggtgccgtcattcgcggcgctatccctgtaatccctgatgaggagaaatga

SEQ ID NO: 1308 - protein, 214 aa, Klebsiella oxytoca
MLSTTAFLALAVQCAASIHPSTSLDVARVESGFHPYAIAEILPDSRGVISHFPTSLPEAIHLTRQLATQERRYSVGLMQITSTNFRHYGVTASDLLNPCINLSIFERILADCYRRGGTLKRALSCYYSGNFETGQRPESTFNQTSYVQRIGYVVPSTREDRQSDPDRNAQPSVHYPAVVLRGEPAGATAPVLTSLHYPGAVIRGAIPVIPDEEK

SEQ ID NO: 1309 - DNA, 222 bp, Citrobacter pasteurii
atgagaaaacccacttatcacgtatttgtcacccaggaaagtcagcccgacgctcagggcgaaaaaaacacgtactggacaaaggttggcgtggccttcgcgcataacggcaagcccggtctgaatatcgtgttgatacccggtattgcggtttccggcaggctggtgttgctcgaagcgagagaagaaagcgacatttcgcaggatgcatctgccgcttaa

SEQ ID NO: 1310 - protein, 73 aa, Citrobacter pasteurii
MRKPTYHVFVTQESQPDAQGEKNTYWTKVGVAFAHNGKPGLNIVLIPGIAVSGRLVLLEAREESDISQDASAA

SEQ ID NO: 1311 - DNA, 186 bp, Citrobacter pasteurii
atgacaaagtatcaattattacgtctgaagcaggttgaaaataaaaccggtctgaaacgctctcagatttacctgtatatgaaaaatggaacctttccacgttcaataaaaattggtccagccagtgtggcctggctcgaatcggaaattgatgaatggatcaacctaaagttagccggacgttag

SEQ ID NO: 1312 - protein, 61 aa, Citrobacter pasteurii
MTKYQLLRLKQVENKTGLKRSQIYLYMKNGTFPRSIKIGPASVAWLESEIDEWINLKLAGR

SEQ ID NO: 1313 - DNA, 273 bp, Klebsiella oxytoca
atgtgcgaaaggatgttaaaaaaagatgtttattctgaatgggttatacgcaatagcctgtactggatgacttcgcttactcagtggaagctttgtgaagatatatcctcttggacaatctcttttgaaaacgatagtcccgaatgcctctatgaattcgagaggctgctgaatgattacactttgcgagaaaaactacagcataaaacaggggcgttgagagattctattgtccataaagtgcttcgcagtgtcgatgaaaggctttcgtga

SEQ ID NO: 1314 - protein, 90 aa, Klebsiella oxytoca
MCERMLKKDVYSEWVIRNSLYWMTSLTQWKLCEDISSWTISFENDSPECLYEFERLLNDYTLREKLQHKTGALRDSIVHKVLRSVDERLS

SEQ ID NO: 1315 - DNA, 666 bp, Enterobacter hormaechei
atgagcatctccaccacgaaacgccgcaatgaagaagtcaatgttggtctttctgatcgccggaaaacagagattacagccccaaagtttgatctgtttggtgaaacttacacgtttgttaagactttctctggcactgtcattaattccaacccaagcaataatcagatctgggtaaaaaccgacgctggggatgagaagcagatttccgactatggtatccccttcagaagttcacacactatttataaatacgagcttcgccagtatagtgaggatggttcgtataatgtgtataaagatgcacttatcgttaataagaacacgggagaacatgaagtaaacttaaacaggaaaaaagttgtcatccccgcttttctgacaatgctgttccataatgcttctacagcatcgtattacagagcaatgcctgtttcgaaactattctctattgttttcattttactttgtgctgctgcacttatttcatttctcacattgccttggggctttaaagatggatatgtgtgggatgagcacaagtatatgtggctcacatatttcctatcaaggatcggaagcttcgtttgtatcaaatggattaaaagaagaagcgctagatttgatcatgaaatcagaaatcttatcgatttagtaaaaaaataa

SEQ ID NO: 1316 - protein, 221 aa, Enterobacter hormaechei
MSISTTKRRNEEVNVGLSDRRKTEITAPKFDLFGETYTFVKTFSGTVINSNPSNNQIWVKTDAGDEKQISDYGIPFRSSHTIYKYELRQYSEDGSYNVYKDALIVNKNTGEHEVNLNRKKVVIPAFLTMLFHNASTASYYRAMPVSKLFSIVFILLCAAALISFLTLPWGFKDGYVWDEHKYMWLTYFLSRIGSFVCIKWIKRRSARFDHEIRNLIDLVKK

SEQ ID NO: 1317 - DNA, 246 bp, Klebsiella aerogenes
atgaacccaatgcaatttgcaatcgaagctgtaggtggtcaaaccgctgcggcacgcttatgcggtctgtcgaatgttgctattcacaagtgggtaaagaacgcggcattgcctcgcactgagtacacagagaaaaccaactattcacagctcttggctgacgcatcaaaagggcagtttacggcggagtggctgcgccgagccgcgaaccctgaccgaattaaaagtggatcacatgccgcctaa

SEQ ID NO: 1318 - protein, 81 aa, Klebsiella aerogenes
MNPMQFAIEAVGGQTAAARLCGLSNVAIHKWVKNAALPRTEYTEKTNYSQLLADASKGQFTAEWLRRAANPDRIKSGSHAA

SEQ ID NO: 1319 - DNA, 252 bp, Klebsiella aerogenes
atgtcgcgagaagatccacaattcaatttcaggatgacccctgagataaaggagaaggttaagcaaagagcgaagcttaacggccggtctataaatgccgaactcctgcaaatcgtacaggatgcactggataaaccatcgccagtgactggctatcgcgacgacgccgagcgccttgcagaccagcaggcagagcagtttaaaaagattgtgtttgatacgcttaaagacatctacagcaaggagtcatag

SEQ ID NO: 1320 - protein, 83 aa, Klebsiella aerogenes
MSREDPQFNFRMTPEIKEKVKQRAKLNGRSINAELLQIVQDALDKPSPVTGYRDDAERLADQQAEQFKKIVFDTLKDIYSKES

SEQ ID NO: 1321 - DNA, 162 bp, Klebsiella aerogenes
atgacctcgcaggtcgtggagcgatgtcaaagacttttggagaatggagccacccgtaagcaggtggctgatatgatcggggtaggggtgaagaccatttataaatatttcccagcaaattattacgaagcattgcgttacatcagtggcatttatcaatag

SEQ ID NO: 1322 - protein, 53 aa, Klebsiella aerogenes
MTSQVVERCQRLLENGATRKQVADMIGVGVKTIYKYFPANYYEALRYISGIYQ

SEQ ID NO: 1323 - DNA, 282 bp, Klebsiella aerogenes
gtgatttttgatgtaagagcgacctttgaagtggcactccagacggacacccacctggtacttatcgatctggatcagggagcatcagttacgaacgatgctgatgcagtgatcgcctggttggccgcaaacctcgaaggtggaattggaaaacgtaaggtgtactaccgggacaccgatggacgctttgatgagctcaaggttaatgccggtgcttttgccggatttgcaccttgtagcgaaggccagcagaccaccttggctgggatgctcggccagtaa

SEQ ID NO: 1324 - protein, 93 aa, Klebsiella aerogenes
MIFDVRATFEVALQTDTHLVLIDLDQGASVTNDADAVIAWLAANLEGGIGKRKVYYRDTDGRFDELKVNAGAFAGFAPCSEGQQTTLAGMLGQ

SEQ ID NO: 1325 - DNA, 537 bp, Klebsiella aerogenes
atgcttagcaaaaaagtctttttcattagtcaagcggaggccgaaagactggagccggttcccggtgcggccatgatctccataactgacccagacaagtcccctgccgctctcggacagtgggggcagttgtaccgcgatagcttctatgacggcggctattctgagaacaccatccacacgatgaaggcagcgttccggatgaattacgcctcttacattgactcatcccaggctgaaaagctgtccaccttcctggatggattggttggtagcggtatcgatcagatcttcgttcattgctattacggagaatccagaagtggcgcggtagcgctgtacctccagaacaaacatggattcactccgaataagccgatcaccaagcccaaccgaacagtttacgaattgctgtgcaatccaaccaagtttgaaccactgatgcaaagctacgaaacgcaacatatggaggaggaactacctcttcacctcaaaatatgggattttcttctcgttgcggtcgggcttaggaggtaa

SEQ ID NO: 1326 - protein, 178 aa, Klebsiella aerogenes
MLSKKVFFISQAEAERLEPVPGAAMISITDPDKSPAALGQWGQLYRDSFYDGGYSENTIHTMKAAFRMNYASYIDSSQAEKLSTFLDGLVGSGIDQIFVHCYYGESRSGAVALYLQNKHGFTPNKPITKPNRTVYELLCNPTKFEPLMQSYETQHMEEELPLHLKIWDFLLVAVGLRR

SEQ ID NO: 1327 - DNA, 198 bp, Klebsiella aerogenes
atggggcgctgtactgttgaggatgccatccagttactggaagggggaaccattgttgcggtcgtaccggcgtcatccggaccagatacgctggtggtttcctctatcaggcttgaatccggactgacagtacagttttcccctccagcggcagccagtgtcagtgttcagctcgcggagctcgatgatgaacagtga

SEQ ID NO: 1328 - protein, 65 aa, Klebsiella aerogenes
MGRCTVEDAIQLLEGGTIVAVVPASSGPDTLVVSSIRLESGLTVQFSPPAAASVSVQLAELDDEQ

SEQ ID NO: 1329 - DNA, 249 bp, Klebsiella aerogenes
atgaacagtgacaagaaatcgtctgaactagccaggctgaggcgtcagcatcagctagtttgctctgtcatcgcagccttgctcatctgtgcaggtatatatgggaccgttgcacgtttgggcttcatcctgatggtgccattgtttgttatcgccttaggtgtgttagtcgatgcgttcctgccaagggtaagttggttcttctgtgtgcgggacgtgagagacatatttgggtggagaaaacgatag

SEQ ID NO: 1330 - protein, 82 aa, Klebsiella aerogenes
MNSDKKSSELARLRRQHQLVCSVIAALLICAGIYGTVARLGFILMVPLFVIALGVLVDAFLPRVSWFFCVRDVRDIFGWRKR

SEQ ID NO: 1331 - DNA, 243 bp, Klebsiella aerogenes
gtggcgaagttgaaggtttatggcgggatcacttatggggtcgaggggcagttcagaactgtcgttgcggccacaagtaagagcaaggctgcttcaattctgaatatcacgatttaccagatgaatagctggtggacggagacttttaacaagtacgaggtcgaggcggcgatgtctgagccgggggctattttttcaaagcctctcgatggcagaggcccatttgtaaagcaggaaggataa

SEQ ID NO: 1332 - protein, 80 aa, Klebsiella aerogenes
MAKLKVYGGITYGVEGQFRTVVAATSKSKAASILNITIYQMNSWWTETFNKYEVEAAMSEPGAIFSKPLDGRGPFVKQEG

SEQ ID NO: 1333 - DNA, 1245 bp, Klebsiella aerogenes
atgagtagccagctagaactttttcatgtccaagaggcgtatgccaaggccgataagccgctatcgaatgaggagctctacgattcagtggcagagctcgctggaatcccgaaaagcgctctgaatgaacaaagtgaaattggcaaggcaaagatcaagcggagcaagctgaaaagacagatacgctggtatcagcaaaccctcaagtcgatgaaccttctccagaaggtggacggcgagcggggtgtctgggagctctcaagcaaaaccaagaagggcctgcatgaagcgcttggtggcattcgacttgtcgcctattcaacaaatcttgggctggcggtgtggtcaaacaacaagagctttttctctgacctcgatgagccggtgcatctgtgtgtgacatctccgccgtttccgctccgaatacagcgtggctatggaaacgttgatgaagccaaatgggtggatttcataacccaggcgctcgaaccgatagtcaagaacctggtgccaggaggaagcgttgtcctgaatgtcagcaatgacatcttcgaggccaagagcccctccagatctctctatgttgaaagaatggtgctggcgctccatgatcggctcgggctgtctctcatggatagatggccgtggatcaacctgtcaaaaccaccaagtccaacccactgggcttgtgtgaaccgttaccagttgtgtgccgggtgggagcctgtttattggttcaccaacgaccctgacagggtgcgttctgacaacagaagggtcctgatccctcatacagagaaacatcagaagctgatggctcaagggggggataaccgagtggtcagttatggtgacggggcatatcgactgagagggaacgcattctctaatgtcacagaaggacggataccgaaaaacgttatccagcgcggccaccgttgtgcggatacgctggagcttcggagaatcgctagagaactggggttgccaccgcacccggcaatgttcccaacagacatacctgagatggctatccgctttctgacggaagagggcgaccttgttgttgatccgttcagtgggtcgaataagagcgggttggccgcagaaaggaataaccggcgctggatcgcctgtgacatcattcttgagtacattcgtacccaggcggaaatgttcaccggctttgatggattttggattaacccagccatagcaacagtgggcgggggagcgttgaattaa

SEQ ID NO: 1334 - protein, 414 aa, Klebsiella aerogenes
MSSQLELFHVQEAYAKADKPLSNEELYDSVAELAGIPKSALNEQSEIGKAKIKRSKLKRQIRWYQQTLKSMNLLQKVDGERGVWELSSKTKKGLHEALGGIRLVAYSTNLGLAVWSNNKSFFSDLDEPVHLCVTSPPFPLRIQRGYGNVDEAKWVDFITQALEPIVKNLVPGGSVVLNVSNDIFEAKSPSRSLYVERMVLALHDRLGLSLMDRWPWINLSKPPSPTHWACVNRYQLCAGWEPVYWFTNDPDRVRSDNRRVLIPHTEKHQKLMAQGGDNRVVSYGDGAYRLRGNAFSNVTEGRIPKNVIQRGHRCADTLELRRIARELGLPPHPAMFPTDIPEMAIRFLTEEGDLVVDPFSGSNKSGLAAERNNRRWIACDIILEYIRTQAEMFTGFDGFWINPAIATVGGGALN

SEQ ID NO: 1335 - DNA, 450 bp, Klebsiella aerogenes
atgagtttaagttttattgcaagagtcttgcgccaattggcaattatgtttgtcctctccgtgcttattgtggccggatatatctactatgccggtaaacagcatcagcaggcagcaatcaacttttggggtgagcaataccagcctgatgccatctcgacgcaaattgattgggggtttatcggtaactgggttattcctcgcggggggccaattatttctccgggcattgctggagtgtgtcccaatacaccacttcccgttgtgcctcttaaaattggtcctgatggccggggttacgttctctgtggtattggaagtgaggctgtctctaccagctttgatgtcaatgacatccaggatgaagaaatacgaaacacattaaaaacgatgtttgaggaagaatttgaaaaaacagttaagggggataaatggacgctaaagaactga

SEQ ID NO: 1336 - protein, 149 aa, Klebsiella aerogenes
MSLSFIARVLRQLAIMFVLSVLIVAGYIYYAGKQHQQAAINFWGEQYQPDAISTQIDWGFIGNWVIPRGGPIISPGIAGVCPNTPLPVVPLKIGPDGRGYVLCGIGSEAVSTSFDVNDIQDEEIRNTLKTMFEEEFEKTVKGDKWTLKN

SEQ ID NO: 1337 - DNA, 708 bp, Klebsiella aerogenes
atgcggacaaaattactcggggcgctgatggtgttcgggattattaccggcacggctcatgcgtcatcgaaattggaaatcaccgatcccagagcggcgaagatagaggacatcgtagagctacccatcaaaggggttcgagccgtccaaagtgatgggcagatcatgttcctctctgaaaacgggcgatttgttatttcaggacaaatctacgacctgtggagcaagaagcccctcaacacgatgtcccaaatgagggatgtagcggagcgtatccacttcaagagcatgggcatggatgtggacacgctgaacaccgtttcgatggggcgtggtgacaaagaggtggtggtctttgtcgatcctagatgcgcggtttgccatcagctcatgggtgatgccaaatcgctggtggatgattacacctttaaatttatcgtgattcctgctctgggtgctgagtccaaccgcttggcaaagaacttgtactgcgcgaaagacaaaacccacgcgctcgatgcgctgatgaacaacaccttgggttcccttccttcaaaagaaacctgcgaccccggccaatacgatcaaacgctgctgacagctcatttcattgggattgagggcgttccgttcgtggttgctccggatggtcgtgtcagcaaaggacgtccgaagaacctgaaatcatggttggagagtgttgaatga

SEQ ID NO: 1338 - protein, 235 aa, Klebsiella aerogenes
MRTKLLGALMVFGIITGTAHASSKLEITDPRAAKIEDIVELPIKGVRAVQSDGQIMFLSENGRFVISGQIYDLWSKKPLNTMSQMRDVAERIHFKSMGMDVDTLNTVSMGRGDKEVVVFVDPRCAVCHQLMGDAKSLVDDYTFKFIVIPALGAESNRLAKNLYCAKDKTHALDALMNNTLGSLPSKETCDPGQYDQTLLTAHFIGIEGVPFVVAPDGRVSKGRPKNLKSWLESVE

SEQ ID NO: 1339 - DNA, 318 bp, Klebsiella aerogenes
atggacattaaatcaatcgcaatcgccgccattctcggtgccgctggtggcttcggcggtagctactacgtgatgagcgaacaaacggcaagcatccatcagcgtttgaatcaaaccccgccagtggtcgtggttgacttcgctaaagtggcgtcggcgtatcccgctggtgcctctcaggaggaagttgaaagactgatggtcaagaccaatgacgcaattttgaagttgaaagacgcaggttatttggtccttgacgcaagtgctgtcgtcggtgctccaagtgacgtgtacctccctgatgaggtgctgaaatga

SEQ ID NO: 1340 - protein, 105 aa, Klebsiella aerogenes
MDIKSIAIAAILGAAGGFGGSYYVMSEQTASIHQRLNQTPPVVVVDFAKVASAYPAGASQEEVERLMVKTNDAILKLKDAGYLVLDASAVVGAPSDVYLPDEVLK

SEQ ID NO: 1341 - DNA, 861 bp, Klebsiella aerogenes
atgaaaaaggctttaatcaccaccgtggctctggctgtagcagctctatctggctgtgcatccaccagcagttacgaacccacagcgtacaaaaccaatcacagtcgcgcttacaacatcgcggaggccggtggcctggtaacaggcatccaagacgcttctgttccgcgtgacaagctggagcgtctgaccgacaccaaaacgtttggggcagcctacgtgctgtctggctacatgtcccctcagctcggaatgaccgactggcaaggtggcttggtcaaccttgcgaactgggctatcggccccaaacagcatggcgctcgcaatagcttgatcgcttggatgcctgctaacgaagcagtttcaccggcagacgctcaggccaaatttctttcacatgtgaaagtttccattgagtcagcgctgactgatttgggtgccaatttcacgcttctgtatgacaaagatggtcgcctaacctatcagttctacaagaatgaatggggttgcccgacgtgggtgaacggacaaagtaaggtagctgacatgtgttccgttaaggtgaaaatcgtggagcctcgcctagggtcagctcctaattttgtctctggcgttcaaggtacagcgtatgccttcacatcaggccatgagaccgcatacaactttgtgaatgtcggtaatggggcagcaagccatgctcctcagcaagcgatctacgcagctattagcaaacagctaccagcttgggcctacctctaccttgctccaaaatcggttgagctggataatggcgaaaaagttgctttcccttaccttcttgatcagggaaaagcagagttatttgtttacccagaagcgtaa

SEQ ID NO: 1342 - protein, 286 aa, Klebsiella aerogenes
MKKALITTVALAVAALSGCASTSSYEPTAYKTNHSRAYNIAEAGGLVTGIQDASVPRDKLERLTDTKTFGAAYVLSGYMSPQLGMTDWQGGLVNLANWAIGPKQHGARNSLIAWMPANEAVSPADAQAKFLSHVKVSIESALTDLGANFTLLYDKDGRLTYQFYKNEWGCPTWVNGQSKVADMCSVKVKIVEPRLGSAPNFVSGVQGTAYAFTSGHETAYNFVNVGNGAASHAPQQAIYAAISKQLPAWAYLYLAPKSVELDNGEKVAFPYLLDQGKAELFVYPEA

SEQ ID NO: 1343 - DNA, 642 bp, Klebsiella aerogenes
atggcagaagcacaagtagcactggacacaaacaacgaccgcagcaaccactactctcgccctgttttcaagcaagttctgaaagtaaacagcctccaagctcagcgcgtcatggaacgcagctttgagcgagtttccaactccctgttctccatcgacgtgatccttcgcatcatcggtgagcaggacgaaatcgaccaggttgaaaccgtcatcctggaacacatttccaaggtctccgaagacctggacaaagctaccgcccagctcaacaagctgatggaagacaacggcatcgacatgatgcccggctacaccaacccgaatgaatacaccatcgagatcaactctcctcaggttgctcagtttgcacacctgatccgcaaactggataccctgatggggatcgttgacactctctggctgaacaccgtactgaccagcaagcagcgcaccgacgccacttaccaatggcagcaacgcctcatcaagctggccggtcgaatcatcggcatcgagaaacgggctcgcatttccgcccacagcaaaggcaaagaaggtgaagtggccgaagccgctccggaatctgcaaccggcgacaaggaaatcgcagacgaagccgagaaaacaaaagcagcataa

SEQ ID NO: 1344 - protein, 213 aa, Klebsiella aerogenes
MAEAQVALDTNNDRSNHYSRPVFKQVLKVNSLQAQRVMERSFERVSNSLFSIDVILRIIGEQDEIDQVETVILEHISKVSEDLDKATAQLNKLMEDNGIDMMPGYTNPNEYTIEINSPQVAQFAHLIRKLDTLMGIVDTLWLNTVLTSKQRTDATYQWQQRLIKLAGRIIGIEKRARISAHSKGKEGEVAEAAPESATGDKEIADEAEKTKAA

SEQ ID NO: 1345 - DNA, 672 bp, Klebsiella pneumoniae
atgaataccaaaccttcagttttttctttcgagtcaagcagtcaaatccgtgcagttattatcaacggcgagccatggttcgtagcagcagatgtcatcaaagctctgcagctgacgaacccaacgatgtcaatgaaagctcttgatgaagatgaacgatctaagttgaacttaggccgtcaggggactgcaaacataatatccgagtccggactctacaccttaatccttcgctgccgagacgccgttacgcctggcaccatcccctaccgtttccgcaaatgggttaccagtgaagtgcttcctcagatccgcaagacaggccgttacgtgcgggaggagctatcaccggcggataaagctcagaaggttgtggccagttttatgccagccattctggaggcaatgaaagaaggggataagccttcatacagctacccactcaagccgggataccgtgagatgatccattgcccggagggtgttgtcggcctggcggagaagtcactgctgatgaacctgctgcagcagcttgatgaagatggtcatgatgtcgccggcgccgcggcggaattcacaacaatggtgagctatattgttggtgttagccgctgcctgcaggacatacgcagccacgcgcagtacatcaacaagaacgcctctgagttctga

SEQ ID NO: 1346 - protein, 223 aa, Klebsiella pneumoniae
MNTKPSVFSFESSSQIRAVIINGEPWFVAADVIKALQLTNPTMSMKALDEDERSKLNLGRQGTANIISESGLYTLILRCRDAVTPGTIPYRFRKWVTSEVLPQIRKTGRYVREELSPADKAQKVVASFMPAILEAMKEGDKPSYSYPLKPGYREMIHCPEGVVGLAEKSLLMNLLQQLDEDGHDVAGAAAEFTTMVSYIVGVSRCLQDIRSHAQYINKNASEF

SEQ ID NO: 1347 - DNA, 546 bp, Klebsiella aerogenes
atgttttttaaacggcatttaacggagaaggaaatatacaaggcagcactcccaattgttaggcttcaagggagagttaacacttcattacgttttttatccaaatactcagatgtaaacaaaaatggattaattgcattacatcttaatttattacattttatctcatacaacatacacggtgtagagtctctgaaaatcactcaagcaggcataaacaaagctgtacaacaaagccctcacgcagatgaaataaaaaatattgcgcaggcaataggacgcaaaggacctgagtacatcgaaggattaattagaaacccatgggggaagaaaaatgataatccactaatatttataatgagcattgaagaaagtataaaagaaacccttaactcaggttatatgttatatagagtagctcccataactgagggtgaagcagctgctttcatggatgttcttaaacaattattattatttgaggataattttcgcctttttggtagggacttggtttataaaatagaaaaattaaaaatcagataa

SEQ ID NO: 1348 - protein, 181 aa, Klebsiella aerogenes
MFFKRHLTEKEIYKAALPIVRLQGRVNTSLRFLSKYSDVNKNGLIALHLNLLHFISYNIHGVESLKITQAGINKAVQQSPHADEIKNIAQAIGRKGPEYIEGLIRNPWGKKNDNPLIFIMSIEESIKETLNSGYMLYRVAPITEGEAAAFMDVLKQLLLFEDNFRLFGRDLVYKIEKLKIR

SEQ ID NO: 1349 - DNA, 327 bp, Klebsiella aerogenes
atgagagaaagaacaaatatcatgctagatataggattaaagcaatccttacaacggctttcgaataaaaccaaaatgagtctaagtgatcttattaaccagagattatcaggttcactttcagttgaagaacgcattggcgaaaagcctgaatggatgagaaaccttgatccctatctcgccaatcacttttcaaatattgagttaccgctcccttcaccattaaaagaataccaagaaaaaatggatgagatagattcaattattaatgaaatgatggttctaaaggaatatttcagagctaagttttacgacgaaataaaatag

SEQ ID NO: 1350 - protein, 108 aa, Klebsiella aerogenes
MRERTNIMLDIGLKQSLQRLSNKTKMSLSDLINQRLSGSLSVEERIGEKPEWMRNLDPYLANHFSNIELPLPSPLKEYQEKMDEIDSIINEMMVLKEYFRAKFYDEIK

SEQ ID NO: 1351 - DNA, 129 bp, Citrobacter freundii
atgggtcttaagccgggtccgaaacgaattgccgattcaacaggggaacctgataaacgccagcgtgacaataaaaaaacgccgggaaatactgacaaattgaaacccagcaaatcttcaaaaaaataa

SEQ ID NO: 1352 - protein, 42 aa, Citrobacter freundii
MGLKPGPKRIADSTGEPDKRQRDNKKTPGNTDKLKPSKSSKK

SEQ ID NO: 1353 - DNA, 453 bp, Klebsiella aerogenes
atgaagaataagaaggtaataactttgataatggccgcagccgcatcatgctcgtcagtctatgccgcgacattaccgaccagtgaggtagacgcatacatacttgcgatgaacaccatgtcacctatcactgcaaagtacaccatccagtacaagcaagcggttgagcagaaatgcaatacagccctgagcgttgagcagctcaactcaaaggcattcaccaatgttgtccaggcaatggtgagtagtgagaccgtcgatagaatggggcttgatgctgctggtggatcactccaggataccctgtctgtgatcggcaagaacgtcacatgcagtgacctgaacgcgccatttaaagcactcttggatgataaggacttcaccagaaagcatcagcacctatcgaaggtgctgcatacttggaatgaagttgtttctcaaagcaaaccctga

SEQ ID NO: 1354 - protein, 150 aa, Klebsiella aerogenes
MKNKKVITLIMAAAASCSSVYAATLPTSEVDAYILAMNTMSPITAKYTIQYKQAVEQKCNTALSVEQLNSKAFTNVVQAMVSSETVDRMGLDAAGGSLQDTLSVIGKNVTCSDLNAPFKALLDDKDFTRKHQHLSKVLHTWNEVVSQSKP

SEQ ID NO: 1355 - DNA, 297 bp, Klebsiella aerogenes
atgcactttactaacttccttcagcgttacttcgatatagagattgaacatacctttgaccctaccattcagggcagcaacgaaacgggtaaagacgtcactaaaatctggatctatgagaagggcgaggatagcgaaccgctgcttactctgacagaagcatggtggtataccgagacaaaaacggctggtaactggcttatcggcaacgtgtattcaacgcttgagcatgggcgtgaaattcatgaaagcgaatttcgtaaactggtaacagctggcaaggtgatatcagcatga

SEQ ID NO: 1356 - protein, 98 aa, Klebsiella aerogenes
MHFTNFLQRYFDIEIEHTFDPTIQGSNETGKDVTKIWIYEKGEDSEPLLTLTEAWWYTETKTAGNWLIGNVYSTLEHGREIHESEFRKLVTAGKVISA

SEQ ID NO: 1357 - DNA, 360 bp, Klebsiella aerogenes
atgagtaaggggaataaaatgcttattaatcggatagcggttatcgggcttgcagttgtcgcagccgctacgcaggcaggtgtgccgccggttaagtttttttaccgggatacagtcccggtaagcattacgctggacgaacccgcaacgggttgcagcatggccggtgtgattgttcatccagtggatcggccagcggcaaaagtggcgtggtttagcgagcggatttgcggtaaaaaacgttacccggttagctttatcagtgatgaaattagcgccccgcataacgtgatccataaaggggaaaagtttcacgttaccccggctcaggtcaatctcctggacgcgcaaaacctctaa

SEQ ID NO: 1358 - protein, 119 aa, Klebsiella aerogenes
MSKGNKMLINRIAVIGLAVVAAATQAGVPPVKFFYRDTVPVSITLDEPATGCSMAGVIVHPVDRPAAKVAWFSERICGKKRYPVSFISDEISAPHNVIHKGEKFHVTPAQVNLLDAQNL

SEQ ID NO: 1359 - DNA, 285 bp, Klebsiella aerogenes
atgtatcactatctcgtttttgtccctctcgcattaatttttagcgccgctgcgcttgccctgccctggtttatcgttcgtgcgggatacagggatctggtgcagatcacctgcgcctgcgtctctgttctgggcctgtgtgcggcgacaggggttttcagctacttcgataataagccgcttgcgtttctgtacggttgcggcgcgctggcgtgctttttgtacgcggtagactgcgcgataccgttgtatatgacgcgtaaaaagccacgtaagcagctgtaa

SEQ ID NO: 1360 - protein, 94 aa, Klebsiella aerogenes
MYHYLVFVPLALIFSAAALALPWFIVRAGYRDLVQITCACVSVLGLCAATGVFSYFDNKPLAFLYGCGALACFLYAVDCAIPLYMTRKKPRKQL

SEQ ID NO: 1361 - DNA, 141 bp, Klebsiella oxytoca
atgaaactgggtttgagatatattatatatgccaaacgtatcaggtctcatttatcccaaatcgtcacgcaggtattgaatttcagcatcggcaataagcctatactgacgtcgctgatgatgcggaaaaaaagtttatag

SEQ ID NO: 1362 - protein, 46 aa, Klebsiella oxytoca
MKLGLRYIIYAKRIRSHLSQIVTQVLNFSIGNKPILTSLMMRKKSL

SEQ ID NO: 1363 - DNA, 399 bp, Citrobacter rodentium
atggctaagcatataaatggttatcatgagaagaagattgtagatgttattaacacatggtctatagatgaaaaactaacctgggacgctttgtgcgacaggttagtaaggattattgggaaaagaccatcaagacaatccttaagtagtcatgtaaggattgcagaaagcttcagtgtgaaaaaagccactatcaaatctggtgcattacacactgtaaaacctgctaatttaaaagtggcttctcaacgaattagaagacttgaagcagaaaatgaagctttgaaggcattaaatgaacgctatttagaacagttcaaagtgtggctttataatgctcaccttaaacaaataacgattgaagaacttaataatccattacctgcaaaatacctttaa

SEQ ID NO: 1364 - protein, 132 aa, Citrobacter rodentium
MAKHINGYHEKKIVDVINTWSIDEKLTWDALCDRLVRIIGKRPSRQSLSSHVRIAESFSVKKATIKSGALHTVKPANLKVASQRIRRLEAENEALKALNERYLEQFKVWLYNAHLKQITIEELNNPLPAKYL

SEQ ID NO: 1365 - DNA, 1404 bp, Citrobacter rodentium
atgttgcatgtgcattcattcaataaatctaagacgaaacactcaacattatcaatgttgaagattgtagaattcgttttactgaaaatcaatatgcaagctaatgtaagctattgcaacaattcagtttttgatgaatgcataagaatagcctctgaaaagtattctaaagcacatgcatttgctattgggaaagaacttgagaaattgagttcatttttaagtgataataggatgactaattcatcttatttattttgggtaaatccaattagatataggattactcagtcttggactggttatgattcttcacttgaaggccatcctagattgcctgatatcaaatcagttattgcgattgctgagattttttcaaagagggatgaacaattatctttaagagacatatttactacatctgtgcttgctttacttatgtgcgcaccgagtaggatatcagaaattttagctttgccagcggattgtgaaattacagaatgtgatggaaagggcattcaaagatacggtttgagatttttttcagcaaaagggtatgaaggtaatataaaatggattccaactctaatgatacctgtagctaaaaaggcaattaccagattaaaagaattatcaagtcaagcgaggttattggctgctgaaattcagaaaaatcactctaattcaacgatgggaacccttaaagagaatatacctcaagatttcccttggtatgatagagagaagaaaattgaatattctaatgcgctttgcttgttaactgaaggacagttaaatcaaaacaaaaagaaaatgttagataagttattcagacctacaatgagtttttttaaaactgacattgttgattctgattatataaaaggacattttaatatctttaaaagacatggttatataaatgaagatggtagcccatatttgctgagaacacatcaactgaggcatcttctcaacacatttgctcaaataaatggtatggatgaatttagtattgctcgctggtctggacgtaagtttatttctcaaaatgtttcttatgaccacagatcgcatcttcaaatgtctaaagcaataagagaacaaaagttatcagtgtgtgttaatgagcacagaaaaaaggatattccagtggtggatcttgacgagtttgattcacttagtagtggtgcagtacttgtatcaaaacatggctactgcaagcactcatatgcgtttaagccgtgtgaacattatccgattgagaattctggtttagataacgaaacgatttcaaacattcacgataaaattttaaaaagaacactgtatgataaaaatgatgggaacataaatgctgatagatggtatgaattccataagagaataaaaaaaggagaataa

SEQ ID NO: 1366 - protein, 467 aa, Citrobacter rodentium
MLHVHSFNKSKTKHSTLSMLKIVEFVLLKINMQANVSYCNNSVFDECIRIASEKYSKAHAFAIGKELEKLSSFLSDNRMTNSSYLFWVNPIRYRITQSWTGYDSSLEGHPRLPDIKSVIAIAEIFSKRDEQLSLRDIFTTSVLALLMCAPSRISEILALPADCEITECDGKGIQRYGLRFFSAKGYEGNIKWIPTLMIPVAKKAITRLKELSSQARLLAAEIQKNHSNSTMGTLKENIPQDFPWYDREKKIEYSNALCLLTEGQLNQNKKKMLDKLFRPTMSFFKTDIVDSDYIKGHFNIFKRHGYINEDGSPYLLRTHQLRHLLNTFAQINGMDEFSIARWSGRKFISQNVSYDHRSHLQMSKAIREQKLSVCVNEHRKKDIPVVDLDEFDSLSSGAVLVSKHGYCKHSYAFKPCEHYPIENSGLDNETISNIHDKILKRTLYDKNDGNINADRWYEFHKRIKKGE

SEQ ID NO: 1367 - DNA, 888 bp, Klebsiella oxytoca
atgttcataatgttttcagatgagttagtgttgcagcaaagacgtgatttattcaaaaataaatatgtcagatttgaaaatctattagtagatgaattccaggacatttcacctcaaatagctaattggttaagggcaatacataaagaaaatgcaattttaagtcgaaggcctacgataatggctattggtgatgattggcaatcaatatattcatggagaggcagttctcctgatattttcatgaatttttcagattttttccctgtgcataaatcattgggaaaacataagacagtttttatgatggaaaactatcgttcggatgctgcgattcttaatgatgctgaaaaaatgatggctttagttaaagggaaaatcataaaagaatctatatcatgccgaaaacctgatggtgatgagcatggtgtctattgttatgggtatgatgataaaaaagatgataattcatggaaaaataaagcaattcagctaatttatgaacaattaaatatggtaaaaaatcaaaaacataaagataaaactcatattatagttttgagtcgaactaataatacacttaaagaaataagagatctttatatagaaagatatggcagtattaaaggaataaattttttaacgatccataaagctaaaggtttgcagggggaagtatgtgtgatctttgatgatagcaaagctcatataggacacattttaagaaatgaagtttataaacagattccctacttcaaatatagttatgatcaagctatgatcgatgagtcatatcgtttggcatatgtagctataacacgagggataaaaagagtattctggtttgcaccaaaaggaagtgatggggcattctctcattttcggtaa

SEQ ID NO: 1368 - protein, 295 aa, Klebsiella oxytoca
MFIMFSDELVLQQRRDLFKNKYVRFENLLVDEFQDISPQIANWLRAIHKENAILSRRPTIMAIGDDWQSIYSWRGSSPDIFMNFSDFFPVHKSLGKHKTVFMMENYRSDAAILNDAEKMMALVKGKIIKESISCRKPDGDEHGVYCYGYDDKKDDNSWKNKAIQLIYEQLNMVKNQKHKDKTHIIVLSRTNNTLKEIRDLYIERYGSIKGINFLTIHKAKGLQGEVCVIFDDSKAHIGHILRNEVYKQIPYFKYSYDQAMIDESYRLAYVAITRGIKRVFWFAPKGSDGAFSHFR

SEQ ID NO: 1369 - DNA, 480 bp, Klebsiella aerogenes
atgaaaatcgtacattacgaagcgaatgcaccatggataggaagaatgaaatgcccaaacccaaagtgtgggaaggaaactcctgcctggcaatcgagcggcatgagcgacagttgcccgcattttttctgtgatacttgctcgaatgtaatccatagagagcaggaccatgcattactgtatgaaaatgaaatcaatcaagagctcttggatcgaatagcagcaactcttccagattgcccttgcgggggtaggtttgttcctggtgcaaacccaaagtgtccgagttgcaagaccgagtacgtgcaccaatgggatgcagtgaaaaggttgaatgtaccttttatgccaatcttggatggttcctgcttgattcgagataggctgtattcgtatgaagtatgcattggttctaaaccaaaatactggtggcgtttgttcacaaatgccttaacaagtttaggcaagggacgctcctga

SEQ ID NO: 1370 - protein, 159 aa, Klebsiella aerogenes
MKIVHYEANAPWIGRMKCPNPKCGKETPAWQSSGMSDSCPHFFCDTCSNVIHREQDHALLYENEINQELLDRIAATLPDCPCGGRFVPGANPKCPSCKTEYVHQWDAVKRLNVPFMPILDGSCLIRDRLYSYEVCIGSKPKYWWRLFTNALTSLGKGRS

SEQ ID NO: 1371 - DNA, 474 bp, Klebsiella aerogenes
gtgaaactatcactaatggtagctatatcgaagaatggagttatcgggaatggccctgatattccatggagtgccaaaggtgaacagctcctgtttaaagctattacctataaccaatggctgttggttggacgcaagacttttgaatcaatgggagcattacccaaccgaaagtatgcggtcgtaacacgttcaagttttacatctgacaatgagaacgtattgatctttccatcaattaaagatgctttaaccaacctaaagaaaataacggatcatgtcattgtttcaggtggtggggagatatacaaaagcctgatcgatcaagtagatacactacatatatctacaatagacatcgagccggaaggtgatgtttactttcctgaaatccccagcaattttaggccagtttttacccaagacttcgcctctaacataaattatagttaccaaatctggcaaaagggttaa

SEQ ID NO: 1372 - protein, 157 aa, Klebsiella aerogenes
MKLSLMVAISKNGVIGNGPDIPWSAKGEQLLFKAITYNQWLLVGRKTFESMGALPNRKYAVVTRSSFTSDNENVLIFPSIKDALTNLKKITDHVIVSGGGEIYKSLIDQVDTLHISTIDIEPEGDVYFPEIPSNFRPVFTQDFASNINYSYQIWQKG

SEQ ID NO: 1373 - DNA, 654 bp, Klebsiella oxytoca
atgggcgtatcaagccaaacccgtagtggggcgctggcggaggttctggcgtctgagcgaaagacgcttagcgagcaaatgcgcgtagcactgccggggatcatccagtcattcgacccagaatctttgacggctgttgttcagccagcgatccgctacatcgagcgcgacaacgacggcaacaaaagcacgaaggattatccgttgctggtggatgttcctgtcgttttccctcgcggcggaggctgcacgctgacttttcctgttgaggctggggatgaatgccttgttatctttgcggaccgctgtattgatttctggtggcagagcgggggcatacaggatccggtagacgggcgcatgcatgatttatccgatgccttctgcattgtcggcccgcagtctcaggccaagaaaatcggcggtatcagcaccagcgcagtagagctgcgcagcgatgacggggaaacaaagttgagccttaatcctgccagcggagctatcaacggcacggcgccgggaggttttaacctgaacgggcttaaaattctttcggacggccgcctgcagctggtggatggctcaatcgttgataagcatacgcatggtggcgttgagcctggtggcagcagtacagcaccactgggaggatga

SEQ ID NO: 1374 - protein, 217 aa, Klebsiella oxytoca
MGVSSQTRSGALAEVLASERKTLSEQMRVALPGIIQSFDPESLTAVVQPAIRYIERDNDGNKSTKDYPLLVDVPVVFPRGGGCTLTFPVEAGDECLVIFADRCIDFWWQSGGIQDPVDGRMHDLSDAFCIVGPQSQAKKIGGISTSAVELRSDDGETKLSLNPASGAINGTAPGGFNLNGLKILSDGRLQLVDGSIVDKHTHGGVEPGGSSTAPLGG

SEQ ID NO: 1375 - DNA, 1068 bp, Klebsiella oxytoca
atgtctcagaactggatgcggcacttcgaattgcagttagtcgattcgaaggggaatgctactgattttggtagctttaagagcacttttactatcgactggtttaacctcagcagcgaaacgcgagtaggaacttttaaaatctataacctttcagctgataccgtaaaccggatcgtcggagaggaattctcccggattagggttatcgctggttacgatggcattgcagctgacgttcccgccagccaggtaggcgtcgtcaggacagtaaaccccgatgaagtcgggcagatggatggtcgaaattatgggctgattttcgacggggaaatccggtacaccatcacagggaaagataaccccgttgatagctttgtcctcattcaggcggctgattctgatcgggcattcgccacctcgatcactgcgcagacgctggcggctggctatacggtctctgacgtcaatgcagtgctcatgaaggacttcaacgctaacggggccacggaaggaaatacccctgcaatgcctgcaacggtgtttcctcgcggcagggtgctttttggtatgacccggcatctgatggataacgtcgccgagcaatgcaaggctgactggatgtttgtcgacggtaagcgggaaatggtggcgaaaaatgaggttgttcacgaagccattaaactgaacagcgccaccggccttgtgggtatgcctcagcagaccattggtagcggcgttaacgtccgttgcctgattaaccctaacatccgcgttaatggcctgatcgagctgaatcaggcttctgtgttccgtaccgcactggggaatagcgatatcgccatgacgcaggggcgtatcactgaccagaacaacaacggaaacatcaccattgaaggcaccactgcgcagcctgccagtattgcgactgacggcgtttatattgtccgtggcattatgtacactggcgacacaaggggccaggcgtggtacatggatatgatgtgtgaagcgcgtggcgcgatggatctaaaaactcaatcagcactggagagaggcgctgggtga

SEQ ID NO: 1376 - protein, 355 aa, Klebsiella oxytoca
MSQNWMRHFELQLVDSKGNATDFGSFKSTFTIDWFNLSSETRVGTFKIYNLSADTVNRIVGEEFSRIRVIAGYDGIAADVPASQVGVVRTVNPDEVGQMDGRNYGLIFDGEIRYTITGKDNPVDSFVLIQAADSDRAFATSITAQTLAAGYTVSDVNAVLMKDFNANGATEGNTPAMPATVFPRGRVLFGMTRHLMDNVAEQCKADWMFVDGKREMVAKNEVVHEAIKLNSATGLVGMPQQTIGSGVNVRCLINPNIRVNGLIELNQASVFRTALGNSDIAMTQGRITDQNNNGNITIEGTTAQPASIATDGVYIVRGIMYTGDTRGQAWYMDMMCEARGAMDLKTQSALERGAG

SEQ ID NO: 1377 - DNA, 576 bp, Klebsiella oxytoca
atggatattctttctactctctttcagcagcagagcaggcggatcgggctgatagtccccagtgttgttatttcagaaaagcacgatgactctcttgaaataaccgagcatcccgtagaggttggtgcagcaatttccgaccatgcatttcgacgtccttcggaagtggtaatgcaggtcggttttgctggtggcggttccttacttgacttcgtagatacatcttcgctcgggctgagcgtaggtattggcccgaaggagacttatcaggagctgttaaatctgcagagcagcagggtgcctttagatgtggtgaccggtaagcggatttacaccaatatgttgatccgtgcgcttgaggtcactaccgacaggacgtcggaaaatattctctctgccgtgctgacgctccgggaagtgattatcacaagcacaaccaccacgcaggtggctccaaagtccaatatgaagttaggggcgagcacctccgccgtgcaaaactccggggtgaaaacgccagtgcaaaaaaatgaatcaatattgagccggttaagtggctttgtagcgggagggtaa

SEQ ID NO: 1378 - protein, 191 aa, Klebsiella oxytoca
MDILSTLFQQQSRRIGLIVPSVVISEKHDDSLEITEHPVEVGAAISDHAFRRPSEVVMQVGFAGGGSLLDFVDTSSLGLSVGIGPKETYQELLNLQSSRVPLDVVTGKRIYTNMLIRALEVTTDRTSENILSAVLTLREVIITSTTTTQVAPKSNMKLGASTSAVQNSGVKTPVQKNESILSRLSGFVAGG

SEQ ID NO: 1379 - DNA, 1917 bp, Klebsiella oxytoca
atgaacgctgaaacgctcaaggactttctgatctcgcttgggttcaaagttgatgaggctggcgccagaaaattcgatgccgtcgttgccgggacaacgcttaaagcgattgaactgggcgtcaaagttgaggcggcggcactttccgtcgttgcattcaccgcgaaaattgccagcggtctcgacgacctgtactgggcctctcagcgcacaggcgcgacggtggagggcattaagcagattgggtatgcggttagtcaggttggcggcagtgtcgacggggcccgcggctctctcgaaaatcttgccaggttcatgcgtaacaatcccggcgctgagggttttctgaaccggctgggggttcaaacgcgtgatgccagcggtaacatgcgggatatggcgacgatctttaccggcgtcggccagcgtcttagcagcatgccgtattaccgagctaaccagtacgctcagatgctgggtctggatgaaaacaccctgatggcaatgcgtcgcggtatcggccagtttagtggcgaatacaccgcgatggctaaggcgatcggctataacgccgatgtggccgccgtcagctctaataagttcatgacctcgcttcgctcttttgggctgatggcaggcatggcgcgggataaaatcagctccagtctcgctgatggacttgctggctctctcgacaggctgcgccgccagatactggaaaacttcccgaaaattgaaggcgcaataaccggtacggtgaaaggaattctctgggctggcgagatggtaggcagggtaatttaccgcctcatccagttgggtcagggtatcagcgactggtgggactctcttgataagcagtcgcagcagctgatcgaacttattggagcgctaaccgcagcgtggtggatgctcaaccgcgctatgctcgcatcgcctattacgtgggttctcggtcttgccgcggccatcgctttgctatgggaggattaccagacctggaaggagggcggtaagagcctcatcgactgggggaaatggaagcctgaagtagacgcagcactgaaaatggtcggtgacctgaaacagactgtcctcgatctcggaaaagcgctggcaaagttgctcaatatcgaccctaaatcctggtctttaaaatgggatttcagcaacttcattacccagatgggtgagtttagcaagatgctgagtatgatcggcgacctgcttaacgctatcaaggacggtcgctggtctgatgctgcaagtattggcagggctcttctcaaacaaggcagtaaccagcctgatgcgctgccaggcgtttctgacagtgccaatagcgcagctgactggataaaggataagacaggatttgacccgcgcagcataggccgtttcttccgtagcgaggggaatacgcttgcagatcgcaacaataaccccggcaatattcggcccgtaggcggtggtggttttcgtgcgtttggttctgcgctagaaggctgggaggccatgaaaaaccagctcatgcggtactttactggtaaaacgaccgggcgccgcctgcagactatcatggatatcgtcagcacctgggcacctgcggccgataacaacgatcctgccaaatatgcccgtgatgttgctggctggatgggtgtatcgccgacggcagcattaaacctgtccgaccccaatacgatggctatgctcatgcagtctatggcccgcaaagaggggtattcgaactggaatagcccgcttgcccatcaggctgctggagcgcaggtgaatcagcaaaacacctacaacatctatggtggtaatgctcaggaaattgggcaggaagtcagtcgccgccagcttgatgctaatgccagagtgctgagaaataaccaaactggagcaggatga

SEQ ID NO: 1380 - protein, 638 aa, Klebsiella oxytoca
MNAETLKDFLISLGFKVDEAGARKFDAVVAGTTLKAIELGVKVEAAALSVVAFTAKIASGLDDLYWASQRTGATVEGIKQIGYAVSQVGGSVDGARGSLENLARFMRNNPGAEGFLNRLGVQTRDASGNMRDMATIFTGVGQRLSSMPYYRANQYAQMLGLDENTLMAMRRGIGQFSGEYTAMAKAIGYNADVAAVSSNKFMTSLRSFGLMAGMARDKISSSLADGLAGSLDRLRRQILENFPKIEGAITGTVKGILWAGEMVGRVIYRLIQLGQGISDWWDSLDKQSQQLIELIGALTAAWWMLNRAMLASPITWVLGLAAAIALLWEDYQTWKEGGKSLIDWGKWKPEVDAALKMVGDLKQTVLDLGKALAKLLNIDPKSWSLKWDFSNFITQMGEFSKMLSMIGDLLNAIKDGRWSDAASIGRALLKQGSNQPDALPGVSDSANSAADWIKDKTGFDPRSIGRFFRSEGNTLADRNNNPGNIRPVGGGGFRAFGSALEGWEAMKNQLMRYFTGKTTGRRLQTIMDIVSTWAPAADNNDPAKYARDVAGWMGVSPTAALNLSDPNTMAMLMQSMARKEGYSNWNSPLAHQAAGAQVNQQNTYNIYGGNAQEIGQEVSRRQLDANARVLRNNQTGAG

SEQ ID NO: 1381 - DNA, 153 bp, Klebsiella oxytoca
atgcgcccggtggatgccgggcttatcccttacaccgccctgaaagatggatcagtagacctggctgatattgcccgtatgaatgactggctggacctgaaagccgataacgaaaaccgtatagcgaaatggagagaggctaatgaacgctga

SEQ ID NO: 1382 - protein, 50 aa, Klebsiella oxytoca
MRPVDAGLIPYTALKDGSVDLADIARMNDWLDLKADNENRIAKWREANER

SEQ ID NO: 1383 - DNA, 450 bp, Klebsiella oxytoca
atggaatttgaaatcaaaggcgttaaataccgcaccgcaaagctcgatgttttccagcagttgaaggttagccgtaaactgctgccggtgctggccgggctggtttctgactttggtacgctgaaatccatgatggtcagagacagcgagggcaagctggttttcggtgagaaaagggcattcgacgctctggatatcgtcctgccgaagattgccgatacgctggcagctctgcctgaagaggacgttaacgcggtgattcatccgtgcctgggcgttgttatgcgccagcatgaaaaagggtgggtgaaaattttcgatcagggcgcgctgatgttcgacgatatcgacctgttcacgatgctgcagttggtggcgcgggtggtcgccgacagcctgggaaattttttgaaagaactccccggcagcgggacgcctacccagccatag

SEQ ID NO: 1384 - protein, 149 aa, Klebsiella oxytoca
MEFEIKGVKYRTAKLDVFQQLKVSRKLLPVLAGLVSDFGTLKSMMVRDSEGKLVFGEKRAFDALDIVLPKIADTLAALPEEDVNAVIHPCLGVVMRQHEKGWVKIFDQGALMFDDIDLFTMLQLVARVVADSLGNFLKELPGSGTPTQP

SEQ ID NO: 1385 - DNA, 507 bp, Klebsiella oxytoca
atgaaaagcgggctcacaattcgggaagacaattacagtgtcgttctggatgcgctgaaacaactgtcaggcactgatgtgctggttggtatcccggcaggtcctccgcgcgatgatgcgccgctgagcaacgctgagctggggtatctccagtccaccggggcaaccgtagagatagacggggagaccgtaactctgccgccaagaccatttctggacatgggcattgaggattcccgggataaaacgaccgagcgtttaaagctggccgctcagtctgcgcttgaaggtaaggcagatgtggcgtcgatgcatcttgaagccgcaggccagattgcgcgtgatgcctcaaaggctgtcattgaggcaggcgatcgtctgaccccactatctgaaaagaccatcaagaaacgcagagaaatgaaaccgcctatccctggcgataagccgttgcgtgcccgcggattccttttcagagcgattcagtatgtcgtgaggaaaaaataa

SEQ ID NO: 1386 - protein, 168 aa, Klebsiella oxytoca
MKSGLTIREDNYSVVLDALKQLSGTDVLVGIPAGPPRDDAPLSNAELGYLQSTGATVEIDGETVTLPPRPFLDMGIEDSRDKTTERLKLAAQSALEGKADVASMHLEAAGQIARDASKAVIEAGDRLTPLSEKTIKKRREMKPPIPGDKPLRARGFLFRAIQYVVRKK

SEQ ID NO: 1387 - DNA, 195 bp, Klebsiella aerogenes
atgaaaaaggtccatatcgaatcaaagcgagccggcgaccgcagggttatcgaaatatcgataggcggcatcaccgcgcgttaccgcgccattggcgatctctcagagttaaaagccacaggtcgcggtaacgtccgccaggttaaggcgctgctacgtgagttcattcgaaactccgaccccgcgctcatttag

SEQ ID NO: 1388 - protein, 64 aa, Klebsiella aerogenes
MKKVHIESKRAGDRRVIEISIGGITARYRAIGDLSELKATGRGNVRQVKALLREFIRNSDPALI

SEQ ID NO: 1389 - DNA, 753 bp, Klebsiella aerogenes
atgacacctttgaaagagattggcgagtgcctgattggtgctggagggcgtgaatacttcttccgcccatcgttccgtaacatgactcggatcggtgagccagaacatatcgtccgcactttctatgcgctgttcaatgacgatgtagcaaagatgcttgaagcggcgcgcgaaattcacagtgcgataccagagcatcagcgcagattttacgcccactatttcggtgacgtttcgctgccacgctgggcacttgatgcagcaggttctgccgcgtttgtgcgtgaggcattgctttcggctattaacgtcattcagtcatgctgtgatgaggacgtttctgaactgacaggctggcacgagccatcacgtactggaaagcgtgcatttgtatggcgccgtggcgcgctcccgcctgagaacctgattctgatagctcagtcgctgatcatgcatggcgttatcggacgggccaaggttcgtaagttgcagaagcacgaaagcaaggaaacgacaccggagtttcatgcgactgaatacatcatggccgcgcgcaatcatttcggcataagtcgggaagaggctgagaacctcacgatgacagagttcgccatgatgattaacgccaaatacccaaatcagaacggcttcaccagagaggagtttgactccgtaatgagtgaggatgataaacgctggaatgcaatgcttgcagctgaagaagctggtaaaatgaacaagcgcctagggtag

SEQ ID NO: 1390 - protein, 250 aa, Klebsiella aerogenes
MTPLKEIGECLIGAGGREYFFRPSFRNMTRIGEPEHIVRTFYALFNDDVAKMLEAAREIHSAIPEHQRRFYAHYFGDVSLPRWALDAAGSAAFVREALLSAINVIQSCCDEDVSELTGWHEPSRTGKRAFVWRRGALPPENLILIAQSLIMHGVIGRAKVRKLQKHESKETTPEFHATEYIMAARNHFGISREEAENLTMTEFAMMINAKYPNQNGFTREEFDSVMSEDDKRWNAMLAAEEAGKMNKRLG

SEQ ID NO: 1391 - DNA, 756 bp, Klebsiella aerogenes
atgcaaggctgtgctaatgattttggcaagctgatcgggaaagtggctgtgctacgcatggcctttggctgccccgacgcagtgccagcgctttccgagtggaagcgtctcggcgctatgacgaccaagggcatcgactattcgatgaataccatcaactccgaggcagatgatgccaaagggctggtggagaacctggtcaacaacatggatctgacgatctctggtgaaggtgagtttcgcaaatctgataaagataacgagatcggcgcgtggcgtctgtcgaagtatatctttgacgaagttcaggcaggtcgtcagcctaacctgtgggtgcggttcgactttgcgggtgagaacgccggtacttacatccagggttacatgaacaccacgtcatggtctggtgatttcggtaccaacgatatctccaccttctccggcgagtggaaggtctacgacgctgacaccgttgtgtttgaagtcgctgactccatcgcggccactggcgttgaagtaactcctgcaactgcttctctggtcgttggagccacccagcaactcagcggcgcggttcagccaaccgatgcgactaataaagcgatcacctggacgacttcggcgccatccatcgccaccgtcagttcaaccggcctggtgacagcagttgccgagggcaccgcgactattacggctaccactgctgacggtgatttcaccgacacctgtgcagttaccgtgactgccgcgccgtaa

SEQ ID NO: 1392 - protein, 251 aa, Klebsiella aerogenes
MQGCANDFGKLIGKVAVLRMAFGCPDAVPALSEWKRLGAMTTKGIDYSMNTINSEADDAKGLVENLVNNMDLTISGEGEFRKSDKDNEIGAWRLSKYIFDEVQAGRQPNLWVRFDFAGENAGTYIQGYMNTTSWSGDFGTNDISTFSGEWKVYDADTVVFEVADSIAATGVEVTPATASLVVGATQQLSGAVQPTDATNKAITWTTSAPSIATVSSTGLVTAVAEGTATITATTADGDFTDTCAVTVTAAP

SEQ ID NO: 1393 - DNA, 900 bp, Klebsiella aerogenes
gtgatctataaaatttgccaggtaattgacggggagtacgtttgcgacattgatataagtgtgggagaatggaaagctctattactgaacgaaaaggtttttgactctaaaagtattgaggcgttaaaaaaatggtatattgaaccaaatcattcctgcacatgtttcgatataggaaaaaagtacgaccagcacagtatgagtgctaatggtgttattaacggactaggtggtagagttcaaaaagagcttggcagattcgaagttatagggatcggcaatatagcccccggaacaaaattcattacagtcatgaaaagtaaagaaaacggtgaaaaaccaaaaagatacttatggacaattcgtgatgaactggttcaggcaattaaagaactgaatttttttgatgaagcagaaacaacaaataatgaattttactctgacaatgaattaatcaatgctatgaatgaacacaataactttgatgccacccaggtatttgaatatacaggagaagctaaaccaaagaaaaatgcaatagaagtcaaaaatggcttttcgtatccaaggaataaaggggtgtccaaaaatgcactgaataaagcaggttacaaatgtgaagtcgatagccagcacccaaccttcaaaagacgtaactctcctctgaattacactgaaccacatcatattgtacctatgtccaggcaggatgactttgataattcgcttgacgtcgaagaaaatataatatctctgtgttgtaattgtcataaacaaattcacctcggccatggatatgaagaaatgctggaaaaaatatataacgagagaaaggagttattaaaacaggtagctatcaatatatcactggaggatttgattcgttattataagggatag

SEQ ID NO: 1394 - protein, 299 aa, Klebsiella aerogenes
MIYKICQVIDGEYVCDIDISVGEWKALLLNEKVFDSKSIEALKKWYIEPNHSCTCFDIGKKYDQHSMSANGVINGLGGRVQKELGRFEVIGIGNIAPGTKFITVMKSKENGEKPKRYLWTIRDELVQAIKELNFFDEAETTNNEFYSDNELINAMNEHNNFDATQVFEYTGEAKPKKNAIEVKNGFSYPRNKGVSKNALNKAGYKCEVDSQHPTFKRRNSPLNYTEPHHIVPMSRQDDFDNSLDVEENIISLCCNCHKQIHLGHGYEEMLEKIYNERKELLKQVAINISLEDLIRYYKG

SEQ ID NO: 1395 - DNA, 1023 bp, Klebsiella aerogenes
atggataagagagtgatatttgcggttgccggctcgggcaagaccacgctgctgatacggcggttgagtgaggaccggagaacgctgatcctgaccttcaccgtgaataatgaagcgcatctgcgggcgcagattatcagacgttttggctttatcccggacgggatcagggtgatgacctggtttgagtttctgcacggtttttgcttccggcctttcctgcaggagcggctggcatcgcgtggcctgagcttcgaccgaccccctcccggaataccgcgcacgaatgcccggcattatcaggatcccgccggacggctatatcaccggaggctcgcacacttgctgacagcccgggggctgctgccggatatccgtacccggcttgcccgttactacgatgaactgcttgtcgatgaagtccaggactttgccggacatgactttgattttctgctggagctctgccgtgcggaaatcactgtgctgtgttgcggtgatttttatcagcatacctttgatacaagccgtgacggcaacgttaattcaacgctgcacgatgacattacgcgatatgaggcccgcttcgccgcagcaggtttcatggttgaccgcaacacgctcaaccgaacatggcgttgctcggcttcggtgtgcgagtttatcaccgggcaactgaacatccgtatcgctgcccatgggatacatgccaccctgattgaaacgatcacagatgcagagcgcacagccaccctgcacgccgataatacggtgattaagctcttctatcgtgaacatcaccgttacggctgctattccatgaactggggcgtcagcaaagggctcgatcactttcaggatgtctgcattgtgatggggcccgcccactggaagcttctgacccgtcaggaactggcagcccttccaccgtcgtcccgtaacaggctgtacgtggcatgctcacgggcgcgcggcaacatttattttgttccggaaactcatctgcgccgattccgaaactga

SEQ ID NO: 1396 - protein, 340 aa, Klebsiella aerogenes
MDKRVIFAVAGSGKTTLLIRRLSEDRRTLILTFTVNNEAHLRAQIIRRFGFIPDGIRVMTWFEFLHGFCFRPFLQERLASRGLSFDRPPPGIPRTNARHYQDPAGRLYHRRLAHLLTARGLLPDIRTRLARYYDELLVDEVQDFAGHDFDFLLELCRAEITVLCCGDFYQHTFDTSRDGNVNSTLHDDITRYEARFAAAGFMVDRNTLNRTWRCSASVCEFITGQLNIRIAAHGIHATLIETITDAERTATLHADNTVIKLFYREHHRYGCYSMNWGVSKGLDHFQDVCIVMGPAHWKLLTRQELAALPPSSRNRLYVACSRARGNIYFVPETHLRRFRN

SEQ ID NO: 1397 - DNA, 261 bp, Citrobacter koseri
atgttgaaaattctcaaaactccggaagggaaaaagtttcttattgctgtggcttgtgtgtttatcgttgcggtatgcgtggtgtcaaaagccgcgttccagggcgtggaagaccagtacaatctgccgatggatacctgggacacatccctgtttatcatccagggcgcatgggtggccatttacagctttatgttcaccattgtgggggcgctgcctttcgggttttactttctcggccctaaagatgattcagaataa

SEQ ID NO: 1398 - protein, 86 aa, Citrobacter koseri
MLKILKTPEGKKFLIAVACVFIVAVCVVSKAAFQGVEDQYNLPMDTWDTSLFIIQGAWVAIYSFMFTIVGALPFGFYFLGPKDDSE

SEQ ID NO: 1399 - DNA, 2064 bp, Klebsiella aerogenes
atgaaaactcaacgctttgtacgtacccctcttgcagttctgattatggcattccagacgaatgccgttaatgctcaggagagtcacgatcacgcaacgatggaggatgattccgttatggttgttacggctcctgcctcatcgccgctggaagttgtcacgtccccaaaaagacctcgtcagcctgtcccggcaagtgatggttccgattacctgaaaaccatccccggtttttcacagatacgggccggtggcacgaatggcgacccggttttccgcggtatgttcggatcgcgtctgcgtatcctgaccaataatggcgaaatgctgggtgcctgcccggcccgaatggatgcccccagctcttatatctccccggaaagttttgaccttctgacgttgaccaaaggaccgcaaacggtcctttgggggccgggtaactctgcagggacaattcgtttcgatcgcgagcagccgcgttttgataaacccggcgtacagggaaatgccagcctgcttgctgcctcgaacaatcgctgggatgagaatgcggatatcagcctgggtagcgaagatggatatttgcgcctcatgggtaacaaatcacgttccgatgactataaggatggtaatggcgatcgcgtcccctcaaaatgggataaatggaacggcgatatggcgctcggctggacgcctgataaagataccctgattgaactgacggcagggaaaggggacggggaatcgcgttatgcgggtcgcagtatggacggctcccagttcaggcgagaaagcctgggtgccaggttcgaaaaatcaaatatcggggaggtattccagaaatttgaagcgaatgtctattacaactacgccgaccacattatggataactattcacttcgttcacccgacggtggtatgtcaggaggtatgtcggatggaatgacagacagcggcatgggtgactcaatggatgcaggcatgtcaatggatatgaatatgccaatggcgatggaagtcgacagacgtactgttggcggtcgtatgatgggcacatgggagtgggcggatgtggagctgagaagcggcgccgatacccagctgaatacccatcgtaataaaatggataacagctgggtcaaagatgcccgtttccatgattatggtctcttcagtgaactcacctggaatacctctgattcaagcaagttagtggggggcgctcgccttgatcgtgtcctcgtggataatttttccgggaaaggctcctcagagcgaacggacacccttcctgccgggtttgtacgtttcgagcataccctcgcagaaatgccgctaatgctgtatgccgggcttgggtatacagaacgtttcccggactactgggaactgttttcccccacctacgggcctgacggcacctcagacgcgtttgataaagtgaaaactgaaaaaacgacccagcttgatattggcgcacagtattccggcaaacgtacaaacgcctgggtttctgcttatgtcggtcacgtaaatgattttatccttttccgctacgatcccaacgatgcatatatcagccaggtcgataacatcaacgccaccatcatgggaggcgaagccggtgtcagctataagttgaccgacagctggaaaaccgacgccagtctggcctattcctggggcaggaacatggaagatggtaaaccccttccgcaaatgcctcctctcgaagcccgtctgggattatcctgggaaagtggtaactggagcagtaccgggctggtacgtctggtcagtagccagcatcgggtggcgattaatgaaggtaatgtggtgggcaaagattttgacagcagcgccggttttgccgtggtttccgccaatgccgcttaccgcgtgaacaagtactttaaagtgagcgccggtgtcgataatcttctggacaaagattacagcgagcatctcaacctggcgggtaacagtagctttggctactccgccaatacctccgttaacgaaccaggaagaacattctggggcaaaattaatgtgacattctga

SEQ ID NO: 1400 - protein, 687 aa, Klebsiella aerogenes
MKTQRFVRTPLAVLIMAFQTNAVNAQESHDHATMEDDSVMVVTAPASSPLEVVTSPKRPRQPVPASDGSDYLKTIPGFSQIRAGGTNGDPVFRGMFGSRLRILTNNGEMLGACPARMDAPSSYISPESFDLLTLTKGPQTVLWGPGNSAGTIRFDREQPRFDKPGVQGNASLLAASNNRWDENADISLGSEDGYLRLMGNKSRSDDYKDGNGDRVPSKWDKWNGDMALGWTPDKDTLIELTAGKGDGESRYAGRSMDGSQFRRESLGARFEKSNIGEVFQKFEANVYYNYADHIMDNYSLRSPDGGMSGGMSDGMTDSGMGDSMDAGMSMDMNMPMAMEVDRRTVGGRMMGTWEWADVELRSGADTQLNTHRNKMDNSWVKDARFHDYGLFSELTWNTSDSSKLVGGARLDRVLVDNFSGKGSSERTDTLPAGFVRFEHTLAEMPLMLYAGLGYTERFPDYWELFSPTYGPDGTSDAFDKVKTEKTTQLDIGAQYSGKRTNAWVSAYVGHVNDFILFRYDPNDAYISQVDNINATIMGGEAGVSYKLTDSWKTDASLAYSWGRNMEDGKPLPQMPPLEARLGLSWESGNWSSTGLVRLVSSQHRVAINEGNVVGKDFDSSAGFAVVSANAAYRVNKYFKVSAGVDNLLDKDYSEHLNLAGNSSFGYSANTSVNEPGRTFWGKINVTF

SEQ ID NO: 1401 - DNA, 276 bp, Citrobacter koseri
atggctatgccggaacactgcgaacaaaacctcaccatggtttatcccatgatggcgggacacgctatgtccccgatggaagaaattgcctgtgggtactgtcatttactgattcatctgcctttcgtccagttcgtgctgacgataatgctctggctgatgttactctgcgttcatctgtctcttcctctacaggccattttctcaccgattttccgcgcctgggcacctcagcgtgcccgcgcccctcctgctgcttttctttctgcgaattaa

SEQ ID NO: 1402 - protein, 91 aa, Citrobacter koseri
MAMPEHCEQNLTMVYPMMAGHAMSPMEEIACGYCHLLIHLPFVQFVLTIMLWLMLLCVHLSLPLQAIFSPIFRAWAPQRARAPPAAFLSAN

SEQ ID NO: 1403 - DNA, 861 bp, Enterobacter cloacae
atgcgttattttcgcctgtgtattatctccctgttagccaccctgccgctggcggtacacgccagcccgcagccgcttgagcaaattaaactaagcgaaagccagctgtcgggcagcgtaggcatgatagaaatggatctggccagcggccgcacgctgaccgcctggcgcgccgatgaacgctttcccatgatgagcacctttaaagtagtgctctgcggcgcagtgctggcgcgggtggatgccggtgacgaacagctggagcgaaagatccactatcgccagcaggatctggtggactactcgccggtcagcgaaaaacaccttgccgacggcatgacggtcggcgaactctgtgccgccgccattaccatgagcgataacagcgccgccaatctgctgctggccaccgtcggcggccccgcaggattgactgcctttttgcgccagatcggcgacaacgtcacccgccttgaccgctgggaaacggaactgaatgaggcgcttcccggcgacgcccgcgacaccactaccccggccagcatggccgcgaccctgcgcaagctgctgaccagccagcgtctgagcgcccgttcgcaacggcagctgctgcagtggatggtggacgatcgggtcgccggaccgttgatccgctccgtgctgccggcgggctggtttatcgccgataagaccggagctagcgaacggggtgcgcgcgggattgtcgccctgcttggcccgaataacaaagcagagcggattgtggtgatttatctgcgggatacgccggcgagcatggccgagcgaaatcagcaaatcgccgggatcggcgcggcgctgatcgagcactggcaacgctaa

SEQ ID NO: 1404 - protein, 286 aa, Enterobacter cloacae
MRYFRLCIISLLATLPLAVHASPQPLEQIKLSESQLSGSVGMIEMDLASGRTLTAWRADERFPMMSTFKVVLCGAVLARVDAGDEQLERKIHYRQQDLVDYSPVSEKHLADGMTVGELCAAAITMSDNSAANLLLATVGGPAGLTAFLRQIGDNVTRLDRWETELNEALPGDARDTTTPASMAATLRKLLTSQRLSARSQRQLLQWMVDDRVAGPLIRSVLPAGWFIADKTGASERGARGIVALLGPNNKAERIVVIYLRDTPASMAERNQQIAGIGAALIEHWQR

SEQ ID NO: 1405 - DNA, 762 bp, Enterobacter cloacae
gtgattccaatagaacgacatcagcgtattttagccctggtggagcagcgtggggcggtaagcattaacgagctgacggagatcctcggcgtgtcccatatgaccatccgtcgggacgtcagtaaactggaggagcaggggctgctggtcagcgtctcgggcggcgtacgcgccgtcagccggctggccgcggaacccagtcatctggtgaaaagcacgctgcagagtgaggagaaacaggcgatcggcgcgctggcggcgagtcatatcgctaaaaacagttgcatctatctggatgccgggactaccaccctggcgctggcgcgggcgatcctcgaccggaacgatctccaggtggtcaccaatgattttgagataacccagctgctgatcgatgccagtcagtgcggcgtgatccacaccggcggcactctgtgccgggagaaccgctcctgcgtgggcgaatcggcggcgcgtacgttacgccacctggctatcgatacggcctttatctccgccagcggctgggacagtcgcgggatattcacccctgatgagaacaaggttaccgtcaaggagaccgtcagccaggtcagcgcgagaagcatcctgctgtgcgacagttcgaaatacaatcaggtggccacgtttatggcgttacctttgacccggttcaccaccatcattaccgaccggcatctctccgatgccgccgccagtcatatcgcccggcacgcctgcgaggtgctacgagccggataa

SEQ ID NO: 1406 - protein, 253 aa, Enterobacter cloacae
MIPIERHQRILALVEQRGAVSINELTEILGVSHMTIRRDVSKLEEQGLLVSVSGGVRAVSRLAAEPSHLVKSTLQSEEKQAIGALAASHIAKNSCIYLDAGTTTLALARAILDRNDLQVVTNDFEITQLLIDASQCGVIHTGGTLCRENRSCVGESAARTLRHLAIDTAFISASGWDSRGIFTPDENKVTVKETVSQVSARSILLCDSSKYNQVATFMALPLTRFTTIITDRHLSDAAASHIARHACEVLRAG

SEQ ID NO: 1407 - DNA, 774 bp, Klebsiella aerogenes
atggcaaaaccggactgggaggccatcgaatcggcataccgggccggagtccttagtctccgtgatataggcgataaatacggcgttactgaaggggctatcaggaagagggctaaaaagtttgactgggtacgcaatagcggtacgcaggtacgcaaaaatggtacgcaaagtggtacgcaaaagagcaaggtgcgtaccagcgaaaagcctgccagtgctggccgtacgcaaaaaagtacgcaaccaaaagctgaacctccaccagaaacgaaaccgatacgcggagtgcgtaccaatcctccaaccaatccatttcagaccggtaatcagcacgccctgaagcatggcggctacggtcgtcgaatgttgctttctgatgctactactgaagatgctcagatgcttacactcgacgatgagcttttctggctgcgtgcggcaaatctgaccgctgcagagaatattggccgctggaaagcagagcttgagaccgcgaatgccaaggcggctaaagacattcacaacttgatttcgtcagctcagacagccatgcatcgcaatactgcgcgcattgaatctctggagtacaccaaggtatcaatcattaagcagcgcgctgacgttacttatagagaggccgctactgataaggtgtcgctggaggccgatcgtcttcgccgtgatgctggtatagatgatggcaacggagagcgtgacctcaatgacttctactctgacatccaaaccgacgctgaatccggtcctgcgtag

SEQ ID NO: 1408 - protein, 257 aa, Klebsiella aerogenes
MAKPDWEAIESAYRAGVLSLRDIGDKYGVTEGAIRKRAKKFDWVRNSGTQVRKNGTQSGTQKSKVRTSEKPASAGRTQKSTQPKAEPPPETKPIRGVRTNPPTNPFQTGNQHALKHGGYGRRMLLSDATTEDAQMLTLDDELFWLRAANLTAAENIGRWKAELETANAKAAKDIHNLISSAQTAMHRNTARIESLEYTKVSIIKQRADVTYREAATDKVSLEADRLRRDAGIDDGNGERDLNDFYSDIQTDAESGPA

SEQ ID NO: 1409 - DNA, 702 bp, Klebsiella aerogenes
atgaaacttattaagtattggcgtgttcaacttttcaaagctgaaaatcgtggaatggctccgggtaatgccgaggtgcttatttttgagggttattccaaagataagcccaaaatcaagctcggcgccggggtcagcttcgagctgtttatagcgcctgactcactggaatcccatatcttccgtgatcacctcattgacagcgtgcgcttcatccctgtgtatgaagatgatggcgacaatgtagatgacggaactcaggaagagcagactaagccgccctcacgtgaagcgatgattgcttgtatcatgcaggctattgggggaggctatcagcctaaatccttcgataagctacttagccaccttgatatgatttggctcttgcacgacaaggtgctcgattatgaatatcacgcgtgctggaaatggtgccaaaaccaccacgttaccgacgtgaataagactcgcagttctgctaaggcatcttctttgatggggagggctggatatgtagtcaaccatggcaatctctcagttccattaaaagcaaaaatgccaacacctggcgagattttttccatcgtaaaacaggttgaagatgagatggttggaaaaccactcacagcagaaacggctttttcttttgcggaagaggttaaaaagcgcgtggctgacctgatcgttattgaagttgcctaa

SEQ ID NO: 1410 - protein, 233 aa, Klebsiella aerogenes
MKLIKYWRVQLFKAENRGMAPGNAEVLIFEGYSKDKPKIKLGAGVSFELFIAPDSLESHIFRDHLIDSVRFIPVYEDDGDNVDDGTQEEQTKPPSREAMIACIMQAIGGGYQPKSFDKLLSHLDMIWLLHDKVLDYEYHACWKWCQNHHVTDVNKTRSSAKASSLMGRAGYVVNHGNLSVPLKAKMPTPGEIFSIVKQVEDEMVGKPLTAETAFSFAEEVKKRVADLIVIEVA

SEQ ID NO: 1411 - DNA, 525 bp, Klebsiella aerogenes
atggcgcaactgactaaaagagctggtgccaccggcgcggtttgttctgtggcagcgattatcgcaatagtgctgaatgccggtcacgtgcgtaccaacgagcggggccttgaactgattggcaatgctgaaggttgtcggcgtgatccgtatgtctgcccggcagctgtgctcaccgatggcatcgggaacacgcacggagttaagcccggtgtgcgcaaaactgacaagcagatcgccgctgactgggaaagaaacatccttgaggccgagcgttgcgtaaatacctatggcaatggccgacggttgagcgacaacacattttcagcagtaacgtcgataacctttaatgcgggctgcgccaatatgcagaaatcgacattgtttgcgctactcgtgaaaggtcaggttacgcaggcatgtaaccagttccctcgctgggtgtacggtggtgggaaagttcttcccggccttgttactcgtcgcgccgcagagaaacagctctgtctggacggtgtgaaatga

SEQ ID NO: 1412 - protein, 174 aa, Klebsiella aerogenes
MAQLTKRAGATGAVCSVAAIIAIVLNAGHVRTNERGLELIGNAEGCRRDPYVCPAAVLTDGIGNTHGVKPGVRKTDKQIAADWERNILEAERCVNTYGNGRRLSDNTFSAVTSITFNAGCANMQKSTLFALLVKGQVTQACNQFPRWVYGGGKVLPGLVTRRAAEKQLCLDGVK

SEQ ID NO: 1413 - DNA, 321 bp, Klebsiella aerogenes
atgaaaatgaacaaccaaaacgagaatatcgttacccatttctttgcgtggctggctgctgttgcctcaatgctggggatcactacacaggacatggtttatatcctctttggttttatcggcgtggtgatttctctcgcgtcgtttgtgctggggagaatggatgcacggaaagagcgtaacgaagacagtaagcgaacgcagttgctggctgattatctccatggcgtgcagcagaaaccggttcgtgaacgcccatcgtctgctgaagtgatcaccgaatcaatgaacaggataaacaacgatggcgcaactgactaa

SEQ ID NO: 1414 - protein, 106 aa, Klebsiella aerogenes
MKMNNQNENIVTHFFAWLAAVASMLGITTQDMVYILFGFIGVVISLASFVLGRMDARKERNEDSKRTQLLADYLHGVQQKPVRERPSSAEVITESMNRINNDGATD

SEQ ID NO: 1415 - DNA, 579 bp, Klebsiella aerogenes
atgatcaacccttctgaagttggtaagtcaggtgaaatgattcgcctccgtacgctggaaagcatctggatacagggaaagctgcgcatgtggggccgctggtcatacattggaggcggtagcggcggcaacatgtttaaccagctattggcatccgggaagataacgaaaactgccatcaatgacgtactgcgccgtatgaagaaatcgggcattaccaaacctgagctggaagccttcttcagggaaatcctcagcggtaaaaataaaagcggcctggcgttttgtactgacgaggagggattgaaaattgattcagtgcttagcaccgagcttgtgcgctccgggaataaagctctctataagctaatcaaggatcggtatgtttatcgcatgagcaagaaggccatggcaaaagagctaaacgaaaagcatccagaatggtgcttgaggacttgcgagagcagggttgacgtttggctaaatttagcagaatcgatgctttacgcaccaatgtgtgacgcgtttggcacaaatagcgacagattttacttgaatagttgcgcggaaagtgcttga

SEQ ID NO: 1416 - protein, 192 aa, Klebsiella aerogenes
MINPSEVGKSGEMIRLRTLESIWIQGKLRMWGRWSYIGGGSGGNMFNQLLASGKITKTAINDVLRRMKKSGITKPELEAFFREILSGKNKSGLAFCTDEEGLKIDSVLSTELVRSGNKALYKLIKDRYVYRMSKKAMAKELNEKHPEWCLRTCESRVDVWLNLAESMLYAPMCDAFGTNSDRFYLNSCAESA

SEQ ID NO: 1417 - DNA, 537 bp, Klebsiella aerogenes
atgaaaaaagtatatacagcaatcatattaatagtactcttatgtggtggtgttttatctgccaactacatttttcttcaaaggcacatgaatgaggttctgaaagaagatccaaggaatgatggtattagcgtttgggtttattataagtggtttgtaaactcttccgagattaattatgaccttcgttctgtttctgcagaaaatagttcactggatgttagtagggtgatgctgcaatttgctgaaaaagtgaaagattatgattttagtaaggtttatcttagttacagagggaaagataagttttacttaaaaggagagtattttaaaactcttgggcaggaatatggtattcaaaaccccgtatatacattaagaacaattccggaaaacgtgtatatgttaaatggagagagagcttatagtgtttgggagggtgggcttctgggtgtaatgggaaaacagatggaagatcttagtgatttctctaaggcttggtacttagatgatttcattaaaagcatgagcgattaa

SEQ ID NO: 1418 - protein, 178 aa, Klebsiella aerogenes
MKKVYTAIILIVLLCGGVLSANYIFLQRHMNEVLKEDPRNDGISVWVYYKWFVNSSEINYDLRSVSAENSSLDVSRVMLQFAEKVKDYDFSKVYLSYRGKDKFYLKGEYFKTLGQEYGIQNPVYTLRTIPENVYMLNGERAYSVWEGGLLGVMGKQMEDLSDFSKAWYLDDFIKSMSD

SEQ ID NO: 1419 - DNA, 213 bp, Klebsiella aerogenes
atgagaaggcggggaaaagcagtgtggggggataaaattcagaataaaaaaaacctgcgcatccgcgcaggccggtgcaagataatcagtacgaagtgcgtacttaagaaactcaccaatcaatacctctgggatagccagagtatcaatgcatcactcaacgaaaccagcgaacattcgcaacagctaatcgcaaagtgtaagcaaagatga

SEQ ID NO: 1420 - protein, 70 aa, Klebsiella aerogenes
MRRRGKAVWGDKIQNKKNLRIRAGRCKIISTKCVLKKLTNQYLWDSQSINASLNETSEHSQQLIAKCKQR

SEQ ID NO: 1421 - DNA, 429 bp, Enterobacter cloacae
atgtataaaactatcattatgtcggttgatgtctttgaaatggagctgagcgacaaggctgtccgccatgcagagtttctcgcccaacaggacggtattattcatttacttcacgtcttacccggttcatccagcttcaccatgagccgttttaccgccgatctgcgccgctttgaagagcatttgcagcatgaagcggaaacccgcttgcagaccatggtcggccacttcagcatcgacccttcacgcatcaagagccatgtgcgtttcggcaacgtccgcgatatggttaatgaactggccaatgaaatcaaagctgacgtggtagtcattggttcacgtaatccgtcgatcagcacccatttgctgggttcaaacgcctcaagcgtgattcgtcatgcccatattccggtaatggtcgtgagataa

SEQ ID NO: 1422 - protein, 142 aa, Enterobacter cloacae
MYKTIIMSVDVFEMELSDKAVRHAEFLAQQDGIIHLLHVLPGSSSFTMSRFTADLRRFEEHLQHEAETRLQTMVGHFSIDPSRIKSHVRFGNVRDMVNELANEIKADVVVIGSRNPSISTHLLGSNASSVIRHAHIPVMVVR

SEQ ID NO: 1423 - DNA, 1008 bp, Citrobacter rodentium
gtgatattcgcctggtttatcgttgccgatatctggatcccgctaaccccggattccaccgtgatgcgcgtggtgactccggtctcgtcgcgggtctccggctacgtctcgcacgtctacgtgcacaacaatagccaggtgaaaaaaggcgacctgctgtatgagctcgatcccacgccattcattaataaagttgaagcggcgcaaatcgcccttgaacaggccaaactgagtaaccagcagctggatgcgcaaatcgccgccgctcgcgccaacctgcgcaccgcgcagtacaccgcgcgtaatgacaaagtcactctcgaccgctaccagcgcctgagcaccatgcaaaacgtgtcgcaatcggatctcgataaggtgcgcacgacatggcagaccagcgaacaatcggtcagcgccctgaatgcgcagattcagaacctgctgatccagcgcggcgagcgcgacgacaagcgcaacgtgacgctgcagaaatatcgcaacgcgctggaagaggcgcagctcaacctcggctggacccaggtgcgcgctgagaccgacggtatggtcagcaacctgcagcttaatccgggaatttacgccaccgccgctaccgccgtgctggcgttggttaacaacaataccgatatcgtcgccgactttcgtgaaaaaagcctgcgccatacggcggtgaataccgatgcggcggtggttttcgatgccctgccgggtaaagtcttcccggcgcacgtgaccagcagcgacgccggtattcttgccggtcaggaagcggtgaatggccaactgtcgcagcctgagcagtctacccgctgggtgcgcgatgcgcagcgcatgcggattcacgtcgcgctggatcaacctctggataagccgctgccgaccggcgcccgcgccaccgtccagttgtacaatagcgacggccccttcgcccgcacctttgccggcctgcagatccacctggtgagctggttgcactatgtctattaa

SEQ ID NO: 1424 - protein, 335 aa, Citrobacter rodentium
MIFAWFIVADIWIPLTPDSTVMRVVTPVSSRVSGYVSHVYVHNNSQVKKGDLLYELDPTPFINKVEAAQIALEQAKLSNQQLDAQIAAARANLRTAQYTARNDKVTLDRYQRLSTMQNVSQSDLDKVRTTWQTSEQSVSALNAQIQNLLIQRGERDDKRNVTLQKYRNALEEAQLNLGWTQVRAETDGMVSNLQLNPGIYATAATAVLALVNNNTDIVADFREKSLRHTAVNTDAAVVFDALPGKVFPAHVTSSDAGILAGQEAVNGQLSQPEQSTRWVRDAQRMRIHVALDQPLDKPLPTGARATVQLYNSDGPFARTFAGLQIHLVSWLHYVY

SEQ ID NO: 1425 - DNA, 942 bp, Enterobacter cloacae complex
atgagcaacgatatcgcaaacatcaatgcgccagtagacaccgcaatcgctggcactgctgcgacaattttcagtccagagggtttgaaccaactgatgaaattcgcagaagtaatggcgcaaagccgcgtaacggtaccagctcacctcgccggaaagcctgctgattgcatggccgtggcaatgcaagctgctcagtggggaatgaatccattcgccgtcgcgcaaaaaactcatgtcgtcagcggaactctcggttatgaagcccagctggtaaatgcggttatcactacgatgtcgccaacaaaagaccgtatcaactatgagtggtttgggccgtgggaaaacgtgatcggcaagtttgtagagaaaacatcccagaaaggaaacatatacattgcgccggcatggacattgaaagatgaagcaggttgcggtgttcgcgtatgggcgaccatgaagggagaagaacaccctagagtgcttgagttaatgctttctcaagcacaggtaagaaactccacgctttgggctagcgatcctaaacaacaacttgcatacctggcaaccaagcgctggtcacgcctgcactgccctgacgtaatcatgggcgtgtatacaccggatgagttgcaggaagcgcagccgcgcgttgagcgtgacattaccccagcaccggcaactgcgtcaggcatgaacaaactgatcaacacgaagccagagcagagccaggaagagcgacagcgcaaagcagatgaccgtgatcctgatgaaatgctgacagcattcactgatgcagcaatgaactacaacaccattgctgatctggataaggcatacaaatacgttgcaaaaaacctcgccaatgatgatgagcgcctggcgaaagcaacggacgtgtacaccatccgacgcgacgaacttaacgaaattccgatgtaa

SEQ ID NO: 1426 - protein, 313 aa, Enterobacter cloacae complex
MSNDIANINAPVDTAIAGTAATIFSPEGLNQLMKFAEVMAQSRVTVPAHLAGKPADCMAVAMQAAQWGMNPFAVAQKTHVVSGTLGYEAQLVNAVITTMSPTKDRINYEWFGPWENVIGKFVEKTSQKGNIYIAPAWTLKDEAGCGVRVWATMKGEEHPRVLELMLSQAQVRNSTLWASDPKQQLAYLATKRWSRLHCPDVIMGVYTPDELQEAQPRVERDITPAPATASGMNKLINTKPEQSQEERQRKADDRDPDEMLTAFTDAAMNYNTIADLDKAYKYVAKNLANDDERLAKATDVYTIRRDELNEIPM

SEQ ID NO: 1427 - DNA, 153 bp, Salmonella enterica
atgaaaacagcacattacttcgcaagccgctcagccaaattcctggtgattggcatcaacggcagggtcaccgatgagcgctacgaagttagcggaaaagctgaggccaggaagctagctgctgaattatcggcgaaagcctggaacttctga

SEQ ID NO: 1428 - protein, 50 aa, Salmonella enterica
MKTAHYFASRSAKFLVIGINGRVTDERYEVSGKAEARKLAAELSAKAWNF

SEQ ID NO: 1429 - DNA, 780 bp, Enterobacter cloacae
gtgaccatcgaaatttcgaaccaactatcagaggtgctaagcgtcattgagcgccatctggaatcaacgttgctggccgtgcatttgtacggctccgcagtggatggcggcctgaagccatacagcgatattgatttgttggttactgtggccgtaaagcttgatgaaacgacgcggcgagcattgctcaatgaccttatggaggcttcggctttccctggcgagagcgagacgctccgcgctatagaagtcacccttgtcgtgcatgacgacatcatcccgtggcgttatccggctaagcgcgagctgcaatttggagaatggcagcgcaatgacattcttgcgggtatcttcgagccagccatgatcgacattgatctagctatcctgcttacaaaagcaagagaacatagcgttgccttggtaggtccggcagcggaggaattctttgacccggttcctgaacaggatctattcgaggcgctgagggaaaccttgaagctatggaactcgcagcccgactgggccggcgatgagcgaaatgtagtgcttacgttgtcccgcatttggtacagcgcaataaccggcaaaatcgcgccgaaggatgtcgctgccgactgggcaataaaacgcctacctgcccagtatcagcccgtcttacttgaagctaagcaagcttatctgggacaaaaagaagatcacttggcctcacgcgcagatcacttggaagaatttattcgctttgtgaaaggcgagatcatcaagtcagttggtaaatga

SEQ ID NO: 1430 - protein, 259 aa, Enterobacter cloacae
MTIEISNQLSEVLSVIERHLESTLLAVHLYGSAVDGGLKPYSDIDLLVTVAVKLDETTRRALLNDLMEASAFPGESETLRAIEVTLVVHDDIIPWRYPAKRELQFGEWQRNDILAGIFEPAMIDIDLAILLTKAREHSVALVGPAAEEFFDPVPEQDLFEALRETLKLWNSQPDWAGDERNVVLTLSRIWYSAITGKIAPKDVAADWAIKRLPAQYQPVLLEAKQAYLGQKEDHLASRADHLEEFIRFVKGEIIKSVGK

SEQ ID NO: 1431 - DNA, 702 bp, Klebsiella oxytoca
atgactgagcgcggaatgatttttaacggtgagatggttcgcgccattatcgacggcaggaagactcagacccggcggattgttaaagggactgacggcgccgtgaagttctgcaaggaatgggacatcaacggagaagagattttcgttgtgctcggcgaaaaagaccacacaggaatgaaccctgttttgggtgctatctcatgcccgttcggaggcatcggcgatcgcatctgggtgcgtgaaacatggtctgacgtgaatctcgaaggtattccagctgtggcataccgcgcagatggcgatgtttactctctaatggatgatgaatcgtttttagatgaggacggagcatttaattacgatgaaccccgcgtcactaaatatcattttgctgcttggtattcagaccttattggaggaatagagggtgattggcgaccttcaatccacatgccgcgctgggccagccgcattctgctggaaataactgatattcgcgtcgagcgcctcgctagcgtgagtgacgaagatgctggcaaagagggttacccagcggacccctccccgtttggtgggccaatggataaatggctgtggtttcgtcagttgtgggacggcatctatcaaaaacatagctttaaacacaacccttgggtgtgggttatcgagtttaaacggattaagggggccggcaaatga

SEQ ID NO: 1432 - protein, 233 aa, Klebsiella oxytoca
MTERGMIFNGEMVRAIIDGRKTQTRRIVKGTDGAVKFCKEWDINGEEIFVVLGEKDHTGMNPVLGAISCPFGGIGDRIWVRETWSDVNLEGIPAVAYRADGDVYSLMDDESFLDEDGAFNYDEPRVTKYHFAAWYSDLIGGIEGDWRPSIHMPRWASRILLEITDIRVERLASVSDEDAGKEGYPADPSPFGGPMDKWLWFRQLWDGIYQKHSFKHNPWVWVIEFKRIKGAGK

SEQ ID NO: 1433 - DNA, 1521 bp, Enterobacter cloacae
atgtcctcaaaatggcgtaacgtcctatgctacatttatttgccggtctggatttacaccggactattattattgcttgctttagcttttgtactgttttacgaagcgattaacggttttcatgataccgcaaacgcagttgcaacggtgatttacactcgcgcaatgcggtcgcagcttgctgttgcgatggcggcactcttcaactttttcggcgttctgctgggcggtctcagcgtagcctatgccatcgtgcatatgctgccaacggacctgctgcttaacatgggttccgcacatggcctcgccatggtgttctctatgctgctggcggcaatcatctggaacctcggaacctggtatttcggcctaccggcctccagttctcacaccctgattggcgctatcatcggtattggtttaaccaatgcgctgatgaccggtacttcagtggtggatgcgctgaatatcccgaaagtcatcggcatttttgcctcacttatcgtctcgccgatcgttggcctggtggtagcgggcggcctgattttcattctgcgtcgttactggagcggtaccaaaaaacgcgctcgtatacacctgaccccagcggaacgcgaaaagaaagacggtaagaaaaaaccgccgttctggacccgtatcgcgctgatcctgtccgctatcggcgtgtcgttctcgcacggcgccaacgatgggcagaaaggcattggtctggtcatgctggtcttgattggcgtcgcgccggcgggcttcgtggtcaacatgaacgcatctggttacgaaatcactcgtacccgcgatgcggtcaacaacgtggaaaccttcttccaacagcgccctgagctgctgaagaaagccaccggcgttgatcaactggttccgtcaccggaaaccaataccgcggccaacggcgagtttcactgccatccggcgaacaccatcaacgcgcttgaccgcgtgaagacaatgctcaccggtacggaaagctacgatacactgtcagtggatcagcgcggccagctgcgtcgcattatgctctgcatctccgacaccaccgacaaagtggccaaactgccggatgtgagcactgacgaccagcgcctgctgaagaaactgaaaaccgatatgctgagcaccatcgagtacgcgccaatctggatcattatggcggtcgcgctggcgctgggtattggcaccatgatcggctggcgccgcgtggcgaccactatcggcgagaagattggtaagaagggtatgacctacgcgcaaggtatgtccgcccagatgaccgccgcggtttctatcggccttgccagctacaccggcatgccggtttccaccacccacgtgctctcttcctcggttgcggggacgatgctcgttgatggcggcggtctgcagaagaaaaccgtcaccagcatcctgatggcatgggtactcaccctgccggcagccattttgctgtcaggcgtgctgtactggctggctctgaagcttatctaa

SEQ ID NO: 1434 - protein, 506 aa, Enterobacter cloacae
MSSKWRNVLCYIYLPVWIYTGLLLLLALAFVLFYEAINGFHDTANAVATVIYTRAMRSQLAVAMAALFNFFGVLLGGLSVAYAIVHMLPTDLLLNMGSAHGLAMVFSMLLAAIIWNLGTWYFGLPASSSHTLIGAIIGIGLTNALMTGTSVVDALNIPKVIGIFASLIVSPIVGLVVAGGLIFILRRYWSGTKKRARIHLTPAEREKKDGKKKPPFWTRIALILSAIGVSFSHGANDGQKGIGLVMLVLIGVAPAGFVVNMNASGYEITRTRDAVNNVETFFQQRPELLKKATGVDQLVPSPETNTAANGEFHCHPANTINALDRVKTMLTGTESYDTLSVDQRGQLRRIMLCISDTTDKVAKLPDVSTDDQRLLKKLKTDMLSTIEYAPIWIIMAVALALGIGTMIGWRRVATTIGEKIGKKGMTYAQGMSAQMTAAVSIGLASYTGMPVSTTHVLSSSVAGTMLVDGGGLQKKTVTSILMAWVLTLPAAILLSGVLYWLALKLI

SEQ ID NO: 1435 - DNA, 2097 bp, Klebsiella oxytoca
atgagcaaagtcagaatcgctattatcggtaacggcatggtcggccatcgctttatcgaagagcttcttgataaggcgcctgccggacaattcgacattaccgtgttctgtgaagagccgcgtatcgcctatgaccgtgtccacctgtcgtcttacttctcccatcacactgcggaagagctgtcgctggtacgcgaaggtttctatgagaaacacggcgtcaaggtactggtcggcgaacgcgcgattaccatcaaccgtcaggaaaaggtgatccactccagcgctggccgtaccgttttctacgacaagctgattatggcgactggctcatacccgtggatcccgccgattaaaggcgcggaaacccaggattgcttcgtctatcgtactattgaagatcttaacgccatcgaatcctgcgcccgtcgcagcaaacgcggcgcggtggtcggcggcggtctgctcggtctggaagcggctggcgcgctgaaaaatctcggcgtggaaacccacgtgatcgagtttgcgccgatgctgatggccgagcagctcgaccagatgggcggcgagcagctgaagcgtaagattgaaagcatgggcgtgaaggttcacaccagcaaaaataccaaagagatcgttcagcagggcaccgaggcacgcaaaacgatgcgcttcgccgacggtagcgaactgcaggtcgatttcatcgtcttctctaccggtatccgtccgcgcgacaagctggctacccagtgcggtctcgccgtcgcccaacgcggcggcatcatggtcaacgatagctgccagacctccgatccggatatctacgctatcggcgaatgcgccagctggaataaccgcgtatacggtcttgtcgccccgggctacaaaatggcgcaggttaccgttgaccatatcctcggcaacgacaatctgttcaccggcgccgacctcagcgccaagctgaagctgctcggcgtggacgttggcggtatcggcgacgcccacgggcgcacgccgggcgcgcgcagctacgtctatctcgacgaaagcaaagaggtctacaaacggctcattgtcagcgaagataacaaaaccctgcttggcgcggtactggtcggcgacaccagcgattacggcaacctgctgcagctggtgctgaatgccatcgagctgccggaaaacccggattcgctgatcctcccggcccacgccggcagcggcaagccatccatcggcgtggataaactgccggacagcgcgcagatttgttcctgcttcgacgtcagcaaaggcgacctgatcgccgctatcaataaaggctgccacaccgtggcggcgctgaaagcggaaaccaaagccggaaccggctgcggcggctgtattccgctggtgacgcaggtgctcaacgccgagctggcgaaacagggtatcgaagtgaacaacaatctgtgtgagcacttcgcctactctcgccaggagctgttccacctgatccgcgtcgaaggcatcaaaaccttcgacgaactgctggaaaaacatggtcagggctacggctgtgaagtctgtaagccgaccgtcggttccctgctggcctcatgctggaatgagtacatcctcaaaccacagcacacgccgctgcaggacaccaacgataacttcctcgccaacatccagaaagatggcacctactcggttatcccgcgctccgcaggcggcgaaattacgccagaaggcctggttgccgtcggtcgcatcgcgcgcgaatttaatctgtataccaaaatcaccggctcccagcgtatcggcctgttcggcgcgcaaaaagacgacctgccggaaatctggcgtcaactgattgaagccggcttcgaaaccggccatgcctacgccaaagcgttacgtatggcgaaaacctgcgtcggcagtacctggtgccgctacggcgtcggcgatagcgtcggcttcggcgtagaactggaaaaccgctataaaggtatccgtaccccgcacaaaatgaagttcggcgtctccggttgtacccgtgaatgcgcggaagcccagggtaaagacgttgggatcatcgccacctag

SEQ ID NO: 1436 - protein, 698 aa, Klebsiella oxytoca
MSKVRIAIIGNGMVGHRFIEELLDKAPAGQFDITVFCEEPRIAYDRVHLSSYFSHHTAEELSLVREGFYEKHGVKVLVGERAITINRQEKVIHSSAGRTVFYDKLIMATGSYPWIPPIKGAETQDCFVYRTIEDLNAIESCARRSKRGAVVGGGLLGLEAAGALKNLGVETHVIEFAPMLMAEQLDQMGGEQLKRKIESMGVKVHTSKNTKEIVQQGTEARKTMRFADGSELQVDFIVFSTGIRPRDKLATQCGLAVAQRGGIMVNDSCQTSDPDIYAIGECASWNNRVYGLVAPGYKMAQVTVDHILGNDNLFTGADLSAKLKLLGVDVGGIGDAHGRTPGARSYVYLDESKEVYKRLIVSEDNKTLLGAVLVGDTSDYGNLLQLVLNAIELPENPDSLILPAHAGSGKPSIGVDKLPDSAQICSCFDVSKGDLIAAINKGCHTVAALKAETKAGTGCGGCIPLVTQVLNAELAKQGIEVNNNLCEHFAYSRQELFHLIRVEGIKTFDELLEKHGQGYGCEVCKPTVGSLLASCWNEYILKPQHTPLQDTNDNFLANIQKDGTYSVIPRSAGGEITPEGLVAVGRIAREFNLYTKITGSQRIGLFGAQKDDLPEIWRQLIEAGFETGHAYAKALRMAKTCVGSTWCRYGVGDSVGFGVELENRYKGIRTPHKMKFGVSGCTRECAEAQGKDVGIIAT

SEQ ID NO: 1437 - DNA, 429 bp, Escherichia coli
gtgtgcggtaacggcgggatgaaaccacgccacgccgatctgctggccgcggacctcgatcgcgatacgctcatcaaatatctcgaccgctttatgatgttctacatccgcaccgccgataagcttacccgtaccgcgccatggctggacaacatggaaggcggcatcgactatctgcgcagcgtcatcatcgacgataagctgggcctgaacgatcaccttgaagaagagctggctcgcctgcgcgccgcttttgcctgcgaatggaccgagaccgtcaataacccggcggcgcagacgcgcttcaaacactttatcaacagcgatcagcgcgacccgaacgttcaggtggtgccggaacgtgaccagcatcgcccggccacgccctatgagcgcatcccggtcacgctggtggaggaaaacgtatga

SEQ ID NO: 1438 - protein, 142 aa, Escherichia coli
MCGNGGMKPRHADLLAADLDRDTLIKYLDRFMMFYIRTADKLTRTAPWLDNMEGGIDYLRSVIIDDKLGLNDHLEEELARLRAAFACEWTETVNNPAAQTRFKHFINSDQRDPNVQVVPERDQHRPATPYERIPVTLVEENV

SEQ ID NO: 1439 - DNA, 714 bp, Klebsiella aerogenes
atgatatttgggctttttgtttgtggactgttgtccggggtaaccacctggctgtttggcttcggcggcggctttgttaccgtgccgctgctttacctgttgctgagccatcagggcacagtaggcggtcaggcgatgcaaatagcggtagcgacgtcggcgctggtgatgctgtgcacgtcgctgttggcaagcggccgccacctgcgcgccggaacggttcactggcgctccctgctgccgatacttggcggcatcgccatcggcggtattgccggcgcggcgctggcgctgaaggtcaacggcgagtggatccgctggctgttcattttgtacctggcggtgaccattgtggattgctacgctcgccccggctttatggcgccgtcgacggcttgcgcaccgtcgagtgcagggcgcgagactatccttggcggcgggattggcctgattgccgccttccttggcgttggcggcagggcggcgaccgccagcctgacgtggctgctgatggcgccgatggcggcgctgccctccggtttcatcggtaatatctggtggctggcggccgggctgctggtggccgggagctggttgggattgcggggcgcatcgcgctggttggcaaaactccccgatcgctggcacgtgcggatctacccgctactattgctactggtgttgctggcgatgggctttggcggggtgggctga

SEQ ID NO: 1440 - protein, 237 aa, Klebsiella aerogenes
MIFGLFVCGLLSGVTTWLFGFGGGFVTVPLLYLLLSHQGTVGGQAMQIAVATSALVMLCTSLLASGRHLRAGTVHWRSLLPILGGIAIGGIAGAALALKVNGEWIRWLFILYLAVTIVDCYARPGFMAPSTACAPSSAGRETILGGGIGLIAAFLGVGGRAATASLTWLLMAPMAALPSGFIGNIWWLAAGLLVAGSWLGLRGASRWLAKLPDRWHVRIYPLLLLLVLLAMGFGGVG

SEQ ID NO: 1441 - DNA, 204 bp, Klebsiella aerogenes
atgatgccggcattaccaggtccgggcgtttcgttttccgctgcgcagctgccgatgatgacgaccctgagcgccagtgacggctgtcacctgtattttgagcagggcacactggtgtggatcgaggtttactcgcagggcgacaagcgctggccgttttatggcagaccagaactgacgggaattacccattcatccacgtaa

SEQ ID NO: 1442 - protein, 67 aa, Klebsiella aerogenes
MMPALPGPGVSFSAAQLPMMTTLSASDGCHLYFEQGTLVWIEVYSQGDKRWPFYGRPELTGITHSST

SEQ ID NO: 1443 - DNA, 207 bp, Escherichia coli
atgaataatactttgcagttgttctggagtagcgggctgcatatcgctagaatcttcaatatactgcacaaaaaaaatacccagttaacacaattaaaagaagaactatcaaaaaaccaaattgctggccaatttcttgctgtctttccattgttccatccctaccggtcaatccagtttgttaatcagcatttcattttgagttag

SEQ ID NO: 1444 - protein, 68 aa, Escherichia coli
MNNTLQLFWSSGLHIARIFNILHKKNTQLTQLKEELSKNQIAGQFLAVFPLFHPYRSIQFVNQHFILS

SEQ ID NO: 1445 - DNA, 861 bp, Klebsiella aerogenes
atgggcatgggcgccgcccgcgcctgcctgcaggcgggcctgaacacctggggcgttgacatcaatcccgacaactgtcgcgcactgctggcggcgggcgccaaaggcgcgggccccagcgcggtgccgttcgccgcggaactggatgcagttgtgctgctggtggtcaatgccgcccaggtgcgggggatcctgttcggcgagagcggcctcgccgcccatctgaagccgggcaccgtcgtgatggtgtcgtccaccatcgcctccgccgatgctcaggccattgccgaggcgctggcggagtaccagctattgatgctcgacgcgccggtatcgggcggcgccgtgaaagcggccgccggcgacatgacggtgatggcctccgggagcgatgccgcctttgcccgactcgcgccggtgctggacgccgtggccggcaaagtctaccgcatcgggagcgacattggtcttggctcgacggtaaaaattatccatcagctgctggccggggtgcacatcgccgttgccgccgaagcgatggcgcttgccgcccgcgccgggatcccactggagacgatgtatgacgtggtcacccacgcggcgggtaattcctggatgtttgagaatcgcatgcagcacgtcctggatggcgattactcgccaaaatccgctgtcgatatttttgtcaaagatctcgggctggtgaatgacactgcccgggcgctgaccttcccgctgccgctcgctaccaccgcgctgaatatgttcacctccgccagtaatgccggattcggtcgggaagatgacagcgcggtgatcaagattttcaacggcatcaccctgccgggccataaacagtga

SEQ ID NO: 1446 - protein, 286 aa, Klebsiella aerogenes
MGMGAARACLQAGLNTWGVDINPDNCRALLAAGAKGAGPSAVPFAAELDAVVLLVVNAAQVRGILFGESGLAAHLKPGTVVMVSSTIASADAQAIAEALAEYQLLMLDAPVSGGAVKAAAGDMTVMASGSDAAFARLAPVLDAVAGKVYRIGSDIGLGSTVKIIHQLLAGVHIAVAAEAMALAARAGIPLETMYDVVTHAAGNSWMFENRMQHVLDGDYSPKSAVDIFVKDLGLVNDTARALTFPLPLATTALNMFTSASNAGFGREDDSAVIKIFNGITLPGHKQ

SEQ ID NO: 1447 - DNA, 228 bp, Klebsiella aerogenes
atgaaacgagagacattccaccattttgcagacggccgcggtcgtcgccagattttcgttaatggaaatagaattagccgcgtaatttgggctgacgaagagaagggggtgttgtgttttcatccttatccgctaaggcgtcatcgtaaagaacctttcagtgtttactcccggaagctgcgcgggaaaatcactgttctctttgaaaaagagggcttgaaagcatga

SEQ ID NO: 1448 - protein, 75 aa, Klebsiella aerogenes
MKRETFHHFADGRGRRQIFVNGNRISRVIWADEEKGVLCFHPYPLRRHRKEPFSVYSRKLRGKITVLFEKEGLKA

SEQ ID NO: 1449 - DNA, 174 bp, Citrobacter koseri
atgaaagctcaaaaagcaaccaagccagaagtaaaattcgacactatgaaagcattcgcaggaatgggtgctgctgttgaagtactgatgaaggctgcgcctaatgcgtttacccacgctattgtctcgggtaaagaacagcagggtaagccacgtcgtcgcaaggcagcatga

SEQ ID NO: 1450 - protein, 57 aa, Citrobacter koseri
MKAQKATKPEVKFDTMKAFAGMGAAVEVLMKAAPNAFTHAIVSGKEQQGKPRRRKAA

SEQ ID NO: 1451 - DNA, 540 bp, Klebsiella oxytoca
atgcttacaattgaagagattggccaatctgtccgtaacaatatacaactcgttttggataatttcggactgcctctagcggtaggccctatcagcgatgatgactacaaggtcttatcgggagggtttggtgagttagagtgggattacgttttatccacccacggaaattcgcctgatcgttatgaattttgcataaagttagtcaaccacggtgcgatggagaatgttccttctggagctgctttgtgcatctttggggttgaagaacatacatttaacatccatatgattgaaagctttgtaagagatgatcccgatcaccctcttaaagggcgcatggttcttataacgttaatgagtgcatatttgttttgcatggctgtagactgtcccgtcgttagagtcatcgaacctgttcatgagttacgtgctttttacgaaagctttggatttggcatgctaccatgcgggtatatcatggaagcagagacctctgatattgagggcgtgttcatcaaattcgcacaattaggctag

SEQ ID NO: 1452 - protein, 179 aa, Klebsiella oxytoca
MLTIEEIGQSVRNNIQLVLDNFGLPLAVGPISDDDYKVLSGGFGELEWDYVLSTHGNSPDRYEFCIKLVNHGAMENVPSGAALCIFGVEEHTFNIHMIESFVRDDPDHPLKGRMVLITLMSAYLFCMAVDCPVVRVIEPVHELRAFYESFGFGMLPCGYIMEAETSDIEGVFIKFAQLG

SEQ ID NO: 1453 - DNA, 981 bp, Klebsiella oxytoca
gtgagagccttgctaacacctgaaatagcccaccgtatgggtgtggttctttttcggcctggtagtgaactgatgccgctgttcagacgcggacgggtactgattgaaccagagccagaaaactactcagaacacccgacgggagctataccaccggcaggacagcccctggctgatgacccgtcgctgttaactgtttttgagaacccggaagttatcattcgcgctggtggtatcggcggcctggaggcggagcttgagcgcagttttaaatgccagtatccacatggcacctggcatagcgagaatttcacgctattccgccatgagcctggtagcatccgcctgtgctgggcctgcgataatctggttcgtgaccagtacaccgaaacactggcaggtattgcacggagaaacctggtatcctggatgatatccattatccgctcacagctgggcttcaatgaagaccatacgctgaccattcctgagttgtgctggtggatggttatcaacgatttggctcatgtgataccggaaggactggctcataaagcactgcgtttaccaccggttaagcatcagtcggtgatgaaggagagcgacattactcctgggccagcagctgctgaagtagtacagaaaaagattctggcgctgcgagtggatccggaaacgcctgaatcattcatgctgcggccaaagcggcgccgttgggtaaacgagcactggacacgctgggttaagtcccagttgtgtgtctgctgtaacaagcaggcagatgacccgcaccacctgataggccacggacaaggtggaatgggtacaaaagcgcatgacttattcgtgttgccgctttgcagagcgcaccacgacgagttgcacgctgacaccgtggcattcgaacagaaatacggctcacagctggagctgatgtttcgatttttggatcgttcgctggcaaccggcgtactggcgtaa

SEQ ID NO: 1454 - protein, 326 aa, Klebsiella oxytoca
MRALLTPEIAHRMGVVLFRPGSELMPLFRRGRVLIEPEPENYSEHPTGAIPPAGQPLADDPSLLTVFENPEVIIRAGGIGGLEAELERSFKCQYPHGTWHSENFTLFRHEPGSIRLCWACDNLVRDQYTETLAGIARRNLVSWMISIIRSQLGFNEDHTLTIPELCWWMVINDLAHVIPEGLAHKALRLPPVKHQSVMKESDITPGPAAAEVVQKKILALRVDPETPESFMLRPKRRRWVNEHWTRWVKSQLCVCCNKQADDPHHLIGHGQGGMGTKAHDLFVLPLCRAHHDELHADTVAFEQKYGSQLELMFRFLDRSLATGVLA

SEQ ID NO: 1455 - DNA, 198 bp, Klebsiella oxytoca
atgcataaatcagaagtcattgaacacttcggaggggtatcaaaaacagcaagtgttcttgggatttcccatccggcagtttgccgatggggtgaagtcatcccccaaaaacaagcattcgtcatcgagcgaattacgaaaggtaagcttaagtacgacgccagcctgtaccaaaagggtacagattcagctgcctga

SEQ ID NO: 1456 - protein, 65 aa, Klebsiella oxytoca
MHKSEVIEHFGGVSKTASVLGISHPAVCRWGEVIPQKQAFVIERITKGKLKYDASLYQKGTDSAA

SEQ ID NO: 1457 - DNA, 1032 bp, Citrobacter werkmanii
atgtctgacaaaaaccattatacgacatgggaagaattgcttgaggagtacttcttcgcccgaaacctgcgcgctgcaacagaatggagctacgcaaaggttgtaaaggggttcctgaaatttacgggggctgacataaccccatcaatggttactcatcatgaagttctaagatggcggcgatatgtactcagagaaaaacaacaatcggcgcagacctggaacaataaaattgcacatctcagggccctctataactatgctatggaaagtggtttattgcctgcgggcaaaaacccttttaacaactgcactgtacagcgggacagaaagaaaaaacggactttaaaccgctctcagctaacccgcctttatctgataatgcagcaggctgaaattgaatccaaccggaaaattttcgcacgtggcgggcggagtgcgctttacccggcttggttctggataaccgtcctggatacgctcagatatacgggaatgaggcaaaatcaactgctgcatattcagctcagggacgtcaatctgacagaaggctatatagatctgcgccttgaggggagtaaaacgcacagggaatggcgcgttcccgttgttaagcagctgcgtttgcggctacagcttcttcttacacgggcaacggaggctggagccgggccaaaagataacctcttcgatgtcagtttttacattgccgggaaaaaagcaaaatctgacagaaatgatgtgacagtgatgcatcaaaagatccgctccttttttcgccgtctgtcaaaggaatgtggttttgccgtttcgccgcaccgtttcagacataccctggctacagaactgatgaaagcaccggaaaggaatcttcagctggttaaagatttactgggtcatcgtagcgtaagcacaacaatggaatatgtggaactcaagatggacattgtgggaaaaacactggaagaagaattgtccctgcacacagatctctgtgtagaaagggaattacaactattgacacaaaactga

SEQ ID NO: 1458 - protein, 343 aa, Citrobacter werkmanii
MSDKNHYTTWEELLEEYFFARNLRAATEWSYAKVVKGFLKFTGADITPSMVTHHEVLRWRRYVLREKQQSAQTWNNKIAHLRALYNYAMESGLLPAGKNPFNNCTVQRDRKKKRTLNRSQLTRLYLIMQQAEIESNRKIFARGGRSALYPAWFWITVLDTLRYTGMRQNQLLHIQLRDVNLTEGYIDLRLEGSKTHREWRVPVVKQLRLRLQLLLTRATEAGAGPKDNLFDVSFYIAGKKAKSDRNDVTVMHQKIRSFFRRLSKECGFAVSPHRFRHTLATELMKAPERNLQLVKDLLGHRSVSTTMEYVELKMDIVGKTLEEELSLHTDLCVERELQLLTQN

SEQ ID NO: 1459 - DNA, 672 bp, Enterobacter cloacae complex
atgaaagtggttgatatggatattttaaaacaacgccttatgattctgactttcggattctctaactttttattcttttatttattattaacctctattgatctaaatatattcttaatgactaggcttgatttctcaatattacatttgcagataattaagcctctgatgatgcttttaatttttttatccataactcacttattaaataacacctcactttaccaaggattaacctgggggaaacctaacaagcagtcatttgtttttttcttgctcataattattgcttacactgcttcatactaccttacgccgaaagaacccttcgttacagaatttactaaaggtttgtcacatggaatggcagctgtaaaaatcgcagccacaattattattttccctctactggaggaactggttttcagaggaattatcctgagttcttttttaaacgcccttggtgaaaaggcgggctatatcatcggtgggctgacagtttctgttttgtttgcagttatacacacacagtattcattgcccaccaaaatccaaatgttttcactttcattaattttctgtggagcaagatatcaaagcagagggcttcttttaccaattctactgcatgctttttgtatcgcgcttggcctatatattgagttaaaataa

SEQ ID NO: 1460 - protein, 223 aa, Enterobacter cloacae complex
MKVVDMDILKQRLMILTFGFSNFLFFYLLLTSIDLNIFLMTRLDFSILHLQIIKPLMMLLIFLSITHLLNNTSLYQGLTWGKPNKQSFVFFLLIIIAYTASYYLTPKEPFVTEFTKGLSHGMAAVKIAATIIIFPLLEELVFRGIILSSFLNALGEKAGYIIGGLTVSVLFAVIHTQYSLPTKIQMFSLSLIFCGARYQSRGLLLPILLHAFCIALGLYIELK

SEQ ID NO: 1461 - DNA, 402 bp, Citrobacter werkmanii
atgtatcagtctcaagaaaaacgcgcctgggaacgtggtgttcgtctcgctgcaatatggaagggtatcaaaaaaatttttacacgtttagatcagcgctgcgtcatactggctaaacaatacaaactgccgaagtggttaggccacataccgctgcttttagctgtcctttgttcgttagttgcacttatagcaggcggtttcttgataagctgcagcgcagttttattatggacttttattgctgccataacacatataggatctagctctaaagatgcttcaataaatagttttaatgaaaagaaagatgaaaataattttcatgatgaatttgtaatgaatagcgccatcaataatgaatatgatggcgctccttacaaatccccgagtgaagattag

SEQ ID NO: 1462 - protein, 133 aa, Citrobacter werkmanii
MYQSQEKRAWERGVRLAAIWKGIKKIFTRLDQRCVILAKQYKLPKWLGHIPLLLAVLCSLVALIAGGFLISCSAVLLWTFIAAITHIGSSSKDASINSFNEKKDENNFHDEFVMNSAINNEYDGAPYKSPSED

SEQ ID NO: 1463 - DNA, 477 bp, Escherichia coli
atggccatcaccggctttgctgcgcgggcaggagaaaagctgcgtcaggaaaagcagcactgtcgtgcgatcagtgtctttatccgaaccagcccgttttcaccccgggatgcgccctgtgccagccaggcgacggagacgctactggtagccactcaggacagccgggacatcattgccgctgcccagcgtgcgcttgcgcgcatctggcgtgatggctaccggtacgcaaaggctggtatcatgctggccgatttttccggccgcgaggcacaacttaatctgtttgatgaatgtgctccccgtcctgacagcgaagccctgatgaatgccgtcgatcggattaaccgcgccggtaagggccgcattttttttgccggccaggggatcaatgtggggttcgcgatgcgcagggaaatgctgagtccggaatacacgacagactggaacgccttgccgcgtgctttcatgagataa

SEQ ID NO: 1464 - protein, 158 aa, Escherichia coli
MAITGFAARAGEKLRQEKQHCRAISVFIRTSPFSPRDAPCASQATETLLVATQDSRDIIAAAQRALARIWRDGYRYAKAGIMLADFSGREAQLNLFDECAPRPDSEALMNAVDRINRAGKGRIFFAGQGINVGFAMRREMLSPEYTTDWNALPRAFMR

SEQ ID NO: 1465 - DNA, 546 bp, Klebsiella aerogenes
atggtctggcgtcggctgagaattgctgccgacacgtcactggccgcgcttcacttcattttccagatagtgcagggctggggggacgaccatctccatcaatttcacatttatggcaaagattacggtatctcctacgaaggaggcatcggttttgtcgataatccgttccgggtcgtgattgatgattttgcttttgatgctggcgatcgctttacctatgaatacaatttctttgagcactggcttcatgacattcgtgttgaggccatttatgaaaactctacgctgaaagcgccgttttgtataagcggccatggtatgcccggagccacagctgcggatgagttcgataaaaccctggcgtttcttgaagctatcgttaatgcggatgatgaaacaacggtcggcgagatccgcccttttgctgacgacctggatgctgtcaggttcaaccgccacaaaatcaaccggcaactgagcaggctcgaccttgcatctccggtactggagcctgaagttatctggctgggccgtcgtcgctga

SEQ ID NO: 1466 - protein, 181 aa, Klebsiella aerogenes
MVWRRLRIAADTSLAALHFIFQIVQGWGDDHLHQFHIYGKDYGISYEGGIGFVDNPFRVVIDDFAFDAGDRFTYEYNFFEHWLHDIRVEAIYENSTLKAPFCISGHGMPGATAADEFDKTLAFLEAIVNADDETTVGEIRPFADDLDAVRFNRHKINRQLSRLDLASPVLEPEVIWLGRRR

SEQ ID NO: 1467 - DNA, 573 bp, Klebsiella aerogenes
gtgcaatatgcctacatcagggtaagctcggccgatcagaatacggcccgtcaggaagaggcattgtcaaaggcgggttttcagcctgataaaatttgtgttgagcatgccagcgcgaaggacacaaaccgcccggggttacaggaactcctggggcaattacgccctggtgatacgcttctggttcattccatcgatcgcctttgccggaatatgtcggatatgtgcgctgtcaccacccggcttcgtgaccagggcgttacccttatttttctgaaagagcagctgacgttcagcgccggcacaaacaatccgatgcaggaactgcagctgcacatgatgtcggcattcagccagtttgaacgagccttactgaaggaaaggcaggccgacggcatcgccgcgaaaaaagcacggggtgaaaaaacagggcgccccggcgccgatatcaaaaagatccaggaaattgacgcactcagaagcagaggggtcaggctcaggatcgcctgcgaccatgcgggccttggcgtttccacatattataagcttcgtcaccagatgaacaaccagtag

SEQ ID NO: 1468 - protein, 190 aa, Klebsiella aerogenes
MQYAYIRVSSADQNTARQEEALSKAGFQPDKICVEHASAKDTNRPGLQELLGQLRPGDTLLVHSIDRLCRNMSDMCAVTTRLRDQGVTLIFLKEQLTFSAGTNNPMQELQLHMMSAFSQFERALLKERQADGIAAKKARGEKTGRPGADIKKIQEIDALRSRGVRLRIACDHAGLGVSTYYKLRHQMNNQ

SEQ ID NO: 1469 - DNA, 387 bp, Klebsiella aerogenes
atgaataaaccagcagatctgaaaccccgcaacttatcggctgctgtcagattgcgcctaaatgaaatcgagaactggctggacagagggctaacgcggcatgaaattgctgaaatcctcgacagcgaatacagcttttcggtaacagccaaagggcttgagatggcactgtatagaacgcggcaaaaccgaaaaaatgtattgcacaatacgcatgataagagtagcgcgaagggtgcagcggaaagtgtattgcacaatacacaaccgtctgagcctgaagtgcaggaaagtaaaaaagcagagagtcccggcattattgataaagaattcttcaagaaaatcggtgagaatttcgaccctaagaagttcaacaaaaaattctga

SEQ ID NO: 1470 - protein, 128 aa, Klebsiella aerogenes
MNKPADLKPRNLSAAVRLRLNEIENWLDRGLTRHEIAEILDSEYSFSVTAKGLEMALYRTRQNRKNVLHNTHDKSSAKGAAESVLHNTQPSEPEVQESKKAESPGIIDKEFFKKIGENFDPKKFNKKF

SEQ ID NO: 1471 - DNA, 1023 bp, Enterobacter cloacae
atggttgaaataaccccgacagcagcgacgccccccgataacgactcgcgtgaattccatccgatgcgcggcgtgggcaatcgtcatctgcaaaccatgctgccgcggatcatccgccgcaagctccgatttacgccgcactggcaacgccttgagctgccggatggcgatttcgtcgatctggcctggagcgaagaccccgccggcgcgcgccacaaaccgcgactggtggtctttcacggtctggaaggcagcctgcacagcccttacgcccacggtttgattcacgccgccatgcagcgcggctggctcggggtggtgatgcattttcgcggctgcagcggcgagccgaatcgcaacagtcgtatttatcactctggcgaaacggaagacggtacctggttcctgcactggctgcagcgcgagttcggcacagcgccgacggcggcggtaggctattcgcttggcggcaacatgctgggctgtctgctggcgaaagaaggcgacaatattccgctcgatgcagccgtcattgtctcggcgccctttatgctggaagcctgcagctaccatatggacaaaggattttcgcgcgtctatcagcgttacctgctcaacctgctgaaagccaacgccgcgcgcaagctaaaagcctatccaggctcgctgccggtcgatcttcgccagcttaaaagcatgcgccgcatccgcgaattcgacgacatgatcaccgccaaaatccacggtttcgccgatgcgctagactattaccgacagtgcagcgcgatgccgcgcttaagcgatatcaccaagccgacgctgatcattcacgcgaaagacgatccgtttatggaccatcattcaattccgccgcaggaacaactgccggctaacgtcgaatatcagctcacggaacagggcggtcacgttggctttgtcggcggtacgctgcgaaaaccgcaaatgtggctggagcaacgtattccggattggttaacccgctggctgggaggacaagcatga

SEQ ID NO: 1472 - protein, 340 aa, Enterobacter cloacae
MVEITPTAATPPDNDSREFHPMRGVGNRHLQTMLPRIIRRKLRFTPHWQRLELPDGDFVDLAWSEDPAGARHKPRLVVFHGLEGSLHSPYAHGLIHAAMQRGWLGVVMHFRGCSGEPNRNSRIYHSGETEDGTWFLHWLQREFGTAPTAAVGYSLGGNMLGCLLAKEGDNIPLDAAVIVSAPFMLEACSYHMDKGFSRVYQRYLLNLLKANAARKLKAYPGSLPVDLRQLKSMRRIREFDDMITAKIHGFADALDYYRQCSAMPRLSDITKPTLIIHAKDDPFMDHHSIPPQEQLPANVEYQLTEQGGHVGFVGGTLRKPQMWLEQRIPDWLTRWLGGQA

SEQ ID NO: 1473 - DNA, 1566 bp, Klebsiella aerogenes
atgctgtcactgtcagttggcggcgtcctgctgacgtccattctgcttctgagcgctctcactctggtgcagaaaggaaatattgagaacagcctgctggaaggtaacatcgcttatgctcgcaaacttgctgacacaacggaccattatctcagtacggcccaacaggagctggcctacagcgcagatctgattgttgattttcaagatcggaaactactccaggcagaagctgatcgcctgcgtctgcagtcaggtttttttaactccgttctggtcgtcaaagcgaatgcggtagtagctgccacttctccagagagcctgagtctggtcgggatgcagctgcattctcctgccagccagcagtcgatcatctctcataaaccattcatatcactgcctttcacctcagtgacgggtaactacgttgtgtttctttctcagcccattttttcacagaaaggtcagtatcagggctatatcggcgggactatttatcttaaaaagcacagtatcctcagtgagatccttggacagcatttttacggcaatcaggctgaagtcagtattgttgccgctgacggccgcgttattaacagccgggacccgaacgctgtcgggcggctgcttgatgtccaccagacacacctcacattactgtcaaaagagaagagcggccattttgtcgatcatcatgccggcgaggagcatctcatcggttttgctagcctgcagcaagctgactggaaggtttttattgcaggcacgtcggacaacgtatcccgaattcttaagaaaaccataatcagtgccttctggttcactctcgttatcatcatcttggctaactgtgcggttatatatttttctgccagaatctcccgcccgcttgagagactggccagctttacccgtatggccgacagtgaaaaggcgctacggcagctggcgcaacttgaacctggctatcaggaagcagagcttctaagggaggccgtcagccagcacctgttgtctatgaccagacaggtcagccttctgactgatgaggcgatgaccgatcctcttaccggtctgctgaacagaaaaggcttcactacgcggattaaggcgctgagtccgctcggaaatcattgcgttatcgcaatcgatattgaccatttcaaacatatcaatgatcgctatggtcacgacacaggagataccgtactcgtcaacctaggccggatgctgagattgctgacccgccagaatgacatagtgtgccgttttggcggagaggagttcattattttactgcctgattccagcctgaaggaaacattttttgtggcagaacggatccgtagtgtcacagcggaaacctcgtttgcggaaggcatccacttaactctctccgctggcatcgccgcactccctgactgttccgcagatttcagccagttgcttcgtcaggccgatttagccatgtataaagccaaaagctcggggcgaaaccgggtatgtacttacgaatctggtgactatcgacatcccgagaacccatccgaaaatgacacccgctga

SEQ ID NO: 1474 - protein, 521 aa, Klebsiella aerogenes
MLSLSVGGVLLTSILLLSALTLVQKGNIENSLLEGNIAYARKLADTTDHYLSTAQQELAYSADLIVDFQDRKLLQAEADRLRLQSGFFNSVLVVKANAVVAATSPESLSLVGMQLHSPASQQSIISHKPFISLPFTSVTGNYVVFLSQPIFSQKGQYQGYIGGTIYLKKHSILSEILGQHFYGNQAEVSIVAADGRVINSRDPNAVGRLLDVHQTHLTLLSKEKSGHFVDHHAGEEHLIGFASLQQADWKVFIAGTSDNVSRILKKTIISAFWFTLVIIILANCAVIYFSARISRPLERLASFTRMADSEKALRQLAQLEPGYQEAELLREAVSQHLLSMTRQVSLLTDEAMTDPLTGLLNRKGFTTRIKALSPLGNHCVIAIDIDHFKHINDRYGHDTGDTVLVNLGRMLRLLTRQNDIVCRFGGEEFIILLPDSSLKETFFVAERIRSVTAETSFAEGIHLTLSAGIAALPDCSADFSQLLRQADLAMYKAKSSGRNRVCTYESGDYRHPENPSENDTR

SEQ ID NO: 1475 - DNA, 420 bp, Klebsiella oxytoca
atgactatcacactacaggcagtaaacgagctcatcgccaccctggagagcgcaggcgagctgtcgatcagagagcagaagttcctgaagctggcgaaagcgtaccagcagctggctgcggagaatgtggaggcaaaaaaaataatcagcgaatgccgggagtatttcatcgctggggtgatgaaccgtatcagaccaacgaatgaaggatacctgcatatgatttgcgacacgtttgcagacgaaaccccagcaaccgatcgcatcgtagccgggattaaggctgatggggtggatgagttcgtatccaacgccgtgcataagatttttgatgaaagcggagcagtgtcagctttggcttacctttcgctcgctaattcatacgtgaagcaactgcgcgagggggccgacaaatgctaa

SEQ ID NO: 1476 - protein, 139 aa, Klebsiella oxytoca
MTITLQAVNELIATLESAGELSIREQKFLKLAKAYQQLAAENVEAKKIISECREYFIAGVMNRIRPTNEGYLHMICDTFADETPATDRIVAGIKADGVDEFVSNAVHKIFDESGAVSALAYLSLANSYVKQLREGADKC

SEQ ID NO: 1477 - DNA, 537 bp, Klebsiella oxytoca
atgaaggtagaaaaaagcgatgttctggcatttaccatttccgatgttgaacgcctcgaccctgtcagggtgatgattgaaaactacgagccagggaagggccgcatcactgtaacctgcttcggaaaggcgtggaccggtgcctggtttgctatgggcggagacaccgttcaggagttcattaagcgtgtcagcaatgactaccttatcggctatttcgacccgcaactgcaaagcacagttgatgatgataacgacgccaaccttgaattcgtaaagggtgaaatcatcaaactccggcgtcagcaggaaatcgatgctgaggaagccaggggtatgtggattgaggcagaaaacgctgaggatgtgaaggaaagctgctgcgattgtcgcatcggtaataagttgcctggtctgcttggtgatgagccgtggtatgcaaaatggccggcagtgccaaaccacaattatcaatatctcgaacgcatcattgacgcggtacgtggcgggctcgcagaactggagcgtgcagcatga

SEQ ID NO: 1478 - protein, 178 aa, Klebsiella oxytoca
MKVEKSDVLAFTISDVERLDPVRVMIENYEPGKGRITVTCFGKAWTGAWFAMGGDTVQEFIKRVSNDYLIGYFDPQLQSTVDDDNDANLEFVKGEIIKLRRQQEIDAEEARGMWIEAENAEDVKESCCDCRIGNKLPGLLGDEPWYAKWPAVPNHNYQYLERIIDAVRGGLAELERAA

SEQ ID NO: 1479 - DNA, 294 bp, Klebsiella oxytoca
atgaacggatcgtcatcacatgatgtagaatggttgtttaggcagatttttgactaccttacagaaaagcaaggtatacctggttaccagttaagtaaaattgagaaggttgttttggactcattgatcaaggatggcggaatcacttgctatgatgagcttgacgaggaattcgcggctattcaggcggaagtagtcgctgtggaaaatgaccctgggaaaaaagcccttaaagatgtacttctgcgttatgccatgctgctttggtatgactttaaaccttatcgctactaa

SEQ ID NO: 1480 - protein, 97 aa, Klebsiella oxytoca
MNGSSSHDVEWLFRQIFDYLTEKQGIPGYQLSKIEKVVLDSLIKDGGITCYDELDEEFAAIQAEVVAVENDPGKKALKDVLLRYAMLLWYDFKPYRY

SEQ ID NO: 1481 - DNA, 192 bp, Klebsiella aerogenes
atgctaaatcagcaagatatgacggaaacagccaaggctgtttttgatgaattaagtgacaaaccggctacggctggggagattgctcagaatactcacctaagccgcgaacgctgccagctcatacttacgcagctggtaatggcggggttatctgattatcagttcggatgttataagcgcctccagtaa

SEQ ID NO: 1482 - protein, 63 aa, Klebsiella aerogenes
MLNQQDMTETAKAVFDELSDKPATAGEIAQNTHLSRERCQLILTQLVMAGLSDYQFGCYKRLQ

SEQ ID NO: 1483 - DNA, 516 bp, Klebsiella aerogenes
atggcgattaacaaagtcaaatcaccaacggtttttatgctccatgggtttcttggtagtgggaaaacgacttttgccagacatctggaacacaaatataccgctttacgttttactcatgatgaatggatgcagcagctgtatggcatcgatcccccgcaggctaattttgctgattacgcacaacgggtgttcaacgttatggagcccctatggacgcgatgcgttgagcttaacaataatgtcattctagatttcggattctggtcgagagaggaaagagtccgggtgcgtgaaatcatcacagctcataatggtcaggcagtcctttgccgtctgtcctgcccggatgacattgcatgggaacgtattcaaaaaagaaataaaacgccgacaaatagtctctatatagcgagggagacatttgatttacttcacgaacgatttgagcctctgacgcctgatgaagactttaccgaggtcagtgataatggctcatgtcgatatatgcaataa

SEQ ID NO: 1484 - protein, 171 aa, Klebsiella aerogenes
MAINKVKSPTVFMLHGFLGSGKTTFARHLEHKYTALRFTHDEWMQQLYGIDPPQANFADYAQRVFNVMEPLWTRCVELNNNVILDFGFWSREERVRVREIITAHNGQAVLCRLSCPDDIAWERIQKRNKTPTNSLYIARETFDLLHERFEPLTPDEDFTEVSDNGSCRYMQ

SEQ ID NO: 1485 - DNA, 186 bp, Klebsiella aerogenes
atgcatataaaagaccttttacttctggcactctgtctggccttgcttttttttatagtgaaaggcatcgatgcgtttgaacttcgccttccactctggttactgcgagtaatctatgctgcaggcatttttcttggcgcatcaacgatcctggcaagtatgtggttattgcatatatcgacatga

SEQ ID NO: 1486 - protein, 61 aa, Klebsiella aerogenes
MHIKDLLLLALCLALLFFIVKGIDAFELRLPLWLLRVIYAAGIFLGASTILASMWLLHIST

SEQ ID NO: 1487 - DNA, 1857 bp, Klebsiella aerogenes
atgaaaattaaggtttcaattttaggggggaagcgtcagggagatgcttttgaactgaagttaatcgatgaaaaaatcaactcatcattattcattcttgaagatgaagctatagaaatagcctttacgagtgaaaactattacgaaaagatttctttgttattatacgaaaatgaagtggaacctactttaatcgaacgtgtaggcgagctttggacttacagatggcttcccaaaaggctagggcgtttttcatatgaatgttttttccataattactatggaatagccgaattagtacttgaagctcaatacggtgaaaggactgaactttttagttttcaatcgatagaagttctggcaaaaaagttaaatgcagagcgagttgataagatgctgaactatatagcaaaaatcgatagtaatgctctttgtgcttttttcagagtaactcggcggaaagcaggtttcaaaaatggggatactcctgctgaaattttactagaacaaattgaaagcattgtcgaaataacgacaaccctgataagaaaaataatacaaagacctatttctaaattaacaagtcgggagaaatatgtttatccgagtgacaacacaaatattgatgatttgacgctgtcatggctatgtagcaacactgatgagctatttgaaacagattcatatgaaagtgcaattttggagtttaacgatgagctttatggggcgagaaagcttattgagcaccaggcagtagaagattctgacgtttatgaaaatcaagttttgcatggttttgttatgactttaattcaaaccacttcttctcttctttcaggcttcaaaaaccctgataagtatccaaatagaataaatggaagccctttagggtatgttagttttttctctcaaatacaaaaatttcagaagagtattaatgggcgaaaaattttaaaatgcaaatcaatattatcagatttacattctcttaaaaggataatggcagaggtgatgcctgcaaaaaaacatataatcggagtgcccacgtttacaatgaaagccaaaaaggatcctttatacctttctgttttcaaaaagatcgttgactggtaccgatttgggaaacctgattggagtgttcaagaagagttattatccatacaaagcattccaaaattgtttgaatactattctcttttctatataagagagatattaggacagcatataggctctaaatccgcgcccgaaccagttaatgaatcaatatcatttgtttttaatcttagaaaaggggctactctaaaattactatatgagccaaaatattggatggccacccatcccatggcagacctaagaggtttggttaacagtgaaggatggacaacttacaatggtatggtgactcatcgttcttcctcagggagattttctaatcgatctcccgactttgtaatacatattagcaatgggaatggtattgacaagtatctcattcttgatgcgaagtatacttctactgataaagcctttttacattatttacctgagttaacgcttaaatatcttcatggacttcattctatttcagatgcaaatagttccatcattggtttgattattttaaatcctgatgagaaactactcattagagatttccataattcatcatttgatatttattcggataggccagctatgccatttttattatgcgctaccatttctcctggggaagagtatataagtaataattgtttccaacattctcttttaaagatggtaactcttatggagcaacgtgttaacacagaaggtcaaggtcgctacttaatgaacgttttaagtgcttag

SEQ ID NO: 1488 - protein, 618 aa, Klebsiella aerogenes
MKIKVSILGGKRQGDAFELKLIDEKINSSLFILEDEAIEIAFTSENYYEKISLLLYENEVEPTLIERVGELWTYRWLPKRLGRFSYECFFHNYYGIAELVLEAQYGERTELFSFQSIEVLAKKLNAERVDKMLNYIAKIDSNALCAFFRVTRRKAGFKNGDTPAEILLEQIESIVEITTTLIRKIIQRPISKLTSREKYVYPSDNTNIDDLTLSWLCSNTDELFETDSYESAILEFNDELYGARKLIEHQAVEDSDVYENQVLHGFVMTLIQTTSSLLSGFKNPDKYPNRINGSPLGYVSFFSQIQKFQKSINGRKILKCKSILSDLHSLKRIMAEVMPAKKHIIGVPTFTMKAKKDPLYLSVFKKIVDWYRFGKPDWSVQEELLSIQSIPKLFEYYSLFYIREILGQHIGSKSAPEPVNESISFVFNLRKGATLKLLYEPKYWMATHPMADLRGLVNSEGWTTYNGMVTHRSSSGRFSNRSPDFVIHISNGNGIDKYLILDAKYTSTDKAFLHYLPELTLKYLHGLHSISDANSSIIGLIILNPDEKLLIRDFHNSSFDIYSDRPAMPFLLCATISPGEEYISNNCFQHSLLKMVTLMEQRVNTEGQGRYLMNVLSA

SEQ ID NO: 1489 - DNA, 954 bp, Klebsiella aerogenes
atgacaagtatagcaattcttgaagcagttaacacctcttacgtgccgttcaacggtcagcaagtgataactgcagttgctgctggggtgacttacgtggcaatgcgtcagattgtagagaacatcggaatggactggactggtcagtcggtaaagctgcgcaaaatgaaggacagattcaactgtagagatatctctatggttgccgccgacggcaagttgcgtaagcttttgtgcctcccactgaaaaaactcaatggatggctgttcagtatcaacccagaaaaagtgcgcgccgatatccgcgacaaactgatcaagtaccaggaggaatgctttaccgttctgcatgactactggactaaaggcgaggttaagaacccacgcaaaaagaccacggtcgatgaaaggacgccacttcgggatgccgttaacatgctggtaagcaaaaggcacatgatgtatccggaagcttacgcgatgatccatcaacgctttaatgttgacagcattgaggacctggaggcatcgcagattccaactgcaatcgagtatgttcaccgtgttgcgcttgaaggggaatttcttggcaagcaggaaacactgccagcgccgaagtttgacgtaaacattccgcttcaatggtggatcgataacaacccgttggttcgcagtggcaacctgtcatttgggaagtctctaacagccccgtcctttgacgtgacgatggagatgctttgtggtgacaactcgacatctgcagctattcgcctgattaacgttctggaagaggccggctttgatgtgtcggcgccgaaggctgaaattgtggcgatgcgcaaacatctgggtaatgtcgagtacggtatgaaggctatcgcggatgcttgccgccgggcggggaataaaaccatctcgttccgtggcggaaaggctgaatatgtgattggctaa

SEQ ID NO: 1490 - protein, 317 aa, Klebsiella aerogenes
MTSIAILEAVNTSYVPFNGQQVITAVAAGVTYVAMRQIVENIGMDWTGQSVKLRKMKDRFNCRDISMVAADGKLRKLLCLPLKKLNGWLFSINPEKVRADIRDKLIKYQEECFTVLHDYWTKGEVKNPRKKTTVDERTPLRDAVNMLVSKRHMMYPEAYAMIHQRFNVDSIEDLEASQIPTAIEYVHRVALEGEFLGKQETLPAPKFDVNIPLQWWIDNNPLVRSGNLSFGKSLTAPSFDVTMEMLCGDNSTSAAIRLINVLEEAGFDVSAPKAEIVAMRKHLGNVEYGMKAIADACRRAGNKTISFRGGKAEYVIG

SEQ ID NO: 1491 - DNA, 450 bp, Klebsiella aerogenes
atggaaagtctggacgcacggaaagtgctattgcaattcttgacagaactgccagatacaataaggacggaagagttgctcttggttctcgcttattgcgggcagaaccccaacttaaatgactctgacagcttccctgaatccatcgaaaaataccttctccagggcggcctgtcaggaattggtgccgtactatgcaccagagcatccattgactacacacttggagatgtaaacctcaaaatgattcgagcggaagaggaccttaaggcattggtggcgaaacatcctgacttcccagaagctggccttctcggcattcctctgagaaaacggcattatgccgccgctctggagaagtggaatgcgctgcgggcaaatgagttatctgacgaaagtattcgatattttggacaaatgtttttatccccacgatggggtagaggctga

SEQ ID NO: 1492 - protein, 149 aa, Klebsiella aerogenes
MESLDARKVLLQFLTELPDTIRTEELLLVLAYCGQNPNLNDSDSFPESIEKYLLQGGLSGIGAVLCTRASIDYTLGDVNLKMIRAEEDLKALVAKHPDFPEAGLLGIPLRKRHYAAALEKWNALRANELSDESIRYFGQMFLSPRWGRG

SEQ ID NO: 1493 - DNA, 582 bp, Klebsiella aerogenes
atggactattcattatcagagctatctgaggtttttacgtgcgaccctgaaaagggtgagctttattggctacctcgcagcagagaaagtttcaataacgatttcacatatcggatgtggaacttgcagttctccggcaaagtggccgggggaatcaatggatctggatacgtagtggttagctctggggaaatgaaaatcctagcgcaccgggcaatctggattttcgatgaaggccccattccagatggaatgtttattgaccatatcaatcacatccgacacgacaataggaaagtaaatctgcgcttagtgactcacgcccagaaccagaaaaaccaatccatgcactctacgaacattagcggtatcaatggagtaagaagggatgagaggagcgggaagtgggccgccttcataaaaacaaaaggccgaagcattaggcttggtttatttaatacattagaagacgccactcaggcgagaaagagcgctgatcgcaacttctgttttcatgagaatcacggtaaagacaagtatcttgataccccttacgttgacccttggttaagggttaactga

SEQ ID NO: 1494 - protein, 193 aa, Klebsiella aerogenes
MDYSLSELSEVFTCDPEKGELYWLPRSRESFNNDFTYRMWNLQFSGKVAGGINGSGYVVVSSGEMKILAHRAIWIFDEGPIPDGMFIDHINHIRHDNRKVNLRLVTHAQNQKNQSMHSTNISGINGVRRDERSGKWAAFIKTKGRSIRLGLFNTLEDATQARKSADRNFCFHENHGKDKYLDTPYVDPWLRVN

SEQ ID NO: 1495 - DNA, 1617 bp, Klebsiella aerogenes
atggcaatttttgatgaaaagcggcatttatatgaagccttattgagacataactacttccccaaccaaaaaggttcgataagtgaaatcccaccgtgcttttcttccaggacattcacaccggaaatagcagaattagtttcatctgacacatcagggcgtagaagcttacaaggttatgattgtgtagagtattacgctaccagatataacaatttcccgagaacgctctcaatcatccatccaaaagcgtacgcaaaattagccaagcatatacatgataactgggaggaaatacggtttataaaacaaaatgaaagcagcatgatcaaaccagacatgcatactgatggccgtgttataatcatgaattatgaggatgcagagactaaaaccgtaagagaactgaatgatggttttggacggcgatttaaagttaacgcagatatatcaggttgctttaccaacatctactcacactctattccgtgggcggtcgtaggtattaataatgcaaaaatagccttaaatactaaagtaaaaagccaagataaacactggagcgacaagcttgactattttcagcgtcaggctaagaggaatgagacacatggtgttcctattggcccagcaacctcaagtattgtttgcgagattattttaagcgctgtagataaaaaactgagggatgatggatttttatttagacgttatatagatgactatacatgttattgtaaaacacatgatgatgcgaagtcttttttacatttgcttggtatggagctttctaagtataaattatcactaaatttacacaagactaaaataactaatctcccagggactttgaatgataactgggtttctttgcttaatgtaaactcaccaacaaagaaacgttttacagatcaggatctgaatactctaagctcttctgaagtaattaattttctagattatgctgtgcagttgaacactcaagtaggtggtggaagcatactaaaatacgctatttcactggtaataaacaatctagatgagtatacaatcactcaggtgtatgactacctccttaacttatcatggcattatccaatgcttattccatatctaggcgttcttatcgaacatatttatttagatgatggtgatgagtataagaataaattcaatgagattttgagaatgtgtgcagagaataaatactctgacggtatggcttggactctttatttttgcatcaaaaataacattgatatagatgatgatgttataaaaatgattattagtttcggtgactgcttgagcttatgcttgctagatagcacagggatatatgaagaaaaaatcaatggttttgtggcagatattattaaattagattatgaatatgacatagacagatattggctccttttttatcaacgattccttaatgataaggccccaagtccttataatgacaaatgctttgacatcatgaaaaattatggcgttaattttatgccagatgaaaattataataccaaagctgagtcatattgtcatgtcatcaacaacccatttctcgaagacgaggatgagattgtaagctttaacgattatatggcgtag

SEQ ID NO: 1496 - protein, 538 aa, Klebsiella aerogenes
MAIFDEKRHLYEALLRHNYFPNQKGSISEIPPCFSSRTFTPEIAELVSSDTSGRRSLQGYDCVEYYATRYNNFPRTLSIIHPKAYAKLAKHIHDNWEEIRFIKQNESSMIKPDMHTDGRVIIMNYEDAETKTVRELNDGFGRRFKVNADISGCFTNIYSHSIPWAVVGINNAKIALNTKVKSQDKHWSDKLDYFQRQAKRNETHGVPIGPATSSIVCEIILSAVDKKLRDDGFLFRRYIDDYTCYCKTHDDAKSFLHLLGMELSKYKLSLNLHKTKITNLPGTLNDNWVSLLNVNSPTKKRFTDQDLNTLSSSEVINFLDYAVQLNTQVGGGSILKYAISLVINNLDEYTITQVYDYLLNLSWHYPMLIPYLGVLIEHIYLDDGDEYKNKFNEILRMCAENKYSDGMAWTLYFCIKNNIDIDDDVIKMIISFGDCLSLCLLDSTGIYEEKINGFVADIIKLDYEYDIDRYWLLFYQRFLNDKAPSPYNDKCFDIMKNYGVNFMPDENYNTKAESYCHVINNPFLEDEDEIVSFNDYMA

SEQ ID NO: 1497 - DNA, 525 bp, Klebsiella aerogenes
atgatactcagaaacgctattgtgggcctcatacttggtattttagcttacattgcatctgtttacataggaggtaagatcgttggctcatattcagggctatctgatctttacagaagtagtatgagaggctatttcttttccgcatttttaggcatatcgtctttccttttatctttattaacctttgtcgttatcaacctcaaagaaaaaatgtttgactcagaagattataaaaaaatatatataaagcacaaacagttaaatgctggagatgagataaaaaaacatgacctatacaaaccactagttgtaattaccacaatgctagtattttcaatctcttgtagtatattaacttcaatactacaatttaccctagggttatctagtaactgctggatattgatcataccaacattgactccgttcattgccatttcatttatggtgctttctctttatcaaatgtcacaattaattttccaatggctgcgttctgaagatgttataaaaatatcttga

SEQ ID NO: 1498 - protein, 174 aa, Klebsiella aerogenes
MILRNAIVGLILGILAYIASVYIGGKIVGSYSGLSDLYRSSMRGYFFSAFLGISSFLLSLLTFVVINLKEKMFDSEDYKKIYIKHKQLNAGDEIKKHDLYKPLVVITTMLVFSISCSILTSILQFTLGLSSNCWILIIPTLTPFIAISFMVLSLYQMSQLIFQWLRSEDVIKIS

SEQ ID NO: 1499 - DNA, 477 bp, Klebsiella oxytoca
atgaacggaacgatcacaacgtggtttaaagataaaggttttggatttatcaaagatgaaaacggcgataatcgctactttcatgtgattaaggttgccaaccctgagctgattaaaaaggatgcggcggtcactttcgaacccacaaccaataacaagggtttgtcagcgtacgccgtgaaggtcctcccggaaagcaaatatatctatatcgcaggcgagcggattaagctcacgtcgataaaatcttacctggtttataacgaggaggagcctgccgacacccgcattgataaagagaacgcggtcctctccgtgggcctgctgatgggaaatatcaggccaaaatcagccgctaagcccggggaaatgcgctcggtcaaaaagctggccatcaccaccttccagggcaccacgctcatcttcacggaagatgagatagacatcgacgccacggtgaaactgcttaaggtgtaa

SEQ ID NO: 1500 - protein, 158 aa, Klebsiella oxytoca
MNGTITTWFKDKGFGFIKDENGDNRYFHVIKVANPELIKKDAAVTFEPTTNNKGLSAYAVKVLPESKYIYIAGERIKLTSIKSYLVYNEEEPADTRIDKENAVLSVGLLMGNIRPKSAAKPGEMRSVKKLAITTFQGTTLIFTEDEIDIDATVKLLKV

SEQ ID NO: 1501 - DNA, 279 bp, Klebsiella oxytoca
atgcgtatcaataccaaaatgaggctggcagcactgttataccttatggcggcctacgctgttgccctgccgacactggcgctgttcacggacctggtgataaacggcgggattattgatatgtggcaaggctcgtattcatttttgaaccttcttgatctgcgtaaaattctctatctgcagtttgccgggctgggcgctatcctgggttttgtctactggctatttttctttagaaaataccgtcatcacgatccgctggataaatattttaagtag

SEQ ID NO: 1502 - protein, 92 aa, Klebsiella oxytoca
MRINTKMRLAALLYLMAAYAVALPTLALFTDLVINGGIIDMWQGSYSFLNLLDLRKILYLQFAGLGAILGFVYWLFFFRKYRHHDPLDKYFK

SEQ ID NO: 1503 - DNA, 879 bp, Klebsiella michiganensis
atggacctgacccagcttgaaatgtttaacgccgtcgccagcaccggcagcattacccaggccgcgcagaaggtgcatcgcgtgccgtcgaacctgaccacgcgcattcgccagctggaggcggatctcggcgtagagctgtttattcgcgaaaaccagcgtctgcgcctgtcgcccgccgggcatagctttttacgctatagccagcagatcctcgccctggtagatgaggcgagaatggtggtcgccggagatgaacctcaggggctgttttccctcggctcgctggaaagtaccgccgccgtgcgcatttcaccaaccctggcgcactttaatcaacgttaccccaaaattcatctggccctctccaccggcccttccggcaccatgatcgacggcgtcctggagggaaacctgagcgcggcgtttgttgacggcccgctggtgcatccagggcttgaggggttaccggtatttcccgaagagatgatgatcgtcgcgccctttggccacccgcccattgcgcgcgccagtgaagtgaatggcgccagcgtctatgcgtttcgcgccaactgctcctaccgccgccattttgaaagctggtttcatgccgatcgcgccacgccgggacgcatccatgaaatggagtcctaccacgggatgctggcctgcgtcattgccggcgccggtctggcgctgatcccacgcagtatgctggagagcatgccgggccatcagcaggtttccgcctggccgctggcggaagagtggcgctggctgaccacctggctggtctggcggcggggggcgaaaacccgtcagctcgacgcgtttatagcgctgctgaacgaagatcggcaagcagcatcttctccataa

SEQ ID NO: 1504 - protein, 292 aa, Klebsiella michiganensis
MDLTQLEMFNAVASTGSITQAAQKVHRVPSNLTTRIRQLEADLGVELFIRENQRLRLSPAGHSFLRYSQQILALVDEARMVVAGDEPQGLFSLGSLESTAAVRISPTLAHFNQRYPKIHLALSTGPSGTMIDGVLEGNLSAAFVDGPLVHPGLEGLPVFPEEMMIVAPFGHPPIARASEVNGASVYAFRANCSYRRHFESWFHADRATPGRIHEMESYHGMLACVIAGAGLALIPRSMLESMPGHQQVSAWPLAEEWRWLTTWLVWRRGAKTRQLDAFIALLNEDRQAASSP

SEQ ID NO: 1505 - DNA, 375 bp, Klebsiella variicola
atggtgcccatagaaaatctgttcgcccgcctgcagcgctccacttttcgctcccgctttcgcctcggcgtaaaggaacggcagtattgctatgataagggggcggaagttatcgaccagcacgcggctgattttatcgccaggcgcctggctccggcgcaaattcctaacgatggcaaacagactccgatgcgcggacacccggtattcatcgcccagcacgccaccgcgacctgctgtcgcggctgcctggaaaagtggcacgctatccctcgggggcggggcctcagcgaggcggaacagcgctacgtggtgcaggtgattcaccactggctggtgatccagatgaactcgccggaccgcggcagagcataa

SEQ ID NO: 1506 - protein, 124 aa, Klebsiella variicola
MVPIENLFARLQRSTFRSRFRLGVKERQYCYDKGAEVIDQHAADFIARRLAPAQIPNDGKQTPMRGHPVFIAQHATATCCRGCLEKWHAIPRGRGLSEAEQRYVVQVIHHWLVIQMNSPDRGRA

SEQ ID NO: 1507 - DNA, 528 bp, Klebsiella variicola
atgaccacatccttttctctgcgcacgctgtcgcgtgacgatattctcgaacatcttcctgaattaaccgatatcctcgtcagctgcgtcaacggcggggcctcggtgagctttatgctgcctttcgcccctgaaaccgcgacggcgttctggctgcgaatggcgcagagcgtggcagccggggagcgggtcgtcatcgccgcggcggatgagcagcagcggctcgttggtacggtgcagctcattatcgaccagccggaaaaccaaccgcaccgcgccgacgtcgctaaacttctggttcaccaaaatgcgcgtcgcctgggtctggcgaatgcgctgatggccaggctggaagcgatcgcgcgcgagcagggcaagagcgttctggtgctggatacggcgaccggcagcggagccgagaatttttacgtgcaatgcggttgggaaaaggccggggaaattcctcgctatgcgctgatgccggacggcgaactgacggcgacatcgctgttctataaacttttgtaa

SEQ ID NO: 1508 - protein, 175 aa, Klebsiella variicola
MTTSFSLRTLSRDDILEHLPELTDILVSCVNGGASVSFMLPFAPETATAFWLRMAQSVAAGERVVIAAADEQQRLVGTVQLIIDQPENQPHRADVAKLLVHQNARRLGLANALMARLEAIAREQGKSVLVLDTATGSGAENFYVQCGWEKAGEIPRYALMPDGELTATSLFYKLL

SEQ ID NO: 1509 - DNA, 573 bp, Klebsiella oxytoca
atgcaacaggtatttcaatggattaacgaacccgcaacatggtcggaagaggacggctcacttagcgtcgtaaccgatgaggaaaccgacttctggcgcgaaacctggtacgggtttgagcgcttctccgggcatatctatgccacggaagccgcgggggatttcacctttcaggtgcgggtgcgcgcagatttcagcaccctgtatgaccaggcggggattatgttaatgcaggacgcccggcactggcttaaggccggtatcgagtacaacgacggcgcgcccgccatcggtagcgtactgacgctgggaacttcagactgggccaccggcatttttccaggcaaccccgcggcgttctggctgcgcctgacccgtcggggcgaagcgctgcgcctgcagtactcaacggatggccaccagtggccgctactgcggctgtgcccttttccgaccggcgccgcgaaagtgggcatcatgtgctgtacgccacagcgcagcggcctgcgggttaatttcgacgaaatatcgctgctgccgcccaacgataaagatttgcacgatttaagctga

SEQ ID NO: 1510 - protein, 190 aa, Klebsiella oxytoca
MQQVFQWINEPATWSEEDGSLSVVTDEETDFWRETWYGFERFSGHIYATEAAGDFTFQVRVRADFSTLYDQAGIMLMQDARHWLKAGIEYNDGAPAIGSVLTLGTSDWATGIFPGNPAAFWLRLTRRGEALRLQYSTDGHQWPLLRLCPFPTGAAKVGIMCCTPQRSGLRVNFDEISLLPPNDKDLHDLS

SEQ ID NO: 1511 - DNA, 528 bp, Klebsiella oxytoca
atgcagattcgtaaaggattaaattctgaccttgctcgcctcgaatattgtgatttttccttcacggtcagccaggttgccagaggccctttcatcaataatgatctgaaaattgagacacttccctgcgcttataataaaacctatgagctggatatccagacgctggaaaaccactgtattaatccggatgcaatattcctgattgccgaaaccgaagcgggacaggtggccggtttcatcaccgcatctctgagctggaacaggtttatttccgtcgattatattgccattgaaagctcacatcgcagagccggcgcggccaacaagctcatggccgccgcccatatctgggcccgcagtatgaacgctgcgggattaaagcttgagacgcagaacgttaacgtgcccgcctgcctcttctatcgaaattatggttttactctcggaggatacgatcgatatctctacaacgctttagcggaaaaagatgaaattgcgctgttctggtattacatgttgaactaa

SEQ ID NO: 1512 - protein, 175 aa, Klebsiella oxytoca
MQIRKGLNSDLARLEYCDFSFTVSQVARGPFINNDLKIETLPCAYNKTYELDIQTLENHCINPDAIFLIAETEAGQVAGFITASLSWNRFISVDYIAIESSHRRAGAANKLMAAAHIWARSMNAAGLKLETQNVNVPACLFYRNYGFTLGGYDRYLYNALAEKDEIALFWYYMLN

SEQ ID NO: 1513 - DNA, 2733 bp, Klebsiella oxytoca
atgactgacatgaaaatagaaaaccggaaaataaaccggtctgcgtcagaaaatgataagcagcataaaaaaagcttcgccattgaaaccgaggcatttaacagtccggatcatacgctggcgcggttaaacagcagtcgccacgggctcaccaccgaagatgcccttgaacgactggatgaatacggccgcaatgaagtggcgcatgagcaggcgccgccggcgttgatccagcttttgcaggcattcaataacccgtttatctatgtcctgatggcgctggccgccgtcagcttcgtgaccgattactggctaccgctgcgtaacggcgaagagaccgatctgaccgggatcatcattatcgtcacgatggttagcctgagcgggttattgcgtttctggcaggagtttcgcaccaataaagcggcgcaggcgctgaaatccatggtccgcaccacggcgacggtgctgcgtcgcggtcccgggaatatggggccggtgcaggaagaaattgccattgaggagctggtgcccggggatatcatcttcctggcggcgggggatctggttccggcagacgtccgcctgctggaatcccgggacctgtttgtcagccagtcgatactcagcggcgagtcgctgccggttgaaaagtatgacgttctggccagcgtttccggtaaaggatgcgacaggcttcccgagccgaacaaagataaaagcctgctggagatgggcaatatctgtctgatgggcactaacgtgaccagcggcagggcacaggcggtggtggtggccaccggaaaccgtacctggtttggttcgctggcgaaatccatcgtcggcacgcgtactcagacggcgttcgaccgcggggtaaacagcgttagctggctgctgatccgctttatgctggtgatggtaccgattgtgctgctgattaacggcttcagcaaaggtgattgggttgaagcctcgctgtttgccctggcggtagcggttggcctgacgccggaaatgctgccgatgatcgtcagctccaacctggcgaaaggcgctatcgccatgtcgcggcgcaaagtgatcgtcaagcggctgaacgccatccagaactttggcgctatggacgtgctgtgtaccgataaaaccggtacgttaactcaggacaatatcatccttgagcatcaccttgatgtcagcggtcatgagagcgaccgggtgctgacgctggcctggcttaacagcagcagccagagcggggcgcgcaacctgatggaccgggcggtgctgcgctttggcgaggggcggattgcgccagcgaccaaagagcgttttgtcaaacttgatgaactgccgtttgattttgtccgccgtcgggtctcggtgtcggtggaagatgtccgccacggtgacaaaagcctgatctgcaaaggcgcggtcgaagagatgctgatggtcgccacgcatcttcgtgaaggcgataacgttgtggcgctggatgaaacccgacgcgatctgctgttagccaaaacgaaggactataacgcccagggcttccgcgtgctgctggtcgcaacccgcaagctggatgactccgcgctgaccacgccgctatgcaccgccgatgagcagggattgacggttgaagggatgctgactttcctcgatccgccgaaagagagcgcgggaaaagccattaccgcgctgcgcgataacggcgtggcggtgaaagtgctgaccggcgataacccggtggttacggcgcgtatttgcctggaagtgggcatcgatgcccacggtattctgaccggcgcccagattgaagcgatgacggatcgcgacctggagcgagaagtggaaacgcgctcggtattcgcgaagctgacgccgctgcagaagtcgcgcatcctgaaaacactgcagaaaaacggccacaccgtcggctttctcggcgacggcatcaacgatgcgccagccctgcgcgatgcggacgtcggcatttcggttgacagcgcggcggatatcgccaaagaggcatcggatatcatcctgctggaaaaggatctgatggtgctggaagaaggggtgatcaaaggacgtgagacgttcggcaatatcattaagtacctgaatatgactgccagttctaacttcggcaacgtcttctcggtaatggtggccagcgcgtttattccgttcctgccgatgctggcgattcatctgctgattcagaacctgatgtacgatctctcccagctctcgctgccgtgggacaaaatggacaaagagtttctgcgcaagccgcgtaagtgggatgcgaagaatatcggccgttttatgctgtggattggcccaacctcgtccatttttgatatcaccaccttcgcgctgatgtggtacgtgtttgcagcaaatcacgtcgaagcccaggcgctgttccagtccgggtggtttattgaaggactgctgtcgcaaacgctggtggtgcatatgctgagaacgcagaaaattccgtttatccagagccgtgcgaccttgccggtgctgctcaccaccgcggtgattatggctatcgggatctacattccgttctcgccgctgggagcgatggtcggactggagccgctaccgctgagctacttcccatggctggtcgcgacgctgcttagctattgcctggtagcgcagggcatgaagcgtttctatatcaaacgtttcggtcagtggttctga

SEQ ID NO: 1514 - protein, 910 aa, Klebsiella oxytoca
MTDMKIENRKINRSASENDKQHKKSFAIETEAFNSPDHTLARLNSSRHGLTTEDALERLDEYGRNEVAHEQAPPALIQLLQAFNNPFIYVLMALAAVSFVTDYWLPLRNGEETDLTGIIIIVTMVSLSGLLRFWQEFRTNKAAQALKSMVRTTATVLRRGPGNMGPVQEEIAIEELVPGDIIFLAAGDLVPADVRLLESRDLFVSQSILSGESLPVEKYDVLASVSGKGCDRLPEPNKDKSLLEMGNICLMGTNVTSGRAQAVVVATGNRTWFGSLAKSIVGTRTQTAFDRGVNSVSWLLIRFMLVMVPIVLLINGFSKGDWVEASLFALAVAVGLTPEMLPMIVSSNLAKGAIAMSRRKVIVKRLNAIQNFGAMDVLCTDKTGTLTQDNIILEHHLDVSGHESDRVLTLAWLNSSSQSGARNLMDRAVLRFGEGRIAPATKERFVKLDELPFDFVRRRVSVSVEDVRHGDKSLICKGAVEEMLMVATHLREGDNVVALDETRRDLLLAKTKDYNAQGFRVLLVATRKLDDSALTTPLCTADEQGLTVEGMLTFLDPPKESAGKAITALRDNGVAVKVLTGDNPVVTARICLEVGIDAHGILTGAQIEAMTDRDLEREVETRSVFAKLTPLQKSRILKTLQKNGHTVGFLGDGINDAPALRDADVGISVDSAADIAKEASDIILLEKDLMVLEEGVIKGRETFGNIIKYLNMTASSNFGNVFSVMVASAFIPFLPMLAIHLLIQNLMYDLSQLSLPWDKMDKEFLRKPRKWDAKNIGRFMLWIGPTSSIFDITTFALMWYVFAANHVEAQALFQSGWFIEGLLSQTLVVHMLRTQKIPFIQSRATLPVLLTTAVIMAIGIYIPFSPLGAMVGLEPLPLSYFPWLVATLLSYCLVAQGMKRFYIKRFGQWF

SEQ ID NO: 1515 - DNA, 684 bp, Klebsiella oxytoca
atgttgatgtttccttatatcgcaaatttactcgccgcgatgctgttgggcgcgctgattggcgctgaaagacagtggcgtcagcgtatggccggcctgcgcaccaactcgctggtcgccaccggcgcggcggtttttattctgagctccatttcaacatcgccggacagccccggacgtattgccgcgcaggtggtatccggaattggttttctcggcgccggcgtcatcatgcgtgaaggcatgaacgtgcgcggcctgaataccgccgcaaccctgtggtgctctgcggcgattggtgtactctgcggtttaggccagttctggcaagcagcggcggcaacgctgataatcctctgcgccaatattctactgcgcgaagcggcgcagagaattaatcagatccccggcgcgacagaagaagagaaatgctacgttctgaatattgtctgtcaaagcgaatatgaaaacgcgattcgtcagctattgcttaatatcagtaaagagatgacgctcagccttcagggactggtgtcgacagcagcaaaagaacaagggcataaagaaatccgcatcgaactggtgggaaataccgactgtcgaaaagcgcgagatctcattatgacaagaattggcggggacgaaaacattacgtcagtccgctggtgcgtcgaggggagttaa

SEQ ID NO: 1516 - protein, 227 aa, Klebsiella oxytoca
MLMFPYIANLLAAMLLGALIGAERQWRQRMAGLRTNSLVATGAAVFILSSISTSPDSPGRIAAQVVSGIGFLGAGVIMREGMNVRGLNTAATLWCSAAIGVLCGLGQFWQAAAATLIILCANILLREAAQRINQIPGATEEEKCYVLNIVCQSEYENAIRQLLLNISKEMTLSLQGLVSTAAKEQGHKEIRIELVGNTDCRKARDLIMTRIGGDENITSVRWCVEGS

SEQ ID NO: 1517 - DNA, 981 bp, Klebsiella oxytoca
atggcggcgacttattcaggaaaaattaagcctgaacgcgtagtctggctctttttcttcggggaagtgtcggtaatgaaaataagtaacgataagcagcgttcccaggttgcgcgtaaaacgacgctggtcagcgtgatggtcaatctctttttatccagttttcagatactggccgggatattctccggctcgcagggcttaatcgccgatggtattcattctctttccgatttggtggccgatttcgttgtgctgttggccaataaaaaaagcggcaaaccttcggatagcgaccatcactacgggcaccggcgctatgaaaacggcgcttcactggtgattggcgcgctgctgttactggttggcgcgggtatgctgtggtctgcttgcggcaaactactgcaaccggaatctattcagagtgtgcatattaccgcgctgtgggtggcgctcgccgcgctgaccgccaaagagattttattccgctatatgctaagggcggctaagcaaatccagtcctctatgctaattgccaacgcctggcacgcccgctcagacgccgcgtcttcggtagtcgttgcggtcggcatcatcggtaatctggccggttacgcctggtttgacccagtggccgcactggttgtcggcgcgctggtcacccgcatgggctataccttttcgtctgacgccctccatgacctgatggatcggtcagtggatagcgatagcgagcggcaaataatcgccactatcctggcaacgcccggcgtcgtggcgctgcacgacctgaaaacccgtcgtgccggggatttgatcctggtcgatgtgcatgtcgaagtacccgggcatttatcggtagcggaggggcacgatattgcgctgctggtgcggacccgggtgctaagccaccataacgttctgcatatgatgattcatattgacccgtgtcgcgcagagagcgccgcgattgtcgcgtaa

SEQ ID NO: 1518 - protein, 326 aa, Klebsiella oxytoca
MAATYSGKIKPERVVWLFFFGEVSVMKISNDKQRSQVARKTTLVSVMVNLFLSSFQILAGIFSGSQGLIADGIHSLSDLVADFVVLLANKKSGKPSDSDHHYGHRRYENGASLVIGALLLLVGAGMLWSACGKLLQPESIQSVHITALWVALAALTAKEILFRYMLRAAKQIQSSMLIANAWHARSDAASSVVVAVGIIGNLAGYAWFDPVAALVVGALVTRMGYTFSSDALHDLMDRSVDSDSERQIIATILATPGVVALHDLKTRRAGDLILVDVHVEVPGHLSVAEGHDIALLVRTRVLSHHNVLHMMIHIDPCRAESAAIVA

SEQ ID NO: 1519 - DNA, 807 bp, Salmonella enterica
atgcactctgatcgcgcaccgctgttcctgaaggtcgccacctggggtggcgtgatattcctgcatttcccgctgctgattatcgctctctacgcattcaataccgaagacgccgccttcagctttccgcctgcaggcctgacgctgcgctggtttagcgaagcggcggggcgtagcgatattattgattccgtgacgttgtcactaaaaatcgccgcgctgtcaaccgccatcgctctcgtacttggcacgctggctgcaggtgcgctgtggcgcagcacgttttttggcaaaaacgccgtgtcgctactgctgctattaccgatcgcgctgcccggcattattaccgggcttgcgctgctgaccgcctttaaggccgtcaatctggaacccgggctgctgactatcgtcgtgggacacgcgaccttctgcgtggtcgtggtatttaacaacgtgattgcccgctttcgccgcacttcatggagtctggtggaagcgtcgatggatttaggcgcaaccggcgggcaaacctttcgttacgtggtactgcccaatttgggatcggcgctgctggcggggggaatgctggcgtttgctctgtcgtttgatgaaattatcgtgaccacgtttaccgccgggcacgagcgtacgctgccgctctggttgcttaatcagctcgggcgcccgcgcgatgtcccggtcaccaacgtcgtcgcgctgctggtcatgctggtgacgatgtttccgattctgggggcctggtggctcactcgtgacggcgacatcagcgcggaaaacggaaaataa

SEQ ID NO: 1520 - protein, 268 aa, Salmonella enterica
MHSDRAPLFLKVATWGGVIFLHFPLLIIALYAFNTEDAAFSFPPAGLTLRWFSEAAGRSDIIDSVTLSLKIAALSTAIALVLGTLAAGALWRSTFFGKNAVSLLLLLPIALPGIITGLALLTAFKAVNLEPGLLTIVVGHATFCVVVVFNNVIARFRRTSWSLVEASMDLGATGGQTFRYVVLPNLGSALLAGGMLAFALSFDEIIVTTFTAGHERTLPLWLLNQLGRPRDVPVTNVVALLVMLVTMFPILGAWWLTRDGDISAENGK

SEQ ID NO: 1521 - DNA, 276 bp, Klebsiella oxytoca
atgccacattcacctgaagataaaaagcgtgccctcagccgggtaaggcgcatccgcggccaggttgaagcgctcgagcgggcgctggaatctggcgaaccctgtatgaccattctgcaacagattgcctctattcgcggcgccgctaacggcctgatgggggagatggttgagattcatctgcaggacgaactggttagcggagaaacgacgccagaccagcgcgccgccagaatggcggaagtcgggcatctgctacgatcctatttaaaataa

SEQ ID NO: 1522 - protein, 91 aa, Klebsiella oxytoca
MPHSPEDKKRALSRVRRIRGQVEALERALESGEPCMTILQQIASIRGAANGLMGEMVEIHLQDELVSGETTPDQRAARMAEVGHLLRSYLK

SEQ ID NO: 1523 - DNA, 981 bp, Klebsiella oxytoca
atgaagaaaatactcattattgtcccggatggcggcatgctgtttgagtccgccggtattgccgacattctgatgcaggctaaccgcctgcatccggaaggcgccagtgagatctgttaccaggtacggctggcgacgactcaaccgcatcaggtgatccatggtcagtccggtttaaatttgctggccgatcatcgcctgcatgagatagaccctcgcgagcccctcgatacgatcatcattaccggtagaggtcaaaacccgcaggaagggattgcggtggttgactggctgcgccttgccgctccccatgcccgccgcattgcctccatttgcggcggtgcgatgctgctggcgcaaaccgggctgctggacggcagacgggccactacccactggaagctgttggaaaccatgcaggcggaattcccgctggtccgcgtcgagggcggtccgctctatattcaggacgaacatatctggacctctggcggggtcagttccggctttgatcttacgctggcgctggttgaagaagattacggcttcagcctggcgcgcgatatcgcccaggacttcgtcatgtatctgcgtcgccccggaggccagctgcagtttagccgctacaaccttcggcagactaccaccctaggcccgattaacgatctgctggcatggttgctcgaaaatctcaccgccgacctcagcgtggataagctggcggaaaaagtcgccatgagtccgcgaaatttcacccgcgtgtttacccgggaaaccggcgcttcgccggcgcgttacgtcgcggaagctcgtctggccgctgcccggcagcgtctggagcagaccagcgacacgctggagcgtatcgccgaacaaacgggatttggcagtagcattaatctgcgacggctgtttgaaaaacagcttcatctcacgcccggcgaatatcgccaacggtttcacagcagcagaatggcgtaa

SEQ ID NO: 1524 - protein, 326 aa, Klebsiella oxytoca
MKKILIIVPDGGMLFESAGIADILMQANRLHPEGASEICYQVRLATTQPHQVIHGQSGLNLLADHRLHEIDPREPLDTIIITGRGQNPQEGIAVVDWLRLAAPHARRIASICGGAMLLAQTGLLDGRRATTHWKLLETMQAEFPLVRVEGGPLYIQDEHIWTSGGVSSGFDLTLALVEEDYGFSLARDIAQDFVMYLRRPGGQLQFSRYNLRQTTTLGPINDLLAWLLENLTADLSVDKLAEKVAMSPRNFTRVFTRETGASPARYVAEARLAAARQRLEQTSDTLERIAEQTGFGSSINLRRLFEKQLHLTPGEYRQRFHSSRMA

SEQ ID NO: 1525 - DNA, 1011 bp, Citrobacter koseri
atggttaaggtcggtattaacggttttggtcgtatcggacgcaacgtactgcgtgctgcactgggcaatccggatattgagattgtggcaattaacgatctgacagacagtaagacgctggcgcatctactgaaatacgactcgctgctcggtaaactcgacgccgacgtcaccgctagcgaggggcagcttgtggttgatggtaaacccattaccgtgttcagcgaacgcgatccggcaaatatcccgtggcgtcagcgtgaagtcgatatcgtgattgaagccacaggcttcttcaccgagcgcgacaaggcggcggtgcatatccacagcggtggcgcgaagcgcgtgattatctccgcccccggtaaaaacgatgatttaactatcgtgatgggcgttaacgatggcctctactccccggataagcactacgtggtcagtaacggtagctgcaccaccaacggtctggcgcctgccgcccaggttctgcaccaacattttgggatcaagcatggcctgatgaacacgacccacgcttataccaacagccaggcgctgcacgaccagccggaaaaagatctgcgtggcgcccgcgccgctgcgctgtcgatcgtaccgtactccagcggtgccgcgaaggcgctgggcaaagttattcctgcgctggagggccggctgacgggatattcgctgcgcgtccccgttccggtggtatccattgtcgacctgaccgtcacgcttgagcgagatgtgacaagcgaagaggtgaataatgcctttcgcgaagccgccgcgacggggccactgaaaggtatcctcggctatagcgatgaaccgctggtctccagcgactaccggggcgacccgcgctcatcgattatcgacggtctgtcaacgctggtgattggcggcaatatggtcaaaattctggcgtggtacgacaacgaatggggattctctaatcgcctcgtcgacctggcgctgatgatggcaagtcgtgaacgctaa

SEQ ID NO: 1526 - protein, 336 aa, Citrobacter koseri
MVKVGINGFGRIGRNVLRAALGNPDIEIVAINDLTDSKTLAHLLKYDSLLGKLDADVTASEGQLVVDGKPITVFSERDPANIPWRQREVDIVIEATGFFTERDKAAVHIHSGGAKRVIISAPGKNDDLTIVMGVNDGLYSPDKHYVVSNGSCTTNGLAPAAQVLHQHFGIKHGLMNTTHAYTNSQALHDQPEKDLRGARAAALSIVPYSSGAAKALGKVIPALEGRLTGYSLRVPVPVVSIVDLTVTLERDVTSEEVNNAFREAAATGPLKGILGYSDEPLVSSDYRGDPRSSIIDGLSTLVIGGNMVKILAWYDNEWGFSNRLVDLALMMASRER

SEQ ID NO: 1527 - DNA, 984 bp, Klebsiella oxytoca
atgacgcatatctacgaatctaccaatattagtaatcaggaaacagccagacctttgcctgtcggcggggtaaatagcgcgagcgcggtatcatggggagcaatatttgcaggcgcagccgcagcggcttcgctggcgctgatgctgcttatgcttggcgcaggcttaggcctgacgtccatttctccgtgggaaaatcacggtctggcagcaggtaccatgggtattgtcgccattgcctggctgacgtttacccaaattgtggcgtcaggaatggggggatatctggccgggcgtttgcgtaccaaatgggttgatactcataccaatgaaatctattttcgcgatacagcgcatggttttctgacctgggccgttgcattgctggtatcggctgtgcttttgaccaccactgtcagctcactcatcggcggcagcgcaaaagtgattggctccgttgccgggggcgcgacggcaaccgcgatgagtaacgcgggagacgaatcttccgtgctgtcgaagtcatcgatggaatattttacccgctcgctgttccgttcgaccgcttccgctccggcagataacggcggatttccggctaattcatcaggtaatgacgcgatggcaatgaatcagcccgtaccgccaaaggccgaatctccagcgcaattagcagaggttacgggtatttttgctaacagcatttatactggcgcgcttccgcaggaagatctgacttatgtagcgcagttagtttcgcagaataccggcatcagccagcaagaggccgagcagcgggttcaggctgtttatgataaagcgcaggccaatttgaaagaggcaaaaaataaagcacagcaggccgcagatgctgccagaaaagccacgagctacgttaccctgtggtcatttatttctctgttaatcggcgcattcgttgccagcctgtgtgcaacctatggcggccgtcagcgtgacttataa

SEQ ID NO: 1528 - protein, 327 aa, Klebsiella oxytoca
MTHIYESTNISNQETARPLPVGGVNSASAVSWGAIFAGAAAAASLALMLLMLGAGLGLTSISPWENHGLAAGTMGIVAIAWLTFTQIVASGMGGYLAGRLRTKWVDTHTNEIYFRDTAHGFLTWAVALLVSAVLLTTTVSSLIGGSAKVIGSVAGGATATAMSNAGDESSVLSKSSMEYFTRSLFRSTASAPADNGGFPANSSGNDAMAMNQPVPPKAESPAQLAEVTGIFANSIYTGALPQEDLTYVAQLVSQNTGISQQEAEQRVQAVYDKAQANLKEAKNKAQQAADAARKATSYVTLWSFISLLIGAFVASLCATYGGRQRDL

SEQ ID NO: 1529 - DNA, 480 bp, Klebsiella oxytoca
atgttagattaccgcttcccgacagctttgcagatggtccttagcgtagcgatggcggagcaatcgggcgaacgctcgacgagtgcgattctggcctacggtctgaaagccaatccgagctttatccgcaaattgatggttccgcttacgcgtgacggtatcatcgtcttaacgcttggccgcaacggctctatccatcttggtcgcccggcggaagagattaccctgcgcgatatctacgtatccgtcatcgaagataaaaagctgtgggcgtcacgtcccgacatccctgcccgctgcgtggtgagcgccaacgcgtgctggtacttcaaatctgtcgccgatgaagcagagcaggcttcgttagaggttttagctcgccataccgtggccagtgcgctggaagaagtcaaaaaagccgacaccagcggctgcgatccggttcctgaaatctgtacccagcacaacaaatcgcactaa

SEQ ID NO: 1530 - protein, 159 aa, Klebsiella oxytoca
MLDYRFPTALQMVLSVAMAEQSGERSTSAILAYGLKANPSFIRKLMVPLTRDGIIVLTLGRNGSIHLGRPAEEITLRDIYVSVIEDKKLWASRPDIPARCVVSANACWYFKSVADEAEQASLEVLARHTVASALEEVKKADTSGCDPVPEICTQHNKSH

SEQ ID NO: 1531 - DNA, 2640 bp, Klebsiella oxytoca
atgaagggtaaatataaagccgccatcgcgctattattagcactcgtgctgctaccgctggctttgctgttgacgctcacccactgggtgcccacgctggcaggcatctggctacctgcgggcacccgaatctccctcagcgagagcccgcgcctgacgcgctcttccctgcgtattccggatttacgctacctggtaggcgactgcgaaatcgcgcgtgtcgctaacgccgagctctcccgccccagccgctggcgtttacatatcactgagctggatattaacagcgcctgcctgaataaattaccgcacagcgaagccgcgccgggggcgccgaaaacccttgccgagtggcaatcgatgctgccatacagctggctgacgattgaaaatctgcgtctgtcgccgtgggagaaatggcaggggcgtctggtgatgtcgttgaccccgcagcagcaggatatcggttacgccggagaagaggtctctctccaggcgcgcctgcgcggccaggcgctgacggtcagcgacttttccgcgcgtctggtagaaggccaggcgccggtgaagctggtgggcgagtttcagatgccgctggtgccggacggtttgccggttgatggtcatctgtttagcacttttgaatttcctcagacacccggccttgtcgacgccgaactggagtggcatgagaatcgcgggcagctgttggtcacgccgcgtggtgaagtggagccgattctcgacctgccgtgggaaatcaccccggatcgtatcgctatcagcgatggccgctggcacaccgagtatgcgggcaatgcgttaagcggtcgcgttgcgctttcggtgggtaactggcaacagggcaccgaacagatgcaggtcagcgggcggttgaacgtgcttacccagggtcaggctggtaagggtaatgccgtgctcaatattggccccggtaagctgagtatggacagcagcgacatgccgctacagctgaccggcgaggccaaacttggcgatctgattttttacgccagactgcccgcgcagctgagcggtccgcttatcgcgccgatcctcaactttcatcctggggcgctgctgcgttcgcgcgggcgggtcatcgactcactgaacatcgatgaaattcgctggccgctggcgggcgtcaccgtgacgcagcagggcgtggatggccgcctgcaggccattctccgcgcccatgagcaggagatgggggattttaccctgcatctcgacggccaggccgacaattttatgcccgaccgcggccgctggcagtggcgctactggggcgatggccattttaccccgatgcaggcgcgctgggacgttaaaggcgcgggtgaatgggttgatagcgccatcgtgctcaatagcctgtcgaccggtttcgataagctgcagtatggttccatgctggtgagcacgccgcgcctcaccctggataaaccgattcactggctgcgcgatgagcagcatccgcgactgaccggcgcgctgtcgctggatgccggaaaaaccaccttcagcggcggcagcgaactgccgccgtcaacgctgaaatttaacgttgagggtcgcgatccaacctggttccagttcaatggttccctgcatgcgcaaaaaattggccccgtccgcgtcaccggacgctgggacggcgagcgcctgcgcgggcaggcgtggtggccgaaacagtcattaaccgttttccagccgctggtgccgccggaatggaagatgaacctgcgcgaaggttcactgtacgcccaggtcgcgttctctgccgccgccggtcagggctttgaggcgggggggcacggggtgctcaaaggcggcagcgcctggatgccggataaccagatcaacggcgtcgatttcgtgctgccgttccgctttagcgaaggcatctggcagcttggcacccgccatccggtttcgctgcgcattggcgaagtcgtcaaccagtttacggcgcgcaatctgacggcagatcttcagggagcctggccctggagcgaagacgctcctttacagttgagcaacgtcagcgtcgatattctcggcggcaagctaaccatgcagcagctgcggatgccgcagcacgacccggcgctgctgcgcctgcagaacatctccagcagcgaattaattagcgccattaaagtgaagcagttcgccgtttccggcccgttcaacggcgcgctgccgctgtggctggataacgataaatggatcattaaggacggctggttcagcaatccggggccgatgacgatgcgcctggataaagacaccgctgacgcgctggtggccgacaacgtctccgccggggcggccattaactggctgcgctatatggaagtggccacctcgtggacgcggatcaatctcgataacctcggcgtactgacgctgaaggcgaccatcagcggcaccagtcgggtagagggcaaaagcaacacggtgcacttaaactactcccatgaagagaatatttttgacctgtggcgcagcttgcgtttcggcgacaatctgcaggcgtggctggagcagaacgccagactgcccgcccagcgctgccaggacagtcatacctgtaaggaacaacaataa

SEQ ID NO: 1532 - protein, 879 aa, Klebsiella oxytoca
MKGKYKAAIALLLALVLLPLALLLTLTHWVPTLAGIWLPAGTRISLSESPRLTRSSLRIPDLRYLVGDCEIARVANAELSRPSRWRLHITELDINSACLNKLPHSEAAPGAPKTLAEWQSMLPYSWLTIENLRLSPWEKWQGRLVMSLTPQQQDIGYAGEEVSLQARLRGQALTVSDFSARLVEGQAPVKLVGEFQMPLVPDGLPVDGHLFSTFEFPQTPGLVDAELEWHENRGQLLVTPRGEVEPILDLPWEITPDRIAISDGRWHTEYAGNALSGRVALSVGNWQQGTEQMQVSGRLNVLTQGQAGKGNAVLNIGPGKLSMDSSDMPLQLTGEAKLGDLIFYARLPAQLSGPLIAPILNFHPGALLRSRGRVIDSLNIDEIRWPLAGVTVTQQGVDGRLQAILRAHEQEMGDFTLHLDGQADNFMPDRGRWQWRYWGDGHFTPMQARWDVKGAGEWVDSAIVLNSLSTGFDKLQYGSMLVSTPRLTLDKPIHWLRDEQHPRLTGALSLDAGKTTFSGGSELPPSTLKFNVEGRDPTWFQFNGSLHAQKIGPVRVTGRWDGERLRGQAWWPKQSLTVFQPLVPPEWKMNLREGSLYAQVAFSAAAGQGFEAGGHGVLKGGSAWMPDNQINGVDFVLPFRFSEGIWQLGTRHPVSLRIGEVVNQFTARNLTADLQGAWPWSEDAPLQLSNVSVDILGGKLTMQQLRMPQHDPALLRLQNISSSELISAIKVKQFAVSGPFNGALPLWLDNDKWIIKDGWFSNPGPMTMRLDKDTADALVADNVSAGAAINWLRYMEVATSWTRINLDNLGVLTLKATISGTSRVEGKSNTVHLNYSHEENIFDLWRSLRFGDNLQAWLEQNARLPAQRCQDSHTCKEQQ

SEQ ID NO: 1533 - DNA, 501 bp, Klebsiella oxytoca
gtggacttaattatctcgctgatggcgtacgctcagggccactattcattggtattactgatggttttcctgctgacgttcaccaaatcctgcgccgttatctcgctgctgattccgggaacttccggtctgctgctgttcggcaccctggcttcggccagcgccgggcatttcttgttaatgtggatgagcgccagcttcggcgcaatcggcggattctggctgtcatggctaaccggccgtcattaccagcatcatctgtatcgtattcgctggcttaacgccgagcgtctcgcgcgcggccagctgttcctgcgccgccacggcgcatgggcggttttttttggccgctttctttcccccctgcgcgccaccgtgccgctggtaaccggcgccagcgggacgtccttccgccgtttccagctggccaacgtcagttccggcttgctgtggccgttaatcctgctggcgccaggcgctttaagcctcaatttttggtga

SEQ ID NO: 1534 - protein, 166 aa, Klebsiella oxytoca
MDLIISLMAYAQGHYSLVLLMVFLLTFTKSCAVISLLIPGTSGLLLFGTLASASAGHFLLMWMSASFGAIGGFWLSWLTGRHYQHHLYRIRWLNAERLARGQLFLRRHGAWAVFFGRFLSPLRATVPLVTGASGTSFRRFQLANVSSGLLWPLILLAPGALSLNFW

SEQ ID NO: 1535 - DNA, 1023 bp, Klebsiella oxytoca
gtggcgctacggcgcgggtcgtttttgctggaaggagtgtatgacgttagattatttagaaaaatagctaaaaaagttcatcactattataaaattgataacaatatctactctggcatcaggcaaaagaatccagccatgcaattaaatctctttgaatctataagaatttttattgaaattgtcgaatcaggcagctttactcaggcagcagaaaacctgcaagttcatcgccccgccgtgacgaaagccttacagctgcttgagcagcactgcggtacgcgtttgctgcagcgaaccacgcgtcgcattagcctgacgcctgacggggaaacgttttatcaccggagtaaacctttactctcccaggcggatgagctgctggagtcttttggcgccgatcgcgtactgcgcggccagctgcgggttgatatgcccatcgcttttgcaactttactggttgtccccaggcttcctgatttttatcgccagcatcctgacctcgaaatcattcttagtagctcagatcgccggagagatatgctgcgcgatggtcttgactgcctgctccgcgtcggggaactggatgacggagactatatcgcccgtaagctgggcaatattaaaatgacgacctgcgccagcccggcctatattgcccgctacggcgcgccgaacacgctggaggatttacagcagcatcaggcgatcaactggattaacagcaacagccgacaaagcatgccgtggacgtttaccacgccagaaggccccgttgaaatgacgcttcccggtaagctggtcgtggataactcagaaacctatttatctgcggggctggcaggcctgggattagtccaggggatgaacgtgtttttacagccttatctcgaccgggggctgttagtggaagtcttacccgacaatcctacccccgatcgcaaactgtcacttttgtatccgcaccgccatctttcccgcaaagttcgggtgtttaccgaatggttagagagcttattgtga

SEQ ID NO: 1536 - protein, 340 aa, Klebsiella oxytoca
MALRRGSFLLEGVYDVRLFRKIAKKVHHYYKIDNNIYSGIRQKNPAMQLNLFESIRIFIEIVESGSFTQAAENLQVHRPAVTKALQLLEQHCGTRLLQRTTRRISLTPDGETFYHRSKPLLSQADELLESFGADRVLRGQLRVDMPIAFATLLVVPRLPDFYRQHPDLEIILSSSDRRRDMLRDGLDCLLRVGELDDGDYIARKLGNIKMTTCASPAYIARYGAPNTLEDLQQHQAINWINSNSRQSMPWTFTTPEGPVEMTLPGKLVVDNSETYLSAGLAGLGLVQGMNVFLQPYLDRGLLVEVLPDNPTPDRKLSLLYPHRHLSRKVRVFTEWLESLL

SEQ ID NO: 1537 - DNA, 885 bp, Citrobacter koseri
atggcgaggcgggaaaactataacgatctttacctgttcatgctggtggtgcgggaagggagctttaccgccgccgcgcagcggcttgggctggcgcaatccggcgtcagccgcgccgtacgcgaacttgaagaaaggctcggcgtacagcttctggtgcgcacgacccgtaaactttcacttacccaggccggcgagcagctctatcgaacggtagaagcgggctttgatgcattggattcggggctttccactctggcgtattatcgcaacacgccttccggcaccgtccgcattaacgccagccagcatgcgattgataaagtccttctgccgaagctggcggtgttcaagcagcgctatcctgatatccggctggaacttattagcgaaagtcggtttgtcgatattattgcagagcggtttgatgccggggtgcgtcttgggccggaggtcggcggcggcatggtcgcagtgcgcatttcgcccgatatggagatggccgttgtcggcacgcccgagcattttcgccgctacggtttcccgcaaacgccagcggatctggtcgtccatccctgtatcgcttaccagtttggcgacggtagcctttacgcctgggagctgaatgagcagggtaaaaaaattacccaccggcctcaggggcagtgggcttttgccgacagctatatggaagcgaaagccgcccgcctgggactgggcctggcctatgttccgcaggagctggtcgccgacgacctggagcggggcgcgcttatcagagtcctgcagcgttacagccagcggctggaaggctcttttctctattatcctcatcgcaacgtctcccccgcgctgcgggcggtgatagatacattgcgaacttga

SEQ ID NO: 1538 - protein, 294 aa, Citrobacter koseri
MARRENYNDLYLFMLVVREGSFTAAAQRLGLAQSGVSRAVRELEERLGVQLLVRTTRKLSLTQAGEQLYRTVEAGFDALDSGLSTLAYYRNTPSGTVRINASQHAIDKVLLPKLAVFKQRYPDIRLELISESRFVDIIAERFDAGVRLGPEVGGGMVAVRISPDMEMAVVGTPEHFRRYGFPQTPADLVVHPCIAYQFGDGSLYAWELNEQGKKITHRPQGQWAFADSYMEAKAARLGLGLAYVPQELVADDLERGALIRVLQRYSQRLEGSFLYYPHRNVSPALRAVIDTLRT

SEQ ID NO: 1539 - DNA, 729 bp, Klebsiella oxytoca
atgacctactccatcggtgaatttgcgcagctttgcggcattaacgcgaccacgcttcgcgcctggcagcgtcgctacggcctccttaagccacagcgtaccgatggcggccatcgtctgtacagcgatgacgatattcagcaggcgctcaaaattctcgactgggtcaaaaaaggggtgccggtcagccaggtcaagcccctgctggcccgtcccggcgcgcgacggacaaataactggctcaccttgcaggaaagcatgctgcagcgactgaaagagggaaaaatcgaatcactgcgccagctgatttacgacgccggtcgtgaatatccccgccccgagctggtcaccgaagtgctgcgcccgctgcgtagccaggtttccgccaatgtcccggcaatcatgacgctgcgcgaaatcctcgatggcatcattatcgcctatacctccttttgcctcgaaggggacaaaaaagcgcccggcgataactatctgatcaccggctggcacctgacggacgcctgcgaaatctggcttgaagcgctcaagcgcaccggcaagggtcaccgcatcgacgtccttcccacccctcccgcaacccttgcaccggagatcctgccagaacgcaaatggctgctggtgacgaccggtaaactctcgcctgcccggcagaggcagattgaacgctggcagcagcaggttgtctcgctggagattgtcgcgctgtaa

SEQ ID NO: 1540 - protein, 242 aa, Klebsiella oxytoca
MTYSIGEFAQLCGINATTLRAWQRRYGLLKPQRTDGGHRLYSDDDIQQALKILDWVKKGVPVSQVKPLLARPGARRTNNWLTLQESMLQRLKEGKIESLRQLIYDAGREYPRPELVTEVLRPLRSQVSANVPAIMTLREILDGIIIAYTSFCLEGDKKAPGDNYLITGWHLTDACEIWLEALKRTGKGHRIDVLPTPPATLAPEILPERKWLLVTTGKLSPARQRQIERWQQQVVSLEIVAL

SEQ ID NO: 1541 - DNA, 1680 bp, Klebsiella oxytoca
atgtctcttattcaaaaccctattttacgtggatttaatgccgaccccagtattatccgtgtcgaggacacttactatatcgccaactctacatttgagtggtttcctggcgttcgtttacatgagtcaaaagaccttgagcactggaatcttctccctgcgcctttgtcaacgaccaccctgctggatatgaaaggcaacccctcatccggcggtatttgggcgccggcgctctcctgggccgacggtcaattctggttagtctataccgatgtcaaagtcaccgaaggcgcctttaaagacatgactaactatctgaccaccgcgaccgatattcgcggcccctggagcgatcctgtcaagcttaacggcgtgggttttgatgcctctcttttccacgatgatgatggccgaaaatatatcgtgcagcaaacctgggatcatcgcgaatatcaccacccttttgacggcattacgttaaccgaactggataccaaaaccctgaaattaatgccaggaaccgcgcgtaccatttatcatgggactgccgttggcctcgttgaagggccacatctctataagctcaacggatattattatctttttgccgctcagggaggaaccgtatttacccaccaggaagtggttgcccgctcaaaaacgctggaagccaacagttttactaccgaaccgggagacgtcttcttaacgaatgtcgatacgccagacagctatatccaaaagcaagggcatggcgccttagtttctaccccaggaggcgaatggtactatgcctcgctctgcgctcgtccgtggaatcgccctggcgagtcggtctacgatcctcgcggctggtcaaccctcggcagagaaacgtcgatccaaaaagtgtactgggatgaagatggctggccgcgtattgcgggcggtcacggcggtaaaacgttcgtcgaggggccgaaagacgccatttataccgaaagtgcagaggatcgtagccagcacgacgactttaccacgccgacgctcgatcccaactggaatacgctgcgggtgccctttagcgagaaaatgggtactaccggagacggaaagctcaccttaatcggccaaggctctttagccaatacgcacgatctgtcgctgattgcccgacgctggcaagccttttattttgatgcccaggtaaaagtaaaatttgatccgttcaactaccagcaaatggcaggattaacgaattactataacgatcgccactggagctttgtgtttgttacctggaatgaaattaatggaagggtcattgaaataggggaaaataatcgcggaaaatatacttcctatctgaaagataatgccattaaggtgccagagcatgtcgaatatgtctggttgcgcagcaaagtcaggaaggaaacgtatagctatgaatatagctttgatggcgtcgcgttcactgaaatcccggtcaggttagatgccgctatcctttcagatgactatgtcttgcagagctatggcggtttctttaccggagcgtttgttggccttgcggcagtcgactactccggctatggcgccagcgctgagttttatcattttgattatcaggaacttggcgattcgttagttggtaatgaggtttatagctgggaagccaatgagttacgtagttattaa

SEQ ID NO: 1542 - protein, 559 aa, Klebsiella oxytoca
MSLIQNPILRGFNADPSIIRVEDTYYIANSTFEWFPGVRLHESKDLEHWNLLPAPLSTTTLLDMKGNPSSGGIWAPALSWADGQFWLVYTDVKVTEGAFKDMTNYLTTATDIRGPWSDPVKLNGVGFDASLFHDDDGRKYIVQQTWDHREYHHPFDGITLTELDTKTLKLMPGTARTIYHGTAVGLVEGPHLYKLNGYYYLFAAQGGTVFTHQEVVARSKTLEANSFTTEPGDVFLTNVDTPDSYIQKQGHGALVSTPGGEWYYASLCARPWNRPGESVYDPRGWSTLGRETSIQKVYWDEDGWPRIAGGHGGKTFVEGPKDAIYTESAEDRSQHDDFTTPTLDPNWNTLRVPFSEKMGTTGDGKLTLIGQGSLANTHDLSLIARRWQAFYFDAQVKVKFDPFNYQQMAGLTNYYNDRHWSFVFVTWNEINGRVIEIGENNRGKYTSYLKDNAIKVPEHVEYVWLRSKVRKETYSYEYSFDGVAFTEIPVRLDAAILSDDYVLQSYGGFFTGAFVGLAAVDYSGYGASAEFYHFDYQELGDSLVGNEVYSWEANELRSY

SEQ ID NO: 1543 - DNA, 2391 bp, Klebsiella pneumoniae
atggcagaaacaaaatctcaacaatcacggctgctcgtgacgctgacggctctttttgcagcgttctgtggcctctatcttttagcgggcggagcctggctggtcgccctcggcggctcctggtactaccctatcgcaggtctggtgatgctgggcgtcaccgtcctcctgttccgcggtaagcgctctgcgctttggctctacgccgcgctgctgcttgccacgatgatttggggcgtctgggaggttggttttgacttctgggcgctgaccccacgcagcgacattctggtcttcttcggcatctggctgattcttccttttgtctggcgtcgcctgccgactccctccgctggcgccgttgccgggctggtcgtcgccctgctgattagcggcggcatcctcacctgggccggcttcaacgacccgcaggaagtcaacggtacgctgagagcggatgcaacgccagcagcgcctatttccgacgttgccgatggcgactggtcggcgtatggccgtaatcaggaaggacagcgttactcgccgctgaagcagatcaacgccgataacgtgaagaatctgaaagaagcctgggtcttccgtacaggcgatctcaagcagcctaacgatccgggcgaaattaccaacgaagttacgccgattaaagtgggcgacacgctctatctgtgtactgcccaccagcgcctgttcgcgcttgatgcggccaccggtaaagaaaaatggcatttcgatccgcagctcaacgccgatccctctttccagcacgtgacctgccgcggcgtttcatatcatgaagccagagcggacaatgcgccggcagatgtggttgccgactgcccgcgtcgtatcattctaccggtcaacgatggccgcctgttcgccatcaatgccgaaaccggtaagctgtgtgaatcctttgctaataaaggcattctcaatctgcaaaccaacatgcctgtcactacgccgggtatgtacgaaccaacttcaccgccgattattactgataaaacgatcgttatcgccggcgccgtgaccgataacttctcgacccgcgagccgtctggcgttatccgcggctttgatgtgaataccggtaagctgctgtgggcctttgatccgggtgcgaaagatcccaacgcgattccgagtgatgaacatcatttcacactgaattcacctaactcctgggcgccagcagcctatgacgcgaagctggatttggtctacctgcctatgggcgtgaccaccccggatatctggggcggcaaccgtacgccagaacaggaacgctatgccagctccatcgtggcgctaaacgccaccaccggtaaactggcgtggagctaccagaccgtgcaccacgatctgtgggatatggatatgccgtcgcagccgacgctggcggacatcgatgtcaacggtaaaaccgtaccggtaatttacgctccggcaaaaaccggtaatatttttgtcctcgatcgccgtaacggtgagctggttgtcccggcaccggaaaaaccggttccgcaaggggcggcgaaaggtgactacgtctcaaaaactcagcctttctccgatctgagcttccgcccgaaaaaagacctgagcggcgcggatatgtggggcgccaccatgtttgaccagctggtgtgccgggttatcttccatcagctgcgctatgaaggcatcttcaccccgccgtcagaacaaggaactctggtgttcccgggtaacctggggatgttcgaatggggcggtatctccgtcgatccgaaccgccaggtggcgattgctaacccaatggcgctgccgtttgtgtcaaaactgatcccgcgcggccccggcaacccgatggagcagccgaaagacgccaaaggttccggtactgaagccggtattcagccacagtacggcgttccctacggcgttacgctaaacccgttcctgtcaccgtttggtctgccttgcaaacagccggcctggggctatatctccgcgctggatttaaaaaccaacgaagtggtgtggaaaaaacgtatcggtaccccgcaggatagcctgccgttcccgatgccgattaaacttccgttcaccatgggtatgccgatgctgggcggccctatttctacggcaggcaatgtgctgtttatcggcgcgaccgcagataactacctgcgcgcgtacaatatgagcaacggtgaaaaattatggcaggcccgtctgccggcgggcggccaggcgacgccgatgacctatgaagtgaatggcaagcagtacgttgtcatctctgcgggcggtcacggttcgtttggcacgaagatgggcgactatatcgtcgcttacgctctgccggacgacgcgaagtaa

SEQ ID NO: 1544 - protein, 796 aa, Klebsiella pneumoniae
MAETKSQQSRLLVTLTALFAAFCGLYLLAGGAWLVALGGSWYYPIAGLVMLGVTVLLFRGKRSALWLYAALLLATMIWGVWEVGFDFWALTPRSDILVFFGIWLILPFVWRRLPTPSAGAVAGLVVALLISGGILTWAGFNDPQEVNGTLRADATPAAPISDVADGDWSAYGRNQEGQRYSPLKQINADNVKNLKEAWVFRTGDLKQPNDPGEITNEVTPIKVGDTLYLCTAHQRLFALDAATGKEKWHFDPQLNADPSFQHVTCRGVSYHEARADNAPADVVADCPRRIILPVNDGRLFAINAETGKLCESFANKGILNLQTNMPVTTPGMYEPTSPPIITDKTIVIAGAVTDNFSTREPSGVIRGFDVNTGKLLWAFDPGAKDPNAIPSDEHHFTLNSPNSWAPAAYDAKLDLVYLPMGVTTPDIWGGNRTPEQERYASSIVALNATTGKLAWSYQTVHHDLWDMDMPSQPTLADIDVNGKTVPVIYAPAKTGNIFVLDRRNGELVVPAPEKPVPQGAAKGDYVSKTQPFSDLSFRPKKDLSGADMWGATMFDQLVCRVIFHQLRYEGIFTPPSEQGTLVFPGNLGMFEWGGISVDPNRQVAIANPMALPFVSKLIPRGPGNPMEQPKDAKGSGTEAGIQPQYGVPYGVTLNPFLSPFGLPCKQPAWGYISALDLKTNEVVWKKRIGTPQDSLPFPMPIKLPFTMGMPMLGGPISTAGNVLFIGATADNYLRAYNMSNGEKLWQARLPAGGQATPMTYEVNGKQYVVISAGGHGSFGTKMGDYIVAYALPDDAK

SEQ ID NO: 1545 - DNA, 1371 bp, Enterobacter cloacae
atgtcagtttttcattccgttagcgacctgattggtcatactcccctgctgcagcttcataagctggataccggcccctgcagcctgtttctgaaactggaaaatcaaaatcccggcggctcgataaaagaccgcgtcgcgctatccatgattacgcaggcagagcgcgaaggaaaattaaaacccggcggcacgattatcgaagccaccgccggcaataccggcctcgggctggcgctgatcgccgcgcagaaaaattatcgcctgatcctggtggtgccggacaaaatgagccgcgagaagattttccacctgcgcgcgctgggagcgcaggtacagcttacccgctcggacgttaacaaaggccatcccgcatactatcaggactacgcccggcgtcttgccgacgaaacgccaggcgccttttatatcgaccagtttaataacgaggctaacccgctggcgcatgccaccaccactgccccggaaatcttccggcagctggagggcgatatcgacgcgattgtcgtcggcgtcggctccggcggaaccctcggtgggctacaggcctggtttgctgaacactccccgaaaacggaatttatcctcgccgatccggcgggctccattctggcggaccaggtcgaaaccgggcgctacggtgaaaccggctcctggctggttgaagggatcggcgaagactttattccgccgctggcccatcttgacggcgtccgcagcgcataccgcgtcaccgatagcgaagctttcgccaccgcccgccagctgctgcaggttgaaggcattctggcaggctcctctaccggaacgctgctcaccgccgccctgcgctactgccggtcgcagacatcccctaaacgcgtggtgactttcgcctgcgacagcggcaataaatatttatcaaagatgtttaacgatgactggatgcgccagcagggctttttaagccgcccttcgcgcggcgatctcagcgattttatcgctctgcgccacgacgaaggggcaaccgttaccgccgcgccggacgataccctggcggccatcctcgcgcgtatgcgtctctacgacatctcacaactaccggtgctggaaaacggccgcgtcgtcggcatcgtcgacgaatgggatctgattagccacgtccagggtgacagtcagcgcttttctctgccggtcagggaagcgatgacccgtaacgtggagaccctggataagcacgcgccggaaagcgcgctgaaggccattttcgatcgcggtctggtggccgttatcgccgacaacgatcgttttcttggcctcattacccgcagcgatgtgctgaccacctggcgtaaccgactcgaacagtaa

SEQ ID NO: 1546 - protein, 456 aa, Enterobacter cloacae
MSVFHSVSDLIGHTPLLQLHKLDTGPCSLFLKLENQNPGGSIKDRVALSMITQAEREGKLKPGGTIIEATAGNTGLGLALIAAQKNYRLILVVPDKMSREKIFHLRALGAQVQLTRSDVNKGHPAYYQDYARRLADETPGAFYIDQFNNEANPLAHATTTAPEIFRQLEGDIDAIVVGVGSGGTLGGLQAWFAEHSPKTEFILADPAGSILADQVETGRYGETGSWLVEGIGEDFIPPLAHLDGVRSAYRVTDSEAFATARQLLQVEGILAGSSTGTLLTAALRYCRSQTSPKRVVTFACDSGNKYLSKMFNDDWMRQQGFLSRPSRGDLSDFIALRHDEGATVTAAPDDTLAAILARMRLYDISQLPVLENGRVVGIVDEWDLISHVQGDSQRFSLPVREAMTRNVETLDKHAPESALKAIFDRGLVAVIADNDRFLGLITRSDVLTTWRNRLEQ

SEQ ID NO: 1547 - DNA, 1389 bp, Klebsiella variicola
atgaataaaaacgacatgagtcctttacctaccaatacccacgagtggttttttaatcgtaacagcatcatcattttgctcgatattgttctgtttatcgttctctacaacacgctaccctatgagccgaaggtggtcatgggactgagtatgctcgcttttatcgccgtattatggttaacggaagcgctgcacgtgaccgttacggcaataatggttcccgttatggccgtgctgttgggggtatttaatacccaggcggcgctaaacagtttcgctaactctacgatattccttttcctcggcggctttgctctggcggcggcgatgcatgtgcaggggctggataaagtcattgccgataaagtattagcgatggcgaggggcaaaatgagcctcgcggtctttatgctgtttggcgtgacggcgctgctgtcaatgtggatcagtaatacggcgacggccgcaatgatgatgccgctggtattggggatcctgagtaaagtcgatggcaaaaacagccattcgacctatgtgtttgtgctcctggggattgcctatagcgccagcattggcgggatggcgacgatcgtcggcagtccaccgaatgcgattgccgccgccgaggtggggctctccttctttgactggatgaagttcggtttcccggcaatgatcgtcttactgcctgtcgctattgcgattctttacctcgtgttcaggccggaacttaagggaacctttgaaacgaacactgaacaggtcgattgggataaaggcaaagttgtcaccctggctatttttgcgcttaccgtattcttctggattttcagcggacccattaacgacctgctgggcggttttaaatccttcgataccattgtggctttaggcgccattatattagtcaatttcgcccgggtggttcactggaaggatatagaaaaaacggctgactggggcgtgctgttattattcggcggcggtatctgcttaagtaatgtgttgaaagagacgggcaccagtctgttcctggcaaaccagattagcgggatggtggctcatatggggatatttattattatcctggtgattgcaacattcgtggtgtttctgaccgagtttgccagtaatacggccagcgccgctctgcttattcccgtatttgcctcagtggccgaagcgttcggcatgtcgcctgtgattttgtcggtattgattgccattgcggcttcatgcgcttttatgctgcccgtggcgacgccgccaaacgctatcgttttcgccaccggccatatcaagcagcaggagatgatgcgcgccggcctgtttttgaatattgcctgtatcgtcgttttgaccggttttagcatgttgttttggttataa

SEQ ID NO: 1548 - protein, 462 aa, Klebsiella variicola
MNKNDMSPLPTNTHEWFFNRNSIIILLDIVLFIVLYNTLPYEPKVVMGLSMLAFIAVLWLTEALHVTVTAIMVPVMAVLLGVFNTQAALNSFANSTIFLFLGGFALAAAMHVQGLDKVIADKVLAMARGKMSLAVFMLFGVTALLSMWISNTATAAMMMPLVLGILSKVDGKNSHSTYVFVLLGIAYSASIGGMATIVGSPPNAIAAAEVGLSFFDWMKFGFPAMIVLLPVAIAILYLVFRPELKGTFETNTEQVDWDKGKVVTLAIFALTVFFWIFSGPINDLLGGFKSFDTIVALGAIILVNFARVVHWKDIEKTADWGVLLLFGGGICLSNVLKETGTSLFLANQISGMVAHMGIFIIILVIATFVVFLTEFASNTASAALLIPVFASVAEAFGMSPVILSVLIAIAASCAFMLPVATPPNAIVFATGHIKQQEMMRAGLFLNIACIVVLTGFSMLFWL

SEQ ID NO: 1549 - DNA, 174 bp, Escherichia coli
atgtcgctggaaaatgcgcctgacgaggtcaagctggccgtcgatttaatcatgctgcttgaggaaaataatgtccctgcgcaaaccgtgctagctgcgctggagattatccgtcgcgattatgaaaacaaagtaaaaagtgcggaagaggcctcgcaaaacgcgccggagtag

SEQ ID NO: 1550 - protein, 57 aa, Escherichia coli
MSLENAPDEVKLAVDLIMLLEENNVPAQTVLAALEIIRRDYENKVKSAEEASQNAPE

SEQ ID NO: 1551 - DNA, 555 bp, Citrobacter koseri
atggcggccgacacgctgttggttctcggcgacagtctgagcgccggttatcgtatggcaggcaataccgcctggcctgcgctgctaaacgataagtggcagacaaaaacgccggtagttaacgccagtatcagcggcgatacctcgcagcaggggctggcaaggctgccggccctgcttaagcagcatcagccgcgctgggtgctggttgagctcggcggtaatgacgggctgcgcggtttcccgcctcagcagacggaacagacgctgcgtaccattattgagcatatcaaagcggcggacgcccagccgctactgatgcaaattcgcctgcccgccaactatggccgccgttataatgaagcctttagcgctatttatccggcactggccaaagagtttgatattcctctgctgcccttttttatggaagaggtttatctgaaaccgcagtggatgcaggatgatggaattcacccgaatcgcgacgctcagccgtttattgccgactggatggcgacgcgcctggctcccttagttaatcatgactcctga

SEQ ID NO: 1552 - protein, 184 aa, Citrobacter koseri
MAADTLLVLGDSLSAGYRMAGNTAWPALLNDKWQTKTPVVNASISGDTSQQGLARLPALLKQHQPRWVLVELGGNDGLRGFPPQQTEQTLRTIIEHIKAADAQPLLMQIRLPANYGRRYNEAFSAIYPALAKEFDIPLLPFFMEEVYLKPQWMQDDGIHPNRDAQPFIADWMATRLAPLVNHDS

SEQ ID NO: 1553 - DNA, 1977 bp, Klebsiella oxytoca
atgcgcaataccttccgaccttcacgccctatgctggcgctgactatcgccctggccggactcgcaggcggctgtaatgacagcggcgtaaaccgcgataacccggcggaagcgcccgcctccgcgccgcagaacgtcatggttcccgtcctgtctgctgatgaaaatagcctggtgctggtttgggaaaagccggaatcagagacgcagcaggtggtggactacgcgatttaccgccagggcgagcggctgggtctggcgcgcgaaaatcaaaaccatttttcaccggccaaaccctatattgataacttctatcagcggattgccagcgacggctggcagcagccaatcgatttgcgtacctttacggtcactcacctgcagccggatacggaatatgcctttacggtgcgcgcggtctacgccgatggccaggaatctccggacagcgcggtggttaaagcgcaaacccgcaaaacgccgcacgtcatcgaagccagaacctttggtgcaaagggtgatggcaccacgctgaatacccaggcgctgcagcaggcgatcgataactgtacggtctcgcactatcctcagggctgcaaagtgctgatttccggcggcatattcaagagcggcgcgctgttcctgcacagcgatatgaccctggagattgcggctgacgccaccctgctgggttcagacgatccggcccagtatccgctggaaaaaggctattacctctatccctacagcgatcatccgcagccccgtcgcccgccatcattaattaacgtgctggaagcggacgataagggcgagtctccggccgggacgtttcgcaatattcgcatcgtcggtcaaggtacgattgacggcaacggctggacccggggcgtcaaaagcggcggcgaggccacaattatcgatgaaatgggcaatgaactgccgcagtaccgggccagtaatgccaataaagttggcgcagacggtattctggcaaagcatcagaccgaagcggctattgcggaaggcatcgaaagcaatagcgcctataaaaatcgccgctccagcctgatgactctgcgcggcgtgcacaacctctatcttgccgggctgacaatccgcaaccccgcgttccacggggtaatggcgctggagtcaaaaaatatcacgctcaatggcctggttcaccagacctttgacggcaataacgccgacggcgtggagttcggcaatagccagaatgcgctggttttcaacaacttctttgataccggggatgattgcgtcaatttcgccgccgggtttggtaaaggcgcggaaacttttcatcaacagccgcaaagcggggcgtggatctttaataactatttccgtaaaggccacggcgccgtggtgaccggtagccataccggagcatggatcgaaaaagttcgcgccgaggataacgtcatgtatatgaccgatgtcggcctgcgcatgaaaagccgcccttactacggcggtggcgtaagggatgtgctgttccgccataatgcgatgaaagatatcgccaaagagccgttcgtttttactatcaaatacagcgccgacgtgaatgatacgacccctgccgacgagcccgctcagttccgcgacgttcaggtgcaggacgtcaccgtcgatggtacttcggctaagcacagcatcctgattgacggcatgacggtagccgaaatggcagaatcatttgggctgacctattctcgcgatgcctatcaccagaatctgcgtttttccaacgtcagtttccgtaacaccaaagcgaccagtatctccttcctgcatgacagccagtttgatgaggtaacgttcgccaatacgccgcaggcctgggcgtttttcgccgtcaatgacgtgacgctcgctgatagcctgcatcagcagagcatcacccggggagaaaaggacaaacttatccttgagggggcgataaagtaa

SEQ ID NO: 1554 - protein, 658 aa, Klebsiella oxytoca
MRNTFRPSRPMLALTIALAGLAGGCNDSGVNRDNPAEAPASAPQNVMVPVLSADENSLVLVWEKPESETQQVVDYAIYRQGERLGLARENQNHFSPAKPYIDNFYQRIASDGWQQPIDLRTFTVTHLQPDTEYAFTVRAVYADGQESPDSAVVKAQTRKTPHVIEARTFGAKGDGTTLNTQALQQAIDNCTVSHYPQGCKVLISGGIFKSGALFLHSDMTLEIAADATLLGSDDPAQYPLEKGYYLYPYSDHPQPRRPPSLINVLEADDKGESPAGTFRNIRIVGQGTIDGNGWTRGVKSGGEATIIDEMGNELPQYRASNANKVGADGILAKHQTEAAIAEGIESNSAYKNRRSSLMTLRGVHNLYLAGLTIRNPAFHGVMALESKNITLNGLVHQTFDGNNADGVEFGNSQNALVFNNFFDTGDDCVNFAAGFGKGAETFHQQPQSGAWIFNNYFRKGHGAVVTGSHTGAWIEKVRAEDNVMYMTDVGLRMKSRPYYGGGVRDVLFRHNAMKDIAKEPFVFTIKYSADVNDTTPADEPAQFRDVQVQDVTVDGTSAKHSILIDGMTVAEMAESFGLTYSRDAYHQNLRFSNVSFRNTKATSISFLHDSQFDEVTFANTPQAWAFFAVNDVTLADSLHQQSITRGEKDKLILEGAIK

SEQ ID NO: 1555 - DNA, 876 bp, Klebsiella oxytoca
atgcgaaaaaaactccccagcagcgcctctctgcaggcctttgaggccgccgccaggcacggtaattttgcccgcgcggcggaagaactgtcgcttaccgaaggggcgataagtcggcaaatcgcccgcctggaatcgctgctgaattgcaaactgtttgaacggacgggaagccgggtgcggctgaatcctaacggcgcgcgctatgcgcaccatgtgcgcgagacgctggagcggctggaacgcgacgctcagtatctgatgggcgtcgcggacggcagccgaagcctggaaatcgcctcccccccgacctttgccagccgttggttgattccccgtctgggggattttcatcgccgctacccggacatcatgctgaacatcgcggtcagaaccgagccgtttattcttaccggcagtggttttgatgcggcggtgcactttgagcatcccgcatgggccggaatgcgccggcaatttctgtttgaggagcggctggtgccggtatgccattctgcgttgttcacgggaggcgaagccttgagtcagttgaacctgttaccgcgcattcaccgacggcaaaaccccgacgcctggccgcgctatgctgaagagtgtgggatcgcgctggatcatccggcgcggggcgtgcgctacgatctgcatgagatggcgatagccgccgcgctggccgggcagggcgttgcgctggtaccgcacgtgtacgttgaaaaagagcttgaaaacgggacgctggttgcgccctggcctttggctcgcagcctgagcaagcgcttttgtctggttaaaccgctggagcccgggatcaatgaatcggcgctacaggcgtttgaacagtggctactggcgcaataa

SEQ ID NO: 1556 - protein, 291 aa, Klebsiella oxytoca
MRKKLPSSASLQAFEAAARHGNFARAAEELSLTEGAISRQIARLESLLNCKLFERTGSRVRLNPNGARYAHHVRETLERLERDAQYLMGVADGSRSLEIASPPTFASRWLIPRLGDFHRRYPDIMLNIAVRTEPFILTGSGFDAAVHFEHPAWAGMRRQFLFEERLVPVCHSALFTGGEALSQLNLLPRIHRRQNPDAWPRYAEECGIALDHPARGVRYDLHEMAIAAALAGQGVALVPHVYVEKELENGTLVAPWPLARSLSKRFCLVKPLEPGINESALQAFEQWLLAQ

SEQ ID NO: 1557 - DNA, 867 bp, Klebsiella oxytoca
atgacctggaaaataaacaagcaaattgtgcacaatgacgttttaagaaatagcttcattgatcttgcgcttaaaaccttcgatctctcctttaaagagtggtaccgcaaaggatactggaccgacgcctatattccctacgccctcgtcagcaacaataaagtgattgctaacgcctccgccaatattatcgatctggtctggcaggatgaaccccgccgctatattcaaatcggtaccgtgatgaccgatgtcgatcatcgtaataagggcctcgccggtcagctcgtgaatgccattctggcggactggcaggataaagccgatgctttctttctgttcgctaacccaaacaccgttgatttttatccaaaattcggcttcgagcgcaccgaggagcatcaggctatcctgccggtaatgccggcggcgggcgacttccgcaagctcgatatggatcggccggaggatgtcgcgctattacagcggtattatgaaaaatcgaatcccttttcgcagctgcgcgtacagaataacttcggtttattgatgttttactgttccgcgtttatgaagcacttcgtcttttattccgagaaaaatcaggctatcgccatcgcgatgcaaaacggaccggcgctgatctgttttgatattttttgcgacagcggccgttctttgtcggccattattaatgagctcgccgatgaaaatacctatcaggccgtgctgggctttactcccaaagagaaccgggttggtgagtatgaaaaaattgaaggcgaagatcttctgtttatctacggacaaaaagaaaatatcttcaaagcgcataagctgatgttcccgcttttatcccacgcctga

SEQ ID NO: 1558 - protein, 288 aa, Klebsiella oxytoca
MTWKINKQIVHNDVLRNSFIDLALKTFDLSFKEWYRKGYWTDAYIPYALVSNNKVIANASANIIDLVWQDEPRRYIQIGTVMTDVDHRNKGLAGQLVNAILADWQDKADAFFLFANPNTVDFYPKFGFERTEEHQAILPVMPAAGDFRKLDMDRPEDVALLQRYYEKSNPFSQLRVQNNFGLLMFYCSAFMKHFVFYSEKNQAIAIAMQNGPALICFDIFCDSGRSLSAIINELADENTYQAVLGFTPKENRVGEYEKIEGEDLLFIYGQKENIFKAHKLMFPLLSHA

SEQ ID NO: 1559 - DNA, 1578 bp, Klebsiella oxytoca
gtgttatcatcccgcctttcccttttcgtcctggggctcttttttatgcaacaacctgttgttcgcgttggagaatggctggttactccctctgttaaccaaattagccgcaaggggcgtcagctaactctcgaaccgcgcttaatcgatcttctggttttctttgcccgccatcctgatgaagtactgagtcgggatgagcttatcgacaacgtctggacccgcaacgttgtgaccagtcacgtcgtcacgcaaagcgtttctgagctacgtaagtcgctgaaagatggcgacgatagcagcatggaatatatcgctaccgttcctaaacgcggctataagctaacggtgccggtgatttggtgtacggaagagggggaggaactgacgccggttattcctgcagaaacgccgacggtcgccgtggacgcgccatcggtttccccgcagcctgaggcggctgcgccagagatggcgccggtggcgaagccggaaaaacgtaagcggctgagtacctttatcgtctggggcctgtttttgctggcgctcgcaagctgcgtggcgctggtggcattatccaccctggagtcgcgcccgccggtcacaaaaacccgcatactgctcaacccgcgggatgttgatatccacctgctcagcggcaatacctgtaacaactggtcatcgcagcactcctatgccatcggcctggggagcctgattaccacctcgctgaacacgttctccacctttatggtgcatgataaaaccaactacaacatcaatgagccgagcagttccggaaaaaccctgaccattgagttcgtcaaccagcggcactatcgcgcgcagcagtgctttatgtcggtcaaagtggtggataacgccgacggatcgacgatgatggacaagcgctacttcgtgaccagcgacaaccagctgtcgattcaaaacgacctgctgagtagcctgtcggacgcgcttaagcagccatggccggcgcgaatgcaggagatgcttaagcagtatcagccgtcgcaaagtatcgcgctcacgcatttctatcaggcacatcagttattaatgaacggagacgtcgattcgctgggcaaagccagtagcctgcttgccgatgtgaataagcagtcgccggactttacctacgcctgggcggaaaaggcgctggtggacgtattacgccattcccaacagccgttagatgataaacaactggccgatctttacagcgaaataacccgggtgggtaatatgccggggattaaagatatggcaatattttatcaaattaaaacggtagacatgctgggtaaaggcaaagtcgatgaagcctacagcgcgattaattccgggattgatctggaaatgtcgtggatgaactatgtgctgctgggcaaagtgtacgaaatgaaaggacagaaccgggaagctgccgatgcctatctgacggcgtttaatttacggccgggagagaatacgttttactggattgaaaacgcggtattccagacctccgtaacccgagtggtaccgtatctcgataatttcctcgcttcagaataa

SEQ ID NO: 1560 - protein, 525 aa, Klebsiella oxytoca
MLSSRLSLFVLGLFFMQQPVVRVGEWLVTPSVNQISRKGRQLTLEPRLIDLLVFFARHPDEVLSRDELIDNVWTRNVVTSHVVTQSVSELRKSLKDGDDSSMEYIATVPKRGYKLTVPVIWCTEEGEELTPVIPAETPTVAVDAPSVSPQPEAAAPEMAPVAKPEKRKRLSTFIVWGLFLLALASCVALVALSTLESRPPVTKTRILLNPRDVDIHLLSGNTCNNWSSQHSYAIGLGSLITTSLNTFSTFMVHDKTNYNINEPSSSGKTLTIEFVNQRHYRAQQCFMSVKVVDNADGSTMMDKRYFVTSDNQLSIQNDLLSSLSDALKQPWPARMQEMLKQYQPSQSIALTHFYQAHQLLMNGDVDSLGKASSLLADVNKQSPDFTYAWAEKALVDVLRHSQQPLDDKQLADLYSEITRVGNMPGIKDMAIFYQIKTVDMLGKGKVDEAYSAINSGIDLEMSWMNYVLLGKVYEMKGQNREAADAYLTAFNLRPGENTFYWIENAVFQTSVTRVVPYLDNFLASE

SEQ ID NO: 1561 - DNA, 1338 bp, Klebsiella oxytoca
atgagttctgccaagaagatcgggctatttgcctgtaccggcgtcgtcgccggtaatatgatggggagcggtatcgcattattacctgcaaacctcgctagcatcggtggtattgccatctggggttgggttatttctattattggcgcgatgtctctggcttatgtttatgcccgactggcgaccaagaacccgcagcagggcggccctattgcctacgccggtgaaatatctcctgcgttcggtttccagaccggtgtgctttattatcacgccaactggatcggtaatctggcaatcggcattaccgccgtctcttatttatcaacgttcttcccaattttaaataacccggtgccggcaggtattgcctgtattgccatcgtatggatattcaccttcgtgaatatgctcggcgggacctgggttagccgcttgacaaccattggcctggtgctggtacttattccggtagttatgaccgccgtggtcggctggcactggtttgatgccgcaacctatcaggcaaactggaacacctccagcactactgacagtcatgcggtaatcaaaagtattctgctctgcctgtgggcctttgtcggggtggaatccgccgccgtcagtaccggaatggtgaaaaacccgaaacgcaccgtgccgctggctaccatgctgggcactgcgatggccggtatcgtgtacatcgcagcgactcaggttattgcgggtatgtatcctgcttctcagatggccgcatccggtgcgccgtttgcagtgagcgcctccactattctcggcggctgggctgcgccgatggtttccgccttcaccgcctttgcgtgcctgacttcgctcggttcgtggatgatgctggtgggtcaggccggcgtacgtgccgccaatgacggtaacttcccgaaagtgtatggcgaagtcgacagcaacgggatcccgaaaaaaggcctgctgctggccgcggtgaaaatgaccgcgctgatggtactgattaccctgatgaactctactggcggcaaagcttctgacctgttcggcgagttgaccggtatcgcggtactgctgactatgctgccttacttctactcctgcgttgacctgattcgcttcgaaggcatcaatgtacgcaacttcgtcagcctgatttgctccgtactcggctgcgcgttctgcttcatcgccctgatgggggcaagctccttcgaactggccggtacctttatcgtcagcctgattatcctgatgttctacggtcgcaaaatgcaccagcgccagaacaacgacaactcagcagatagcaacaccgccagcgcgcattaa

SEQ ID NO: 1562 - protein, 445 aa, Klebsiella oxytoca
MSSAKKIGLFACTGVVAGNMMGSGIALLPANLASIGGIAIWGWVISIIGAMSLAYVYARLATKNPQQGGPIAYAGEISPAFGFQTGVLYYHANWIGNLAIGITAVSYLSTFFPILNNPVPAGIACIAIVWIFTFVNMLGGTWVSRLTTIGLVLVLIPVVMTAVVGWHWFDAATYQANWNTSSTTDSHAVIKSILLCLWAFVGVESAAVSTGMVKNPKRTVPLATMLGTAMAGIVYIAATQVIAGMYPASQMAASGAPFAVSASTILGGWAAPMVSAFTAFACLTSLGSWMMLVGQAGVRAANDGNFPKVYGEVDSNGIPKKGLLLAAVKMTALMVLITLMNSTGGKASDLFGELTGIAVLLTMLPYFYSCVDLIRFEGINVRNFVSLICSVLGCAFCFIALMGASSFELAGTFIVSLIILMFYGRKMHQRQNNDNSADSNTASAH

SEQ ID NO: 1563 - DNA, 2148 bp, Klebsiella oxytoca
atgaacgttatcgcaatcatgaatcacatgggtgtctacttcaaagaagaacccatccgtgaactgcatcgcgccctcgaacgcctggacttccgtattgtctacccgaacgaccgtgaagacttattaaaacttatcgaaaacaatgcacgtctgtgcggcgtgatcttcgactgggataaatacaatctcgaactgtgcgaagacatcagcaaaatgaacgaatatatgccgctgtatgcctttgcaaatacttactcaacgctggacgtcagtctcaacgatctgcggatgcaggttcgcttcttcgaatatgcgctgggcgccgcggaagatattgcgaacaaaatcaaacagaatactgacgagtatatcgacaccattctgccgccgctgaccaaagcgctgtttaaatacgtacgtgaaggcaaatataccttctgtacgccaggccatatgggcggtaccgcgttccagaaaagcccggtcggcagcatcttctacgatttctttggttccaataccatgaaatccgatatctccatttcggtatctgaacttggttctctgttggaccacagcggcccgcacaaagaagcggaagagtacatcgctcgcgtcttcaacgcggaacgcagctacatggtgacgaacgggacctctaccgctaacaaaatcgtcgggatgtactctgcgccagcaggtagcaccgtactgattgaccgtaactgccataaatcgctgacccatctgatgatgatgagcgacattacgccaatctacttccgcccgacgcgtaacgcctacggtatcctcggcggtattccgcagagcgaattccagcatgcgaccatcgcgaagcgcgtaaaagaaacgccgaacgcgacctggccggtgcacgcggtgatcaccaactccacctatgatggtctgctgtacaacacggactacatcaagaaaaccctggatgtgaaatccatccactttgactccgcgtgggtgccttacaccaacttctcgccgatttatgaaggcaaatgcgggatgagcggcggtcgcgttgaaggcaaagtgatttatgaaacccagtccacgcacaaattgctggcggcgttctctcaggcttcgatgatccacgttaaaggcgacgttaacgaagaaacctttaacgaagcctacatgatgcacaccacaacgtctccgcactacggcgtggtggcctctacggaaaccgcggcggcgatgatgaaaggcaacgccggtaagcgcctgatcgacggctctatcgaacgttctatcaagttccgtaaagagatcaaacgtctgaaaggcgagtccgacggctggttcttcgacgtctggcagccggaacatatcgatggtcctgaatgctggccgctgcgttccgacagcgcatggcacggtttcaaaaacatcgacaacgagcacatgtatctcgacccgattaaagtcaccttgctgaccccggggatgaagaaagacggcaccatggatgagttcggtattccggccagcatcgtggcgaagtatctcgacgagcacggtatcgtggtcgaaaaaaccggcccgtacaacctgctgttcctgttcagtatcggtatcgataaaaccaaagcgctgagcctgctgcgcgcgctgaccgatttcaaacgcgcgttcgatctgaacctgcgggtgaagaacatgctgccgtcgctgtatcgtgaagatcctgaattctacgaaaacatgcgcgttcaggaactggcgcagaacattcacaaattgattgagcatcacaacctgccggacctgatgttccgcgcgttcgaagtgctgccgaccatggtgatcacgccgtacgccgcgttccagaaagagctgcacggtcagaccgaagaggtgtatctcgaagagatggtgggtcgcgttaacgccaacatgatcctgccgtatcctccgggagtgccgctggtcatgccgggtgaaatgatcaccgaagagagccgtccggtgctggagttcctgcagatgctgtgcgaaatcggcgcccactacccgggcttcgaaaccgatatccacggcgcctatcgtcaggcggatggtcgttacaccgttaaagtgctgaaagaagaaaacaacaaataa

SEQ ID NO: 1564 - protein, 715 aa, Klebsiella oxytoca
MNVIAIMNHMGVYFKEEPIRELHRALERLDFRIVYPNDREDLLKLIENNARLCGVIFDWDKYNLELCEDISKMNEYMPLYAFANTYSTLDVSLNDLRMQVRFFEYALGAAEDIANKIKQNTDEYIDTILPPLTKALFKYVREGKYTFCTPGHMGGTAFQKSPVGSIFYDFFGSNTMKSDISISVSELGSLLDHSGPHKEAEEYIARVFNAERSYMVTNGTSTANKIVGMYSAPAGSTVLIDRNCHKSLTHLMMMSDITPIYFRPTRNAYGILGGIPQSEFQHATIAKRVKETPNATWPVHAVITNSTYDGLLYNTDYIKKTLDVKSIHFDSAWVPYTNFSPIYEGKCGMSGGRVEGKVIYETQSTHKLLAAFSQASMIHVKGDVNEETFNEAYMMHTTTSPHYGVVASTETAAAMMKGNAGKRLIDGSIERSIKFRKEIKRLKGESDGWFFDVWQPEHIDGPECWPLRSDSAWHGFKNIDNEHMYLDPIKVTLLTPGMKKDGTMDEFGIPASIVAKYLDEHGIVVEKTGPYNLLFLFSIGIDKTKALSLLRALTDFKRAFDLNLRVKNMLPSLYREDPEFYENMRVQELAQNIHKLIEHHNLPDLMFRAFEVLPTMVITPYAAFQKELHGQTEEVYLEEMVGRVNANMILPYPPGVPLVMPGEMITEESRPVLEFLQMLCEIGAHYPGFETDIHGAYRQADGRYTVKVLKEENNK

SEQ ID NO: 1565 - DNA, 510 bp, Klebsiella variicola
atgacagttcttcaccgtctctttttgactttagtactatcgctcgtgggtatctctgctgttgcctccgaaccgtctgaaaatgttcggacgatcgtttcgggaatcgtgacctatacacgctggccgcagttatccggcccgccaaagctttgtattttttcgacatcacgttatatccatagcctggccgaagaagcaccggaattattgccttataaacccgtgattgttcgtaatacggaagaagccttacagacgacctgcgatggtttttattttggcagtgaatctccgactcagcagtctgaatttacagctaaatatggaaaccggcccctattgcttattgcggaacaaaacaccgattgctctattggcagcgcattttgcctgcttataaacaatgagagagtcagattttccgtaaatctggatgtactgacgcacagcggcgttcgggttaatcccgatgtgctgatgcttgcccggaaaacatcacatgaataa

SEQ ID NO: 1566 - protein, 169 aa, Klebsiella variicola
MTVLHRLFLTLVLSLVGISAVASEPSENVRTIVSGIVTYTRWPQLSGPPKLCIFSTSRYIHSLAEEAPELLPYKPVIVRNTEEALQTTCDGFYFGSESPTQQSEFTAKYGNRPLLLIAEQNTDCSIGSAFCLLINNERVRFSVNLDVLTHSGVRVNPDVLMLARKTSHE

SEQ ID NO: 1567 - DNA, 1041 bp, Klebsiella oxytoca
atgcaaaacacccaaccgcaacatgccccgctgtggcaacgctacctgaccacgaaagcgcaatcttccgcgaaatacgcccgcgatatcgctgccgaaatggggattagcgaagcggagctgaccgaagcccgcctgggctacgacgccgtacgtctgcagaacgacgcccgcgccatcctgacggcactggaagccgtgggggaaaccaaatgcatctgtcgcaacgaatacgcggtgcatgaacaggtcggcgaatttacccatcagcatttaagcggccacgccggactggtgctaaatccgcgcgccctcgacctgcgcctgtttctgagccagtgggccagcgcttttcgcctgaacgacaacggccgccagagcatccagttctttgatccgcacggcgacgcgctgctcaaggtttacaccactgaaaataccgacatggcggcctgggatgcgctgattgtcgcgcagacgcagcaatcgcctgacccgctggcgattcgcccggccgatccgctgaaatttgccgactccgccgacggcgaggcgctggaaaacgaatggcgcgccatgaccgacgtccaccagttcttcggcctgctgagaaaatataacctgtcgcgccagcaggctttccgcctggtcagcgacgacctcgcctgccgcattgacaaccagacgctgccgggcctgctggaaaccatccgccaggacggcaacgagatcatgatttttgtcggcaaccgcggctgcgtgcagatcttcaccggcgcgctggaaaaagtcgctccgatgcgcggctggctgaatatcttcaacaccgcttttaccctgcatctgcgcgaggagagcgtggatgaaatctgggtgacccgcaaaccgacctctgacggccacgtcaccagcgtcgagctgttcgccaaagacggcacgcagatcgcacagctgttcggtcaacgcagcgaaggccatccggagcagacgcagtggcgtgcgcaggtcgatcgtttgactaccgaaggactcatcgcatga

SEQ ID NO: 1568 - protein, 346 aa, Klebsiella oxytoca
MQNTQPQHAPLWQRYLTTKAQSSAKYARDIAAEMGISEAELTEARLGYDAVRLQNDARAILTALEAVGETKCICRNEYAVHEQVGEFTHQHLSGHAGLVLNPRALDLRLFLSQWASAFRLNDNGRQSIQFFDPHGDALLKVYTTENTDMAAWDALIVAQTQQSPDPLAIRPADPLKFADSADGEALENEWRAMTDVHQFFGLLRKYNLSRQQAFRLVSDDLACRIDNQTLPGLLETIRQDGNEIMIFVGNRGCVQIFTGALEKVAPMRGWLNIFNTAFTLHLREESVDEIWVTRKPTSDGHVTSVELFAKDGTQIAQLFGQRSEGHPEQTQWRAQVDRLTTEGLIA

SEQ ID NO: 1569 - DNA, 819 bp, Klebsiella oxytoca
atgaagcgctggctgatattgcttgcggcgctcccgctgttggccagcgccgccgccgagcgcattgtgtcactcggcggcgacgtcacggaggtggtttacgccctcaacgcccagcggcagctggtggcgaaagacagcaccagcacctggcctgccgccgcgcagagcctgccggatgtgggttatatccgccagctgaatgccgagggcatcctctccctgcgcccgacgctggtgctggccagcgcccaggcgcagccctcgctggtgctgaaaaaggtggcagagaataaggttaaggtcgtcaacgtgccgggcggctacgaccttccggcaatcgaagcaaaaattgacgtgattgccgacgccctcggtaagcagagcgaaggaaaagctctgcgccacaagcttcttcagcagatcgcgcaaattccttcccagcctgtaaacaagcgggtgctgtttatcctcagccacggcggcatgaataccatggtggccgggaaacaaaccgcagcggatggggcaatcagggcggccgggttagagaatgccatgcaaagcttcgaccattatcgcagcatgtcgcaggagggcgttatcgccagtaaaccggacctggtggtgatctccgccgatgggctgaaaggcatgggcggcgaagccgggctctggaaactgccgggactggcgcagacgccagcggggcgcaataagcaggtgctggtgatagatgatatggccctgctcggctttggcccgcgtaccccgcaggcggtgctcgcgttacggcaaaaagcggagcatctgccctga

SEQ ID NO: 1570 - protein, 272 aa, Klebsiella oxytoca
MKRWLILLAALPLLASAAAERIVSLGGDVTEVVYALNAQRQLVAKDSTSTWPAAAQSLPDVGYIRQLNAEGILSLRPTLVLASAQAQPSLVLKKVAENKVKVVNVPGGYDLPAIEAKIDVIADALGKQSEGKALRHKLLQQIAQIPSQPVNKRVLFILSHGGMNTMVAGKQTAADGAIRAAGLENAMQSFDHYRSMSQEGVIASKPDLVVISADGLKGMGGEAGLWKLPGLAQTPAGRNKQVLVIDDMALLGFGPRTPQAVLALRQKAEHLP

SEQ ID NO: 1571 - DNA, 996 bp, Klebsiella oxytoca
atgcgcacccaccctgcccgtcatctgtggttaatgacgctgctgctgattgtcctgacgctgctcgccacgaccctgggcgcaatgcgcctgccattagccagcctgttgccctccggcgatgaaatcctgaggagtatctggctgaccattcgtttgccgcgagtgctgctggcgctgctggtcggcgccgcgctggcgctttccggctgcgtgatgcaggggctgtttcgcaaccctctcgccgaccccgggctgctaggcattagtagcggcgcggcgctggcggtcgcctgctggctggtactgcccctgtcggtgccggcgctcgtggcgctgtacgccccgatgctggcggcgtttatcggcagtatggcggtgatggtggtaatttttattctcagccgggcgggcgacgcctcgctttcgcgcctgctgctggtcggcatcgccattaatgccctgtgcggcgcgctggtcggggtactttcgtggatcagcaatgatacccagctgcgccagctttccctctgggggatgggcagcctcgggcaagcggaatggtcgacgctgctggtggccgccacgctgatgatcccggcctcgctggtggtgtgggcgatggcttcgcggctcaacctgctgcagctgggcgatgaagaggcgcactatctcggcgtcaacgttcgcgccctgcagcggctgctgctgctgtgcagcgcattgctggtggcgtcggcggtggccatcagcggcattatcggttttatcggactggtggtgccgcatttgatgcggatgtggctggggccggaccaccgcggcctggtccccggttcgctactgtgcggcgcaatgttgctgctgctggccgacacgctggcgcgcaccgttgccgctcctgcggagatgccggtcgggctgttgaccagcgtactcggcgcgccgtggtttctgtggctgatttttcgtcgggagaaaggggctcatggataa

SEQ ID NO: 1572 - protein, 331 aa, Klebsiella oxytoca
MRTHPARHLWLMTLLLIVLTLLATTLGAMRLPLASLLPSGDEILRSIWLTIRLPRVLLALLVGAALALSGCVMQGLFRNPLADPGLLGISSGAALAVACWLVLPLSVPALVALYAPMLAAFIGSMAVMVVIFILSRAGDASLSRLLLVGIAINALCGALVGVLSWISNDTQLRQLSLWGMGSLGQAEWSTLLVAATLMIPASLVVWAMASRLNLLQLGDEEAHYLGVNVRALQRLLLLCSALLVASAVAISGIIGFIGLVVPHLMRMWLGPDHRGLVPGSLLCGAMLLLLADTLARTVAAPAEMPVGLLTSVLGAPWFLWLIFRREKGAHG

SEQ ID NO: 1573 - DNA, 780 bp, Klebsiella oxytoca
atggataaccgctatagcgcgcgttcgctttcgctgcgtctgagtaaccggcagattattcatgatgtttcgctccagctttacggcggcgagatgacggcattgattggccccaacggcgccggtaaatcgaccctgctgcgcctgttgaccggttatttaacgcccgacgagggccaacgggtggtggaaggccgaccgctggagagctggtcggcagaaacgctttcgcgccgccgggcggtgatgctgcaacgcacccagttgcacgcagactggccgatagaaacgattatcgctatggggcgctcgccgtggggcggcgcgataaaccaggagatgatctgccaggtaatgaaagagaccgggtgcgatcatctggccggaagacgctaccctaccctctccggcggcgagcagcagcgggtgcagctggcccgctgcctggcgcagctttggcgcgacggcgcccccgagggctggctgttccttgatgaacccacttcggcgctggatctctattaccagcagcacctgctgcgcctgctcaaacgcctgacccgcagccgccgcctgcacgtctgcgtggtactgcacgatctgaacctcgcagcgctatgggccgatcggattctgctgctgcatcaggggaaactggtggctcagggcacgccgcaggaggtgatccagcagccgattatcagccgctggtacggcgcggaggtcagcacgggcaaacatcccgatgcggccgttccgcaggtgtatctggcgccgtga

SEQ ID NO: 1574 - protein, 259 aa, Klebsiella oxytoca
MDNRYSARSLSLRLSNRQIIHDVSLQLYGGEMTALIGPNGAGKSTLLRLLTGYLTPDEGQRVVEGRPLESWSAETLSRRRAVMLQRTQLHADWPIETIIAMGRSPWGGAINQEMICQVMKETGCDHLAGRRYPTLSGGEQQRVQLARCLAQLWRDGAPEGWLFLDEPTSALDLYYQQHLLRLLKRLTRSRRLHVCVVLHDLNLAALWADRILLLHQGKLVAQGTPQEVIQQPIISRWYGAEVSTGKHPDAAVPQVYLAP

SEQ ID NO: 1575 - DNA, 1152 bp, Klebsiella oxytoca
atggcttacagaatgattttaaacgaaacctcttattttggcccaggttcgattcgttgtatcgtagatgaagttaaaaaacgcggcttcaaaaaagcgctggtggtcacggataaggatctgattcgttttgatgtagcaaccagggtgttcgctatcctcgacggcgccggattgccctacagcgtctttgatgaagtggtcccgaatcccacgattgaggttgtgcagcagggcgtagaggcgtttaaacagtcaggcgccgactacctgatcgcgatcggcggcggctcgccgcaggatacctgtaaggcaataggcattatcattaataaccccgaatttgccgacgttcgcagtctcgaaggcggggcggatacgaaaaacgccgccgtaccgatgattgccatcccaacgaccgccggtaccgcggcggaagtcaccatcaactacgtaataaccgacgtacagaatcgccgcaagtttgtttgctacgacccgcatgatatcccggtggtagcgatcatcgacgccgaaatgatgagcagcatgcctgccagcctgaaggcggccaccggcgttgatgccctgacccacgccattgaaggctatatcactaaaggcgcatgggaattaaccgacatgctgcatctgaaggccatcgaggtgattggccgctcgctgcgcgcttccgtacagggcgacgcacagggcgcggaagggatggcgctggggcaatatattgccgggatgggtttctccaacgtcggtctggggctggttcatggtatggctcatccgctgggcgctttttacggcacgccgcacggcgtggctaatgcggtgctgctgccgcatattatggcttataacgccgaatttaccggcgagaagtatcgagacatcgcggttgcgcttggtaacaagtcggcggcaaccctgccgattgccgaagcgcgtgccgcggcaattgaggcggtggcgcagctaaatcgcgacgtcaatattccggcgcgcctgcgcgacgtgggaatgaaagaagaagatattgatgctctggccgccgcggccctggcggacgtgtgtaccggcggcaacccgcgcgataccaatctggaagagattaaagcgctctatcggcagatcttctaa

SEQ ID NO: 1576 - protein, 383 aa, Klebsiella oxytoca
MAYRMILNETSYFGPGSIRCIVDEVKKRGFKKALVVTDKDLIRFDVATRVFAILDGAGLPYSVFDEVVPNPTIEVVQQGVEAFKQSGADYLIAIGGGSPQDTCKAIGIIINNPEFADVRSLEGGADTKNAAVPMIAIPTTAGTAAEVTINYVITDVQNRRKFVCYDPHDIPVVAIIDAEMMSSMPASLKAATGVDALTHAIEGYITKGAWELTDMLHLKAIEVIGRSLRASVQGDAQGAEGMALGQYIAGMGFSNVGLGLVHGMAHPLGAFYGTPHGVANAVLLPHIMAYNAEFTGEKYRDIAVALGNKSAATLPIAEARAAAIEAVAQLNRDVNIPARLRDVGMKEEDIDALAAAALADVCTGGNPRDTNLEEIKALYRQIF

SEQ ID NO: 1577 - DNA, 741 bp, Klebsiella oxytoca
atgcggttcgatatagagggatttattacatttgatactgaggaggcctctctggtcaatctcttgaccggcgattgtattgaactctccgccacttcgactcgccttcttactagtctgttgcaataccggggggatattatttcgcgggttgatattttccagacggtgtttgaaaaatatggtgcgaggccatctaatagtaatcttaatcagtacatctcaacgctgcgtcgcagccttgcggatctgggtattgaaaagaatgtgattattacggtaccgcgaattggctttaaaatttctgaggatgtcattatcactaccgacaatgattactcttcctctatcacactgccaaccctttctccacagctgcctgagcgtaacttgctgcaacaacattgcaaagcggcgatgttactgatcgcgttcgcagcagtcgcgatgctgctctcttatttttttatctataaaaaacaaacagctaagctcatgttcacccaagataaatgcactatttatggttccgaagctatcccggtgacagaaatactcaggaataaaaagctctttacctcggggctggactgttccacgccaaagaaaatctacttctttaaccgacaaatgaatcaggagcagggattaggtatttacatggatatcttcatgcttgagtgcgacattaaagaccagcaatgctatagttattactataaggaaataaaaaatgcgtaa

SEQ ID NO: 1578 - protein, 246 aa, Klebsiella oxytoca
MRFDIEGFITFDTEEASLVNLLTGDCIELSATSTRLLTSLLQYRGDIISRVDIFQTVFEKYGARPSNSNLNQYISTLRRSLADLGIEKNVIITVPRIGFKISEDVIITTDNDYSSSITLPTLSPQLPERNLLQQHCKAAMLLIAFAAVAMLLSYFFIYKKQTAKLMFTQDKCTIYGSEAIPVTEILRNKKLFTSGLDCSTPKKIYFFNRQMNQEQGLGIYMDIFMLECDIKDQQCYSYYYKEIKNA

SEQ ID NO: 1579 - DNA, 732 bp, Klebsiella oxytoca
atggcgcaaaaatgggtgctgattaccggcggcagccgggggataggccgggcgctggtcgccggcctggcgcaaaacgggaacgtggtgtttaccgggcgcaatgaagcggcgattaacgccactctggcggagtgtgaaaattcatcgtatcaggtgcaaggatacgcctgcgacggcaacgacgagtcgcgggttgaagaacttgctcaggcgctgctggccgagcggggcgcaccggaggcaattattcacaatgccggaatggctcgcgatggcctgcatattcaccagaacgccgcgctatggcgcgaggtgctggacaccaacgttatctcaatgatgaactggaaccggattctgctgccggcgatgttgatgcagcggcgcggctccatcgtgatgatgtcctcggtcagcgccttcaagggtaacgtcgggcagacggcgtatgcggcgagtaaagcggcgatgagcggcattgcgcgttcgctggcgctggaggtcgggcgcttcggcattcgggtaaactgcctggcgccgggcctgatccgcacggagatgctggaagagatacccgcgcaaaaattgaaagagatgcgccagtcgatacctctgcgcaggttgggcgaaacggatgatgtactgaaggccgtggcgtttttaatcggcgaggggagtgaatatatgaccggacaaactctgattctggacggcggattaagcgcctga

SEQ ID NO: 1580 - protein, 243 aa, Klebsiella oxytoca
MAQKWVLITGGSRGIGRALVAGLAQNGNVVFTGRNEAAINATLAECENSSYQVQGYACDGNDESRVEELAQALLAERGAPEAIIHNAGMARDGLHIHQNAALWREVLDTNVISMMNWNRILLPAMLMQRRGSIVMMSSVSAFKGNVGQTAYAASKAAMSGIARSLALEVGRFGIRVNCLAPGLIRTEMLEEIPAQKLKEMRQSIPLRRLGETDDVLKAVAFLIGEGSEYMTGQTLILDGGLSA

SEQ ID NO: 1581 - DNA, 252 bp, Klebsiella oxytoca
atgattgcctatgatgaagttctgcaaaaagtgtgtgaaatgatttgtgacgccaaggacctggagccggatgaggtggatgagaatacgccgctggttcgcttaaagttagatagtctggactacgtcgagctgatggtgctggcaaaacgtgaattcaatattaccctggaagcggactggtttattcaaaatccggggatcacgctgggtgaactgtgtcagcacatcagcaaagagtcaggcagctga

SEQ ID NO: 1582 - protein, 83 aa, Klebsiella oxytoca
MIAYDEVLQKVCEMICDAKDLEPDEVDENTPLVRLKLDSLDYVELMVLAKREFNITLEADWFIQNPGITLGELCQHISKESGS

SEQ ID NO: 1583 - DNA, 1254 bp, Klebsiella oxytoca
atgagtcacagtaaacccccttatcgcgtggtgataaccggctatggcgcggtgactccccttggcgatagcgctgccgaaagctggcaggcgatcatggattatcgacgcggttaccgctatgtggatctctccgctaacggcatccacacccattttatcggtcaggtagagaatgaacccagcctcaagggggttcccgccgctattcgtcggcgtctgccgcgtcacgctcgcctggcgctggccgccgcgcgggaggcggtggcgatggcctttgctggcaaaccacccaccgatgcttatgacccgctgaggtgtggcgccattatcggctccggctgggcagggctggatgaaagctatctggcggtaccggagtttgagaaaacgggcgtctcttcgcccttcagctgcttcttttcgatgccgaacgtgaccaccgcggcctgtagtcagctgtggaatctgcgcggttatcaaaatactccggtcgccgcctgcgccaccggcactatcgccattggcgaggcctatgatgcgattcgctttggccgggccagcatgatgctcgccggggccggggagtcgttaaacagcgtttgcgctatctggaatatcgatgtgcttggcgcgttgagccgggaagcgtcatcgccggagcgggccagctgcccgttcagcctgcagcgctgcgggtttgtcctttctgaaggcggcgcggtgctgtgcctggaagagcgcgaaagcgccctggcgcggggcgcgacaatcctcgcggaggtcaccggttatgccaatttctccgatgcggtggattttacctcaccggccgaagactgcgtggcacgtgaacagactatccgctgggcgctgcgcgacgcgggcctgcagcctgccgatctcgattatatcaacgctcacggcacctccacaccgctcaacgatatgaatgaaacgcagtcgctgaaaaaagcgctcggcgacgaggcgtaccggatcccggtctccagtaccaaagcctactccggacatctgatcgccgccgcggggagcttcgagaccattgtttgcctgcaggcgatggcggcggggatcatgccggcgacggcgcatctgacgcagcccgatccgcagtgcgatctcgactatatcgctgaagggcatcgtcaaggagagatccgtcgggcgctgaatctgagctttggtttcggcggcgcgaacgccgcgctggtactggagaaacacgcgtga

SEQ ID NO: 1584 - protein, 417 aa, Klebsiella oxytoca
MSHSKPPYRVVITGYGAVTPLGDSAAESWQAIMDYRRGYRYVDLSANGIHTHFIGQVENEPSLKGVPAAIRRRLPRHARLALAAAREAVAMAFAGKPPTDAYDPLRCGAIIGSGWAGLDESYLAVPEFEKTGVSSPFSCFFSMPNVTTAACSQLWNLRGYQNTPVAACATGTIAIGEAYDAIRFGRASMMLAGAGESLNSVCAIWNIDVLGALSREASSPERASCPFSLQRCGFVLSEGGAVLCLEERESALARGATILAEVTGYANFSDAVDFTSPAEDCVAREQTIRWALRDAGLQPADLDYINAHGTSTPLNDMNETQSLKKALGDEAYRIPVSSTKAYSGHLIAAAGSFETIVCLQAMAAGIMPATAHLTQPDPQCDLDYIAEGHRQGEIRRALNLSFGFGGANAALVLEKHA

SEQ ID NO: 1585 - DNA, 1398 bp, Klebsiella oxytoca
atgagatcgctgactttattatcgttaattgtattgctgacgggctgtggaaatttgacccgcagcgattatcagcggccgctgctgtcggtgccggagaactggcagcgaacggaagggcaaagcgccgcgcttgcgtcggagaaagtgggtcgctggtgggaccgtttcgacgatgaacgtctgtcgcgggtgatggggcaggttctggaaagcaataacgatctggccgctgccgccttaacccttcggcaggcgcgcatttccgccgggctggcccgaaccaatatctctcccgacgcgacgcttaacggtgccggcagtaactcaaagccgctcaatagcggaggttcgcaggagagctatagcgcctcgttatccctgagctatgagctggatctgtggggcaagctggcgcgggttcgtgaacagagcgagtgggaggcgattgccagcgaacaggactatcgggcgacgatcctgtcgacgattgatactaccgcgcagctctactggaatatcgcgctgctgaatcaacaaatggcttatcaggccgccagcctggatatcgccaggcagacgctggcgcagattgagtcctggcagcgggcggggaaagtagggctgcttgacgttctgcagtcccggcagacggtcatcagtcgccagaatcagttgctaagcctgaaacagcagcgggcgatctcccgcaacgcgctggcgctgctgctcaacaggccccccgcgcagcatagcgatgaagcaccggcgcttgacgtccatcagcgtgtcgccattgccagcgccacgccgctggccgcgctcgccagccggcccgatctgcaggcggcggagtcgcggctgcgcgcggcgctggcgggttccgatgcggcgcggctgagcttttatcccacgctctcgctgcaggggacgctgagcgccggcagccagatctttcaccagtggtttaacgacccgctgcgtaccgtcggaagcagcgtcggcgcgccctttatccagtggaacacggtacagcttaccgtggagcaggccagcgtaaaggtgcagcaggaggcggtgaacttccgccgtacggcctacaccgcgctgtcggaggtggacgatgcgatggaaaagcggcttaacgccgacgagcagcgcgtgcgcctgctgcaatcgctgcagctgggccagcggcgcctgacgctcaccgaaagccgctatcgggcgggcgcggtggactaccagaccctgctgaacgcacaggacgcgctgctcgacgtacagaacagcctggcgcagaaccagtacgactatctttatgccactttgcagctttggctggcgcagggaggcaataacccgcaacagaggatttcccagaatgagtcacagtaa

SEQ ID NO: 1586 - protein, 465 aa, Klebsiella oxytoca
MRSLTLLSLIVLLTGCGNLTRSDYQRPLLSVPENWQRTEGQSAALASEKVGRWWDRFDDERLSRVMGQVLESNNDLAAAALTLRQARISAGLARTNISPDATLNGAGSNSKPLNSGGSQESYSASLSLSYELDLWGKLARVREQSEWEAIASEQDYRATILSTIDTTAQLYWNIALLNQQMAYQAASLDIARQTLAQIESWQRAGKVGLLDVLQSRQTVISRQNQLLSLKQQRAISRNALALLLNRPPAQHSDEAPALDVHQRVAIASATPLAALASRPDLQAAESRLRAALAGSDAARLSFYPTLSLQGTLSAGSQIFHQWFNDPLRTVGSSVGAPFIQWNTVQLTVEQASVKVQQEAVNFRRTAYTALSEVDDAMEKRLNADEQRVRLLQSLQLGQRRLTLTESRYRAGAVDYQTLLNAQDALLDVQNSLAQNQYDYLYATLQLWLAQGGNNPQQRISQNESQ

SEQ ID NO: 1587 - DNA, 384 bp, Enterobacter cloacae
gtgaaatctgagcgtgcttgggccggtattatctgtgggttctttctatttatcgtggtttgcttatcgctgctgttacatatgaaaggcgcctttcgggctaccggtaaccctgagctcgggctgctgttctttttgctacccggtgcggcggcaagctgcctctccccgggtcagcgggtgctgcgtccgcttatcggcgctatgctggctgcgcctatttgtctggtcgtcatgcggttattcttcgtcactcaacgatctttctggcaggaactggcgtggctatttagcgcggtgttctggtgcgcgctgggcgcgctgtgctttttatttatttgcgcctggcttgataccagacgcaagccctcgtcagaggagtga

SEQ ID NO: 1588 - protein, 127 aa, Enterobacter cloacae
MKSERAWAGIICGFFLFIVVCLSLLLHMKGAFRATGNPELGLLFFLLPGAAASCLSPGQRVLRPLIGAMLAAPICLVVMRLFFVTQRSFWQELAWLFSAVFWCALGALCFLFICAWLDTRRKPSSEE

SEQ ID NO: 1589 - DNA, 717 bp, Klebsiella oxytoca
atgaacgaattttttccattagcaagcgccgccgggatgaccgtcggccttgccgtttgcgccctgatcatcggtctggtgctggcgatgctgtttgccgtcctcgagtcggtgaagctgcgcccggtcgcctggctcgcaaccggcattgtcacccttttgcgcggactaccggaaatcctggtagttctgtttatctattttggttcctcgcagctgctgctgaccctttctgacggctttactattaatctcggcattgtgcagatcccggtacagatgcagattgaaaattttgacgtcagcccgttcctctgcggggctatcgcgctttctctgctgtatgccgcttacgcatcgcaaacgctgcgcggggcgcttaaagccgttccgcaggggcaatgggaatccggtcaggcgctgggattatcaaaagccgctattttcttccgcctggtgatgccgcagatgtggcgccacgcgctgccgggcctcggcaaccagtggctggtgctgctgaaggataccgcactggtgagcctcattagcgtcaacgatctgatgctgcaaaccaaaagtatcgctacccgaacccaggagccgtttaactggtatatcatcgcggcagcaatctatctggtcatcaccctgttgagtcagtacattctgaaacgtattgatcagcgagcgacgcgcttcgaacggagaccaggctga

SEQ ID NO: 1590 - protein, 238 aa, Klebsiella oxytoca
MNEFFPLASAAGMTVGLAVCALIIGLVLAMLFAVLESVKLRPVAWLATGIVTLLRGLPEILVVLFIYFGSSQLLLTLSDGFTINLGIVQIPVQMQIENFDVSPFLCGAIALSLLYAAYASQTLRGALKAVPQGQWESGQALGLSKAAIFFRLVMPQMWRHALPGLGNQWLVLLKDTALVSLISVNDLMLQTKSIATRTQEPFNWYIIAAAIYLVITLLSQYILKRIDQRATRFERRPG

SEQ ID NO: 1591 - DNA, 915 bp, Klebsiella oxytoca
atggaccgacttagcgcgatggcgctgctggtaaaagtgaccgaactcggcagtatgtcggcggctgcgcgggcgctgaatatgcccctgactaccgtcagtcgccagattggcgaactggaaaataccctcggcgtacgcctgatgatccgcactacgcgcaagctgacgctgaccgatgccggcgtcgattatgtcgccgccgcgcggcgcattctggaagaggtagagcgcgccgagcgccaggcggcgggtgaatatcaggagccaaaaggcgaactggttctctcagccccaaccatgtttgggcgcctgcatgttttaccgatagtcgcccgttttctcgctcgttacccgcagattcgcgtccgtttgctgctcagcgaccgcaatgccgacctggtgggcgaccatattgacttagcggtacgtatcggcccgctaccggacagcgggatggtggccacccggctgggcgagatgcgcatcgtgacctgcgcccacccggctttgttggaaaaacacggcataccacaacgcccgcgcgagctggccgcgctaccaatcattggtattgaatcaccgatgccttaccgcggctggcgctttcacgccgaagaggcggaggaccggctggtgctggtgcagccggtgctgtcactgaccacgccggagagcgccgccgaggctgcccgccagggagtcggcgtggcccgactgctgcattaccaggcgatcgatggcctggcccgcggcgaattacggatgatcctgcaagcgacggagccggaacctgtgccggtgcacctgctgtacacctcccgggatctggctccgctcaagctgcgtaaatttatcgattttgccacaccggcactgcgccaggcgctgttacgtattgccgccgccgtctag

SEQ ID NO: 1592 - protein, 304 aa, Klebsiella oxytoca
MDRLSAMALLVKVTELGSMSAAARALNMPLTTVSRQIGELENTLGVRLMIRTTRKLTLTDAGVDYVAAARRILEEVERAERQAAGEYQEPKGELVLSAPTMFGRLHVLPIVARFLARYPQIRVRLLLSDRNADLVGDHIDLAVRIGPLPDSGMVATRLGEMRIVTCAHPALLEKHGIPQRPRELAALPIIGIESPMPYRGWRFHAEEAEDRLVLVQPVLSLTTPESAAEAARQGVGVARLLHYQAIDGLARGELRMILQATEPEPVPVHLLYTSRDLAPLKLRKFIDFATPALRQALLRIAAAV

SEQ ID NO: 1593 - DNA, 1050 bp, Klebsiella oxytoca
atgcaaatcaacgctattggaacgaattcggccagccagccgttggggtctatggccatcacccgccgcgagccggggccggatgatgtgcagatcgccattgattattgcggcgtctgccactcggatgtgcaccaggcgcgctccgagtgggcagggacgctctatccctgcgtaccgggtcatgaaatcgtcggccgggtgaccgccgtaggcagccgcgtctccggtcacgccgttggcgatctggtgggcgtcggctgtatggtcgatagctgtaaagagtgcgaggagtgccgggacgggctggaaaactactgtgatcatatggtgctcacctataacggcccaacgcaggatgcgcccggccacacgctcggcggttactcccagcagatcgttgttcatcagcgctacgtgctgcgcatatcccatcccaaagaacagctggccgccgtcgcgccgctgctgtgcgcgggtatcacgacctactcgccgcttcgccactggaacgttgggccgggcaaaaaagtcggcatcgtgggcatcggcgggctggggcatatgggcatcaagctggcccacgccatgggggcccacgtggtggcctttactacctcggaatccaagcgtgacgcggcgcgagagctgggcgcggacgaagtggtggtctcgcgcaacgaaaacgaaatggccgcccatctgaaaagcttcgactttatacttaacaccgtggcggcgccgcataacctcgatgccttcaccacgctgctcaaacgcgacggcaccatgacgctggtgggcgcgcccgccacgccgcatccctcgccggaagtgtttaatctgatcttccgccgccggtcaattgccggatcgatgatcggcggcatcccggaaactcaggagatgctcgatttctgcgccgagcacggcatcgtcgccgatattgagctgattcgcggcgaccagattaacgaggcctgggagcggatgattaaaggcgacgtgaaataccgtttcgtcatcgacagcgccacgctcggcggctaa

SEQ ID NO: 1594 - protein, 349 aa, Klebsiella oxytoca
MQINAIGTNSASQPLGSMAITRREPGPDDVQIAIDYCGVCHSDVHQARSEWAGTLYPCVPGHEIVGRVTAVGSRVSGHAVGDLVGVGCMVDSCKECEECRDGLENYCDHMVLTYNGPTQDAPGHTLGGYSQQIVVHQRYVLRISHPKEQLAAVAPLLCAGITTYSPLRHWNVGPGKKVGIVGIGGLGHMGIKLAHAMGAHVVAFTTSESKRDAARELGADEVVVSRNENEMAAHLKSFDFILNTVAAPHNLDAFTTLLKRDGTMTLVGAPATPHPSPEVFNLIFRRRSIAGSMIGGIPETQEMLDFCAEHGIVADIELIRGDQINEAWERMIKGDVKYRFVIDSATLGG

SEQ ID NO: 1595 - DNA, 2184 bp, Klebsiella michiganensis
atgtctctctccactcactcccgggatgggcgaaacgctccatccctgcttgcgatgggcatagcgctggcgctctccccaaaccttagccaggctgccagtcactccgaagacactattattgtagaaggttccgcagatagcgcttcggatacgcaagaacaggattacagcgtcaaaactacctccgcagggacaaaaatggagatggcccagcgcgatatcccgcaatcggtcagtatcatcaccgaacaacggatgcgcgatcagcagttgcaaacgctgggtgatgtgatggagcacaccatggggatcagcagcagccaggcagattctgaccgcaccagctactactctcgtggttttgagatcgataactatatggtcgatggcattccgacctggtttgaatcccgctggaatctgggcgacgcgctttccgatatggctcttttcgaacgggtggaggtcgtccgcggcgcgaatggtctgctgaccggcaccggtaatcccgccgcgtcgatcaatatgatccgtaagcatgcgaccagccgcgagttcaagggaaatgtctctgcggagtacggcagctggaacaagcagcgctacgttgccgatatgcaaagtccgctaaccgaagatggcaacgtgcgggcgcgcattatcgctggttatcaaaataatgactcatggctcgatcgttacaacagcgaaaaaacgttcttctcggggattgtggatgcggatctcgcgacgtcgaccagtttatccgccggctacgagtatcagcgtatcaacgtcaatagcccgacatggggcggtctgccgcgctggaataccgatggcagcacaaaccgttacgatcgcgcccacagcaccgctccagactgggcctataacgacaaagagatcaataaagtcttcgttacgctgaaacaacgctttgctgatacctggcaggcaacgctgaacgccactcactccgaggtcaagttcgacagcaaaatgatgtacgtagatgcttacgtcaataaagcgaccgggatgctggaggggccttatagcagctacggtccgggctatgactacgtaggcggtaccggctggaatagcggaaagcgtaaagtcgacgccgtggatctgttcaccgacggcggctacgacctgttcggccgccagcataatctgatgataggcggcagctacagcaagcaaaataaccgctatttcagctcgtgggcaaacgtcttccccaatgagattggcagcttctacagcttcaatagcgctgggttcccggaaaccagctggggcccgcagagtctggcgcaggacgataccacgcgcatgaaatcgctgtatgccgcgacgcgtatttccctgcttgatccgctgcatctgatccttggcgtccgctataacaactggagcattgagacgctgacctacaacatggagaaaaatcataccaccccatacgccgggctggtttacgacataaacgacaattggtcggcctacaccagctatacctcggtcttccagccgcagaacaagcgcgatagctcgggtaagtatctgacgccgattaccgggaataactatgaagtgggcctgaagtcggactggatggacagccgattaaccacgactctcgcgatattccgcatcgagcaggataatctcggccaggcgaccggcgggcaaatccccggtagcaacggcgaagcagcctataaaaccgtcgatggaaccgtgagcaaaggggtggagttcgaaatcaacggtgcgattaccgataactggcagatgacctttggggcgacgcgttttgtcgctgaagataatgaaggcaatgccgtgaatcccaacctgccgcgaaccagcgtcaaactgtttaccagctaccgtctgccggtaatgcctgaactgaccgttggcggcggcgttaactggcagaaccgggtatataaagataccgcgacgccttacggcaccttccgtgcggaacagggcagctacgcgctggttgatttgttcactcgctaccaggtcactaaaaattttgctttgcagggtaacgtcaataacctgttcgataaaacctacgacaccaacatcgatggctcaattgtctacggcgaaccgcgcaacttcagcattaccgccagctatcagttctga

SEQ ID NO: 1596 - protein, 727 aa, Klebsiella michiganensis
MSLSTHSRDGRNAPSLLAMGIALALSPNLSQAASHSEDTIIVEGSADSASDTQEQDYSVKTTSAGTKMEMAQRDIPQSVSIITEQRMRDQQLQTLGDVMEHTMGISSSQADSDRTSYYSRGFEIDNYMVDGIPTWFESRWNLGDALSDMALFERVEVVRGANGLLTGTGNPAASINMIRKHATSREFKGNVSAEYGSWNKQRYVADMQSPLTEDGNVRARIIAGYQNNDSWLDRYNSEKTFFSGIVDADLATSTSLSAGYEYQRINVNSPTWGGLPRWNTDGSTNRYDRAHSTAPDWAYNDKEINKVFVTLKQRFADTWQATLNATHSEVKFDSKMMYVDAYVNKATGMLEGPYSSYGPGYDYVGGTGWNSGKRKVDAVDLFTDGGYDLFGRQHNLMIGGSYSKQNNRYFSSWANVFPNEIGSFYSFNSAGFPETSWGPQSLAQDDTTRMKSLYAATRISLLDPLHLILGVRYNNWSIETLTYNMEKNHTTPYAGLVYDINDNWSAYTSYTSVFQPQNKRDSSGKYLTPITGNNYEVGLKSDWMDSRLTTTLAIFRIEQDNLGQATGGQIPGSNGEAAYKTVDGTVSKGVEFEINGAITDNWQMTFGATRFVAEDNEGNAVNPNLPRTSVKLFTSYRLPVMPELTVGGGVNWQNRVYKDTATPYGTFRAEQGSYALVDLFTRYQVTKNFALQGNVNNLFDKTYDTNIDGSIVYGEPRNFSITASYQF

SEQ ID NO: 1597 - DNA, 342 bp, Klebsiella variicola
atggatttcaatatcgttgccgtcacggcctgcgtcagcggcgtcgctcacacttatatggcggccgaacgcctggaaaaggtcggccaccatgagaaatggaatatcaaaatcgaaacccagggcgcgctgggggttgagaacaaaattaccgctgacgatattgcccatgccgatgtcgttctgctggtgacggatattgaaattgacgatgtcagacgcttcaacggcatccgcaccattaagaccagcatcaaaacttttctgctgcagccgcagcagattgtcgaagcggttaaatgcattatgaaaaagccggtagtttatattgagatcccttga

SEQ ID NO: 1598 - protein, 113 aa, Klebsiella variicola
MDFNIVAVTACVSGVAHTYMAAERLEKVGHHEKWNIKIETQGALGVENKITADDIAHADVVLLVTDIEIDDVRRFNGIRTIKTSIKTFLLQPQQIVEAVKCIMKKPVVYIEIP

SEQ ID NO: 1599 - DNA, 207 bp, Klebsiella variicola
atgctttaccgctatgccgttttctccagaaaacacaacacgtttcatattcttctgctgtttaccattttactaataagtttcgtccatttgagcgtgctgctggaaaccgataacacatggctactgtggccgatgatgatttatctgcctgtttttttgctttggcgaaaggtctcagtgttacgaagcaggatcgctgattaa

SEQ ID NO: 1600 - protein, 68 aa, Klebsiella variicola
MLYRYAVFSRKHNTFHILLLFTILLISFVHLSVLLETDNTWLLWPMMIYLPVFLLWRKVSVLRSRIAD

SEQ ID NO: 1601 - DNA, 1206 bp, Escherichia coli
atgaataagcttcccctgatggcggatcatgacccggtggcgctgctgccggataacgaacaagacgaagcgaagatcgtaaaatcgcggcggctgatactgctgctggccggtatgctgctggtgggcgctgtctgggcctggttcgccgtgctggatgaagtctctacgggcaccggaaaagtgatccccagctcccgggagcaggtgattcagaccctcgatggcggcatcttaaccgagctgaacgtgcaggagggcagcaaagtgcaagccggacaggtcgtggcgcgcctcgaccccacccgcagcgaatctaacgtgggggaaagccaggcgaagtatcgcgcctctctggcggcgagcattcgcttaactgctgaggtcaacaatcagccgctggtgtttcccgacaccctgaaagcctggcccgcgctgttggcggaggagacccgcctttaccatagccgcaaggagcaactgagcaaatcgacgcgtcagctggatgagtcgttaaagctggtcaatagcgaactggccattactgaaaaactggcgaaaaccggggcggcgagcaacgtcgaagtgctgcgtcttcgtcagcaggtcgcggatattagttttaaaaaaatcgatctcaatacgcgttattttgttgacgcgcgtgaacagctgtcaaaagccaatgccgatgtagccagcctggcggaagtgattaaagggcgcgccgattcggtgacgcgtttaaccgtccgctcgccggtacagggaattgttaaaaatattaaggtcaatactattggtggggttattgcgcccaatggcgaattgatggaaatcgtgcctatagacggccgtttattaatcgaagcgcggatctcccctcgcgatattgcttttatccatcccgaccagcaggcgctggtcaaaattaccgcctatgattatgccatctatggcgcacttaacggcgtggtggaaaccatatcgccggataccactcaggatgaagctaaacccgatatttactactaccgggtatttatccgtactgataatgattacctggagaataagagcggcaagcgctttttaattggcccggggatgatcgctaccgttgatattaagaccggtgaaaaaacggttatggattatctggtaaaaccatttaatcgggccaaagaagcattacgggagcgctaa

SEQ ID NO: 1602 - protein, 401 aa, Escherichia coli
MNKLPLMADHDPVALLPDNEQDEAKIVKSRRLILLLAGMLLVGAVWAWFAVLDEVSTGTGKVIPSSREQVIQTLDGGILTELNVQEGSKVQAGQVVARLDPTRSESNVGESQAKYRASLAASIRLTAEVNNQPLVFPDTLKAWPALLAEETRLYHSRKEQLSKSTRQLDESLKLVNSELAITEKLAKTGAASNVEVLRLRQQVADISFKKIDLNTRYFVDAREQLSKANADVASLAEVIKGRADSVTRLTVRSPVQGIVKNIKVNTIGGVIAPNGELMEIVPIDGRLLIEARISPRDIAFIHPDQQALVKITAYDYAIYGALNGVVETISPDTTQDEAKPDIYYYRVFIRTDNDYLENKSGKRFLIGPGMIATVDIKTGEKTVMDYLVKPFNRAKEALRER

SEQ ID NO: 1603 - DNA, 873 bp, Klebsiella oxytoca
atgttccgacacgttaagcaacttcagtataccgtcagggtcgcggaacctaatccggggctggctaatctccttctggagcaattcggcggccctcagggcgaactcgccgccgcatgccgatatttcacacagggcctgagcgatgacgatccgggtcgcaaggatatgctgatggacattgccaccgaagagctgagccaccttgaaattatcggctcgctggtaggtatgctcaataaaggggcgaaaggcgccctggcggagggtacggaaaacgaagccgatctgtaccgctcgcttaccgctaacggcaacgacagccatattacctctttgttatatggcggaggcacgccgctgaccaactccgccggcgtgccctggaccgcagcatacattgacaccattggtgaacccaccgcggatttacgctccaacgtggccgccgaggcgcgcgctaaaatcatctatgagcgcctgataaacgtcaccgatgaccccggcgtgaaggatgcgctggcctttctgatgacccgagaagccgcccatcagctctcttttgagaaggcgcttcaatccatcagaaacaactatccaccgggcaaactaccgccaatcactgactacgccagcacctactacaatatgtcagagggcgatgacattcgcggcagctggaatagcgatctgcacttcgagtatgttgcgaatccgcagcctgcagtagatggcggagatggcggtgccagcgttaagctaacggccgaacaaaaggccctggtgaaaaccatggcgaaacgcacccaatccgacccggaaggcgatcctctcaccggcgcagaacttggcgcgggtaagaaaaagccgtaa

SEQ ID NO: 1604 - protein, 290 aa, Klebsiella oxytoca
MFRHVKQLQYTVRVAEPNPGLANLLLEQFGGPQGELAAACRYFTQGLSDDDPGRKDMLMDIATEELSHLEIIGSLVGMLNKGAKGALAEGTENEADLYRSLTANGNDSHITSLLYGGGTPLTNSAGVPWTAAYIDTIGEPTADLRSNVAAEARAKIIYERLINVTDDPGVKDALAFLMTREAAHQLSFEKALQSIRNNYPPGKLPPITDYASTYYNMSEGDDIRGSWNSDLHFEYVANPQPAVDGGDGGASVKLTAEQKALVKTMAKRTQSDPEGDPLTGAELGAGKKKP

SEQ ID NO: 1605 - DNA, 150 bp, Klebsiella oxytoca
atgtccgtacagcatccagccgacccagataaacgcgttcgtcatccgtcgaaagaggatccgcgcgagcagggtgaagttccgcgtaaaagagacgacagcgaagatcataaagaagatccctggcatccccaacctgaaaaacgctaa

SEQ ID NO: 1606 - protein, 49 aa, Klebsiella oxytoca
MSVQHPADPDKRVRHPSKEDPREQGEVPRKRDDSEDHKEDPWHPQPEKR

SEQ ID NO: 1607 - DNA, 1068 bp, Enterobacter cloacae
atgccgggacaggggttaaatagtctgcgtaagaacgtcgttgagttaccggatagcgactacgatttggataaactggtgaatgtttatccattaacaccgggtttagtggatcaacttcgtcccgaaactgtaatggcgcgaccaaatccgcagttagataatttattgaaaagttatgagtaccgaattggtgttggcgacgtcttgatggtaacggtctgggatcaccctgaattaactactcctgcaggccaatatcgtagcgcgagtgatacggggaactgggtaaattctgatgggacgattttctatccttatattggaaaagtattagtagctggaaaaacattgagccaagtgcgacaggatatagcgaatagacttacaacatatatcgaaagcccacaagttgatgtaagtatagcagccttccggtctcagaaagtatatgtaacaggtgaggttacaaattctgggaaacaagcaattacaaacattccattaacggtaatggatgctatcaatgctgctggtggacttgcccctgatgcagattggcgtaacgttgtacttacccataatgggaaagataaaaaaatctcactctatgcattaatgcaaaaaggagatttaactcaaaaccatttattattcccaggcgatattttgtttatcccacgaaatgacgaactcaaagtatttgtgatgggtgaggtaggaaaacaaagcacgcttaaaatggaccgaagcggaatgacactcgcagaagccatagggaactctgaaggtatttcacaatcaatgagtgatgctactggaatttttgtgattcgccaattacaaggtgataagaaaggtaaaatcgcgaatatatatcagctaaatgcacaagatgcttcagctatggttttaggtaccgagtttcaattagaaccctatgatattgtttatgtaacaactgcacctctggttcgttggaacagagttatatcccagttggtcccaacgatcactggtgtacatgatatgacagaaaccgtccgctatattaagacatggccataa

SEQ ID NO: 1608 - protein, 355 aa, Enterobacter cloacae
MPGQGLNSLRKNVVELPDSDYDLDKLVNVYPLTPGLVDQLRPETVMARPNPQLDNLLKSYEYRIGVGDVLMVTVWDHPELTTPAGQYRSASDTGNWVNSDGTIFYPYIGKVLVAGKTLSQVRQDIANRLTTYIESPQVDVSIAAFRSQKVYVTGEVTNSGKQAITNIPLTVMDAINAAGGLAPDADWRNVVLTHNGKDKKISLYALMQKGDLTQNHLLFPGDILFIPRNDELKVFVMGEVGKQSTLKMDRSGMTLAEAIGNSEGISQSMSDATGIFVIRQLQGDKKGKIANIYQLNAQDASAMVLGTEFQLEPYDIVYVTTAPLVRWNRVISQLVPTITGVHDMTETVRYIKTWP

SEQ ID NO: 1609 - DNA, 333 bp, Klebsiella variicola
atgaagaagttactgcttgtcgctattatggcaacaggcctggttgcctgtacgcagtcgccagcgccgaaagaagactcaaagttgagagacgcctacagcgcctgcattactagcgcggaggggaacccggataagcttgaagcctgtcagagcgtactgaacgtgcttaagcaagagaaacagcaccagcagttcgccacccaggaaagcgtgcgggtgctggactatcaacagtgtatccaggcgcgcaaaaccggtaacgatcaggccgtgcaggcgcgctgcgaccagctctggaaagagatccgcagcaacaatacgcctcgttaa

SEQ ID NO: 1610 - protein, 110 aa, Klebsiella variicola
MKKLLLVAIMATGLVACTQSPAPKEDSKLRDAYSACITSAEGNPDKLEACQSVLNVLKQEKQHQQFATQESVRVLDYQQCIQARKTGNDQAVQARCDQLWKEIRSNNTPR

SEQ ID NO: 1611 - DNA, 1296 bp, Klebsiella oxytoca
atgacgcaatcatcatcgcgcgccggtaccttcggcgctattctccgcgtgaccagcggtaattttctcgagcaattcgacttttttctgttcggtttttacgccacctacatcgccagaacgttctttccggcggaaagtgagtttgcggcgttaatgctcaccttcgccgtgtttggttcgggcttcctgatgcgccctatcggggcgatagtgctgggggcctatatcgacagaatcgggcggcgtaaagggctgatggtgacgctggcgattatgggctgcgggacactgctgatagcactggtccccggctatcacgccatcggcgttctcgcccccattctggtattagtcggccgtctgctgcagggattctcggcgggcgtagagctcggcggcgtgtcggtctacctgtcggaaatcgccaccccggggaaaaaggggttctataccagctggcaatccgccagccagcaggtggctatcgtggtcgcggcgctgattggctacgcgctgaacgaaacgcttggccatgatgagatcgccgaatggggctggcgtatccccttctttattggttgtctgatcattccgctgatttttgtactgcggcgttcgctacaggaaaccgaagctttcctgcagcgtaaacatcgtcctgatacccgagaaatcctgagcacgattgtaaaaaactggcgcatcatctcggcgggcaccttactggtggcgatgaccacgaccactttttactttattaccgtttataccccaacctacgggagagccgtgctgcatctgagcgctcgcgatagcctgctggtcaccatgctggtcggcatctctaactttatctggttaccgattggcggggcaatttctgacagaataggccgtcgtccggtgctgatgggcatcaccctgctggcgctgtttaccacctggccggtgatgcactggctcaccgccgcgccggattttacccgtatgacgctggtcctgctctggttctcgtttttcttcggtatgtataacggcgcgatggtcgcggcgctgaccgaagtgatgccggtctacgtccgcaccgtgggcttttcgttagcctttagcctcgccaccgctatctttggcggcctgacgccggctatttccaccgcgctggtcgagatcaccggggataaaagctcgccgggctggtggctgatgtgcgctgcgctatgcggacttgccgcaactgccatgctctttactcgcctgagccgcagctatcagccagcagaaataccccgctaa

SEQ ID NO: 1612 - protein, 431 aa, Klebsiella oxytoca
MTQSSSRAGTFGAILRVTSGNFLEQFDFFLFGFYATYIARTFFPAESEFAALMLTFAVFGSGFLMRPIGAIVLGAYIDRIGRRKGLMVTLAIMGCGTLLIALVPGYHAIGVLAPILVLVGRLLQGFSAGVELGGVSVYLSEIATPGKKGFYTSWQSASQQVAIVVAALIGYALNETLGHDEIAEWGWRIPFFIGCLIIPLIFVLRRSLQETEAFLQRKHRPDTREILSTIVKNWRIISAGTLLVAMTTTTFYFITVYTPTYGRAVLHLSARDSLLVTMLVGISNFIWLPIGGAISDRIGRRPVLMGITLLALFTTWPVMHWLTAAPDFTRMTLVLLWFSFFFGMYNGAMVAALTEVMPVYVRTVGFSLAFSLATAIFGGLTPAISTALVEITGDKSSPGWWLMCAALCGLAATAMLFTRLSRSYQPAEIPR

SEQ ID NO: 1613 - DNA, 1401 bp, Klebsiella oxytoca
atggcgacggtgggacaaacgtgtcccgcggccgacgtcatcgaacgggaacaggcgaacagtttttgggaaccgatagtgtcaaaggcaaccgaacaaaacgacaagcttaaacgagcgatcatagtttcagtcgcgctgcacatcgtcttgatagcgctgctgatctggagttcgtttgacgagcatctggatgcttctgccggcggcggcgggggctcttctatagatgcggttatggtcgatccgggggcggttgtgaagaattatgaccgtcaacagcagcagcaggccagcgcccgccgcgccgccgagcagcgtgaaaagcaggctcagcagcaggcggaagagttgcgcgaaaagcaggccgccgagcaggaacggctaaaacagctggaacaggagcgtctgcaggcgcaggaagcggctaaagaggcgaaagagcagcagaaacaggcggaagaagccgcggcgaaagccgccgcagcggccaaagcgaaagcggacgctcaggtgaaagaggcgcaggaagctgccgccaaagccgccgctgatgcaaaagcgaaggccgatgctcaggcgaaagcagccgaagccgctgcggcgaaagcggcggcggatgcgaagaaacaggcagaagcagaagccgcgaaagcggccgcggacgcgcagaagaaagccgaagcggatgcagcgaagaaagctcagcaggaagccgagaagaaagcgcagcagcaggcagagaaaaaagcgcagcaagaagcggcgaaacaggctgcggctgaaaaggctgctgccgaaaaagcggcagaaaaagccgccgcgcagaaagccgctgctgagaaagcagcagccgagaaagccgccgcagcggaaaaagccgccgctgagaaagctgcggcagccaaagccgcagcagcagagaaggccgccgcagacaaagcagcgaaagccgcagccgctaaggcagcagccgcgaagaaagccgctgcggccaaagaggccaacggcgtggacgatctgctcggcgacctgagctccggtaagaatgcgcctaaaactggcggtggggcgaaagggagcaatgcatctgctgccgggagtggtaatactaaaaataatggcgcatcaggagctgatatcagcaattatgccgggcagatcaaatctgccattgaaagtaagttttacgacgcagcgtcttactcaggcaagacctgtaccttgcgtattaaacttgctccggatggcatgttgctaaatatacagtctgaaggtggggatcctgcgctttgtcaggccgctcttgcagcagcccgacaggctaagttcccaaaaccgcctagtcaggcggtatatgaagtattcaaaaatgcgccgttggacttcaaacctcagtga

SEQ ID NO: 1614 - protein, 466 aa, Klebsiella oxytoca
MATVGQTCPAADVIEREQANSFWEPIVSKATEQNDKLKRAIIVSVALHIVLIALLIWSSFDEHLDASAGGGGGSSIDAVMVDPGAVVKNYDRQQQQQASARRAAEQREKQAQQQAEELREKQAAEQERLKQLEQERLQAQEAAKEAKEQQKQAEEAAAKAAAAAKAKADAQVKEAQEAAAKAAADAKAKADAQAKAAEAAAAKAAADAKKQAEAEAAKAAADAQKKAEADAAKKAQQEAEKKAQQQAEKKAQQEAAKQAAAEKAAAEKAAEKAAAQKAAAEKAAAEKAAAAEKAAAEKAAAAKAAAAEKAAADKAAKAAAAKAAAAKKAAAAKEANGVDDLLGDLSSGKNAPKTGGGAKGSNASAAGSGNTKNNGASGADISNYAGQIKSAIESKFYDAASYSGKTCTLRIKLAPDGMLLNIQSEGGDPALCQAALAAARQAKFPKPPSQAVYEVFKNAPLDFKPQ

SEQ ID NO: 1615 - DNA, 1047 bp, Acinetobacter pittii
atgaaaaaatggtcacgccacctgctcgctgcgggcgctctggcaatcgggatgagcgccgcgcacgcggacgatagcaaaacgctctatttctacaactggaccgaatatgtcccgccggggctactggagcaattcaccaaagagaccggcatcaaggtgatctattcaacctacgagtcgaacgaaaccatgtatgccaagctcaaaacctataaagacggcgcttatgacctggtggtaccttccacctacttcgtcgacaaaatgcgtaaagagggcatgctgcagaagatcgataagagcaagctgagcaacttcggcaatctcgatcctgaaatgctcaataaaccgttcgacccgaataacgattactctattccgtacatctggggcgcgacggccatcggaatcaatagcgatgagatcgatccgaaaaccgttaccagctgggcggatctatggaagccagagtataagagcagcctgctgctgaccgacgacgcgcgcgaagtgttccaggtcgcgctgcgtaaactgggctactccggcaatactaccgatccgaaagagattgaagcggcctataacgagctgaaaaaactaatgccgaacgtcgcggcgttcaactccgataacccggcgaacccgtatatggaaggcgaggtaaatctcggcatggtgtggaatggctccgcgtgggttgcgcgtcaggccggtacgccgctggaagtcgtgtggccaaaagaaggcggcatcttctggatggatagcctgtcgattccggccaatgccaaaaacgtcgacggcgcgctgaagctgatcaacttcctgctgcgcccggaagtggccaaacaggttgcagaaactatcggttacccgacgccaaacctggccgcgcgtaaaatgctgagcccggaggtcgccaatgataaatcactctatccggacgccgcgacgattcagaaaggcgaatggcagaacgatgtcggcagcgccagcacgctttatgaagagtattatcagaagctaaaagcgggtcgttaa

SEQ ID NO: 1616 - protein, 348 aa, Acinetobacter pittii
MKKWSRHLLAAGALAIGMSAAHADDSKTLYFYNWTEYVPPGLLEQFTKETGIKVIYSTYESNETMYAKLKTYKDGAYDLVVPSTYFVDKMRKEGMLQKIDKSKLSNFGNLDPEMLNKPFDPNNDYSIPYIWGATAIGINSDEIDPKTVTSWADLWKPEYKSSLLLTDDAREVFQVALRKLGYSGNTTDPKEIEAAYNELKKLMPNVAAFNSDNPANPYMEGEVNLGMVWNGSAWVARQAGTPLEVVWPKEGGIFWMDSLSIPANAKNVDGALKLINFLLRPEVAKQVAETIGYPTPNLAARKMLSPEVANDKSLYPDAATIQKGEWQNDVGSASTLYEEYYQKLKAGR

SEQ ID NO: 1617 - DNA, 2079 bp, Raoultella planticola
atgtcacacacacttgcactccatcccgtgaaaaagcgggatgcgatattcctttgggttttattcggctggctggcgtttgccctgctgccgagctggagcctggattacggtctgctggagtccacgagcgatgaaattctcgcggcctacggctggtcacagttcaatatcagctggctgtggtatctgttaccgagcctgctgctgattcgtccctttcaggaagccaggcgggagcagcgcagccgccactatctcgatgctggctgggcgttctgctgtatggcgtttatcgtcgtcagcgccaccgtggaaggccgcggattaggctacgccaccatcgtgctgtttgtcgcgctgggggccatcatgaccctggcgctcacccgcctggaatggctggggggcgaccgctttgtcattggttcgctggtcaccatcgtggcgttaatcggcgtctttatcgtctggccgagcatcgctattttcatcccgatgttcactaacgacgccggcgagtttgccccgctggcgtttatggccgtgctgtcgcaggcgcatattgtccaggtgatcctcaactccatcgccctgtcgattgcggtaggcatcggctgcactttctttggtctggtgctggcgatttacaccacccgtatcgcccagcgcagcgcgattattggccgcattttctcgattctgccgatcgtcaccccgccgtttgtcgtcggtctcggcgttaccctgatgatgggccgttccggctacgtcaccgaactgatggtcgactggtttggcttaaccaacaccaactggctgtacggatttaccggcatctggctggcgcaggtgctggcgttcaccccgatggcgtttatgatcctcgacggcgcgattaagaccattcatccgtcgctggaggaggcgtcgtacaccctgcgcgccagccgctggcagaccttcaacggcgtcttcgtcccgctgctgaaaccggcgctggcgaacgcgtttttaatcgtcatcgttcagtcgctggccgacttcagcaacccgctggtgctcggcggcaacttcgacgtactggcgacgcaaatctacttctatatcaccggttcgcagctcgattatcaggccgccagtactctcggcgcattcctgctgctgttctcgctgctggtgttctgcattcagtatatgtggatcggcaagcgctcttacgtcacggtttccggcaagtcctaccgtggcgacgtgcagccgctgccggtgaccctggtgtggagcgtgatcgccattctggcggtgtggatcgccttcaacgccctgctctacggcagtattttctacggcagctttaccgttaactggggcgtggactacaccctgacgctggataactttatcaagctgttcggccaggggatgagcgacggcgcctggccttcgctgctcgatactctgctttacgccgggatcgccgcgcccatcaccgccgctttcggcctgctgatcgcctggatcgtagtgcggcagcagtttaaaggcaaaaagaccatcgagttcaccaccatgctgtgcttcgcggtgccgggcaccgtggcgggcgtctcctatattctcgcctttaacagcgcgccggtgtacctcaccggaacggcggcgattgtgattatctcgatggtcatgcgtaacgtgccggtgggcattcgggcaggtattgccggtttaggccagatcgacaaatcgctggacgaagcgtcgctcagtctgcgcgcgggttccctgcgcaccattacgcatatcctgctgccgctgctgcgcccggcgatcctctcggcgctgatctacagctttgtgcgcgccattaccaccgtcagcgccattgtgttcctcgtgacgccggacacccgcgtcgctaccgcctatatcctcaaccgggtggaagacggcgaatacggcgtggcgatcgcctacggatcgattctgatcgtcgtgatgctggcgattatttttatctttgactggctgatcggggaagcgcgtatctcccggtcaaaagccaaaaaccaggcgtaa

SEQ ID NO: 1618 - protein, 692 aa, Raoultella planticola
MSHTLALHPVKKRDAIFLWVLFGWLAFALLPSWSLDYGLLESTSDEILAAYGWSQFNISWLWYLLPSLLLIRPFQEARREQRSRHYLDAGWAFCCMAFIVVSATVEGRGLGYATIVLFVALGAIMTLALTRLEWLGGDRFVIGSLVTIVALIGVFIVWPSIAIFIPMFTNDAGEFAPLAFMAVLSQAHIVQVILNSIALSIAVGIGCTFFGLVLAIYTTRIAQRSAIIGRIFSILPIVTPPFVVGLGVTLMMGRSGYVTELMVDWFGLTNTNWLYGFTGIWLAQVLAFTPMAFMILDGAIKTIHPSLEEASYTLRASRWQTFNGVFVPLLKPALANAFLIVIVQSLADFSNPLVLGGNFDVLATQIYFYITGSQLDYQAASTLGAFLLLFSLLVFCIQYMWIGKRSYVTVSGKSYRGDVQPLPVTLVWSVIAILAVWIAFNALLYGSIFYGSFTVNWGVDYTLTLDNFIKLFGQGMSDGAWPSLLDTLLYAGIAAPITAAFGLLIAWIVVRQQFKGKKTIEFTTMLCFAVPGTVAGVSYILAFNSAPVYLTGTAAIVIISMVMRNVPVGIRAGIAGLGQIDKSLDEASLSLRAGSLRTITHILLPLLRPAILSALIYSFVRAITTVSAIVFLVTPDTRVATAYILNRVEDGEYGVAIAYGSILIVVMLAIIFIFDWLIGEARISRSKAKNQA

SEQ ID NO: 1619 - DNA, 564 bp, Escherichia coli
atgaagcccagactctctcacgcgctactgtttgttccttttttgcttttggcaggatgttcatcctcatcgaaaccgcataaaaccgccgcccagagtagtcactcgaccatcgacggaggttcagacgatctgatcccggtgatcgccgcgctgcacgatcaaatgcatacctgggagggaacgccctacgaatggggcgggacggagcaaagcggcgtcgactgctccgggtttgtctggcgcacgctcaaagatcgcttcaacctgccgatggagcgcattacgacgcgcgagcttctgcatatgggcgagcgcgtgagcccgcggcagctgcggccgggagatttagtcttcttccgtattaaaggcggcatgcacgtcggtttctatgataccgaccgtaattttcttcatgcctccaccagccagggcgtgatgcgctcttcgctggataatccatactggcaatcggtattctaccaggctcgccgcctgccgaaggaatataacgcccagataaccatgaataacgataatctgcatctggcaaaaaatcgttaa

SEQ ID NO: 1620 - protein, 187 aa, Escherichia coli
MKPRLSHALLFVPFLLLAGCSSSSKPHKTAAQSSHSTIDGGSDDLIPVIAALHDQMHTWEGTPYEWGGTEQSGVDCSGFVWRTLKDRFNLPMERITTRELLHMGERVSPRQLRPGDLVFFRIKGGMHVGFYDTDRNFLHASTSQGVMRSSLDNPYWQSVFYQARRLPKEYNAQITMNNDNLHLAKNR

SEQ ID NO: 1621 - DNA, 1293 bp, Klebsiella oxytoca
atgctactggcaggtgctatttttatcctgaccattattctggttatctggcagccgaaggggctgggcatcggctggagcgcgacgcttggcgcagtactggctttgatatctggcgttgtgcatgtgggggatattccggtggtgtggaatatcgtctggaacgcgacggcgacctttatttcggtgattattatcagcctgttgctcgacgagtccggcttttttgaatgggcggcgctgcatgtctctcgttggggtaacggtcgtggccgtttgctgtttacctggatcgttctgctcggcgctgcggtggcggcgctgtttgctaacgatggtgcggcactgattctgactcccattgtcatcgccatgctgctggcattagggttcagcaaggggacgacgctggccttcgtgatggctgccggatttattgccgatacggccagcctgccgcttatcgtgtcgaacctggtgaatatagtctcggcggacttctttggactgggcttcactgagtatgcgtcggtaatggtgccggtggatattgctgctattatcgccacgctggttatgctgcatctgttcttccgcaaagatatcccgccgacttacgatctggctctcctgaaggcacctgaaaaagcagtaaaagatccggctacgttccgcaccggctggattgttttgattcttctgctggtaggttttttcgtcctcgagcctctcgggattcccgttagcgcaattgcggcagttggggcggtaatactgtttaccgtggcgaaacgaggtcatgccattaacacaggcaaagtgctgcgtggcgcaccctggcagatcgttatcttctcattggggatgtacctggtggtctacggtctgcgtaacgccgggctaaccgaatacctttcaggggggctaaacgtactggcggataaaggactctgggccgcgacgctgggtactggcttcctgatggctttcctgtcttcgatcatgaacaacatgccttccgtgctggttggtgcgctctctatcgatgaaagcaccgcaaccggcgttattaaagaggcgatgatctacgccaacgtgattggctgcgatctgggtccgaaaattacacctattggtagcctggcaacgctgctctggctgcatgtactttcacagaagaatatgaccatcacctggggctactattttcgcaccgggatcgttatgactctgcctgtgctgtttgtcacgctggccgcgctggcgctacgtctctctttcactttgtcatga

SEQ ID NO: 1622 - protein, 430 aa, Klebsiella oxytoca
MLLAGAIFILTIILVIWQPKGLGIGWSATLGAVLALISGVVHVGDIPVVWNIVWNATATFISVIIISLLLDESGFFEWAALHVSRWGNGRGRLLFTWIVLLGAAVAALFANDGAALILTPIVIAMLLALGFSKGTTLAFVMAAGFIADTASLPLIVSNLVNIVSADFFGLGFTEYASVMVPVDIAAIIATLVMLHLFFRKDIPPTYDLALLKAPEKAVKDPATFRTGWIVLILLLVGFFVLEPLGIPVSAIAAVGAVILFTVAKRGHAINTGKVLRGAPWQIVIFSLGMYLVVYGLRNAGLTEYLSGGLNVLADKGLWAATLGTGFLMAFLSSIMNNMPSVLVGALSIDESTATGVIKEAMIYANVIGCDLGPKITPIGSLATLLWLHVLSQKNMTITWGYYFRTGIVMTLPVLFVTLAALALRLSFTLS

SEQ ID NO: 1623 - DNA, 513 bp, Klebsiella oxytoca
atggaaattacaacgattaatcagctaatcgcagcaggttcaggcctaataggtgcttgtataggcgcgggtatttctggctggatcaactataaaattagtcgcagtaatcatgatttagaaaagctgtcatttgctgcagggttcattgcggaagttgagtcattacaaaaagtaatgagagaaagaggttatttagagtccttcacttctttcgctaaccaccctgatgttatggctggtgcaaaggttcagtacgaaattttaatacctgataacttctcacggttttataacgccaacctaaataaagttggtttgctaggcgtggaaaggaccaagctattgatccaataccaccagatacttcaggcgttggcccaagactttaaaaagggttcctatgtcaatataaatgggtttgacaaagaggcaatcgatgaaagtgtccgcttcttcacccttgccttatctatcggagatcaacttgtgaattacgaaactcacaattag

SEQ ID NO: 1624 - protein, 170 aa, Klebsiella oxytoca
MEITTINQLIAAGSGLIGACIGAGISGWINYKISRSNHDLEKLSFAAGFIAEVESLQKVMRERGYLESFTSFANHPDVMAGAKVQYEILIPDNFSRFYNANLNKVGLLGVERTKLLIQYHQILQALAQDFKKGSYVNINGFDKEAIDESVRFFTLALSIGDQLVNYETHN

SEQ ID NO: 1625 - DNA, 156 bp, Klebsiella oxytoca
atggcctcagtagacgaaaagacaaaactagctgaaattgctgcaagcatggcaatagagctaataaaagcgaaccctagtgggcacaataccgctgagcgtgtggctgacgcattcaaaactatatatacagcggtctacaataaggctggataa

SEQ ID NO: 1626 - protein, 51 aa, Klebsiella oxytoca
MASVDEKTKLAEIAASMAIELIKANPSGHNTAERVADAFKTIYTAVYNKAG

SEQ ID NO: 1627 - DNA, 531 bp, Klebsiella oxytoca
gtggcacagttgaaactgagtaagaaaagcggcgctgcgggcattgcctgctccgtcggagcgatcatcgctattgttatgaatgcgggccatgtaaggactaacgagcgcgggctggagttaatcggcaatgctgaatcttgccgacgtgatccgtatgtgtgcccggcaggtgtgctgactgacggtatgggtaatacgcacggcgtgaagctcggcaccgttaagtctgaccagcagattgcagccgagtgggagcacaacatccttgatgctgagtcctgtgttaaccgctacggaaatggccgaaagctatctgacgatactttttcagcagttgtatcggtaacgtttcgtgctggctgcggaaacatgcgcacctccacgatgttctcacttctcagaagtgggggcatcacggcggcatgcaaccagttccctcgctgggtatggggtggcggcaaggttcttcctggcctggtaactcgcgccgggaaagaaaaggcgctctgcctggatggtgtgaaatga

SEQ ID NO: 1628 - protein, 176 aa, Klebsiella oxytoca
MAQLKLSKKSGAAGIACSVGAIIAIVMNAGHVRTNERGLELIGNAESCRRDPYVCPAGVLTDGMGNTHGVKLGTVKSDQQIAAEWEHNILDAESCVNRYGNGRKLSDDTFSAVVSVTFRAGCGNMRTSTMFSLLRSGGITAACNQFPRWVWGGGKVLPGLVTRAGKEKALCLDGVK

SEQ ID NO: 1629 - DNA, 273 bp, Klebsiella oxytoca
atggctaagcttctcaacttgcaggaatgggctgctgaggtctacacgactccaccctcactttctactctgcgtcgatggacgcgggaagggcgtatttatcccgcgccggagctgcacggaaaggaatataaagttcagcctgacgctatctacgtggatccgcgcaagaagaatctgcgcgctaaaccgaaacacaccaaactgccgtccggcggcaccttactggagagactgactcatggcgaaaaggccagtacgttacgacgctaa

SEQ ID NO: 1630 - protein, 90 aa, Klebsiella oxytoca
MAKLLNLQEWAAEVYTTPPSLSTLRRWTREGRIYPAPELHGKEYKVQPDAIYVDPRKKNLRAKPKHTKLPSGGTLLERLTHGEKASTLRR

SEQ ID NO: 1631 - DNA, 2415 bp, Klebsiella oxytoca
atgaccaaccactgggtcgacattaagaacgccaatcttatcgtggtgatgggcggcaacgccgctgaagctcacccggttgggttccgctgggcgatggaagccaagatccacaatggcgcgaagctgattgtgatcgatccgcgctttacgcgtaccgcgtcggtggctgatttctataccccaattcgttccggtactgacattaccttcctgtcaggcgtcatcctgtacctgttgaacaatgaaaagattaaccgtgaatataccgaagcctataccaacgccagcctgatcgtgcgtgaagattacagctttgaagacggtttattcagcggctatgacgccgaagcccgcaagtacgacaaaacgtcctggaactatgagctggatgaaaacggctttgctaaacgcgataccacgctgcagcatccgcgctgcgtctggaatttgctgaagcagcacgtttcccgctatacgccagaagttgtcgaaaatatctgcgggacgccaaaagcggacttcctgaaagtctgcgagtacattgcggaaaccagcgctcctgataaaaccgcgtctttcctgtacgcactgggctggacgcagcactccatcggcgcgcagaacattcgcaccatggcgatgatccagctgctgctcggtaatatgggcatggcgggcggcggcgtaaacgccctgcgcggccactccaacattcagggtctcaccgacttaggattgctgtcgcagagcctgcctggctatatgacgctgccgagcgagaaacagactgacctgcaaacctacctcgccgccaatacgccgaaaccgctgttgaaggatcaggtgaactactggggtaactacccgaaattcttcgtctcgatgatgaaggccttctttggcgataaagcaacggcggaaaacagctggggctttgactggctgccgaagtgggacaaaggatacgacgtcctgcaatacttcgagatgatgaatcagggtaaagtgaatggctatatctgccagggctttaacccggtagcctcgttcccgaacaaaaacaaggttgttgcgtcgctgtcgaaactgaagttcctggtgaccatcgatccgctcaacaccgaaacctccactttctggcaaaaccacggggagtcgaacgacgtcgatccggcgaaaatccagaccgaagtgttccgcctgccgtccacctgcttcgccgaagagaacggttccatcgttaactccggccgctggctgcagtggcactggaaaggcgctgacgccccggggattgcggccaccgacggtgaaatcctcgccggtatcttcttacgcctgcgcaagatgtacgccgaacagggcggaccggcgccggaaccggtgctgaacatgacgtggaactacgccacgccgcatgaaccggcatcggaagaagtggcgatggagagcaacggcaaggcgctggctgacatcaccgacccggcaaccggtgctgtgatcgtcaagaaaggccagcagctcagttcgtttgcgcagctgcgtgacgacggcacgacctccagcggctgctggatcttcgccggcagctggacgcctgacggcaaccagatggcccgtcgcgataacgccgatccatctggccttggcaataccctcggctgggcatgggcgtggccgcttaaccgccgtatcctgtataaccgcgcctccgctgacccgcagggtaaaccgtgggatccgaagcgtcagctcctgaaatgggacggcgcgaagtggggcggcgtggatattccagactacagcgccgcggcgccggacagcgatgtcgggccgtttatcatgcagccggaagggatgggacgtctgttcgctatcgataagatggcggaggggccgttcccggaacactacgagccgtttgaaacgccgctgggcactaacccgctgcacccgaatgtcgtctctaacccggccgctcgcgtctttaaaggcgaccttgagcagatgggcaaagcggaaaaattcccttacgtcggtaccacttaccgtctgaccgagcacttccactactggaccaagcacgcgcttctcaacgccatcgcgcagccggagcagtttgtggagatcggcgagaagctggcgaacaagctcggcatcgcccatggcgataccgtgaaggtctcctctaaccgcggctatattaaagccaaggcggtggtgaccaagcgtattcgcacgctgaaagcggacggcaaggatatcgatactatcggtattccgattcactggggctacgaaggcgtggcgaagaaagggtttatcgccaataccctgacgccgtttgtcggggatgcgaacacgcagacgccggagttcaaggctttcctcgtgaacgtggaaaaggcgtaa

SEQ ID NO: 1632 - protein, 804 aa, Klebsiella oxytoca
MTNHWVDIKNANLIVVMGGNAAEAHPVGFRWAMEAKIHNGAKLIVIDPRFTRTASVADFYTPIRSGTDITFLSGVILYLLNNEKINREYTEAYTNASLIVREDYSFEDGLFSGYDAEARKYDKTSWNYELDENGFAKRDTTLQHPRCVWNLLKQHVSRYTPEVVENICGTPKADFLKVCEYIAETSAPDKTASFLYALGWTQHSIGAQNIRTMAMIQLLLGNMGMAGGGVNALRGHSNIQGLTDLGLLSQSLPGYMTLPSEKQTDLQTYLAANTPKPLLKDQVNYWGNYPKFFVSMMKAFFGDKATAENSWGFDWLPKWDKGYDVLQYFEMMNQGKVNGYICQGFNPVASFPNKNKVVASLSKLKFLVTIDPLNTETSTFWQNHGESNDVDPAKIQTEVFRLPSTCFAEENGSIVNSGRWLQWHWKGADAPGIAATDGEILAGIFLRLRKMYAEQGGPAPEPVLNMTWNYATPHEPASEEVAMESNGKALADITDPATGAVIVKKGQQLSSFAQLRDDGTTSSGCWIFAGSWTPDGNQMARRDNADPSGLGNTLGWAWAWPLNRRILYNRASADPQGKPWDPKRQLLKWDGAKWGGVDIPDYSAAAPDSDVGPFIMQPEGMGRLFAIDKMAEGPFPEHYEPFETPLGTNPLHPNVVSNPAARVFKGDLEQMGKAEKFPYVGTTYRLTEHFHYWTKHALLNAIAQPEQFVEIGEKLANKLGIAHGDTVKVSSNRGYIKAKAVVTKRIRTLKADGKDIDTIGIPIHWGYEGVAKKGFIANTLTPFVGDANTQTPEFKAFLVNVEKA

SEQ ID NO: 1633 - DNA, 582 bp, Klebsiella variicola
atgcagggtgaggtaataaccggcgtcgtgctggcggggggaagaggcacgcgcatgggaggaatagataaaggattacagctgctgaatggtaaggccctgtggcgtcatgtcgccgatacgctgcagcctcaggtcgccaggctggtgattagcgctaaccgcaatcttgattgctggcgaagcagcggctacccgattattaccgactcgctgaacgactttcccgggccgttggccggcatgcattccgtaatgcatcaggtcgagggcgaatggtttctgttttgtccgtgcgatacgccatttatcccatcatttctggcgactcgcttaatgcagcacaaaacatcagccctggccgtttgggtacacgatggtgaacgagaccatccggccattgctctggtaaatcgcaaggtgatcggcgaactggaaacgtatctggccgcaggagagcggcgggtaatggtatttctgcacaaaattggcggtcatagcgtcgattttagcgatgtaaaatcagcatttataaacgttaatactctcgacgatttgcaacatatgcaggtaccattatga

SEQ ID NO: 1634 - protein, 193 aa, Klebsiella variicola
MQGEVITGVVLAGGRGTRMGGIDKGLQLLNGKALWRHVADTLQPQVARLVISANRNLDCWRSSGYPIITDSLNDFPGPLAGMHSVMHQVEGEWFLFCPCDTPFIPSFLATRLMQHKTSALAVWVHDGERDHPAIALVNRKVIGELETYLAAGERRVMVFLHKIGGHSVDFSDVKSAFINVNTLDDLQHMQVPL

SEQ ID NO: 1635 - DNA, 459 bp, Salmonella enterica
atgagtctgcagtccgtgcggcagttttttgctgaccgcgcccccgatatcgaaatcatcgaacttaatcagagtacggccacagtagcgttagccgcggcggcgcataacgttgaacccggacaaatagcaaaaaccctctctttaaaaataaaggaaagggtcgtacttgttgtcgcaaaaggcgatgcacgcctggataataaaaaactcaaggaagcattcggcgctaaagcgcgcatgctgagtagcgatgaggtcattacgttaaccggacaccccattggcggcgtttgcccttttggcctggaagttccgctggcagtgtattgcgatatttcattaagacagtatccggaagtgcttccagcagcaggttcaatacatagcgccgttcgcatttcacccgagcgaatggcgcagctgacggatgctacatggattgacgtttgtctttaa

SEQ ID NO: 1636 - protein, 152 aa, Salmonella enterica
MSLQSVRQFFADRAPDIEIIELNQSTATVALAAAAHNVEPGQIAKTLSLKIKERVVLVVAKGDARLDNKKLKEAFGAKARMLSSDEVITLTGHPIGGVCPFGLEVPLAVYCDISLRQYPEVLPAAGSIHSAVRISPERMAQLTDATWIDVCL

SEQ ID NO: 1637 - DNA, 681 bp, Salmonella enterica
atggaaaaagacctcacagcacgatatgtcgctatcgtagagaaatgtgcgatgacggaagtggcccttcgccacattttaattaatgaaagtggtaagaattatcgcattcaattctttaaagatactcaggcattaaagcgggagttccagtctaaagatttttcagcgattattttttctctttcaggtaaccgccgatcccggcttgaaagcttactctttcttcatgagattgcacgctactgccctgaaatgcaaagaattgtcttagccaatgatgaagctgaaatgcgtctggttagccatctgacgccttcacgcctgcacggcattttgaataaatcagcctgtcggctacagctgcaggaacatctgctgcagcttctcgaacgcagcggtccgccaaatgaaagctcgctaaaccaaaagcagggcatgtgtagtcaaattctgagcccgacggaacataccatcctgcgctatatgtcttatggctattcgttgcctgagattgcgacacagctggagcgcaatattaaaacgattcgggcgcataaatttaatgccatgaccaagctgggcgtcagttctgatatgggactactgagcgcggctgatatattaatgcgcttatcggcaaacaatgatgatgccagggtaatgcgccttgcccagtag

SEQ ID NO: 1638 - protein, 226 aa, Salmonella enterica
MEKDLTARYVAIVEKCAMTEVALRHILINESGKNYRIQFFKDTQALKREFQSKDFSAIIFSLSGNRRSRLESLLFLHEIARYCPEMQRIVLANDEAEMRLVSHLTPSRLHGILNKSACRLQLQEHLLQLLERSGPPNESSLNQKQGMCSQILSPTEHTILRYMSYGYSLPEIATQLERNIKTIRAHKFNAMTKLGVSSDMGLLSAADILMRLSANNDDARVMRLAQ

SEQ ID NO: 1639 - DNA, 723 bp, Escherichia coli
atgttaccaggacagggtaagttcggcattattatcagcagaataccggttatgcagtccggcttgaaggccattgttggggagcatctacccgattatgaattgagtttttgccgttctcaggatgagctcaccctgctgcaactgcggcgcgcagtactggttattgcagatttatccggtgaaatagagaatccaagaaatatttgtgaacactactactccttaatgacgcaatacagggatatacactgggtctttatggtaggaagtgcctgtttcccattagcggttgaattattaatgcggcctgaaagcacattaatttcagacagtgagccggtaaaacgtctcatcgaagtggttcgcgcgggtggacttgccgccgagcgaatcagccagacattgttctctcctgaagtggaacacatcggtgacgaacagcaaaaaatggtcattctgacgctctctgagcgaaaagtgttgcggcttctcgctaaaggatggggaattaatcaaattgctgctttattgaagaagagcaataaaaccataagtgcgcagaaaaatagtgctatgcgccgcttatctttgcgtagcaatgcagagatgtatgcctggattaatagtgcacagggaatgaaggagctgaatatttattcagcctatggagagcaaactgaatggaaaaagacctcacagcacgatatgtcgctatcgtag

SEQ ID NO: 1640 - protein, 240 aa, Escherichia coli
MLPGQGKFGIIISRIPVMQSGLKAIVGEHLPDYELSFCRSQDELTLLQLRRAVLVIADLSGEIENPRNICEHYYSLMTQYRDIHWVFMVGSACFPLAVELLMRPESTLISDSEPVKRLIEVVRAGGLAAERISQTLFSPEVEHIGDEQQKMVILTLSERKVLRLLAKGWGINQIAALLKKSNKTISAQKNSAMRRLSLRSNAEMYAWINSAQGMKELNIYSAYGEQTEWKKTSQHDMSLS

SEQ ID NO: 1641 - DNA, 870 bp, Escherichia coli
atgcaggcagtgagtaccattcccgttttcaaactgtatggcgaagagcagggctggccgacgcccgatctgctgcactgcgagtcgatactccagcggagccatctttatgaatggcatatccgcctgcatcagcacgcagagctggtgcagctgctatatctgcacaaagggcaggcggaaattgaaatcgaaggtacgacgaccgtgatgagggagtcctgtattcagatcgttccggcgctgtgtattcatggttttcgtttttccccgggtacggaaggctacgtcttgtcgctggcgctgccgctgctcggaagtctcgaaagtcagtttgccagtcagttggatgtactcggccagccgcgatgcgtgccggtcaaggcgtcgcggagccatattcgggcgctgttcaccgctttgcgcgaagagtatcgcgaagagtatgacgcgcgtgaaatgatgctgcattccctgctgggagcgctgctggtgtggttgaaccggcagcatcgcccgcagccgataacggcagacaaagctgagcgcaagcgtagcgtcatgcgtcatttttctcgactgatagaaagtcattatcgcgaacatatgcccttagccgcttatgcaaagctggcgggcgtttctgcaacgcatctgaattatttatgccatgaattctacggctgcagcgcgctgggagtattacatcaaagattgatgcttgaggcgcgtcgcaatctgcaatacaccagcatgacgattgcacaactttctgattatttaggatttactgatgcagcctatttttctcgtttctttcgccgttataacggtgaatctcccaaagtatttaggaacaaaataaaatga

SEQ ID NO: 1642 - protein, 289 aa, Escherichia coli
MQAVSTIPVFKLYGEEQGWPTPDLLHCESILQRSHLYEWHIRLHQHAELVQLLYLHKGQAEIEIEGTTTVMRESCIQIVPALCIHGFRFSPGTEGYVLSLALPLLGSLESQFASQLDVLGQPRCVPVKASRSHIRALFTALREEYREEYDAREMMLHSLLGALLVWLNRQHRPQPITADKAERKRSVMRHFSRLIESHYREHMPLAAYAKLAGVSATHLNYLCHEFYGCSALGVLHQRLMLEARRNLQYTSMTIAQLSDYLGFTDAAYFSRFFRRYNGESPKVFRNKIK

SEQ ID NO: 1643 - DNA, 603 bp, Klebsiella variicola
atggacaagattaaactggtggcgattttacgcggtattcgccccgctgaggcagcggagcatattgagacgctgatagaggcaggatttcgctatatcgaaattccgctcaattcgccggactggcagcagagtattccgcagatggtcgcgcgctttggcgagcaggcggtgattggcgcgggaacggtacttaaggtggaacaggtcgattttctggccgatgccggagcgaagcttatcgtgacgccgaatactgagccgacgacgatccgccgggcggtggcgcgcggaatgcgggtttgcgccgggtgcgccaccgcgaccgaggcgtttaacgcgctggatgccggggcgcagtggttgaaaattttcccgtcttccacttttggcccggactacattcgggcgctgaaagcggtgctgccgtcggaggtgccggtgctggcggtcggcggcgtgacgccggagaatctggcaagctgggttgaggcagggtgcgccggcgctggcctgggaagcgatctgtatcgcgccgggcaggccgtggaacgtacccgtcagcaggcggagaggtttatcgccgccgcccgctgcggttaa

SEQ ID NO: 1644 - protein, 200 aa, Klebsiella variicola
MDKIKLVAILRGIRPAEAAEHIETLIEAGFRYIEIPLNSPDWQQSIPQMVARFGEQAVIGAGTVLKVEQVDFLADAGAKLIVTPNTEPTTIRRAVARGMRVCAGCATATEAFNALDAGAQWLKIFPSSTFGPDYIRALKAVLPSEVPVLAVGGVTPENLASWVEAGCAGAGLGSDLYRAGQAVERTRQQAERFIAAARCG

SEQ ID NO: 1645 - DNA, 240 bp, Escherichia coli
atgagcgatatagatctcagcccgccgcaacgcgatctgctacgcgaaaagctgtataaatactgccaggagaattttgaactggaactggagcaatttgacgcggaattttttgtcgactttatcgcgaaagagctgggtccaatgttttataacgccgggattgatgcggccatcgccacccaccttgcatggagcgatcgaattcaggaagagatggatctgaaaaaagtctattag

SEQ ID NO: 1646 - protein, 79 aa, Escherichia coli
MSDIDLSPPQRDLLREKLYKYCQENFELELEQFDAEFFVDFIAKELGPMFYNAGIDAAIATHLAWSDRIQEEMDLKKVY

SEQ ID NO: 1647 - DNA, 690 bp, Klebsiella oxytoca
atgattgaacgccacgagcaaaagaagtatttacgttttgccattaatctgggcaacccggttcttacgatactgtcgccagatggatcgccgggggggataaccgtcgaactggcaaagaaactggcgactgagagccagcgtgaagcgcggttggtgacctggccaacggccgggcaggtcgtggatgcggcgctgatggatcaatgggatatcgcttttctggctatcgacccggcgagggaagataagcttcgctttacgccctcctacatcacgatcgagagttcgctgatggttaaaaaagagagcaagattcaatcggttcaggagatggaccgcgaaggttcagtaatcaacgtgggcaaaggtgcggcctacgagctgtatctgattcgcacgctgaaacatgcgacgctgcgccaatatgccacttcgcaggatgctatacaggcgttcatcaacggcgaaggtgatatggtggccggtattcgtcagcctctggagaaagccgcgcgggataatccacagtttcgcgttttacccgatagttttagccagatacatcaggcgatatgcgtgccgcgcaatgcgacacagcactatgaatttatttgccgctgcctttcttcatggatagcggacgggactattgccgggatggtgagtcaccatatcggcaatagttga

SEQ ID NO: 1648 - protein, 229 aa, Klebsiella oxytoca
MIERHEQKKYLRFAINLGNPVLTILSPDGSPGGITVELAKKLATESQREARLVTWPTAGQVVDAALMDQWDIAFLAIDPAREDKLRFTPSYITIESSLMVKKESKIQSVQEMDREGSVINVGKGAAYELYLIRTLKHATLRQYATSQDAIQAFINGEGDMVAGIRQPLEKAARDNPQFRVLPDSFSQIHQAICVPRNATQHYEFICRCLSSWIADGTIAGMVSHHIGNS

SEQ ID NO: 1649 - DNA, 522 bp, Klebsiella oxytoca
atgtcacatcaacgagcaatcggccgtagagttgaaaaagcatgtcttgcttttcaagaacaagactatgaaacctgtctgctacacttgtttccagctatagatagtacaggtaaagcaaggagaccgaacggtaaagtaggagaacgcataagagcattaatagatgatcaattagatatcataacggccttaggcgtgggctcggtaataagaaatttaaatatcgatgggcaaactatcccccaaatattatataactttgccagaactacattagcgcacgaaggtgaaattgatcctcgtttgaaaatttctgaaaactcacgattaagtgccagcaaggactcatggagtatttcaccaagttttattttaggaatgataatagctgtagttactgcacaagaaaatttaaacgattgtgcatcaataaacattactgttacaattaaaggtcaagaaattgatataaataatttatgggggcaagaagcagtactcaaagcatcattatcataa

SEQ ID NO: 1650 - protein, 173 aa, Klebsiella oxytoca
MSHQRAIGRRVEKACLAFQEQDYETCLLHLFPAIDSTGKARRPNGKVGERIRALIDDQLDIITALGVGSVIRNLNIDGQTIPQILYNFARTTLAHEGEIDPRLKISENSRLSASKDSWSISPSFILGMIIAVVTAQENLNDCASINITVTIKGQEIDINNLWGQEAVLKASLS

SEQ ID NO: 1651 - DNA, 153 bp, Klebsiella oxytoca
atgctgacaaaatacgccctggtggcaatcatcgtgctgtgtctgacagcgctgggattgacgttaatggtgcacgactcgctgtgcgagctgagcatcaaagaacgtagtatggagttcaaggccgttctcgcttacgaaacgaagaagtag

SEQ ID NO: 1652 - protein, 50 aa, Klebsiella oxytoca
MLTKYALVAIIVLCLTALGLTLMVHDSLCELSIKERSMEFKAVLAYETKK

SEQ ID NO: 1653 - DNA, 597 bp, Klebsiella oxytoca
atgttaagtgaacagctggattggcaaaaaaccgacggtctgatgccggtcatcgtgcagcacgccgtttccggggaagtgctgatgctgggctatatgaatcaggatgcgctggcgaaaaccgaagagaccggtaaagtgaccttttattcacggaccaaacagcgtctgtggaccaagggggaaacgtcgggcaatttcctcaacgtggtgagcatcaccccggattgcgataacgacaccctgctggcgctggtaaatccgattggcccaacctgccataaaggcacatcgagctgcttcggcgaaaccggccaccagtggctgtttctctaccagctggagcaactgttggccgaacgcaagcacgctgacccggagagctcttacaccgcgaagctgtacgctagcggcaccaagcgcattgcccagaaggtgggagaagaaggcgttgagaccgcgctggccgccacggtgcatgaccagttcgagctgaagaatgaagcgtcggatttgatgtatcacctgctggtgctgctgcaggatcaggggctgaatttaacggacgtgattaacaatcttaagagccgtcactga

SEQ ID NO: 1654 - protein, 198 aa, Klebsiella oxytoca
MLSEQLDWQKTDGLMPVIVQHAVSGEVLMLGYMNQDALAKTEETGKVTFYSRTKQRLWTKGETSGNFLNVVSITPDCDNDTLLALVNPIGPTCHKGTSSCFGETGHQWLFLYQLEQLLAERKHADPESSYTAKLYASGTKRIAQKVGEEGVETALAATVHDQFELKNEASDLMYHLLVLLQDQGLNLTDVINNLKSRH

SEQ ID NO: 1655 - DNA, 777 bp, Klebsiella oxytoca
atgctggcaaaacggataatcccctgtcttgacgttcgcgacggccaggtagtgaaaggcgtgcagttccgtaatcacgaaatcatcggcgatattgtcccgctggcaaaacgctatgccgacgaaggcgcggatgagctggtgttctacgatatcaccgcctcgagcgacggtcgcgtggtggataaaagctgggtatcgcgcgttgcggaagtgatcgacattcccttctgcgtcgccggcggcattaagtcgctggaagaggcggcgcaaatcctctcctttggcgcggataaaatctccatcaactcccctgccctggcggacccgacgctgattactcgcctggccgatcggttcggggtgcagtgtattgtcgtgggtatcgatacctggtttgacgccgaaagcgggaagtatcacgtcaatcaatataccggcgatgagagccgtacgcgggtgacgcagtgggaaacgctggactgggtgcaggaagtacaaaagcgcggggccggcgagatcgtcctcaatatgatgaatcaggacggcgtgcgtaatggctacgatctgcagcagttaagcaaggtacgcgccgtgtgccacgtgccgctgattgcatccggcggtgccgggactatggagcacttcctggaagccttccgcgacgccaacgtcgacggcgcgctggccgcctcggtgttccacaagcaaattatcaatattggtgaactaaaaacgtacctggcagcacagggcgtggagattagggtatgttaa

SEQ ID NO: 1656 - protein, 258 aa, Klebsiella oxytoca
MLAKRIIPCLDVRDGQVVKGVQFRNHEIIGDIVPLAKRYADEGADELVFYDITASSDGRVVDKSWVSRVAEVIDIPFCVAGGIKSLEEAAQILSFGADKISINSPALADPTLITRLADRFGVQCIVVGIDTWFDAESGKYHVNQYTGDESRTRVTQWETLDWVQEVQKRGAGEIVLNMMNQDGVRNGYDLQQLSKVRAVCHVPLIASGGAGTMEHFLEAFRDANVDGALAASVFHKQIINIGELKTYLAAQGVEIRVC

SEQ ID NO: 1657 - DNA, 738 bp, Enterobacter asburiae
atgatcattcctgctttagatttaattgacggtacggtcgtccgtctccatcagggcgattatggccagcagcgcgactacggtaacgatccgctgccgcgcctgcaatcctatgccgcgcaaggggccgaagtactgcatctcgtcgatctgaccggagcgaaagatccggcgaagcgccagatccccctgctgaaaacgctggttgccggcgtgaacgtgccggtgcaggtcggcggcggcgtgcgcacggaagaagacgtggccgccctgcttgacgcgggcgtggcgcgcgtggtggtgggctcgacggcggtgaagtcgccggaggtggtgaaaggctggtttaagcgttttggcccgcagcatctggtgctggcgctggacgtacggatcgatgcgcaaggcagcaagcaggtggccgttagcggctggcaggagaattccggcgtaaccctggaggagctggtggagagctatcagtccgtcggcctgcagcacgtgctatgtaccgatatttcccgcgacgggacgctggccgggtctaacgtctcgctgtatgaagaagtctgcgcccgctatccgcaggtggcgtttcagtcctccggcggcattggcgatctgcatgatatcgccgcgctgcgcggaacaggggtgcgcggggtgattgtcggccgggcgctgctggaaggtaaatttaacgtaacggaggccattcaatgctggcaaaacggataa

SEQ ID NO: 1658 - protein, 245 aa, Enterobacter asburiae
MIIPALDLIDGTVVRLHQGDYGQQRDYGNDPLPRLQSYAAQGAEVLHLVDLTGAKDPAKRQIPLLKTLVAGVNVPVQVGGGVRTEEDVAALLDAGVARVVVGSTAVKSPEVVKGWFKRFGPQHLVLALDVRIDAQGSKQVAVSGWQENSGVTLEELVESYQSVGLQHVLCTDISRDGTLAGSNVSLYEEVCARYPQVAFQSSGGIGDLHDIAALRGTGVRGVIVGRALLEGKFNVTEAIQCWQNG

SEQ ID NO: 1659 - DNA, 1233 bp, Klebsiella oxytoca
atgaatgaggcaataaaagctattgaatacgaaaccattaacactagaaactatacatccgtaaaattacttatattcattatcgcactttcttgtcaattaacagacattacgatcggccctgtgaagttttgggagcttctggcaataattttttttccattctttataaggcgtgttgagaaaaaaatgctatggtttttacttgcatttactattcttcttttgctatcaatattcaaaggtatgattagttcaattcattatgagtacttttctaccttgaaaagcaagtatagtatttctctggtgcgttacgtagaacttatattatgcttaatagtagcgttaataccgttcaatttgataaaaaataaaagattagactttgattatattgttaaaaagtttctcacttataatgtatttctcacgatcattatactccttctttatgccattgatattgtcttgaaaacttcactggtatcgtatggtagtacttttagattgagagggttttacgtcgaaggtggcccatatgggctttacatagcaactttgatttttctcgaactaacattttataaaagaaaaataattacaactttctttcttattgcactgttattaacgcagtctaaagctggctttgttgctttctttgtttttttattttttatacttttccaaaataatagatttttaagtggctttttgaatcccaagaatatatttcgtttttttatgacgattttaatagtagttttaattggggttggtgccacttataagattgctaacaattattatcaagatatacagaacattgatgaagaaattaagggcagagaaaatgattcatcattagtaatgggtaggattgctgccacggatattggtccaagaattttacaggataatccatttttaggtgtgggattaggtgcatattccttagtccgtaataatgtgaattatcgtggctcttttcctgtcgtgacaggatgggatctaactggattgggaggcttttttaatttattagtagaaaatggtgtaatcggtttattgatatttatttttgcaataaaaaaatattttaagttggacaaaataggaatatatttccttctgcttttttgtgtgccttttattttcggtgctcagctttatatgatttatccttggttgtatttagggttgtattatgcttttaagaagagtagttaa

SEQ ID NO: 1660 - protein, 410 aa, Klebsiella oxytoca
MNEAIKAIEYETINTRNYTSVKLLIFIIALSCQLTDITIGPVKFWELLAIIFFPFFIRRVEKKMLWFLLAFTILLLLSIFKGMISSIHYEYFSTLKSKYSISLVRYVELILCLIVALIPFNLIKNKRLDFDYIVKKFLTYNVFLTIIILLLYAIDIVLKTSLVSYGSTFRLRGFYVEGGPYGLYIATLIFLELTFYKRKIITTFFLIALLLTQSKAGFVAFFVFLFFILFQNNRFLSGFLNPKNIFRFFMTILIVVLIGVGATYKIANNYYQDIQNIDEEIKGRENDSSLVMGRIAATDIGPRILQDNPFLGVGLGAYSLVRNNVNYRGSFPVVTGWDLTGLGGFFNLLVENGVIGLLIFIFAIKKYFKLDKIGIYFLLLFCVPFIFGAQLYMIYPWLYLGLYYAFKKSS

SEQ ID NO: 1661 - DNA, 801 bp, Klebsiella oxytoca
atgttaacgtctgcactccttgtcgcgctggtgatgtatatcgccaagttcgcggatcacaccctgggacaaccgctcatcgaaaggccgctgatctgcggcgcgatggtaggactggtgctgggggattttcaacagggcattattatcggcgccacgctggaactcatttttctgggcactatcactatcggcggctccgttcccgcagatctggctgtgggttcagtcctggcgacggcctttaccattcttactcacgcggaaccagcggtggccgtcgcgctggcgctgcccatcagcctgctggcggttttcgtctatcaggtactaaagctggtttataccggactggttgaaaaatatgacgccttactggaagaaggccgcgaccgtgcggcgctgggtatcactttcggcatgaccctgttttacggcgtgccgtttgcggtactggcgttcttcggcattctgtttggcaccgacgtcattcgcagtctggtcgaaagtatcccggatacggtgatgcgtggaatgactgccgttggcggcattctcccggcgctgggcttcgcaattttgctcaaagcattatggaacaagaatatcgccgccttcttctttatcggttttgcgatggcggcctatctgcagctaccgattatgggcattgccattatcgcggcctcggtagcggtctatctgtgctttaacgaatttaatcagcttaaagccaataaacaggcggcaaccgctgccccagtgtcagttgatgataaggatgggtttttcaatgactga

SEQ ID NO: 1662 - protein, 266 aa, Klebsiella oxytoca
MLTSALLVALVMYIAKFADHTLGQPLIERPLICGAMVGLVLGDFQQGIIIGATLELIFLGTITIGGSVPADLAVGSVLATAFTILTHAEPAVAVALALPISLLAVFVYQVLKLVYTGLVEKYDALLEEGRDRAALGITFGMTLFYGVPFAVLAFFGILFGTDVIRSLVESIPDTVMRGMTAVGGILPALGFAILLKALWNKNIAAFFFIGFAMAAYLQLPIMGIAIIAASVAVYLCFNEFNQLKANKQAATAAPVSVDDKDGFFND

SEQ ID NO: 1663 - DNA, 270 bp, Klebsiella oxytoca
atgagaggcactcaatcgcgtgatgcagaggttttgtatcgtaaggcccaggagtatttcgatcgcatctcactaggtgaattgtcagaacaagaatcaaaagttcttgaggcattaatgcaggatgggggcattgtctgcgactcttcacgtgatgatgtcgttttgtcgttacaacgagagtaccttgccgctactactcgcgaggaaaagaatgttgtcattcagtctctgatatctgttctggcagaagatgtctctgaaaggtga

SEQ ID NO: 1664 - protein, 89 aa, Klebsiella oxytoca
MRGTQSRDAEVLYRKAQEYFDRISLGELSEQESKVLEALMQDGGIVCDSSRDDVVLSLQREYLAATTREEKNVVIQSLISVLAEDVSER

SEQ ID NO: 1665 - DNA, 180 bp, Klebsiella oxytoca
ttggaagagaatattcaaccaatggaccgcctttatcgcgatcagcacggcattgttgtgcatgtgactggctatgacgctggccgccagcgtgtgatttaccgccgcccgggatatgagtgggagtgtgtggctccgatgatcatcttccgcgccagattcaagaggattgataagtga

SEQ ID NO: 1666 - protein, 59 aa, Klebsiella oxytoca
MEENIQPMDRLYRDQHGIVVHVTGYDAGRQRVIYRRPGYEWECVAPMIIFRARFKRIDK

SEQ ID NO: 1667 - DNA, 195 bp, Klebsiella oxytoca
atgaccatgaaatctggatgggccaggcccatcaacgccagaaagcatcacttctttttagaggatgaagccaccagtatttgcggccgctggatgtattttggcacagaccgcgagccggatacgttcgaaagccctgatgactgcgccgcctgccgccgcaaggtaaataagaatttgggagtgaaagcatga

SEQ ID NO: 1668 - protein, 64 aa, Klebsiella oxytoca
MTMKSGWARPINARKHHFFLEDEATSICGRWMYFGTDREPDTFESPDDCAACRRKVNKNLGVKA

SEQ ID NO: 1669 - DNA, 405 bp, Klebsiella oxytoca
atggggcagatcaatacgatggctccgctcataaccggaggtggttttacccgtgacagcggtttccagcaccgtctgccaggcgccgccgtcggtctgcaggtcaatagcatacttgacggtattgcccaccacgtcgccgtcatcttcctgtttcatcagggacggccatttcagacgaacacgaacggcagaaagctgggtattagtaaaggtatgggtccaggctgtcttgctggaaacttccgttcctacactgatttcattttcagtaccgggaataccctgaatataagtctgagcctgcgtgccggggcgaaattcccaggacacgccactgaagttttgcgaaccatcagcattttcaagcggggtgccatcaagataaatatctttcccggttaa

SEQ ID NO: 1670 - protein, 134 aa, Klebsiella oxytoca
MGQINTMAPLITGGGFTRDSGFQHRLPGAAVGLQVNSILDGIAHHVAVIFLFHQGRPFQTNTNGRKLGISKGMGPGCLAGNFRSYTDFIFSTGNTLNISLSLRAGAKFPGHATEVLRTISIFKRGAIKINIFPG

SEQ ID NO: 1671 - DNA, 351 bp, Klebsiella oxytoca
gtgaaaattattttagcattgccgattattatcggggcattcattcttactggttgtaagtcaccgtcggaagtccgtcagagtggtccggaagaaatatttcattcgaataagaatgtgaatgatgtttctgagtgcattttatcaggctggcaggaaaaaagttttctaacaggacctgtcccggtatatattcagccttataaaaacggtaagactgtctatatagacgtatatacttgggttgcagatgtgattcctgaccaagatgggaaaagtaaagttatttacttctctcaaaatgccagaagaagcgctgaaatgaaatcggtgatcaaatcatgcatataa

SEQ ID NO: 1672 - protein, 116 aa, Klebsiella oxytoca
MKIILALPIIIGAFILTGCKSPSEVRQSGPEEIFHSNKNVNDVSECILSGWQEKSFLTGPVPVYIQPYKNGKTVYIDVYTWVADVIPDQDGKSKVIYFSQNARRSAEMKSVIKSCI

SEQ ID NO: 1673 - DNA, 1077 bp, Klebsiella oxytoca
atgcctgatcgctcaagtaatccgcccaatgcatatcaacaactcaataatcctggcgcagcaatcactcagctgaccagagacattgctgagaacaatgcaaacgcgacccagaagagtatttccagcattggtaccctggcctcaggacccgtattagagctttctgatagtgctcaggatgtgctgtatgctctttttttccgaggtgcactcgtatctggtgatattccttcaaaagccggcgcctccgcactgcgttctctgggatttgccgagaccggccatacagccacgccatacaaaggggaagactatttcacctggctgactcctgcggggtatgcgttcgctattgggtatctggttaaaactcgcttcggcaaacagcctgcaaatgcaaaatcttccgggcagccctcggttcatccggaaggattaagcattaacaaagccattattaaagggaagatcagtagcgcagcctatgtttgcggcaataccatcgaggaggaaacgctgtcgaaggttctggccaattcactgcataacgttccccatgagaaagctggcgatgttgctgaactactggccagggccgttaagtctgcgtttagtgcgctggggcatgcatccggtgaacaggaaaaggaacggcctaaagaatcggacttatccgtcggtactttcaaagtttatagcgagggagaggtgaaggtggcttcaggctctcccttagctgctgaaatagaagccgggcgtgaagatcgcaaaacagcagggaccattaatttaaaactggagctggatacctctgatgccatcgaaagcattaatgggctgagcaaagaaatttcagatcttgttgatactgcaattgccaactcgctcaaaccgggtggacgtctgtacaacgtcgtgcgggaatcttcgtttaacagctcgaatactaccgcccttaactcccgtgtgactgatcttgaatcttgtctcaacagcgcatgtgttttgattagtgatttgtcttgccgtatttcagaacgtatcactggtgacgtacatgccagcccggtctaa

SEQ ID NO: 1674 - protein, 358 aa, Klebsiella oxytoca
MPDRSSNPPNAYQQLNNPGAAITQLTRDIAENNANATQKSISSIGTLASGPVLELSDSAQDVLYALFFRGALVSGDIPSKAGASALRSLGFAETGHTATPYKGEDYFTWLTPAGYAFAIGYLVKTRFGKQPANAKSSGQPSVHPEGLSINKAIIKGKISSAAYVCGNTIEEETLSKVLANSLHNVPHEKAGDVAELLARAVKSAFSALGHASGEQEKERPKESDLSVGTFKVYSEGEVKVASGSPLAAEIEAGREDRKTAGTINLKLELDTSDAIESINGLSKEISDLVDTAIANSLKPGGRLYNVVRESSFNSSNTTALNSRVTDLESCLNSACVLISDLSCRISERITGDVHASPV

SEQ ID NO: 1675 - DNA, 12192 bp, Klebsiella oxytoca
atggcaaataacataattaaagggcgcaagggtggcggctcaaagcagcgtacaccgacggaacagccggatgatttgcagtccgttgcgaaagccaaaattctgctcgcattaggtgagggtgaatttgcaggtggtttaaccgggaaagatatttatcttgatggcaccccgcttgaaaatgctgatggttcgcaaaacttcagtggcgtgtcctgggaatttcgccccggcacgcaggctcagacttatattcagggtattcccggtactgaaaatgaaatcagtgtaggaacggaagtttccagcaagacagcctggacccatacctttactaatacccagctttctgccgttcgtgttcgtctgaaatggccgtccctgatgaaacaggaagatgacggcgacgtggtgggcaataccgtcaagtatgctattgacctgcagaccgacggcggcgcctggcagacggtgctggaaaccgctgtcacgggtaaaaccacctccggttatgagcggagccatcgtattgatctgccccatgccggcagtacctggacgctacgcctgcgtaaaatctctccggatgcaaacagtgtcaaaactggcgacgtgatgacgctgcagagctataccgaagtgattgacgcgaagctgcgttatcccaacaccgcgctgctttatatcgagttcgactccagccagtttaatggctccattccgcaaatttcctgtgagccgcgtgggcgcgtgattcgtgtgccggataactacaatccggaaacccgcgaatataccggggtctggaccggcgggtttaaatgggcctggacggataacccggcctggatctattacgacattgttacagctgaccgttttggtctcggtaatcgtctgagcagcgccaatatttcgaaatggacgctgtaccagattgcacagtactgcgatcagctggttcctgacgggcgtggtggtgacggcatggagccgcgctatacctgtaacgtctatgttcaggaacgcaacgatgcttacaccgtgctgcgagactttgccgccattttccggggcatgacctgctggaacggtgagcagattgttgtgcaggctgatatgccgcgtgatgtcgattttacctatacgcgcgccaatattgtcggcaaaccccgttattcgagcagcagcagccaggttcggtacaccaacgccctggtttcctggtctgatccggataatgcttatgctgatgcgatggagccggcgtttatcccggaactggtttcccgctacagttttaaccagctcgaattgaccgcgattggctgtacgcgccagagcgaagcccaccgtaaggggctgtggggcatactgaccaacaacaaagaccgggtcgttgagtttgatgtggggctggacggtcgcattcctcaacccggttatatcattgccctggcggatgagttgctggccggacgggtcaacggcgggcgaatcagcgcggtgaatggccgggtgattactctggatcgtgatgtggatgccaaacctggcgaccgtctccagctaaacctgccatccggtatctcacagagccggaccattcaggctgttaacggacgccggcagattacggtcacaacggcgtacagtgagacaccagaacgggaatgcgtctgggccgttgaatccgatgacctcttcctgcagcagtaccgggttacaggggtaaaagagaacagcgatgccaccctcacgatcaccggcgtggcacatgacccggataaattcgcccgcatcgataccggcgctattatcgaccagcgcccggttagcgtattgccggcgggcaaccagtcacctcctgacgatattgtcatcacatcccgctcggtcgtgaatcaggggatcagcgtcgaaacgatgcaggttaactggtcagctgtcagcggcgctattgcctacgaggcacagtggcgccgtaacgacgggaactggattaatgtgccgcgcagctcgaccacctcgtttgaggtcagcggcatttatgccggtcgttatctggttcgcgtccgcgcgataaatgcggcggagatctcgagcggctgggcgtattccgaagagaaaaccctgaccggcaaggtcggcgagccgctggcaccgctggcgctggcaacccgttcgctggttcatggagtccaggttagctgggagtttccgaccggctccggggatacgctgcgcacggaactgcagtacagcaaaaaccaggacggcagtgcgccaatgccgttatcagacgtggcctatccggggaaaagctatcagcagatgggcctcagtatgggcgcagaattctggtatcgggcgcgccttgtggatcgtcttggcaatgaaagcccgtggaccggctgggtccaggggatggccagcgataactttgatgactactacgaaaacctgaccgacgcgatcaaggatacggctgcctgggaggaaacgcagcgcaccattagcgaaacacaggaaggtatccgcaatacgcagcaggaactggagcagaccgctgaagctctgcgtaaggaagccgaagaccaggcgaagcaggtcagccaggatattgatgcatcggcgaaaagcatcacggctgatgttgacgggaagatctccgccgtgaataaaactatcacggatgagatcacctcggtcaatgaagctctcgattctggtctggctcaggcaaacaaaggcgttcaggaggcaaaatccgccgtcgcagatgcgaacaagcagatcgcaactgtgaacaagtcgctgaccgacagcatcacccaggtcagacagtcagtcactgatacggctgcagaaatcaacgccaccatcgacctggagattgccagggtcagcaaaacgctggccgacggcgatgccgcattgaatgcgcagataaagactgccgaaaatggcctgaagcagtcgctgtctcaggttaacaccacgctgaccaatgcagtgaagcaggagaccgcggatcgtatcgccgatgttaacgcgaaggcggcacaggccgctgatgaactgctggcggcaacgcaggggattgaggctagtatcgagagcctgactcaggtgatgaagactgccgatgagaatctggcgcgggaaatgtccagcctcgctgccggcgctaatatccagttcgattcgcaggttatctggcatttcaacaatcagacgaccgagggctggaccggcagcgccggcgtaccgggtgtgtcccaggatggctggttacgcccggcggacagtgccaccgatccgtacattacctctcctggcggactggctgtcgatggtgcggcgtaccgcttcatcatgctgcgctttcgtaaaaccggtaaaccagtctgggcgggtgagatccgctgggtgtctgccggcgaaaacttcaataacacgaagcgatacattgttgctgagccggaatatgccgatggggtggcaaccctgacggtgcgtgatattccgtggacagggaacattgatcgtattcgcctggacctgacgaaccagcaggatgccagcaactttatcgaattcgactggatcgccgttggccggccagcacccggcgccagtacggcggctctgcaggatgtgcgcagtacgctgagtaacgcgctgaccgccgaagcacaggcacgcagcacgctggcggcgcagatgcgtggctcctatgatgggagcgatctggagaaagtcacctccgggctgctgtaccaggaaaaaaccgcacgcgttaccgccatctcggcggaagttaaggccagagagtccctgcagacgcagtttaacgacaacaaagctgctgtttctggtgaactgagttctctgacgacagagcagcgcgcgcaggcgagccgtatcggtggcctggaaaccagcctcgggaaaaaagccgatgcagccgcgctgacgtccctgacgcagaaagttgagcaacagggtgccacgctgacatcgcagggcgccgcgttaacatcactcactaaccgggtgggccagacggaaacgggcctggctggtacgaatgaggcgttgagcgggctggagtctacggttacccagcagggcgacaggataaccagccagggtcagtccatcacgaaactgacgagcgatttgggcacgacaaatgccgcgctggcgaagaaagccgaagcggctgcggtcactgccttaacgcagcaggtagagcaaaacggccaggatattcgaagcaatactgacagcatcaccagtctgtcgaatcagctggtcaatggccagccgaatagctggtcccgtcggatctatcctgtgcagctggctaatgccgggacagtcccgtcattcagcgatattcgcgccgtggcgcccgtggtcgtggatgaggtgtccgacgcggccaaactggactttacatccgctggcagctatctgatcgcgctgtattcctgccaggtgaaagtggccgccgataccaccatcacaatggcgcccggtaacaggatttttgatgataccggcgccatatttgtgaatggcgttcaggttgcctgggggaatgccagctggactaccggcagttttgaactgaaagttggctggaataccgttgagtttctggtgaatcagtggaccggccaggcgtatatcaacctgggcctgaagctgtcagacaaggttgctgagatgtactccggtctcggtgtttccgcgctggcaaacgcagccggcgtactcagctcgaatgtcagccagattggcaatgatgtggtcagcaattcgcagagcatcacccagctccggaatgcgctgacgcagacagacgcgaatgtggccagcaaagcggatcagacggcgatgaactcgctaaccggacgcgtggagaagactgagtccggtctgacggcggcgaacagcaacattacgtcgctcagcagctctctgagccagcaatccaaacgcggcgctaatctgcttcctgatggcacttttgaaagctacgcggttggccacaatctggcgaataaccgtgccatcgtgaccactgacgactcgcatggcggcaataaatgcattcgtgtgacgcgtccgaatgactacactaattatatagataacagtgacaaccacatcttcagcggcttccaggttcgcgacaacgcggtattctatgttgagtgctgggttaagctggacgccaagagcacgacgatggatggatcggtgcagattgcggtcggcatgtcgtttcagtatcaggataactcctggcagtggccggcactcattaagtcggcaaaagatctgtccgcagacacctggacgaaagtcagtggctatctgaagagcagcaagagcggtattaagcaggcaatggtgaggatttctattcctaacgttagcagcgttaaggcgggtaactcattcctcattgatgacctggtcattaccgaagtgactgatgcctacaatgcgcaaagtacagcagacgctaatgccaatgcgatttcgacactggactcgaccgtctcccaacagggtgaccagatcaccagtcagggtaacagcatcaccaaactgacaaatgacctggcaacgaccaataacaacgtcagtaaaaaagcggatcagagcgctttaagcgtgttgtccgggcgcgtcgatcaaacagaatcgggcttatcctctgcgaatagcagtatcactgcgcttaattcatctgtacgcgcagggaatgcgacaagtggcgatttgattagcaacccgacatttgacccagagtttagtcagatgggcttcactgtggtttccagctcgtctgagggcgtgccagccaattgcccatacgcttatgttgcacgcattgcggctcgcgaccatcaccccaattttgctgctattccggcgacattgggggatgtctatgaaatgtctgctctcgtcgcgtgtggtaccggctccgctgatttcaacctgtatctcggaaccgcaacaaggccaagcggcagcgtgggcgcgcctctgtcatccggcggcaaccgcaaggcgtcggccacatggcagcgagtaacctggcgattcaaaattactcaggggattgtcgatcgcggcttcttccgtccattcctgcaaattaaccagtccagcccattcggcaccgtatggttcgttacggactggcatatgcgaaatgtgacagcggcgcaaaaggttcaggatactgcggatgccacggcggcggcggttgactccctgaccaccaccgtgactcaacagggtaatctgctgacctcgaccggcaaccggacaacccagctggaaaacgggctggcaaccaccaatgccgcagtggccaaaaaggctgatgcgacagcggtgcagaatttgaccaataccgtcacacagctgggcaatgacctgacggctgcgaacagcgccatcacgaagctgaccggaaatctggcgaataccgataaagcgctggcgcagaaagccgatgcgactgcgctggccacgctcggcacgaaagtgacgcagcagggcaaaacgctggagagccagagcaattcgctgacgaacctgtcgaacagcctctcgcaggtcgcggcagatatcgatgccagcgggcagataccgggtaacctggtcgtgaatccctcgtttgaacgcgggctggatggttacaccgggcggtcaaccgcgaccagtgtggtggaggtttccgttcctcatagcgggacgcgggcgctgaaggttgatccggggaatgtgactccggggcaatacatcccgtttgttcaggggcgaacctatgaaatcggggtatgggttaaggatctcggagcgaccactgataacggagcaggtaacaacaagctgcggatcggcaactccgctggtcagccggtgtttgagcgaccgtacaatagcgggacgatcggttccgactggacgctgatttccggtcgctggaaggccacggagacagccaagctcccggttacgctgagtaacggtttgacagccgggagtcgttgctttgatgatttctatgtcatcgatgtgacagatagtgtcaaaatcgacgccaacgcctccgcattgtcttctctccagaatactgtaacccagcagggtaaagatattgcgtcgcagtccaccagcattacggatctgaaaaacaatctggacacgaccaacgcgaacgtcgcgaaaaaagcggacgccgcagctctccagacactgcaaaatacggttacccagcagggcaaagacattgcttcagcctcaagcagcattacaagcctgcagaacaacctgagcaccaccaatgccaacgttgcaaagaaagctgatgcgacggcgctgaacgctctccagaacaccgtgacgcagcagggtagctccatttcgtctcagggtaacagtatcacccagcttaaaaacgacgttgatagcttgtatattggcgcgagcaaccttcttcgtaactccgataagagcggcgccccggctctgtgtctgtctccgacttccggcttcaccagttatgagctgaaagcgattacgggtctggttggtaaaaatatcgctgttaaaactcagtacacgatgactctttggtttaaagagtacgcggatggcttcggaacaactaagccgttcacttctgcagtcatcggtcgttccgctgtcgggactgactcatggtctctgcgatactattcgcagaacggcatcgttacgcgtgatggtgacttgtacaaatgggttggaacaattacagctgaatctggttcgacgcttttcgtaggcgttgccggattgcgattcctgtttgaagataagtcccagaagaccggttgtcagatctaccaggtgaaactggaagaagggaataagggcacctcgtggtcgccggcttccgaggatctgtctgacgcgatttctggcaatagtcaggcgctgagtagtcttgatagccgtgtgactaaagccgaaggctcaatcacgtctcaaggcaacagcatcacccagcttcagaatgagctgaccgcgacgaatgctaacgttagcaagaaggcggatgcctctgcactggcctcgctgcagaacacagtgactcagcagggcaaggatataacgtcggtgtccagcgatatttctttactgaagaatagtctggcgacaactgatgcaaacgttgctaaaaaagcggactcttctacgctgtcttcgttacagagtacggtgacgcagcagggcaaagatttgagcagcgttggtaatcgcacaacgaacctggaaaacaatctcaagaccacagacgcgaacgtctcgaagaaggcagacgcatctgcggtggattccctccagaatactgtaacccagcagggtaaagatattgcgtcgcagtccaccagcattacggatctgaaaaacaatctggacacgaccaacgcgaacgtcgcgaaaaaagcggacgccgcagctctccagacactgcaaaatacggttacccagcagggcaaagacattgcttcagcctcaagcagcattacaagcctgcagaacaacctgaacacgacaaacagtaatgtcagtaaaaaggctgactcaactgcgctgaacgctctccagaacaccgtgacttctcagggcgacgctctgacgagccagggtaatcgcgtaacgtcgttagaaaatactttaacggtgggcgacaacattgttccaaactccgcaatgttgaataacgctcagggttggggtggtcatgcaacaactgttgacggttatccggctgtgatcgatacagcagcatgggcgccaacttcacctaagttttccgtaacacctggcgacattctagactttagtcttctttgtctggctggtgccgcaatcaacggtctggcatggggtattcgcttcgatggcccgagcctgacgaacaactcggtctacgtggaggcgttaaattatgcagctggcgagaagaaagccgtaactggaaccatcactgtcccggctggcgcgacaactggctatctccaaccttatagcagaaacgccattacgctcacgatctataacattaaggtgacccgcagaaatgccggtactatcgcgaacgccaaggcgatcgctgatctcactaacgaagtgactcagcagggcaaggatataacgtcggcgtccagcaatatttctttactgaagaatagtctggcgacaactgatgcaaacgttgctaaaaaagcggactcttctgcgctgtcttcgttacagagtacggtgaatcagcagggcacttccataagctctatcggtaatcgcaccacatcgctggaaaacgggctgtcgacagctcagaacaacattgccaggaaggctgatgcttctgcattgcaggatctccggaacacggtgacatctcaggggggcgatttaactgcggcgaacagtagcattaccagcctgcaggcctcgatgaaccgtcgcactgtgtttactgtcactgcacgggggattggcaacagcgtaactcctggggtttttgatgaaagcggcaaaaacctgtttacccctggtcgcagctgggcgctggtcacttttgcaaaacaaagcgacggatcagcggtgattgcgacctccaaaacatacgatgtctttggcagcgcgaataatggcgacacgatgtcggctgatatcggggcgttgactagtggcacttacgtttgcgtcctgacattcgatgagccatctggcaaccgaggtaagatattgtctgctctggaatctcttggtggtacatccgaagtcgtcaactccctgccgtatcgtggtgcctatattctccttggccgcaaaggcatgaggtcgggcgatggtctggaactgcgtgcgccaaccggtggagatgccaccgctcacatttcgacctcagtcgaatttgtgaacgggataatgatggggctgggtgcagccggcggtgtgatgatgaaggctgatgcgaacgcgtcggcaattaccacgctccagaacacagtgaagacccaggggggtaatattgactccctgagttcctcgataacggcgctggagaacagcctcaggtcgacaaacgatacggtgagtaaaaaggctgacacgactgcagtgagttcactgactggtcgcgtaagccaggtggaaaacactatcaccagccagtcgcagagtatcacgtcgctgaccagcagcatcaataccatcagtactcagggagctaatccgtgggttgacggtacgttcgaaagctacggagatggtcatgtgctgggcgggggcggcaccgccgttgtggtggcgtctcagaaattcaccggcaataagagcctgcaggtgagtcgaggagcgaacgacaacggcaacagcgataaacagcttgggagctggcagtcagtccgtgaggatgcgaagttccggtttgagttctgggctatgatgccggcggatcaggcgccctcctccgggtggacaacgctggtcggtatccagtcgcagaatgctgccgggcaaaatgcgtggcaggcggcggtcactgtcagcgaagcctctctgggcgcgcgcgataagtgggtgaaattcacgggtatcgccagtaacaacggggcaggcagaacacgcgcggtggtctggatctccactcgtggcgccaccggcaacggtacccctggctattcactgtatatcgacgatctggtcatcacggatgttaccgatgcgaaagcggcacaggatgcctctgacgcgacggcgagcgccgtgagcggcctgacggcgcgcgtaacggatgccgaagggaaaatcactgcccaggcgcagcagcagacagcactggcctcgaaagtggataacgccaactcccgcgtcgataacatggcgaagacgctgagcgacagccagagcacacaggccagcctgaatacctcgcttcagtcgcagattgacgcgcaggcggccgccaacatcaaaaaccagacgacgctggacaacacgattaaatcggtggccagtatcaccagtacccagcagacgcatgcaacggcactggaggcgctggcaacgcagcagacgaccctgacatccagtgtcggggatctcagcgcttccgttcagaacaccgccaaaaccgtggcggatgtgaatggtacggtgagttcgctgtggtcgatgaaggttgagacggttaacgggaagaatgttggcgcggggattacgctgggcagcaatggtgaaacaagcgatatgatcctctacgctgaccgcttctcgctgtttaaccgtaataatgcgacggctgttccggtgatggttgccgaaggcaatgagctgtatatcgatacggcacgtatcaaaaacagttccctgacctcaaccaaaatcgcggacggttccatcacgaacgcgaagatcggccacgagatccgctcgaatgactttgttgacgggtcacgcggctggcgtatcgctaaggatggctcttcgcagttcaacaacgtgatcgttcgcggtgcggtttatgcgactgacggctggttccagggtacggtatatgcgaaccacatcgagggcgacatcgggtcatttgcgatcaacatcgctcagcaccgcacgcgcaaggtgccgaaggctacatggcagtggtttgagctggcccggttccggcggcagaatttcgaccaggtgatcaatattcgcggtggactcctccagacggatagcatcactatcgacggcggcgcgaaactcagagcggggatgtcctacgcgccaggggctgacggcggactgaatcctggctatctgtcgtatgcaatgcttcttcgtggcacaggcgctacgtctggtggcggcagtatggagctaggcattgagcttatgtatgaaacaggtggagcaacacgcctgctgacggcacaaggggagatgaacgtcgacaatatgtcgtttgttgttccagctggcagtggggatgcagttcttcgttatggttgttatcttgaccgtaacggacagatggtattaaccatcctctcaagattcgacgccttcgccgcgcgcaataacaacgtaattcgcggttcatcaacctga

SEQ ID NO: 1676 - protein, 4063 aa, Klebsiella oxytoca
MANNIIKGRKGGGSKQRTPTEQPDDLQSVAKAKILLALGEGEFAGGLTGKDIYLDGTPLENADGSQNFSGVSWEFRPGTQAQTYIQGIPGTENEISVGTEVSSKTAWTHTFTNTQLSAVRVRLKWPSLMKQEDDGDVVGNTVKYAIDLQTDGGAWQTVLETAVTGKTTSGYERSHRIDLPHAGSTWTLRLRKISPDANSVKTGDVMTLQSYTEVIDAKLRYPNTALLYIEFDSSQFNGSIPQISCEPRGRVIRVPDNYNPETREYTGVWTGGFKWAWTDNPAWIYYDIVTADRFGLGNRLSSANISKWTLYQIAQYCDQLVPDGRGGDGMEPRYTCNVYVQERNDAYTVLRDFAAIFRGMTCWNGEQIVVQADMPRDVDFTYTRANIVGKPRYSSSSSQVRYTNALVSWSDPDNAYADAMEPAFIPELVSRYSFNQLELTAIGCTRQSEAHRKGLWGILTNNKDRVVEFDVGLDGRIPQPGYIIALADELLAGRVNGGRISAVNGRVITLDRDVDAKPGDRLQLNLPSGISQSRTIQAVNGRRQITVTTAYSETPERECVWAVESDDLFLQQYRVTGVKENSDATLTITGVAHDPDKFARIDTGAIIDQRPVSVLPAGNQSPPDDIVITSRSVVNQGISVETMQVNWSAVSGAIAYEAQWRRNDGNWINVPRSSTTSFEVSGIYAGRYLVRVRAINAAEISSGWAYSEEKTLTGKVGEPLAPLALATRSLVHGVQVSWEFPTGSGDTLRTELQYSKNQDGSAPMPLSDVAYPGKSYQQMGLSMGAEFWYRARLVDRLGNESPWTGWVQGMASDNFDDYYENLTDAIKDTAAWEETQRTISETQEGIRNTQQELEQTAEALRKEAEDQAKQVSQDIDASAKSITADVDGKISAVNKTITDEITSVNEALDSGLAQANKGVQEAKSAVADANKQIATVNKSLTDSITQVRQSVTDTAAEINATIDLEIARVSKTLADGDAALNAQIKTAENGLKQSLSQVNTTLTNAVKQETADRIADVNAKAAQAADELLAATQGIEASIESLTQVMKTADENLAREMSSLAAGANIQFDSQVIWHFNNQTTEGWTGSAGVPGVSQDGWLRPADSATDPYITSPGGLAVDGAAYRFIMLRFRKTGKPVWAGEIRWVSAGENFNNTKRYIVAEPEYADGVATLTVRDIPWTGNIDRIRLDLTNQQDASNFIEFDWIAVGRPAPGASTAALQDVRSTLSNALTAEAQARSTLAAQMRGSYDGSDLEKVTSGLLYQEKTARVTAISAEVKARESLQTQFNDNKAAVSGELSSLTTEQRAQASRIGGLETSLGKKADAAALTSLTQKVEQQGATLTSQGAALTSLTNRVGQTETGLAGTNEALSGLESTVTQQGDRITSQGQSITKLTSDLGTTNAALAKKAEAAAVTALTQQVEQNGQDIRSNTDSITSLSNQLVNGQPNSWSRRIYPVQLANAGTVPSFSDIRAVAPVVVDEVSDAAKLDFTSAGSYLIALYSCQVKVAADTTITMAPGNRIFDDTGAIFVNGVQVAWGNASWTTGSFELKVGWNTVEFLVNQWTGQAYINLGLKLSDKVAEMYSGLGVSALANAAGVLSSNVSQIGNDVVSNSQSITQLRNALTQTDANVASKADQTAMNSLTGRVEKTESGLTAANSNITSLSSSLSQQSKRGANLLPDGTFESYAVGHNLANNRAIVTTDDSHGGNKCIRVTRPNDYTNYIDNSDNHIFSGFQVRDNAVFYVECWVKLDAKSTTMDGSVQIAVGMSFQYQDNSWQWPALIKSAKDLSADTWTKVSGYLKSSKSGIKQAMVRISIPNVSSVKAGNSFLIDDLVITEVTDAYNAQSTADANANAISTLDSTVSQQGDQITSQGNSITKLTNDLATTNNNVSKKADQSALSVLSGRVDQTESGLSSANSSITALNSSVRAGNATSGDLISNPTFDPEFSQMGFTVVSSSSEGVPANCPYAYVARIAARDHHPNFAAIPATLGDVYEMSALVACGTGSADFNLYLGTATRPSGSVGAPLSSGGNRKASATWQRVTWRFKITQGIVDRGFFRPFLQINQSSPFGTVWFVTDWHMRNVTAAQKVQDTADATAAAVDSLTTTVTQQGNLLTSTGNRTTQLENGLATTNAAVAKKADATAVQNLTNTVTQLGNDLTAANSAITKLTGNLANTDKALAQKADATALATLGTKVTQQGKTLESQSNSLTNLSNSLSQVAADIDASGQIPGNLVVNPSFERGLDGYTGRSTATSVVEVSVPHSGTRALKVDPGNVTPGQYIPFVQGRTYEIGVWVKDLGATTDNGAGNNKLRIGNSAGQPVFERPYNSGTIGSDWTLISGRWKATETAKLPVTLSNGLTAGSRCFDDFYVIDVTDSVKIDANASALSSLQNTVTQQGKDIASQSTSITDLKNNLDTTNANVAKKADAAALQTLQNTVTQQGKDIASASSSITSLQNNLSTTNANVAKKADATALNALQNTVTQQGSSISSQGNSITQLKNDVDSLYIGASNLLRNSDKSGAPALCLSPTSGFTSYELKAITGLVGKNIAVKTQYTMTLWFKEYADGFGTTKPFTSAVIGRSAVGTDSWSLRYYSQNGIVTRDGDLYKWVGTITAESGSTLFVGVAGLRFLFEDKSQKTGCQIYQVKLEEGNKGTSWSPASEDLSDAISGNSQALSSLDSRVTKAEGSITSQGNSITQLQNELTATNANVSKKADASALASLQNTVTQQGKDITSVSSDISLLKNSLATTDANVAKKADSSTLSSLQSTVTQQGKDLSSVGNRTTNLENNLKTTDANVSKKADASAVDSLQNTVTQQGKDIASQSTSITDLKNNLDTTNANVAKKADAAALQTLQNTVTQQGKDIASASSSITSLQNNLNTTNSNVSKKADSTALNALQNTVTSQGDALTSQGNRVTSLENTLTVGDNIVPNSAMLNNAQGWGGHATTVDGYPAVIDTAAWAPTSPKFSVTPGDILDFSLLCLAGAAINGLAWGIRFDGPSLTNNSVYVEALNYAAGEKKAVTGTITVPAGATTGYLQPYSRNAITLTIYNIKVTRRNAGTIANAKAIADLTNEVTQQGKDITSASSNISLLKNSLATTDANVAKKADSSALSSLQSTVNQQGTSISSIGNRTTSLENGLSTAQNNIARKADASALQDLRNTVTSQGGDLTAANSSITSLQASMNRRTVFTVTARGIGNSVTPGVFDESGKNLFTPGRSWALVTFAKQSDGSAVIATSKTYDVFGSANNGDTMSADIGALTSGTYVCVLTFDEPSGNRGKILSALESLGGTSEVVNSLPYRGAYILLGRKGMRSGDGLELRAPTGGDATAHISTSVEFVNGIMMGLGAAGGVMMKADANASAITTLQNTVKTQGGNIDSLSSSITALENSLRSTNDTVSKKADTTAVSSLTGRVSQVENTITSQSQSITSLTSSINTISTQGANPWVDGTFESYGDGHVLGGGGTAVVVASQKFTGNKSLQVSRGANDNGNSDKQLGSWQSVREDAKFRFEFWAMMPADQAPSSGWTTLVGIQSQNAAGQNAWQAAVTVSEASLGARDKWVKFTGIASNNGAGRTRAVVWISTRGATGNGTPGYSLYIDDLVITDVTDAKAAQDASDATASAVSGLTARVTDAEGKITAQAQQQTALASKVDNANSRVDNMAKTLSDSQSTQASLNTSLQSQIDAQAAANIKNQTTLDNTIKSVASITSTQQTHATALEALATQQTTLTSSVGDLSASVQNTAKTVADVNGTVSSLWSMKVETVNGKNVGAGITLGSNGETSDMILYADRFSLFNRNNATAVPVMVAEGNELYIDTARIKNSSLTSTKIADGSITNAKIGHEIRSNDFVDGSRGWRIAKDGSSQFNNVIVRGAVYATDGWFQGTVYANHIEGDIGSFAINIAQHRTRKVPKATWQWFELARFRRQNFDQVINIRGGLLQTDSITIDGGAKLRAGMSYAPGADGGLNPGYLSYAMLLRGTGATSGGGSMELGIELMYETGGATRLLTAQGEMNVDNMSFVVPAGSGDAVLRYGCYLDRNGQMVLTILSRFDAFAARNNNVIRGSST

SEQ ID NO: 1677 - DNA, 387 bp, Klebsiella oxytoca
atgctgaatattgataaatatctggctgtccgctggcagatgggcgggcgggttttccctgttctcgactgctacggcattgtgcatgaggtccgccgggacctcgggctgcctgaatggcccgcgtttgaggctgtgattaaagagcgtggcagctctgaaatggggaatgtctgcgagagtttttcgcatgacctgactccatgcgggccctgcaacggagcggtagccgcctgctatatgggaggagtaatcggtcatctcggcgtcgtggtggagctgggcggccttctgtatgtgatggagtgcaatccccgccgtaacgtgacgatcctgccgttgacgcgctttgagaagcagtatctgaaagtggagtattaccagtga

SEQ ID NO: 1678 - protein, 128 aa, Klebsiella oxytoca
MLNIDKYLAVRWQMGGRVFPVLDCYGIVHEVRRDLGLPEWPAFEAVIKERGSSEMGNVCESFSHDLTPCGPCNGAVAACYMGGVIGHLGVVVELGGLLYVMECNPRRNVTILPLTRFEKQYLKVEYYQ

SEQ ID NO: 1679 - DNA, 672 bp, Klebsiella oxytoca
atgctaaaaattagtgatgtagaatctacggctctggatggccttttcactgatggaaaaatatcaggtggcatccctcctacaaggttggttgcagcatggttcaatgcaattcaaacagaacttgtaaatgttgtcgaaggggcaggaattgaattagaccccgaaaactcagcgcaggtattagaggccttaaataaattattcactattagcgactatcttaaaaagtcactgaacctcagtgaccttggcgataaatccacggcaagggctaatcttggtctgggtgaatctgctacacgagcggtagggaatacagcgggtacggtggctgcgggggacgattctcgcattactggcgcaatgcagaaaggccaaaacctgaatgatctgcctgataaggttgcggctcgatctaatctcggcctgggcgcaatggctaccagagacaaccctccgtttattgatgaaatcggggcctgtgcactggcctggtacgacggtgcggtgaattataccgacactgtaaacggtggcgctcttttcccgtcaactgccgatggtggtcatgcaaccgtcgcattatccgggacctggcgctgcctggggcaaacagaaaccatcaacgaccagcaccgaacgactttatggcaaaaaatcgcaaactga

SEQ ID NO: 1680 - protein, 223 aa, Klebsiella oxytoca
MLKISDVESTALDGLFTDGKISGGIPPTRLVAAWFNAIQTELVNVVEGAGIELDPENSAQVLEALNKLFTISDYLKKSLNLSDLGDKSTARANLGLGESATRAVGNTAGTVAAGDDSRITGAMQKGQNLNDLPDKVAARSNLGLGAMATRDNPPFIDEIGACALAWYDGAVNYTDTVNGGALFPSTADGGHATVALSGTWRCLGQTETINDQHRTTLWQKIAN

SEQ ID NO: 1681 - DNA, 336 bp, Klebsiella oxytoca
atgttgatgtacgaagagaactattccccgcaggatgtgatcgcctatcgagacgatgaggtgttttcccataaaacccgcactttcgccacgctggcaattgatgttgtgcctggcacactgcttacctcagaaggtgaagcatactccagtggtagcgatgttctgatcgcgctggatgaccaaaaggctggcactaatgttccggtgattgttgtagaccgaggctgcatcttaaagcgcaatggtctgaaagcggttacccctgctgcgctggcgaacgccatcactgctatcgaaacagacggtaaaaaccgtgtttctatttctgaataa

SEQ ID NO: 1682 - protein, 111 aa, Klebsiella oxytoca
MLMYEENYSPQDVIAYRDDEVFSHKTRTFATLAIDVVPGTLLTSEGEAYSSGSDVLIALDDQKAGTNVPVIVVDRGCILKRNGLKAVTPAALANAITAIETDGKNRVSISE

SEQ ID NO: 1683 - DNA, 834 bp, Klebsiella oxytoca
atgacaaccgagacagtagaaactaatcagccagacgaacaggacggcacttttgatcgcaattacaccgaggttaagcgcctgaaagtcttgattgccgacgatggaaccaaaatcccgttcagcgcgaacatgaaagtagtctatgcatacctctacaccttccagacgaacaaagaccgcagaaactaccctgagccaatccatcccaatatggaaataatcgcgtgggaaaatggcattactaaacccacggcgcaaaaggctgtggatgatttaatgcgggcgggggtgttgattaaggaccaaattcaggttgggagcgggtttaagtccaacaattacgttgtgttgaaaccctcgaaagtggtggcgcgtggcgtcactccaccgcatccaaatgcttctaaatattcaactgccgaggagagcggtaagaatgaacaaaaacgtgctgtggaatctttcgtgctggaatctgccgcgcctattgctggaaaacccgacggcgtacctcctgtgggtgttcctgtcgatgttgatttatccggttgtgatgatccatcactgagtgatttggtagagccagactcgttaaggggtactgatgcgatgaaggctgaacaggccgcgtacaccagcgaacaattacacaccaagctgaggaaatggcgcaattgggggctagatgatgaggcgcgggcattctgtttgtcacagggtgtaaatgatgatactgacagtatggctctgtttatccaacgttatcagatgcctgtattacatcagatacccggagagatccctcaatgggatgaaaaaatacctttctga

SEQ ID NO: 1684 - protein, 277 aa, Klebsiella oxytoca
MTTETVETNQPDEQDGTFDRNYTEVKRLKVLIADDGTKIPFSANMKVVYAYLYTFQTNKDRRNYPEPIHPNMEIIAWENGITKPTAQKAVDDLMRAGVLIKDQIQVGSGFKSNNYVVLKPSKVVARGVTPPHPNASKYSTAEESGKNEQKRAVESFVLESAAPIAGKPDGVPPVGVPVDVDLSGCDDPSLSDLVEPDSLRGTDAMKAEQAAYTSEQLHTKLRKWRNWGLDDEARAFCLSQGVNDDTDSMALFIQRYQMPVLHQIPGEIPQWDEKIPF

SEQ ID NO: 1685 - DNA, 177 bp, Enterobacter cloacae
atgaatatttcatttccggatgaaacgtaccgcacattgctgaaagaggccaaccgccgagacatgccaatggcaaaattatgcagcgaattgctgcaaacggcagcaaaaataattgaaaagtgcaaaacagataaccagcgaggatacaatgacaaccgagacagtagaaactaa

SEQ ID NO: 1686 - protein, 58 aa, Enterobacter cloacae
MNISFPDETYRTLLKEANRRDMPMAKLCSELLQTAAKIIEKCKTDNQRGYNDNRDSRN

SEQ ID NO: 1687 - DNA, 591 bp, Klebsiella pneumoniae
atggattggttatggggcgttgaaaaattatcacctgcggtagttgggttccttggtgcctggctagggagtcgctggggggtaactaaattcaaacgtgaaaagcactgggaaaccaagatcaaaacatatgaaacagtgatccattgcttcgagactattggttactggggagacaatgaaggtaatgaggcatttttagaagttcgtgttggagggttagaggagggggtagagcagttccaccatgctatgcgtcagttagcacaagttggagtgactggagcaatttatttatctcctgaatttagaaacactgcttatgaaaaacgcttaaaaattcaacaaatgtatataggtagaatacgtgaaataaatgacgaacttggtcatggagaagattacatatactacaataaggcagaattatatataaaaatcagcaaattagcatatgagtcagtagaggagcttaatctgattgctgaaaaagatattggtgttgaacgtaataaacttctccctcacttgtcagtaaaaatgaatgagattacgaatgctattcgggattttcagaaggatttgcggtaa

SEQ ID NO: 1688 - protein, 196 aa, Klebsiella pneumoniae
MDWLWGVEKLSPAVVGFLGAWLGSRWGVTKFKREKHWETKIKTYETVIHCFETIGYWGDNEGNEAFLEVRVGGLEEGVEQFHHAMRQLAQVGVTGAIYLSPEFRNTAYEKRLKIQQMYIGRIREINDELGHGEDYIYYNKAELYIKISKLAYESVEELNLIAEKDIGVERNKLLPHLSVKMNEITNAIRDFQKDLR

SEQ ID NO: 1689 - DNA, 2265 bp, Klebsiella oxytoca
atgaatgattataattttaatgttctcaacgataaagagttcgaaaaactagcaattgagctcataggtaatcaggaaaatgtattagttgaacgatttgctcctggcagggatcaaggtatagatggccgtttttattcaccttcaggaggttctgtaatcattcaagcaaaacattatgctggaacaggcttgggcggattattgagaactcttgaaaatgatgaactaccaaaaataaaaaagctaaacccaagtagatacatcttagttaccagtgttggattaacccctcaaaataaaaacaccataaaatctttacttcacccttatatattaagcacaaacgatatatatggaaaggaaggtgtcaatgatttacttacacaatacccatccgttgaaaaaaacttttataagctttggatttcaagcactaatgttttaattaacattctaaataatggaatcgtacaaaaaagcaagtttctaattgaagaagcgcatcttgaatcagctagatacattcagacaaaacagttcgatgaagctttagacatattaaaagaaaaacatgcgcttgttatcaccggttcaccaggagttggaaaaactactttagccaagcaattagcactttttcactcctataaaggatatgagatttatcacattgaagactcaattagtgaagccgaatcttgtttttgcccagaaaaaatgcagtttttttattttgatgattttctcggcgcaaactatttggatgttatagaagggaactttgattcaaagataatgaattttatccgaagagtaacattagataaaaataagagacttgtattaacatcaagatcaaacatcctcaatagagcaaaaagtattagtgatatatttaactttggaaacatatcaaaccgtgagtatgaaataagtgtaaccgaacttactcaaattgaaaaagcgaatattttatataatcacatttggcacagctccctgcccactgagttttcagatgtgtactttgataataaaaattactgggaaataatcaaacacaaaaacttcaaccctcgattaatatcaattataactgacggtgaacgattgtctggcttgtctaatgaggaatactggccttatataaaaaacgccttgaacaatccagagattatttgggatttatatttcaaaaggcagatacctgatgaaatttatgatctcgttaatattgtcgtcctaaatggtggaaatattgaagaaacaaaatgcaaagaaatattaaagagagtctttgagaaaaaacacaaaaataattactatgtcaaagttcataaaatagatgatctcatcaaagaatcgttgaaatcaaccctcaatagaaatattcgattaaatcaaacatcgcacattgcaagtataaccccttttaacccatcaatttctgactatattatcaatcgcatagcaaaagatgacactaatctttctttgtatatgttggcatcaaaaacctatcagtcgattaacaccttattttttttagcagttaacaacaaattagataataaaacatttaattcagttttaaacatattaatatccgacgccatgagtaaggatattaataattacgcaacgcatttatattacaaagttttaacatcagatatatctgacactgaaaaactaaaaaaaataccgccgtctacatttttaaatataaataaaagccaagtatcttatgattctgaaataggtgagtgtattatttgggcaattgagaagcaaccacacctattctcaaagaaattcgctattgatttcattgactatgctctttgctcaagtaaacaatactctttataccatgaagactatcttccccttgcaaaattaatgacattttatcctgatatagagcaggacattaaattcagagaattaaaagatcatataatagatttttgggagtccggatttgatgagatccttggtgactcagctaaaatccaaaatctctcccctgatgattttgacacagcggatgatgttgctttgaattatcttcatgagtttctcgacgagtatcctttcgaatttcatgaaagagatattgagtccattatggataatattgacacatcctcacatttaccagactatagctattatcatgatgatgatgatggatacagacctaaagccacccagtatgtaaatactgtaagctatattgacgatttattcagcagatga

SEQ ID NO: 1690 - protein, 754 aa, Klebsiella oxytoca
MNDYNFNVLNDKEFEKLAIELIGNQENVLVERFAPGRDQGIDGRFYSPSGGSVIIQAKHYAGTGLGGLLRTLENDELPKIKKLNPSRYILVTSVGLTPQNKNTIKSLLHPYILSTNDIYGKEGVNDLLTQYPSVEKNFYKLWISSTNVLINILNNGIVQKSKFLIEEAHLESARYIQTKQFDEALDILKEKHALVITGSPGVGKTTLAKQLALFHSYKGYEIYHIEDSISEAESCFCPEKMQFFYFDDFLGANYLDVIEGNFDSKIMNFIRRVTLDKNKRLVLTSRSNILNRAKSISDIFNFGNISNREYEISVTELTQIEKANILYNHIWHSSLPTEFSDVYFDNKNYWEIIKHKNFNPRLISIITDGERLSGLSNEEYWPYIKNALNNPEIIWDLYFKRQIPDEIYDLVNIVVLNGGNIEETKCKEILKRVFEKKHKNNYYVKVHKIDDLIKESLKSTLNRNIRLNQTSHIASITPFNPSISDYIINRIAKDDTNLSLYMLASKTYQSINTLFFLAVNNKLDNKTFNSVLNILISDAMSKDINNYATHLYYKVLTSDISDTEKLKKIPPSTFLNINKSQVSYDSEIGECIIWAIEKQPHLFSKKFAIDFIDYALCSSKQYSLYHEDYLPLAKLMTFYPDIEQDIKFRELKDHIIDFWESGFDEILGDSAKIQNLSPDDFDTADDVALNYLHEFLDEYPFEFHERDIESIMDNIDTSSHLPDYSYYHDDDDGYRPKATQYVNTVSYIDDLFSR

SEQ ID NO: 1691 - DNA, 210 bp, Klebsiella oxytoca
atgcttaaaacctacgatgtgcctgttaatccaactgaacgcacccaccacctgatttctctggcggagctgatgcgtgatgtattggacagtaaagctgattctcgcgaggactatctggaggcattgattgccatgctggagatgtctttgcgcgatctgcatggtctgctggaaggtaatgaactgccggaggtgcgccatgcgtaa

SEQ ID NO: 1692 - protein, 69 aa, Klebsiella oxytoca
MLKTYDVPVNPTERTHHLISLAELMRDVLDSKADSREDYLEALIAMLEMSLRDLHGLLEGNELPEVRHA

SEQ ID NO: 1693 - DNA, 1089 bp, Klebsiella oxytoca
atgctcagccagcttaacctgcgttttcacaaaaagctgatcgaggcgctgaaagtgcgcgccggtcgcgaaaatacttcggtcaacgccctggccgaacgcttcctcgatgacggcctgaaaacggtcgcgcccggcgacgggtattttcagctggtcgccgatcctgaggctacggtccggcagctgtaccggcatatcattcttggccagaccttaggcacgtcagcgctctcccgcgacgaactgcactttgtcctggttcacgccagggaggccttcctgcgcaggcataacaggcttgccaccctcccggctctggacacgctgctggacatcaccggcgacctgctggcctggcaggtggagcacgatcgccctgtggacggtcactacctgaaggggattttccgcctggccgggaaaaactggacggaagagtttgacgccttccgggcagagctgcgccccgttgtggaccagatgtatgccgaacacctcctgcgtccgctggagagcgactgcttcaacctcgccgatattcccgacagtgctctggctgggattttcaccctgccgcggctgaaaaccgttttcccgctgatgctgcgcgggctggactggagcggggagaaggcccgagatctggctcaggagctgcgcccggtgatcccggccgtcacgcaaaccattgaggccggtacgctgcgcctggagatccgcatcgacggccagcaccccggcgcgcgcccgggcgcctggtatgagacaccgcggctgcacctgctgatcaccggccaggacttcgtggtgccgtacggctgggaagcgttctccgaattgctgggcctgttcacgctgtacgcccgccatccggaagccctggcgcacggccaccagggcgagcgcgtgatgttttccccgcccggacatgtcacgccggagggattcttcgggatcgacgggcttcggatatttctcccggcagaggcctttgagtcgctggtcagtgaactcacaacgaaatgtgctgaaggtacgttggcggaggcccttaccgggatgcgctgcctgtacggagatctgtag

SEQ ID NO: 1694 - protein, 362 aa, Klebsiella oxytoca
MLSQLNLRFHKKLIEALKVRAGRENTSVNALAERFLDDGLKTVAPGDGYFQLVADPEATVRQLYRHIILGQTLGTSALSRDELHFVLVHAREAFLRRHNRLATLPALDTLLDITGDLLAWQVEHDRPVDGHYLKGIFRLAGKNWTEEFDAFRAELRPVVDQMYAEHLLRPLESDCFNLADIPDSALAGIFTLPRLKTVFPLMLRGLDWSGEKARDLAQELRPVIPAVTQTIEAGTLRLEIRIDGQHPGARPGAWYETPRLHLLITGQDFVVPYGWEAFSELLGLFTLYARHPEALAHGHQGERVMFSPPGHVTPEGFFGIDGLRIFLPAEAFESLVSELTTKCAEGTLAEALTGMRCLYGDL

SEQ ID NO: 1695 - DNA, 882 bp, Enterobacter cloacae
atgtcactgtatcgccgtctagttctgctgtcttgtctctcatggccgctggctggcttttctgccaccgcgctgaccaacctcgtcgcggaaccattcgctaaactcgaacaggactttggcggctccatcggtgtgtacgcgatggataccggctcaggcgcaactgtaagttaccgcgctgaggagcgcttcccactgtgcagctcattcaagggctttcttgctgccgctgtgctggctcgcagccagcagcaggccggcttgctggacacacccatccgttacggcaaaaatgcgctggttccgtggtcacccatctcggaaaaatatctgacaacaggcatgacggtggcggagctgtccgcggccgccgtgcaatacagtgataacgccgccgccaatttgttgctgaaggagttgggcggcccggccgggctgacggccttcatgcgctctatcggcgataccacgttccgtctggaccgctgggagctggagctgaactccgccatcccaggcgatgcgcgcgatacctcatcgccgcgcgccgtgacggaaagcttacaaaaactgacactgggctctgcactggctgcgccgcagcggcagcagtttgttgattggctaaagggaaacacgaccggcaaccaccgcatccgcgcggcggtgccggcagactgggcagtcggagacaaaaccggaacctgcggagtgtatggcacggcaaatgactatgccgtcgtctggcccactgggcgcgcacctattgtgttggccgtctacacccgggcgcctaacaaggatgacaagtacagcgaggccgtcatcgccgctgcggctagactcgcgctcgagggattgggcgtcaacgggcagtaa

SEQ ID NO: 1696 - protein, 293 aa, Enterobacter cloacae
MSLYRRLVLLSCLSWPLAGFSATALTNLVAEPFAKLEQDFGGSIGVYAMDTGSGATVSYRAEERFPLCSSFKGFLAAAVLARSQQQAGLLDTPIRYGKNALVPWSPISEKYLTTGMTVAELSAAAVQYSDNAAANLLLKELGGPAGLTAFMRSIGDTTFRLDRWELELNSAIPGDARDTSSPRAVTESLQKLTLGSALAAPQRQQFVDWLKGNTTGNHRIRAAVPADWAVGDKTGTCGVYGTANDYAVVWPTGRAPIVLAVYTRAPNKDDKYSEAVIAAAARLALEGLGVNGQ

SEQ ID NO: 1697 - DNA, 291 bp, Klebsiella oxytoca
atggctaaccttcagcttgcagtgaacggcgagtatttcgacgcaatgaagcgaggcgagaaaacagaagagtatcgcctggttaatccgtattgggggcgccgcatctttgggcgagattatgaccgcctgattatcacgcggggctacccgcgagcagacgaccacgaccgccgcattgatatcccgtatgacgggttcgaaatcaaaaccattactcacaaacatttcggcgataagcctgtgaaggtattcgccatcaaggtgaatttcgtaggagccaaccaatga

SEQ ID NO: 1698 - protein, 96 aa, Klebsiella oxytoca
MANLQLAVNGEYFDAMKRGEKTEEYRLVNPYWGRRIFGRDYDRLIITRGYPRADDHDRRIDIPYDGFEIKTITHKHFGDKPVKVFAIKVNFVGANQ

SEQ ID NO: 1699 - DNA, 306 bp, Klebsiella oxytoca
gtgagtaaattgagcgatgaaatcagaaccttagaacttgaccagttgcgctctcttcgcgagttcgtaggcgacctgatagccagaaaggaggatgaaccgcgcaggactgtatggcgtgtttgctcttacggtatctgcttcggtaatttcagggaagaggaatacctcaaggcagtagcgtttctggcggagaaggctgccgaaattgactcagacccgacatcggacaggcgagacaggcgcatggagattttatcccaccgagttatcgagtcagaatacgagggatggtttgatgcctaa

SEQ ID NO: 1700 - protein, 101 aa, Klebsiella oxytoca
MSKLSDEIRTLELDQLRSLREFVGDLIARKEDEPRRTVWRVCSYGICFGNFREEEYLKAVAFLAEKAAEIDSDPTSDRRDRRMEILSHRVIESEYEGWFDA

SEQ ID NO: 1701 - DNA, 606 bp, Klebsiella oxytoca
atgagtattcaacatttccaaacaaagttaggcatcacaaagtacagcatcgtgaccaacagcaacgattccgtcacactgcgcctcatgactgagcatgaccttgcgatgctctatgagtggctaaatcgatctcatatcgtcgagtggtggggcggagaagaagcacgcccgacacttgctgacgtacaggaacagtacttgccaagcgttttagcgcaagagtccgtcactccatacattgcaatgctgaatggagagccgattgggtatgcccagtcgtacgttgctcttggaagcggggacggatggtgggaagaagaaaccgatccaggagtacgcggaatagaccagtcactggcgaatgcatcacaactgggcaaaggcttgggaaccaagctggttcgagctctggttgagttgctgttcaatgatcccgaggtcaccaagatccaaacggacccgtcgccgagcaacttgcgagcgatccgatgctacgagaaagcggggtttgagaggcaaggtaccgtaaccaccccagatggtccagccgtgtacatggttcaaacacgccaggcattcgagcgaacacgcagtgttgcctaa

SEQ ID NO: 1702 - protein, 201 aa, Klebsiella oxytoca
MSIQHFQTKLGITKYSIVTNSNDSVTLRLMTEHDLAMLYEWLNRSHIVEWWGGEEARPTLADVQEQYLPSVLAQESVTPYIAMLNGEPIGYAQSYVALGSGDGWWEEETDPGVRGIDQSLANASQLGKGLGTKLVRALVELLFNDPEVTKIQTDPSPSNLRAIRCYEKAGFERQGTVTTPDGPAVYMVQTRQAFERTRSVA

SEQ ID NO: 1703 - DNA, 825 bp, Enterobacter cloacae
atgaaaaaaattttgctgctgcatatgttggtgttcgtttccgccactctcccaatcagttccgtggcttctgatgaggttgaaacgcttaaatgcaccatcatcgcagacgccattaccggaaataccttatatgagaccggagaatgtgcccgtcgtgtgtctccgtgctcgtcttttaaacttccattggcaatcatggggtttgatagtggaatcttgcagtcgccaaaatcacctacgtgggaattgaagccggaatacaacccgtctccgagagatcgcacatacaaacaagtctatccggcgctatggcaaagcgactctgttgtctggttctcgcagcaattaacaagccgtctgggagttgatcggttcacggaatacgtaaagaaatttgagtacggtaatcaagatgtttccggtgactcggggaagcataacggcttgacccagtcatggctgatgtcgtcgctcaccatatctcccaaggagcaaattcagtttcttctacgctttgtcgcgcataagctgcctgtatccgaagcggcttatgacatggcgtatgccacaatcccgcagtaccaggcagccgaaggatgggctgtacatggaaaaagcggcagcggctggcttcgggacaataacggcaagataaatgaaagtcgtccgcagggctggttcgtgggctgggctgaaaaaaacggacggcaagttgttttcgcccgattggaaataggaaaggaaaagtccgatattcccggcgggtctaaagcacgagaggatattctcgtggaattacccgtgttgatgggtaacaaatga

SEQ ID NO: 1704 - protein, 274 aa, Enterobacter cloacae
MKKILLLHMLVFVSATLPISSVASDEVETLKCTIIADAITGNTLYETGECARRVSPCSSFKLPLAIMGFDSGILQSPKSPTWELKPEYNPSPRDRTYKQVYPALWQSDSVVWFSQQLTSRLGVDRFTEYVKKFEYGNQDVSGDSGKHNGLTQSWLMSSLTISPKEQIQFLLRFVAHKLPVSEAAYDMAYATIPQYQAAEGWAVHGKSGSGWLRDNNGKINESRPQGWFVGWAEKNGRQVVFARLEIGKEKSDIPGGSKAREDILVELPVLMGNK

SEQ ID NO: 1705 - DNA, 540 bp, Klebsiella oxytoca
atgcctcatgtggcggccaggacggccagccgggatcgggatactggtcgttaccagagccaccgacccgagcaaacccttctctatcagatcgttgacgagtattacccggcattcgctgcgcttatggcagagcagggaaaggaattgccgggctatgtgcaacgggaatttgaagaatttctccaatgcgggcggctggagcatggctttctacgggttcgctgcgagtcttgccacgccgagcacctggtcgctttcagctgtaagcgtcgcggtttctgcccgagctgtggggcgcggcggatggccgaaagtgccgccttgctggttgatgaagtactgcctgaacaacccatgcgtcagtgggtgttgagcttcccgtttcagctgcgtttcctgtttggggtcgtttgcgggaaggggcggaatcctacgctaaggctttggccagcgatattctccggtgagattgatgtgttcccaggggataggagaagtcgcttgatatctagtatgacgtctgtcgcacctgcttga

SEQ ID NO: 1706 - protein, 179 aa, Klebsiella oxytoca
MPHVAARTASRDRDTGRYQSHRPEQTLLYQIVDEYYPAFAALMAEQGKELPGYVQREFEEFLQCGRLEHGFLRVRCESCHAEHLVAFSCKRRGFCPSCGARRMAESAALLVDEVLPEQPMRQWVLSFPFQLRFLFGVVCGKGRNPTLRLWPAIFSGEIDVFPGDRRSRLISSMTSVAPA

SEQ ID NO: 1707 - DNA, 426 bp, Escherichia coli
atgtttgaaaataatactggcgtctacaattacaaaaataaaaacattgatttaaaatccaataacgctaatttatatagagataaactaaggcaacactgtgttagtgttagacttaataaagaggaattacaatttttaaatgaaaaacgaggaaacataagaaaaggtgaatggcttcgaaagagctttctgaacacaacccccaccctcattcctccaatcaatctcgatgcctggaaagaattagggaagatatcgcaaaacctaaataagctcaatatccatcttgacaacaagagtgatggaagctgtttgacaaatacagaactttttgccgttagacgtcaaatctctgagcttcgtttgcatctcataaatattgatctttggaggatatctgatgaagggaatgcagaagattaa

SEQ ID NO: 1708 - protein, 141 aa, Escherichia coli
MFENNTGVYNYKNKNIDLKSNNANLYRDKLRQHCVSVRLNKEELQFLNEKRGNIRKGEWLRKSFLNTTPTLIPPINLDAWKELGKISQNLNKLNIHLDNKSDGSCLTNTELFAVRRQISELRLHLINIDLWRISDEGNAED

SEQ ID NO: 1709 - DNA, 930 bp, Citrobacter braakii
atgaatgctcatcaaggaaaatacactcagcaactattatcccttccgatccttgagaatgtggacgatttatcacacgcccttaggcttccgaaagaagttatttcaaaatttagctttaataatgataaatattatcaccgtatagaaatgaaaaaaaaatccggtggtattcgacacatagagagtcctttaaaggagttaaaagcaatacagcgatgggttctaagatatattttagataaattgtcaccttcagtttatgcaaaaggctttgtaagaaaaaaatcaattattgataatgctaaaccgcacgagggaaatcaatacattttaaatcttgatttgcaagatttttttactaatgtcaaagcatcgcatgtatatactctgtttaaaaatataggatataataataacatagcttttatactaacatctttttgcgctaaaggggggtatttacctcaaggtgcaccgacttcacccgccttatctaaccttgtttgcttaagactggatcatcgtatatctacatattgtaaaaaacgggctttaacatacacacgctatgcagatgatctttgcatatcaggaaataaaatactaattttacaaaaagcatcttatttaataaaggatattatctgcgatgaaggattcatcattaactctaaaaaagaaaaatttctaggaccaaaggtacggcgagaggttacaggtttaaccgtcacacctagaatcactataagtaaaaaagattattgcatttatagaaaaaggatttatgatttagtaagaaatgaaataccaaataagaatgaaatcatagcaggtgtattatcttttgtcagaagcattgacaaggataaaggcagaaagctttctgagttctatcagaagcaaaatgccatcattatgaatgtttag

SEQ ID NO: 1710 - protein, 309 aa, Citrobacter braakii
MNAHQGKYTQQLLSLPILENVDDLSHALRLPKEVISKFSFNNDKYYHRIEMKKKSGGIRHIESPLKELKAIQRWVLRYILDKLSPSVYAKGFVRKKSIIDNAKPHEGNQYILNLDLQDFFTNVKASHVYTLFKNIGYNNNIAFILTSFCAKGGYLPQGAPTSPALSNLVCLRLDHRISTYCKKRALTYTRYADDLCISGNKILILQKASYLIKDIICDEGFIINSKKEKFLGPKVRREVTGLTVTPRITISKKDYCIYRKRIYDLVRNEIPNKNEIIAGVLSFVRSIDKDKGRKLSEFYQKQNAIIMNV

SEQ ID NO: 1711 - DNA, 1542 bp, Klebsiella oxytoca
atgcaagatattttatcatggattgacgtcggaaaactttcggctgagcgcgatgacaatcttattaattattttcatgataatggagttttgaaaaacataatcgatacaccatcttctttcttagtattaggaagaaaaggtgcaggaaaaactgcactctttagatatctaacaagcaatccatatcaatttttgaaaaaagatgaagtattagtatctctatcgtttgaggactacaactggagagtccattctcttttaagtaatgagtatgcagcaggttcactggcttacaaacaatcatggaaatttgttatactagttgaagtaataaaggcatattataaatatttaagtgacgctaaaagtaaaataccaaaaccattacaaaaagctcaagacgctttaaataaaatctttgatacaccatttccttccatatctgtattagtcggaaggaaattattgaatttaggtaaggtctctttacctaaagcaggtttaaatattgatgacggggatcttaactctttagatgtagatggcggtgaagttctgttcgaaaatgcagtcaatgacccttctttaaaagataaactttgtaataacatagaccatttaattactttttttgaaaactgcctgcaggcatgccaacctctacatgcaaaagtttttgtctgttttgatcggattgatgaggcctgggatgacatttcagttgatatttcgcgacgagttatcgctggcttagtcacggctgctgactctctcactcctaaatataaaggatatgttagacccttgatatttttacgtgaggatatatttgaagtattaagcctgaatgactcaaacaaattacgagaagattgtggggaattattacactggagtagagaaacactgatgaaaatgcttctccagcgaattaactattatgccgcacgcaataacaaagatttagtacacgatgttgatgatctcttcgatcgccctgaaatgcgacaacgagctaaaccgtctaactatcttatgaaacgctctatgatgcgccctcgagatatgatttgcttgttaacaaaaactatatcatcaatgcgtgatgacaaaaacgatccgttttctgaaaatcaatctgttggaaacaaattagaagcagaatatatttatcatgcagagcctagttactctgaatggttaaaacaggaagtgattgatgaatgggcagtacaaagaccagaaattcgagttttacttgcagccattcagaataattcatcaaccgttttcactaaagatgaactcctctcagaaatacagaaaatagatagcacatataatgatgaactcattaatgagtatattagatttttgttcgatatatcgctcataggttttaaggtagggcagtccactatatggcgatataaatgcttttatccgtcacaaggctttattgattctgatgagtataaaattcatgatggtttaataagggttttaaacttaaaagaacccagagaaaaaacagaataa

SEQ ID NO: 1712 - protein, 513 aa, Klebsiella oxytoca
MQDILSWIDVGKLSAERDDNLINYFHDNGVLKNIIDTPSSFLVLGRKGAGKTALFRYLTSNPYQFLKKDEVLVSLSFEDYNWRVHSLLSNEYAAGSLAYKQSWKFVILVEVIKAYYKYLSDAKSKIPKPLQKAQDALNKIFDTPFPSISVLVGRKLLNLGKVSLPKAGLNIDDGDLNSLDVDGGEVLFENAVNDPSLKDKLCNNIDHLITFFENCLQACQPLHAKVFVCFDRIDEAWDDISVDISRRVIAGLVTAADSLTPKYKGYVRPLIFLREDIFEVLSLNDSNKLREDCGELLHWSRETLMKMLLQRINYYAARNNKDLVHDVDDLFDRPEMRQRAKPSNYLMKRSMMRPRDMICLLTKTISSMRDDKNDPFSENQSVGNKLEAEYIYHAEPSYSEWLKQEVIDEWAVQRPEIRVLLAAIQNNSSTVFTKDELLSEIQKIDSTYNDELINEYIRFLFDISLIGFKVGQSTIWRYKCFYPSQGFIDSDEYKIHDGLIRVLNLKEPREKTE

SEQ ID NO: 1713 - DNA, 1092 bp, Klebsiella oxytoca
atgaaaaacgcgatttatcttttaaccggcggcattgctctcgccctgtttgccgcagcaccggcacgcgcggcgatgggcggctgcgaagccgtaggcgggcctgttaattttaccaccagctttgccaacgactggacaaaagagcaaaacgtcgccgggactttaatagacctgacctccggcaccacctctggcggtagctataaaatggtttgcgactgtcccgccaacaccaaggttaatctctactacaccaccaccacgccgttagctaactccggctattccggatttcaaaaattaaatgacagtctggatattaaaacggtgattaccgatgtacccggcgtatcggcgcttaaggttcccactggtgtgaattcaccggtcagaggagacgggtcttttcaggcctcaaagggcaatagcgtatgcagtggggatcctgaggagcagcgcgccggggcatttaccgtgggcagtaacgtcagcattacctttcgcgtcacgcaatcttttttaggccggatggagatccccagcacgcatattgcaaccctccagtcagcatggagtagttccagttcatatgcaaaatttgtctacaaagatattgccgatatttatctccagggcagcatcaccgttccgcaaagctgtaagattaacgaaggcgatgtcattcaggtcgaccttgggcaaattcgcgcttcaacgttcaccactaaaggccatatgccggacggatacactcctgtagagtttgacattgtctacgattgcggggatacgtccttgtttggaaaaaatgactatatccttctggatgtccagggcgaggatatctttgatgagtacacattagccgcccgccgccgggaatcagataacgccgcagatattggtattcagatgagtaaccttagcacaggtgggggaactaccactgttacgggtgcgccagctattaatttatatgattcagcaggcgttgttcggatgcgggcgacgccaattaacctggtcggtggggccctacagccagggcctttccgtacctctgcaaccctcaccgcaacggttagatag

SEQ ID NO: 1714 - protein, 363 aa, Klebsiella oxytoca
MKNAIYLLTGGIALALFAAAPARAAMGGCEAVGGPVNFTTSFANDWTKEQNVAGTLIDLTSGTTSGGSYKMVCDCPANTKVNLYYTTTTPLANSGYSGFQKLNDSLDIKTVITDVPGVSALKVPTGVNSPVRGDGSFQASKGNSVCSGDPEEQRAGAFTVGSNVSITFRVTQSFLGRMEIPSTHIATLQSAWSSSSSYAKFVYKDIADIYLQGSITVPQSCKINEGDVIQVDLGQIRASTFTTKGHMPDGYTPVEFDIVYDCGDTSLFGKNDYILLDVQGEDIFDEYTLAARRRESDNAADIGIQMSNLSTGGGTTTVTGAPAINLYDSAGVVRMRATPINLVGGALQPGPFRTSATLTATVR

SEQ ID NO: 1715 - DNA, 3012 bp, Klebsiella oxytoca
gtggttatctttgaagatcttgataggctaggaacgcctgagattttcgttaagttgcgtgaaattaacaaaatagttaataacaatattgttgatggcaacccggtcaggtttgtttatgcggtaagagacgacctgttcctgggggctgatgccagaactaaattctttgattttattcttcccgttattccatttatggatagcagaaatgcgtttactctattaaagaggaaaatgtcgctcgatacgcataatgataaatatctgaaagacatttcggcatatataaatgatatgcgcagcctgcaaaatttggtcaatgaataccatgtattcagcaatatcgttgataacggaaatgataaaatcaaactgttgtcgctggttttttataaaaatatctacgccttagactatttccttaccgataagaaaacaggagttttatattcatttattcgtgactatcgcactcgcaaacttcaccgtaatcatttctactctctggaaaaaaaattggatagtttacagtccgaaatagaatatcttaatcatgaacctatgtatgatcataggggaattagagaggaaatagtttgtcgatatattccgaaaatactctgggatggcattcattttggtacggggaatggatacagtaatttttaccccctaacaaccttggctttaattgatgatgaaaatatttttttagaatttttatcgcaaaaggaaaatttatatataggctattttgttagtcatcagagatattcactctcactttttgatagggcattaagagaacaactaaaagaagaatacctgaaacgaaaaacaaaaatgggtaaagataaaaactcggcttttagtgagctgcagataaaaataaagaaacttaaagagtcaataaaattaaaaaatgccctttcgctgcgagaacttacgctaatcatcgggcgtgaaaaatttgaagatattgctcaggggtatcttgaggcgatggagggtcatgacttcgtctctgagcagcagctccatgctttgcgtaccgatatgcgcaatggcgggttagacgccttgtatctgctgctgtctgatggtctggtgatgcaggacttcatggcctaccgctctattttccatgaaggatcgatgaccgtaaatgataacgacttcctgaaagccgttggtcaggatctgagctacgcaacctcaaacggtgaatattttatcgatgatgagaacagagtcatcagcgaactggttgaacataaccgtatttatgccgatggagcgtttcatcatcaactggtgacacatctgattgataacgaggatgaacatctggctggtatgatcacttcgctattcagcaagtctgatgaacatatccttgctgttttttctgagctttatagcagatttggcaaacccgagaccttcgataagttaatcgttactgcactgcaaaaaaatggttatcttgacagaatggttgccgttctcgcaggccagccgggtgaaaaattcaccaatgatattgctataagtgtgatagcctgcgtatcgcctgaacatgcgctagataaatcgcaataccgccagcttattcattcgctgggctgccgtatcatctctcagctcaccgaggagaatcaggaagagttcatgcgtcacgtacaacaggcggatgcatgctatgacgagctgttcgaaccaatgacgctaacggagcggtattgcctgcaatttattgcacaaaacagtctgtatcagttaactcggcacaatgttggtattgccgtttcgtgtcttattgaaaacataacgcctgaagaggcggaaaggaaaccttggacgctcgcctatgagcataaactcaatgcggtttctgattacttcaatcaaaacatcgatacattcgtaagtgatgtgtttatctcctctgctgaggatgccgaatgtattcgctacgttctgacccgcacctccctaagagatggttccaaaggcgatatcgtcagaaaaatgaccttctcgtttgctgatctgtccgggatatcggctaaagaagaatttactgaagaccagctaacgatctcctatcacgacctgttttaccgttatgaccgcgtcgtgccgggatggggggcgctgatagactatatctgtgaagactgcaacatggcgatactgacggcgtatgtgacaaagcatgtagctgcattaggtcagtcccccttagaagtctatgatggcgaccgctatgacctgctgtacatgaaaattatctgtaatgatgacctagacgagtggacttatcagaacttggttgcaccgattgagattaacatgcgggaaattgatgagcacctcagcgcacgtaatttctgcaccttgatagctatgttgaaactgcctctcgacgcggatgtgtatgaaaaaattgcggctcaatacgcggacctggatgagaaaatcagtgatgccttcgtctattggttcagtcagtataaaagtgaatttttggcgcagcccgagttctatctaagaaaagaaaaagatgcgcgcttctttatagccatgctcacaaaagtcatgacttacgcactctttactgtgcaagagagagcggacctggtgtcgctatttattgattatttcattgcgtctgatatcgctgaccttaatttcccaaatgatgtcctgctgcaggtgtttaacagcactagtaatgaagaattcaagggcatgctgtttacgcgatttattgtggcaggtctcaataaacatcaactggccgggctttgtcatcagttaggtgaagatgaattgagaagtatattccttaatcgaacccgagcgacaattgctgttgcaaacagggggcgcgtgatatcaattcttgagcatctgcaagcagtacgcatcatcagagatttcaaggaacgtgatgatgggaaattctctgtcgttatcgaacctaacccagaggatgaagattag

SEQ ID NO: 1716 - protein, 1003 aa, Klebsiella oxytoca
MVIFEDLDRLGTPEIFVKLREINKIVNNNIVDGNPVRFVYAVRDDLFLGADARTKFFDFILPVIPFMDSRNAFTLLKRKMSLDTHNDKYLKDISAYINDMRSLQNLVNEYHVFSNIVDNGNDKIKLLSLVFYKNIYALDYFLTDKKTGVLYSFIRDYRTRKLHRNHFYSLEKKLDSLQSEIEYLNHEPMYDHRGIREEIVCRYIPKILWDGIHFGTGNGYSNFYPLTTLALIDDENIFLEFLSQKENLYIGYFVSHQRYSLSLFDRALREQLKEEYLKRKTKMGKDKNSAFSELQIKIKKLKESIKLKNALSLRELTLIIGREKFEDIAQGYLEAMEGHDFVSEQQLHALRTDMRNGGLDALYLLLSDGLVMQDFMAYRSIFHEGSMTVNDNDFLKAVGQDLSYATSNGEYFIDDENRVISELVEHNRIYADGAFHHQLVTHLIDNEDEHLAGMITSLFSKSDEHILAVFSELYSRFGKPETFDKLIVTALQKNGYLDRMVAVLAGQPGEKFTNDIAISVIACVSPEHALDKSQYRQLIHSLGCRIISQLTEENQEEFMRHVQQADACYDELFEPMTLTERYCLQFIAQNSLYQLTRHNVGIAVSCLIENITPEEAERKPWTLAYEHKLNAVSDYFNQNIDTFVSDVFISSAEDAECIRYVLTRTSLRDGSKGDIVRKMTFSFADLSGISAKEEFTEDQLTISYHDLFYRYDRVVPGWGALIDYICEDCNMAILTAYVTKHVAALGQSPLEVYDGDRYDLLYMKIICNDDLDEWTYQNLVAPIEINMREIDEHLSARNFCTLIAMLKLPLDADVYEKIAAQYADLDEKISDAFVYWFSQYKSEFLAQPEFYLRKEKDARFFIAMLTKVMTYALFTVQERADLVSLFIDYFIASDIADLNFPNDVLLQVFNSTSNEEFKGMLFTRFIVAGLNKHQLAGLCHQLGEDELRSIFLNRTRATIAVANRGRVISILEHLQAVRIIRDFKERDDGKFSVVIEPNPEDED

SEQ ID NO: 1717 - DNA, 180 bp, Klebsiella oxytoca
atgatcatgaagcaaccggactggcattctgccgacattatcgcggcgctgaaaaagcaggggacgtcgctgtccgccgtttcccgtaaatcagggctgacgccttctacactggcaaatgtgctaataaggcactggcccaaaggggaacggttgatcgctgaggtgttgggcgtataa

SEQ ID NO: 1718 - protein, 59 aa, Klebsiella oxytoca
MIMKQPDWHSADIIAALKKQGTSLSAVSRKSGLTPSTLANVLIRHWPKGERLIAEVLGV

SEQ ID NO: 1719 - DNA, 984 bp, Klebsiella oxytoca
atggaacttacaaccagcggaaaacttatactggaaaaagctgaatcaactctggacttctatattaataaggcacgtcttgattccgttgcagatttgattaaatccgcacgggtatgtgataccgccaatgacccaggagcacctccgcaaaaaagccttaacgatctacttaataatgttgttgaattacctggttcaacatcaattgttgcagtacctgcttcgctgaccgatcctcagactggggcagtaaataaagaaatgctgaaaatgttaaaacaggttcgaacgcttgaatcatacatatcagtattaacagcttattgtctttataatgaacatccttccccctatgacatctctaaacctgccgaagcttcatcatttacacaggcgacagcaaaatggcgaaatcatgttataactggtggggctgtgagggcgatggcaaaatatcttccagtatcacaaattacagcgcaatcattttctaaagaggtaaccagcgccactttacatcttggttttctgactacactttttggtggattcaatctaccagccaaagcaattagacagttagactccattctaaccggtgtggtagatcaaatgaaaaaggtggagttgtcatttgaaaaacaaacgaccaccttagatcattttatcagttattattatttcgatgttatcgaaggtactggcggtgattcaggtattccagcgatgtatgattgcaaaatcagactgatgtacctgcatgtggatcagcaaagctggagagcatctgtagggaaatcttccgttaaccacttcggctttcatatgaattattatgacatggatactgttatgggggatctctcagacgatgttgaggcaatcaattcagcgattaagcaattaactagtaaaacggacgagcaaatttctgctattatgtctccgaaaacaattgaagcagatccaaaaaaatcctga

SEQ ID NO: 1720 - protein, 327 aa, Klebsiella oxytoca
MELTTSGKLILEKAESTLDFYINKARLDSVADLIKSARVCDTANDPGAPPQKSLNDLLNNVVELPGSTSIVAVPASLTDPQTGAVNKEMLKMLKQVRTLESYISVLTAYCLYNEHPSPYDISKPAEASSFTQATAKWRNHVITGGAVRAMAKYLPVSQITAQSFSKEVTSATLHLGFLTTLFGGFNLPAKAIRQLDSILTGVVDQMKKVELSFEKQTTTLDHFISYYYFDVIEGTGGDSGIPAMYDCKIRLMYLHVDQQSWRASVGKSSVNHFGFHMNYYDMDTVMGDLSDDVEAINSAIKQLTSKTDEQISAIMSPKTIEADPKKS

SEQ ID NO: 1721 - DNA, 579 bp, Klebsiella oxytoca
atgattaatgaacgcttgacgcacgaagagttagagcttctttaccaggcaatgaaaacacactctgaagttttggctgaatccgcttcagaggcagaggttattgaatgctgccagatagtaagagcgctgcgagagctacaggagcgccgcaaggccgacttcgagcaggtggcgttcacagatgaacgaaaccttcatcatattgctatgggccgagaaacctctctgatttggggtaagcagaactcagaggcgggagatgttccgctctatcgccacgcgcagccagcgccggtagtgcagatggtcgctgaggaatcgcgctgcggcaccaaagccacgtcagccctggattcattgccaaaaaacgccgagtcgcgcagcggcaactctctggctaacgataccaacgttgttaaacggttgaccattactctgcctgatacgagctcaaaagcattctggagcggtaccggaaaaacggaaacattccatccggtgacttatcgcctatgggtgaaagaagccatagagcgatactgcgccatcgctcggattgatgtggaggtgaagtag

SEQ ID NO: 1722 - protein, 192 aa, Klebsiella oxytoca
MINERLTHEELELLYQAMKTHSEVLAESASEAEVIECCQIVRALRELQERRKADFEQVAFTDERNLHHIAMGRETSLIWGKQNSEAGDVPLYRHAQPAPVVQMVAEESRCGTKATSALDSLPKNAESRSGNSLANDTNVVKRLTITLPDTSSKAFWSGTGKTETFHPVTYRLWVKEAIERYCAIARIDVEVK

SEQ ID NO: 1723 - DNA, 231 bp, Klebsiella oxytoca
atgaacaaagagacgcaacaaaaaatcagtatggcagcatctcgtgcctgtatcggaaagcactttggcatcagcggtcaggctgttggtaagtggatttacgagaatggcgtgcctcaaaaacgcatcgtcccgctatgccgttttcttaactgggaagtaacgcctcatgaaattgatcctgaggcgtacccaaacccaactgacggcctgccgaaacaggaaggctga

SEQ ID NO: 1724 - protein, 76 aa, Klebsiella oxytoca
MNKETQQKISMAASRACIGKHFGISGQAVGKWIYENGVPQKRIVPLCRFLNWEVTPHEIDPEAYPNPTDGLPKQEG

SEQ ID NO: 1725 - DNA, 822 bp, Klebsiella oxytoca
atggcatttaaaaaaggggttactttttatttcaccgatgaaggaaagtatgaggagtttttggaaaaccataaaaagtcaggcacaacaaaatcaaagtttgtattaaggcatttggaagataataagaatatattcgacaagctaaataaaaattgcgaattaatagctgggctctataattcgaatccatatgttcagtgcgtggatgcatttttttcttttcggcagccatttctcttgagtggagttactgaaccggaattaagaaaggggttgttgaataatattgatgaaaaaatcaaaattgattttgttgaacgcattctggaaaatatgaaatgttatcatggctcttatcatttaattaaaaccatgataaagataacgtacatgagagaaagaaatgatgattgtgattatattaatgcatcatgcttttgtcgctatggatttataaagattgatgaatttttgtggaagagatataacagtctttatgacttcacctcaataacgtaccaaaaattttattatattttttcggccccaaagaaaaccaaacaactcgcaatgattttagagtcagaagcttcaggtgatatgataggcggtttttttatttccgtttatccagaggggaagagttttcctaaggatctgtcgaaacgtggatttcaggaatatccagggagaccactagtatggttaaaagtttcaggggttaatggataccaaaacataaatagatttacttttgaggaacataagcgtgttgacaatggtaagtttagcctaatcaagaagtcacgaatgaaatga

SEQ ID NO: 1726 - protein, 273 aa, Klebsiella oxytoca
MAFKKGVTFYFTDEGKYEEFLENHKKSGTTKSKFVLRHLEDNKNIFDKLNKNCELIAGLYNSNPYVQCVDAFFSFRQPFLLSGVTEPELRKGLLNNIDEKIKIDFVERILENMKCYHGSYHLIKTMIKITYMRERNDDCDYINASCFCRYGFIKIDEFLWKRYNSLYDFTSITYQKFYYIFSAPKKTKQLAMILESEASGDMIGGFFISVYPEGKSFPKDLSKRGFQEYPGRPLVWLKVSGVNGYQNINRFTFEEHKRVDNGKFSLIKKSRMK

SEQ ID NO: 1727 - DNA, 1173 bp, Klebsiella oxytoca
atgccgcataaaaaagtagcactacagcttattgaggaaacgcttaaagaactcgagtccccaaaaggctctttgttatcggctatacaaaagctacaaaggaccgcggatatcattaatgatgaagatacaaaaatatggtgtgctattcagttgggtgatgataaatacacaaaaccacttaagttatttttaaaattcttaatcgataacaaaaatacaactacgaagacttatgaggaaaaattaagcaaacatttaaaaacgttatctgatacaggaattaagtctggagttcactattctaacgaagaacttacgttaaaaagtaatgaaagtggtggtggatataataatattggatttattgaagaaaaatatgcagaccttgtaagaaaaaaagaaggtaatgacgggacatattataaaaacaacttaaaccaacatatcaattatgtaagaaaaaaagcacatgaattagcatcacaaatatttaatcaattaaaattctcaggcactgtcagtaactgttttgatatactgaaaaatgctgtcgatgataaattattagatctaaatccagtgatcgcagaacaactaatgttggcatttaaagctatctcttcagataaagaagaagaatggtctcaagctttaactacatgtcgtaggcttctggaggggctggctgatgaactttatccggcatcgaaggaaaaatttaatggtcgggctgttgggcaaggtcaatacgtaaaccgcctatgggcatttatggatggggctattcagtccgatagcaataaagaccttgccaaagcacatatagattttctcggatcatggttagataaagttaataagttaacaaataaaggtgttcatgccgagttagatcggattgaagctgtaaaatcagtatttcatacgtatttagtagtggctgatttgcttgagtatatgtcaaataccaaaacctcagtatctaagcctgatatcaataaagctactttagatgaactggaagcattgttaaatataaatagaacaatcgctaaagaaattgttaaagcacgagttcgtgaaggcaagcttgatctagatattttaaaaagcataaaaggtataggtgctaagacgcttagtaatatacaagaagtgtttgatttgtaa

SEQ ID NO: 1728 - protein, 390 aa, Klebsiella oxytoca
MPHKKVALQLIEETLKELESPKGSLLSAIQKLQRTADIINDEDTKIWCAIQLGDDKYTKPLKLFLKFLIDNKNTTTKTYEEKLSKHLKTLSDTGIKSGVHYSNEELTLKSNESGGGYNNIGFIEEKYADLVRKKEGNDGTYYKNNLNQHINYVRKKAHELASQIFNQLKFSGTVSNCFDILKNAVDDKLLDLNPVIAEQLMLAFKAISSDKEEEWSQALTTCRRLLEGLADELYPASKEKFNGRAVGQGQYVNRLWAFMDGAIQSDSNKDLAKAHIDFLGSWLDKVNKLTNKGVHAELDRIEAVKSVFHTYLVVADLLEYMSNTKTSVSKPDINKATLDELEALLNINRTIAKEIVKARVREGKLDLDILKSIKGIGAKTLSNIQEVFDL

SEQ ID NO: 1729 - DNA, 372 bp, Klebsiella oxytoca
atgagcaatgatcgcatgaccaatgttccagatttcctgggcgaattggatgctggcgtgttcatcaacaagatcgccggggcgctcaataccgccgcactgggcgttttgaacaatggcagcaaaggcaaagtagtactgactttcgacatcgatcgcatgggcaattcgatcgaagaaaagcgagtcatgatcaaacacaaactgcagtacatcacccccaccccgcgcgggaaagtttctgaagaagacacgacagaaacgccgatgtttgttaaccgcggcggcaagttgaccatcctgcaggaagaccagggcaacctgtttactctgagcggggatccggatgcaaagctgcgagcggctcagtag

SEQ ID NO: 1730 - protein, 123 aa, Klebsiella oxytoca
MSNDRMTNVPDFLGELDAGVFINKIAGALNTAALGVLNNGSKGKVVLTFDIDRMGNSIEEKRVMIKHKLQYITPTPRGKVSEEDTTETPMFVNRGGKLTILQEDQGNLFTLSGDPDAKLRAAQ

SEQ ID NO: 1731 - DNA, 2088 bp, Klebsiella oxytoca
atgcaacaggaatctgtagacagtaaaaaagtcctccgcccagatggttcgttcatggagtggttcctcactccgaacgtacagtttggcctgctggccatactgaccgtgctgggtctgtttctcccctttaccatgctgctgagcatcctcatccttccgccgctgatggtggcattcacggatcgtaaattccggccaccgctgcgaatgccgaaagactgcgaaatgttcgacgacaccctgaccacggaaacccaggcggaataccgtctggggcccattcgcatcccgcataaggtccgggagcgaaagaaagcgaagggaattttatatgtcgggtatgagcggggacgcctgttcggccgcgagctgtggctgaacatgacggacctgctgcgccacatggtattttttggtaccaccgggtcgggtaaaaccgaaaccttctatgggtttatcgttaacttcctgctgtggtgccgtggctactgcctctcagacggtaaagcagataacaagctggccttcgccacctggtcgctggcgcgccgtttcggccgtgaggatgattattacgttctcaacctgctgaccggcagtattgacaggttcgtgaacctggtgaagcaggaaagcatccccgcgcaatccaactcagtcaacctcttcagcgttgccccgccgaccttcatcatccagttgatggaatccatgctcccccaggtgggcggggattcggcacagtggcaggatacggcaaaagccatgatgtcggcgctgatcaatgccctgtgttataagcgcgcccgcggcgaactgcttttgtcacagcgcactattcagaaaaacatgtcgctgccggcaatggccgcgctgtacgtggaggcaaagaaaaacggctggcacagcgagggttacgccgcgctggaaagttatctggaaaatacaccaggcttcctgctggccaacgcggaatacccggaaacgtgggaagcccgcgccttcgaacagcataactacatgagccgtcagttcctgaagacgctctccctgttcaatgaaacttatggccatgtttttccggaagacagcggcgatatccggatggacgatattttccacaatgaccgcattctcatcgtcatgatcccgtcgctggagctgtcacgcggtgaagcggccacgcttggccgtttatatgtgacgctgcagcgaatgaccatcagtaaggacctgggctaccagctggaagggaaaaaagaggaagtcctgctcactcacgcgctgaataatcaggcgccatacgggctgatttatgacgagctgggccagtatttcaccagcggtatggatacgctgagtgcgcagatgcgttcactggaaaaaatgggcgtattttcctcccaggatcacccgtcgctcgcccgcggcgcgaacggcgaggtggattcgctgatcgccaacacccgcgtgaaatattttgagtcgattgaagaccggaaaacctttgaaatactgcgcgaaaccgtcggccaggattattattctgagctctccgggcaggaagccgaacacggcacgttttccaaaacggtccgggaaggggatctgtaccaaatccgtgaaaaggaccgcgtgaacattcgtgagctacgtaagcagaccgaaggtcagggggtaatttctttccaggatgccctggtacgcagcgccgcgttttacattccggacaatgagaagttttccagcgaactgccgatgcggataaaccgctttatcgaggtattgccgccatcgccggcaacgctgtacagcatttatccggaacgcaaggatgatgaactggcggaaaccaacccggatgcaatgcgattcccgccgatcaagctgttcggctacgacaaagcggccaacagcctgctggaaaaaattgaggtcttctacgagctgcagtgtggcgcaatttcaccggaggaaatgtcggtgtgcctgtttgaactgttcgctgaatggcttgatggaacggaaacggacgacgtgctttaccaccaggaagacgatctgttcccgatgatcgagatgtaa

SEQ ID NO: 1732 - protein, 695 aa, Klebsiella oxytoca
MQQESVDSKKVLRPDGSFMEWFLTPNVQFGLLAILTVLGLFLPFTMLLSILILPPLMVAFTDRKFRPPLRMPKDCEMFDDTLTTETQAEYRLGPIRIPHKVRERKKAKGILYVGYERGRLFGRELWLNMTDLLRHMVFFGTTGSGKTETFYGFIVNFLLWCRGYCLSDGKADNKLAFATWSLARRFGREDDYYVLNLLTGSIDRFVNLVKQESIPAQSNSVNLFSVAPPTFIIQLMESMLPQVGGDSAQWQDTAKAMMSALINALCYKRARGELLLSQRTIQKNMSLPAMAALYVEAKKNGWHSEGYAALESYLENTPGFLLANAEYPETWEARAFEQHNYMSRQFLKTLSLFNETYGHVFPEDSGDIRMDDIFHNDRILIVMIPSLELSRGEAATLGRLYVTLQRMTISKDLGYQLEGKKEEVLLTHALNNQAPYGLIYDELGQYFTSGMDTLSAQMRSLEKMGVFSSQDHPSLARGANGEVDSLIANTRVKYFESIEDRKTFEILRETVGQDYYSELSGQEAEHGTFSKTVREGDLYQIREKDRVNIRELRKQTEGQGVISFQDALVRSAAFYIPDNEKFSSELPMRINRFIEVLPPSPATLYSIYPERKDDELAETNPDAMRFPPIKLFGYDKAANSLLEKIEVFYELQCGAISPEEMSVCLFELFAEWLDGTETDDVLYHQEDDLFPMIEM

SEQ ID NO: 1733 - DNA, 249 bp, Klebsiella oxytoca
atgagtggattgaaaggccgccgaatcagcgcggatatgtttgctatgatgttaaaagtacctgtcggggagctggtttttgcagcccgacacaaccagccgctacacggacaggcgctacctccttacgggatcggcggcgggaaaagctggagctcgaccgcctccacccgcagtatgacgtttgatatgcaggatgcggtcgatttcagcgagaaatttcataaaattcagtcgcctgacggctga

SEQ ID NO: 1734 - protein, 82 aa, Klebsiella oxytoca
MSGLKGRRISADMFAMMLKVPVGELVFAARHNQPLHGQALPPYGIGGGKSWSSTASTRSMTFDMQDAVDFSEKFHKIQSPDG

SEQ ID NO: 1735 - DNA, 495 bp, Klebsiella michiganensis
atgttgtgcggcctgttggtctgccatctgcgccttgtcccgctccagctggaactgctgcagctgtaccttgagtccttccaactggacaagctgctcgggcggcagctgcgccagcttctgctccagcacgcgctgctggtcagcggggttgatggcaccgttgacggtctcgacaatactggccaccgagtcagcggctttcgccgtggtactgtcgttgccgaaccagccgccgacagtgcgaaccagagaaggtccggccttcagcagggcggaggcaatagtggaaagcgttacaggatccaatttaatacccccttacaaaccagccacgaatacagaattattatggtcagtgcagcaagcagattgagcagcatgaccccaggactggtcgcgaagacaggggcaaaggccagcagaaaagcaccgacagcccagattagccaggacgcgcaacgtacccatttgcgggcaggacggcccggctga

SEQ ID NO: 1736 - protein, 164 aa, Klebsiella michiganensis
MLCGLLVCHLRLVPLQLELLQLYLESFQLDKLLGRQLRQLLLQHALLVSGVDGTVDGLDNTGHRVSGFRRGTVVAEPAADSANQRRSGLQQGGGNSGKRYRIQFNTPLQTSHEYRIIMVSAASRLSSMTPGLVAKTGAKASRKAPTAQISQDAQRTHLRAGRPG

SEQ ID NO: 1737 - DNA, 294 bp, Klebsiella oxytoca
atgtgtgcgcacggtatcgcgggaaacgcgatgaccatacgtctgcaggcacgtctgcagaatcgactcgttggcgctgtcgccgcattcgacaagagatcgcaaaataaccaggcgctggtcctggtcgagaatgtcacgcatagtcacctcttatttttccttcagctcattttccagaagcagatcgctgacgtgtttcacctggcgaatcgccgggcccagttcgcgcaaatcgccccgcaggttgctcatctccagctgcagctggtgaaggtctttctggctgggtag

SEQ ID NO: 1738 - protein, 97 aa, Klebsiella oxytoca
MCAHGIAGNAMTIRLQARLQNRLVGAVAAFDKRSQNNQALVLVENVTHSHLLFFLQLIFQKQIADVFHLANRRAQFAQIAPQVAHLQLQLVKVFLAG

SEQ ID NO: 1739 - DNA, 669 bp, Klebsiella michiganensis
atgagcatttatcaacgcattaacggcgctgactggcgcaacgtatgggtggttggcgatctgcatggatgctatacgctgctgatgaatgagttggacaagattaagttcgatccggccagcgatctgcttatttccgttggcgacatggttgaccgcggagctgagaatgttgagtgtctggatctgataaatcagccgtggttcagggctgtgcgtggcaaccatgagcagatgatgatagacggcctgtcagcgcacggaaacgttaatcactggctggttaacggcggaggatggttctttaaccttgattacgacaaagagcgcctggccaaagcccttacgtataaggcagcagaattacccctcatcattgagctgaaaacaggtgataaaaaagtcgtaatttgccatgccgattatccgcatagtgaatatgagtttgataagccagtcgatgcgcatctggtgatctggaaccgcgaacgcgtcagtgatgctcaagatggaattgtgcatgagataaccggcgcgcacctgtttattttcgggcataccccggcgcgccagcctctcaaatacgctaaccagatgtatatcgatactggtgcggtgtttggtggtcgcctgaccttgctacaggtgcagagtggtgatcatgcgtaa

SEQ ID NO: 1740 - protein, 222 aa, Klebsiella michiganensis
MSIYQRINGADWRNVWVVGDLHGCYTLLMNELDKIKFDPASDLLISVGDMVDRGAENVECLDLINQPWFRAVRGNHEQMMIDGLSAHGNVNHWLVNGGGWFFNLDYDKERLAKALTYKAAELPLIIELKTGDKKVVICHADYPHSEYEFDKPVDAHLVIWNRERVSDAQDGIVHEITGAHLFIFGHTPARQPLKYANQMYIDTGAVFGGRLTLLQVQSGDHA

SEQ ID NO: 1741 - DNA, 1290 bp, Klebsiella oxytoca
atgaatcgtcgtctttttgccaaaagagcacttgtaattagtgcaactctgccgctttcaaaagtttcttttagtaattataggtgtttctctgcttctcaagaagataatacatgtgtcgtgaacattgatgattatggatgtcatagccacagtcaccatagttactttgacaacagagcgattttacaatatataattgatacatgtgctcaattaagtctaaagaataattctcgaatggtgattcatattcctgaaggaacatattatttatctgctacggcttcaaattcaaagagtaattcaactataggggcgtattgtctcttaatgcgaagtaatataattcttaaaggtgaaggtgtattaaaattattaccaaaccaatatggtaaaggcgcatattttaggattctcgcaagcgaaaaaaatgataaaatagaaaattctgatattcgggacattacatttgatggtaactcatcatttcagaccgatggatttcaagcaagtaatattctattagagtgtaaagctaatattactattgctaatgttcgtagtataaatgcaaatggtaatggtattcttattaaaggggaagcattacaaaatcagccagtagcagatgtgtgtattaatgattgttttgttactaattgtaagaagattggtattcaggtaagtcagtttaatggtttgaaaatttataataacatcgtctcacattgcaacgataatggcatagatatttatggtgatttgggtggcactttcccaaacataacaaatgggaatcactttttaatatttaataataaagtttcattttgccttaatggcatttttccagaaaccgtgtcaaacggtaaagtctacggtaataaaattgaatatatgaaagagtctggagttcatatcaatcgaattcatggattgccgagtaatattatcatcgaaaataatcaaatagttaattctacttccggtgttttttttactggagatatgaagaatattctagtgaaaaacaataagatttatgaagtcactaattccttcttttcctttggtggaggtaaagggaatacttctgggatacaggtaattaataatttaatatttgtaggtgataataaaagtacattgtcttcatttgcaggagaaaaaattcgtaatatcaatgttagctataattatattacacaaaaacacagtgattttaaattctccttgaatcgtaataatgcacgttttgtggatgaaaaaacggtgataattaaatga

SEQ ID NO: 1742 - protein, 429 aa, Klebsiella oxytoca
MNRRLFAKRALVISATLPLSKVSFSNYRCFSASQEDNTCVVNIDDYGCHSHSHHSYFDNRAILQYIIDTCAQLSLKNNSRMVIHIPEGTYYLSATASNSKSNSTIGAYCLLMRSNIILKGEGVLKLLPNQYGKGAYFRILASEKNDKIENSDIRDITFDGNSSFQTDGFQASNILLECKANITIANVRSINANGNGILIKGEALQNQPVADVCINDCFVTNCKKIGIQVSQFNGLKIYNNIVSHCNDNGIDIYGDLGGTFPNITNGNHFLIFNNKVSFCLNGIFPETVSNGKVYGNKIEYMKESGVHINRIHGLPSNIIIENNQIVNSTSGVFFTGDMKNILVKNNKIYEVTNSFFSFGGGKGNTSGIQVINNLIFVGDNKSTLSSFAGEKIRNINVSYNYITQKHSDFKFSLNRNNARFVDEKTVIIK

SEQ ID NO: 1743 - DNA, 198 bp, Klebsiella aerogenes
gtgagtaaccagatccctgaagctgtagccgtagcgatgattaatgcggccagagatatcaccgtggcaaaaattaatgccaaaggcgcaaagttcgatggttatgtaaacccggtaaactggtttgatcgttcaatgaaagaggtccgcgaagccgttaaagcagtgcttcctgacgttgagcgggaggcaaggtga

SEQ ID NO: 1744 - protein, 65 aa, Klebsiella aerogenes
MSNQIPEAVAVAMINAARDITVAKINAKGAKFDGYVNPVNWFDRSMKEVREAVKAVLPDVEREAR

SEQ ID NO: 1745 - DNA, 309 bp, Klebsiella oxytoca
atgactgagttaagcaaaccagccagtaagggaagaaacgatggggaatgcaagtctctgacctcagatgacgctcgcttcctagtgattcgtggtgactatagcgaatccgatatcatccgggcggcagttaaccagaacgttattgatacagaaggcgcacaggattttgcttctagcgcacgctattaccagtgctggtataaagtcagcccaatcggcggtcaggatggctattcaggctggcatcatccgcgcaacacaccgtgtcgcggcgcgtactttgcgtcagttttgcaatgggattag

SEQ ID NO: 1746 - protein, 102 aa, Klebsiella oxytoca
MTELSKPASKGRNDGECKSLTSDDARFLVIRGDYSESDIIRAAVNQNVIDTEGAQDFASSARYYQCWYKVSPIGGQDGYSGWHHPRNTPCRGAYFASVLQWD

SEQ ID NO: 1747 - DNA, 345 bp, Klebsiella oxytoca
atgagcaaatcactaaatgcacgctgtatccgtcgctgggaagttgagtttaaaggccgctgcgactcgaaatttagcactgtctggcgcaagcgtgacctgcgcggatatattcgcgagtctgggctggttactgctttctgcatggttgagcagatggctgagaataatgcaaaggtggattatgacggctctgctgttggctggtcgcctgagttcgcagcatggtacgacgaacgccgggggcagtacctcaaagaagctcgtgactttctgaacgaagaagccacaaccgaagaaatcgacgaagagattcagagcgagctggaggcttggaatgactga

SEQ ID NO: 1748 - protein, 114 aa, Klebsiella oxytoca
MSKSLNARCIRRWEVEFKGRCDSKFSTVWRKRDLRGYIRESGLVTAFCMVEQMAENNAKVDYDGSAVGWSPEFAAWYDERRGQYLKEARDFLNEEATTEEIDEEIQSELEAWND

SEQ ID NO: 1749 - DNA, 786 bp, Citrobacter freundii
gtgcccgccgagatttcggtgcaactatcacaagcactcaacgtcatcgggcgccacttggagtcgacgttgctggccgtgcatttgtacggctccgcactggatggcggattgaaaccgtacagtgatattgatttgctggtggctgtagctgcaccgctcaatgatgccgtgcggcaagccctgctcgtcgatctcttggaggtttcagcttcccctggccaaaacaaggcactccgcgccttggaagtgaccatcgtcgtgcacagtgacatcgtaccttggcgttatccggccaggcgggaactgcagttcggagagtggcagcgcaaagacatccttgcgggcatcttcgagcccgccacaaccgattctgacttggcgattctgctaacaaaggcaaagcaacatagcatcgtcttggcaggttcagcagcgaaggatctcttcagctcagtcccagaaagcgatctattcaaggcactggccgatactctgaagctatggaactcgccgccagattgggcgggcgatgagcggaatgtagtgcttactttgtctcgtatctggtacaccgcagcaaccggcaagatcgcgccaaaggatgttgctgccacttgggcaatggcacgcttgccagctcaacatcagcccatcctgttgaatgccaagcgggcttatcttgggcaagaagaagattatttgcccgctcgtgcggatcaggtggcggcgctcattaaattcgtgaagtatgaagcagttaaactgcttggtgccagccaatga

SEQ ID NO: 1750 - protein, 261 aa, Citrobacter freundii
MPAEISVQLSQALNVIGRHLESTLLAVHLYGSALDGGLKPYSDIDLLVAVAAPLNDAVRQALLVDLLEVSASPGQNKALRALEVTIVVHSDIVPWRYPARRELQFGEWQRKDILAGIFEPATTDSDLAILLTKAKQHSIVLAGSAAKDLFSSVPESDLFKALADTLKLWNSPPDWAGDERNVVLTLSRIWYTAATGKIAPKDVAATWAMARLPAQHQPILLNAKRAYLGQEEDYLPARADQVAALIKFVKYEAVKLLGASQ

SEQ ID NO: 1751 - DNA, 474 bp, Enterobacter cloacae complex
atgcgtttatctcatgccgccctggcggtcgttatgctggcctcagcctccgttgcacaggccatccccaatatgtggagcagcggcttcgctcagggggtgaccgaatacatcatcaccagtccggagaaagtggtctttaatcttaactgcactaccagccccgatgagcagaatgtgttgcagcacagcgtatacctgaccctgcccgacggtaccttgctgaattctcatgatgacggaaccgacatcaccgtggtgatggatgacagccagtatccgttaccgtcatccctgggctggcgaaacggtgataatgcctgggtgtcatttattgacgcactggggcaggcagcaaatttcgatgtttatgtcagcgataaaaaagtaggcactttcagtccgggtctgaagaatacgcaaaaagagctgtctgacctcagtgagtgccggaccacccattacagcgattaa

SEQ ID NO: 1752 - protein, 157 aa, Enterobacter cloacae complex
MRLSHAALAVVMLASASVAQAIPNMWSSGFAQGVTEYIITSPEKVVFNLNCTTSPDEQNVLQHSVYLTLPDGTLLNSHDDGTDITVVMDDSQYPLPSSLGWRNGDNAWVSFIDALGQAANFDVYVSDKKVGTFSPGLKNTQKELSDLSECRTTHYSD

SEQ ID NO: 1753 - DNA, 465 bp, Enterobacter cloacae complex
atgaaaatgaggtttgcagttcttgcgctggtcttcagcgtcagtctcagtaccgcggcccgggaacgagccgatattccggcgaacactatctggtcgtttaaggaccctggtggtcgggttttatgggatgtctgtggcggaaaacaaagctcctgcaccatcgtgttggcggcaacgaacagggtagccatcgttaatcgtaaatccactaacggctgcgccctgggggatttttacgtggtgggcaaacccgaaaaagcctggaaccagtacgacacggggacctgcagcagcaatgcttacttcagtcaggggaccatgaacaacgggcagtaccggactatcgatgtccgtctcaacggggaactggtaaaacgattcccggtggaatactggtcgatggtgaaatccttttcgggtagcaaccggccaaaatggaaggacaagacgacagaaagataa

SEQ ID NO: 1754 - protein, 154 aa, Enterobacter cloacae complex
MKMRFAVLALVFSVSLSTAARERADIPANTIWSFKDPGGRVLWDVCGGKQSSCTIVLAATNRVAIVNRKSTNGCALGDFYVVGKPEKAWNQYDTGTCSSNAYFSQGTMNNGQYRTIDVRLNGELVKRFPVEYWSMVKSFSGSNRPKWKDKTTER

SEQ ID NO: 1755 - DNA, 255 bp, Klebsiella oxytoca
atgctcaagcgcaaacagctgcagcgcgtactgctgccgctaatctctctgatactgttagccagctgcggcagcaggcaaaaaaacttgccacccgcctggacgccgcaagccacaccgcaagtcttgccgctaccgtcagaagcaaaacaaccggcgccaccgctggagtgctcgccgacatgcttggcaaccttgcagaagaagctcgacggtatgctgcaatcgctgacgaacgctacacagcaggaatga

SEQ ID NO: 1756 - protein, 84 aa, Klebsiella oxytoca
MLKRKQLQRVLLPLISLILLASCGSRQKNLPPAWTPQATPQVLPLPSEAKQPAPPLECSPTCLATLQKKLDGMLQSLTNATQQE

SEQ ID NO: 1757 - DNA, 291 bp, Klebsiella pneumoniae
atgactaaaaatattgaaagtaaaaatacatctactgagttgttctatgatcttgcaaagcgttcttttgaagcgagctggaaaacaatgcaggatatgtgtagtgacagcatttcgcatcttgtcgatgatgctgattttatgagtgcatttataaggataacgattaatcatgtttgtcataactttgacaagttaaccgcgcaggaagactatcatgggaatattgaagaggttaactacgaagaagtagcagaacggcttgtacgtaatgcttgggtgtattgttaa

SEQ ID NO: 1758 - protein, 96 aa, Klebsiella pneumoniae
MTKNIESKNTSTELFYDLAKRSFEASWKTMQDMCSDSISHLVDDADFMSAFIRITINHVCHNFDKLTAQEDYHGNIEEVNYEEVAERLVRNAWVYC

SEQ ID NO: 1759 - DNA, 714 bp, Klebsiella michiganensis
atggaaaaagattcaagggttgaattttataagtcaaatcatcctgcaggggttattaataatttcaatcacggtttagagaaaacaactgctgaatatattctattttctgatcaggatgatgtatggttgaatgataaagtggagttacttttaaataagatacaaaaggcagaaagtaattgcaacgagccgacaccgtgtttagttttttctaatttgtgcgttgttgatgaaaagttgaatgttattgggagtgatttttatgtactaaatagtttaaatcctctaaataacctagatgagcgatatttgatttggcgttctacgatctatggatgcactactatcttcaatagagctttgttgtctaaagcaggcttagcaccatgcaatattactatgcatgaccattggtttgcttataatgctcttaagttcggtatgttaatttatgatgaaagaaaacatgtcctatatcgacagcattcaggtaacttggtaggctcgcataaaagaaatatttttagtaaacttagccgattacggaaaacaatgtcaggaattaataaaaatatagctactgttcgctttttggaacacgaaaaaaaaatggcagaacataaatttaccttatttaataatgtcattccatttattagagaaagaacattatatactgtgctgtttattatactttggagtataaaatga

SEQ ID NO: 1760 - protein, 237 aa, Klebsiella michiganensis
MEKDSRVEFYKSNHPAGVINNFNHGLEKTTAEYILFSDQDDVWLNDKVELLLNKIQKAESNCNEPTPCLVFSNLCVVDEKLNVIGSDFYVLNSLNPLNNLDERYLIWRSTIYGCTTIFNRALLSKAGLAPCNITMHDHWFAYNALKFGMLIYDERKHVLYRQHSGNLVGSHKRNIFSKLSRLRKTMSGINKNIATVRFLEHEKKMAEHKFTLFNNVIPFIRERTLYTVLFIILWSIK

SEQ ID NO: 1761 - DNA, 552 bp, Klebsiella pneumoniae
atgcgtaaaattttatccattactgttcttgccgtgttgttatcaggctgtggtgaaaaaggcgattttgagaaagcgatcaacgcaaaatttgcacaatcaaagctgtgctattcactgcagaacaatgacgttactttcaacaaaggttttcctataaaggttaatcatggctaccgttctgccggatacagtgccagtgatgaaatactgaaaggtctggctaatcagggactgcttgatgtctcccaacagcctaacggttttagcagtgttgatgtattagagataacagacaaaggccaagaggttgagttttgggatcgtaaagatggtgcctgtgttggtcatcgggtagttgctgagataaaggaatggaccgagccgggcaacggtaatcagaaagttgttcgcgtcacctatacatggaagttaactgatgttccatcatgggtggacaaaagcgcattctctggtgtgaaagggatgaatgagcctgccgatggtgccatgaatcttgttaaaaccagcaacggctggaaagcgatctga

SEQ ID NO: 1762 - protein, 183 aa, Klebsiella pneumoniae
MRKILSITVLAVLLSGCGEKGDFEKAINAKFAQSKLCYSLQNNDVTFNKGFPIKVNHGYRSAGYSASDEILKGLANQGLLDVSQQPNGFSSVDVLEITDKGQEVEFWDRKDGACVGHRVVAEIKEWTEPGNGNQKVVRVTYTWKLTDVPSWVDKSAFSGVKGMNEPADGAMNLVKTSNGWKAI

SEQ ID NO: 1763 - DNA, 246 bp, Klebsiella oxytoca
atgactttccagaccagatactcagttcagtcgtacaacatagggaaaaacgtgaatgatgtggatattgggatccatgcgtattgctcctggacctacttaaatggctcgccacttggtggtttccagaggattgtttccgataactcaaaccgttggttcgtgacaaataccaaatggggtaattatgagtcgggaggtacaattattgtaacctgcctcgatttaccaggggcgggtatttaa

SEQ ID NO: 1764 - protein, 81 aa, Klebsiella oxytoca
MTFQTRYSVQSYNIGKNVNDVDIGIHAYCSWTYLNGSPLGGFQRIVSDNSNRWFVTNTKWGNYESGGTIIVTCLDLPGAGI

SEQ ID NO: 1765 - DNA, 240 bp, Klebsiella oxytoca
atgtcaatccaaagattattatttgggggcaatatggtggtgctttttatctgggcttgcgtcaggttttattcaaagattatagagaaatcgcgaaagagggggattggtggtgtcgtcttgatggggatgagttttatattgatgatccacgagattttctctccgctattccaggcaattttgatcatgtctataatgcttcatttcaatattatttcacctacgatgattatataa

SEQ ID NO: 1766 - protein, 79 aa, Klebsiella oxytoca
MSIQRLLFGGNMVVLFIWACVRFYSKIIEKSRKRGIGGVVLMGMSFILMIHEIFSPLFQAILIMSIMLHFNIISPTMII

SEQ ID NO: 1767 - DNA, 1926 bp, Serratia liquefaciens
atgaagcttgaagcaattcggttatctggtttccagtcttttggcaaagaaccaactgaactaagcttggaagatgtgacctatctcattggtcctaatggatcaggtaaaacagcagcacttcaggctttatgccgactttttgcgtttgatccaacattgcgtcgtgtccagcgaacagatttccatgtcccttttgatgaggatgaatttcctcctgagagacagttgtggattgaagctgactttctgtttcacgaacttgcggaggacgaggataacagtactgtggctccttattttggtcacatgcgacttgatgagccagaaggtattccacgtgtgcgttttcgcctcactgctactatgggaacagatggggatatagaagaaaacttagtatatgttttggatgtcagtcctgatagctcacctcaaaccacagctcaagtaaccagggcagagcgtaataatattcaagttcactacttaccagccagacgggaccctgcagaccatattgcttacggtgctaacgctttactcggacgtttactccgtgctgttcgttgggatgatgaacgtaatacgattagaggattaaccaaccagataagcgacagcctagcagctaatccctccatcaatgctttcagtgaaagtttgaaattaacttgggcaaccctacacaaaggtaaatttttctcagatcctaaaattacatttgtggcttcggagattgaagcattgctacgccatttatcggtttcatttactcccggccatgatggctcgcttgtcgatttttctcggttgagcgatggtcaaaaatcgatgctttacctttctcttgttctatcatctcaagcgatcggtagagctgttctcgcagaggaagatgttacatttgatcccgacaagttgcgccctccgatttttacgctggtcgcagtggaagaaccagagaatagcctttctccccattacctgggacgtatcgtcagtgccttgaataccatggcaaaaaatattgatgctcaagccttaattgctactcatgcaccatcaatgttacgaagagttgatcctaaatttatacgttatctacgacttactgaggaaagaaaaacacgaattacgtgtatcaaattgccccctaaaacagatgaagcacataaatttgtgagagaggctgtacaagcattccctgagatctatttctcacgcttggttgtgcttggtgaaggagatagtgaaggaatcgtactgcctcgtttgctccaagttaaaggcactcctgtggatgaatcagctattacggtagcaccgttaggtggcaggcatgtaaatcatttctggcggttgctttcagcactgcagattccctatctgactttgcttgatctggatgtagctcggtatggcgctggatgggggcgaattaaatacgttaacgatcagcttgcagcatttgagccggagaaagtacttcctacagaatggaaaattacaaaatggaatgatgaaactacgccaataagaactcaccatttttttaataaaggcactcaagacattttcaaagaacttgaaaaccgatctgtgtttttttcctttcctatggatttggacttttccatgttgctagcttatcccgaagcttatggagttgaaaaagaggagccggatgagtcaacaataaaagcagtgcttggcaaaagctatgacaatatttctcaatatagcgtagatgaacagagttttttcgctacatatcatctacgttttaaattaggtagtaagcccgccgcacacattgatgctctagcgaaactaagcgacaaaaaattaattgcgaatatgccagagtcgcttaatagactagttgatgccgttattgccaaacttggagaattacctgaatga

SEQ ID NO: 1768 - protein, 641 aa, Serratia liquefaciens
MKLEAIRLSGFQSFGKEPTELSLEDVTYLIGPNGSGKTAALQALCRLFAFDPTLRRVQRTDFHVPFDEDEFPPERQLWIEADFLFHELAEDEDNSTVAPYFGHMRLDEPEGIPRVRFRLTATMGTDGDIEENLVYVLDVSPDSSPQTTAQVTRAERNNIQVHYLPARRDPADHIAYGANALLGRLLRAVRWDDERNTIRGLTNQISDSLAANPSINAFSESLKLTWATLHKGKFFSDPKITFVASEIEALLRHLSVSFTPGHDGSLVDFSRLSDGQKSMLYLSLVLSSQAIGRAVLAEEDVTFDPDKLRPPIFTLVAVEEPENSLSPHYLGRIVSALNTMAKNIDAQALIATHAPSMLRRVDPKFIRYLRLTEERKTRITCIKLPPKTDEAHKFVREAVQAFPEIYFSRLVVLGEGDSEGIVLPRLLQVKGTPVDESAITVAPLGGRHVNHFWRLLSALQIPYLTLLDLDVARYGAGWGRIKYVNDQLAAFEPEKVLPTEWKITKWNDETTPIRTHHFFNKGTQDIFKELENRSVFFSFPMDLDFSMLLAYPEAYGVEKEEPDESTIKAVLGKSYDNISQYSVDEQSFFATYHLRFKLGSKPAAHIDALAKLSDKKLIANMPESLNRLVDAVIAKLGELPE

SEQ ID NO: 1769 - DNA, 1668 bp, Serratia liquefaciens
atgattcctattgaagcatggcaacccgcagatggattaacgctggaaccaaatgcaaaacgagcagcaaaagcccgcaaacgttgcttagctcttaccgctggaccgggcgcaggtaaaactgaaatgcttgcgcagcgggcagatttcctgttacggacagggacatgtcggtatccgaagcggattctcgctatctccttcaaggttgatgctagtagaaatctaaaagagcgcgtcgaacggcgctgtggtgcagaccttgcctcccgtttcgatagttatactttccatgcatttgccaagcgaataattgatcgctttagaccagtactgaaaggaagagaggcattagattcagactatacgatcgttgataagaaaatcagtatttctcgttcccaaatcgaatttagtgatcttgttccgttggctattaaaatattgcaaaactcaaaaattgctcgtaattctattcgtcagacttacagcgatattttccttgatgaatttcaggattgtacaaatttgcaatatgaattggttaaacttgcttttctagggactaaaatccggcttactgcagtaggtgataccaagcaaaaaatcatgggttgggcgggagcgatggatggtatattccaaacatttactgatgatttcaatgcagttccacttaacatgtaccgaaatttccggtcaaagccacaattgctgcgagtacaaaacgaaataattcgtcggcttgatcttgcatctgtcatgccagatgaacaattgaatggtgacgaaggtgagattcatgtcgagagtttcagaaacagtcaagaagaagccatttatttggcaaatattattaatgactggattaataaagaaggattggcaccaacagaaattgccgtcttagtttctaagcagttagatctctatgctgaccacctaatgatggagctggaattacgaggaattccatatcgaaacgagcagcaaatgcaggatattactgttgagccagttgcacgtttaatcgtagattatctttcatgcctctatggaaagcgtgaacccaaggcttggatccgtctgatgaatcagctgattccttttgctgatgaagaagtacagtcctgtgcgcgaaaggaccttgatcgtttgttaaaaaaacagcgcaaagaagcaactagtgctgaacagcttgattcacctttttcttgttggtggaagtttgtaaaggagtttttaaaacatattggcactgatacaatcgtagccctatcacctgattacgaatcacacaagcgtctacaggaagtttttcgtgataccaaagcaaggattgaagagttgcttgaaattgaatcagatttgccacaagctcttggacggtttacggatgaccaagcagtcagaattttaaccattcacaaaagcaaagggcttgagttcgattctgtaattataatggcggtggaaaacgagattttctttggtaaccaagatgagaatcgatgtgcattcttcgttggtgtttcacggacgaagagacgattatttttaactcatgctgcacagcgtgaacggcctgctaatgccaaacgttgggaagtccatcgaactgttcaatccgaatatattggttatgttacaccatttattaaacggtaa

SEQ ID NO: 1770 - protein, 555 aa, Serratia liquefaciens
MIPIEAWQPADGLTLEPNAKRAAKARKRCLALTAGPGAGKTEMLAQRADFLLRTGTCRYPKRILAISFKVDASRNLKERVERRCGADLASRFDSYTFHAFAKRIIDRFRPVLKGREALDSDYTIVDKKISISRSQIEFSDLVPLAIKILQNSKIARNSIRQTYSDIFLDEFQDCTNLQYELVKLAFLGTKIRLTAVGDTKQKIMGWAGAMDGIFQTFTDDFNAVPLNMYRNFRSKPQLLRVQNEIIRRLDLASVMPDEQLNGDEGEIHVESFRNSQEEAIYLANIINDWINKEGLAPTEIAVLVSKQLDLYADHLMMELELRGIPYRNEQQMQDITVEPVARLIVDYLSCLYGKREPKAWIRLMNQLIPFADEEVQSCARKDLDRLLKKQRKEATSAEQLDSPFSCWWKFVKEFLKHIGTDTIVALSPDYESHKRLQEVFRDTKARIEELLEIESDLPQALGRFTDDQAVRILTIHKSKGLEFDSVIIMAVENEIFFGNQDENRCAFFVGVSRTKRRLFLTHAAQRERPANAKRWEVHRTVQSEYIGYVTPFIKR

SEQ ID NO: 1771 - DNA, 1467 bp, Citrobacter koseri
ttgggcgctatcgatggtgaagcgaaaagatacacacatataactggtgatttttcacaagacctatcagatcttgttaactttaaaatgaagcttcctaatcggactgatgggaaattagagactcctccgccagcatattattttttaccattctatattgatcagataaaaagctggagttcaccttgggattcatttgaaaacttaggtcagtatgccaactggaaaaaatcgttaataaagtattttactggctatctgaaaccagaacattttgaattagaagaagaaatttatgaatatagtgaggtaaaaaaagaatcaacagcaaaaatagaaaaatttcaaagcgcagttgacgtcatagttgataattctgctgatatcaccatagcattagataatgagaaatttagcgaaattcagaaagagataaatactgagcttcaagagtttatcgattaccaaaggaggctttatgatgctcaggctacgattacctcaaatatatatgatctcgaaaaacagtatgaattagccaccagttctgcaaacgaactcgaagaagattataagtttgcggtcgaatctataccgacagatcatttagagtgcccattgtgtggtactcttcacgataactcactgactaacagagcattgcttctttcagagaaggattcgctacttgacgaggcaaactcaatagcatcagaaatagaggcgcttagatcctcattatttgagttaaatgaggtagctcaatttgctactaatgaaattgaaagaattaataagaagtatctcaccgatgacaatgcgggcgaaaaaacactcattacacaagtaattgatgctatttcgaaagaaaaggtctcaagaagtattcaagttaaaattgataatgaagatcttaaaatcagcaaagccaataactctgtcgccgaattgaaaaaagatcagagaaaacttctttcaaacaaggataaggaagaactgaattcttcttttatgtcaaagctattgggaaatattgaagcactaggatcaacaggagtaaatcttagcaaagtgaaatcacctactgattataaacagttacttggtggcggtgctgctgaggctgccaggggattgcttgcttatcaactctccgtactgcaacaaatacatagtgctaaaacttgcatagtgcctcctttcgtcattgatacacccaaccagcaagaacaggcggggcatcgttatgaaaccgtcatcaaagaactaatgcgcagtatcccagaggactatcagataatactgtgtgcaatggagaataatgcattaaatgaatttaaaaatgatgccaatgttattacattaaattctggaaagttattggattcttcccaatatgactctctaagatctgagtataaaaacattcaattggctgtaagagaaacgagggatgatgattaa

SEQ ID NO: 1772 - protein, 488 aa, Citrobacter koseri
MGAIDGEAKRYTHITGDFSQDLSDLVNFKMKLPNRTDGKLETPPPAYYFLPFYIDQIKSWSSPWDSFENLGQYANWKKSLIKYFTGYLKPEHFELEEEIYEYSEVKKESTAKIEKFQSAVDVIVDNSADITIALDNEKFSEIQKEINTELQEFIDYQRRLYDAQATITSNIYDLEKQYELATSSANELEEDYKFAVESIPTDHLECPLCGTLHDNSLTNRALLLSEKDSLLDEANSIASEIEALRSSLFELNEVAQFATNEIERINKKYLTDDNAGEKTLITQVIDAISKEKVSRSIQVKIDNEDLKISKANNSVAELKKDQRKLLSNKDKEELNSSFMSKLLGNIEALGSTGVNLSKVKSPTDYKQLLGGGAAEAARGLLAYQLSVLQQIHSAKTCIVPPFVIDTPNQQEQAGHRYETVIKELMRSIPEDYQIILCAMENNALNEFKNDANVITLNSGKLLDSSQYDSLRSEYKNIQLAVRETRDDD

SEQ ID NO: 1773 - DNA, 1137 bp, Klebsiella oxytoca
atgcgtgcatcaaaactcacaaagataggtatggcgaccctgatgttttcttgctctgtctgtgctcaggagagcatcaagctgggcgtgattgaaccgcttactggctcagtggcttataacggaaccgcgtatgttaatggcgccaggctggcgttggcggagtacaacaagcgtacggcagcgaagccggtgcagctggtgattgaagatggacagtgcagcccggctaactccgttaacgcggcagaaaagctgattcagaaagataaggttgtcgccctgcttggcgccttttgcagttctgccaccgcagcggtcatgccgctggcgcaacagtataaagtgcctttcctgaccggcgtctcttcccaggccgatctgaccgaaagaaataatccttactttttccgttccgctgaaaccgatgcgctgttggcgaaagcgttcgctaaaatcctggcggaaaaactgcaactaaaacgtgtcgcctatattggcgtaaatgatgactggggtcagggcagtattcagggcttctcccaggacctcgctacgcacggcgtaaaaaatgtcatgacggaatattttgatcatggcgccaccgatttctacacgctgctggccaaactgcgcaacgctaaggctgacggcgtgtttattgccgcagagactcaggatggctcgattctggtcaagcagctcaaagagtttggtattgatatcaatgtctttggtgtcggctcttgggcaacctcagactttattaacctggtgggcgaggcttcagaaggcatttacgcagcggtgccttatgtctataccttgccgggcgacagcaaccagcaatttgttaaagcttaccaggcgcaatacaagcagtttccggataagtacgccgctgccggctataactccacgcacatcatgctggatgcaataggtcatgcggattctacggatgccgcaaaaattattgccagtctgaaagccaccgattatcacgcccccaatggcaattaccgcttcactgatcaaggccaggcttacgggtttgatgccgcgttggtgcagattcgccagaaagtccctgaggtggtaaccagcactgccgttgaggcgccggagaaaaaataa

SEQ ID NO: 1774 - protein, 378 aa, Klebsiella oxytoca
MRASKLTKIGMATLMFSCSVCAQESIKLGVIEPLTGSVAYNGTAYVNGARLALAEYNKRTAAKPVQLVIEDGQCSPANSVNAAEKLIQKDKVVALLGAFCSSATAAVMPLAQQYKVPFLTGVSSQADLTERNNPYFFRSAETDALLAKAFAKILAEKLQLKRVAYIGVNDDWGQGSIQGFSQDLATHGVKNVMTEYFDHGATDFYTLLAKLRNAKADGVFIAAETQDGSILVKQLKEFGIDINVFGVGSWATSDFINLVGEASEGIYAAVPYVYTLPGDSNQQFVKAYQAQYKQFPDKYAAAGYNSTHIMLDAIGHADSTDAAKIIASLKATDYHAPNGNYRFTDQGQAYGFDAALVQIRQKVPEVVTSTAVEAPEKK

SEQ ID NO: 1775 - DNA, 873 bp, Klebsiella oxytoca
atggatctgttcctgcaattttttgctaacggcctggtgagcggcaccttttacgctctgtccgcgctgggcctgacgctgatatttggtttgatgcgcgtggtcaacttcgctcatggtgagttttatatgatgggcggaatgttgggatggtttgtcactcacgcgcttgggctgaactttttcaccggtttgctggcggtcgctatcatcatggcggcgtttggctggctggtggatcggttattgatccaacgcgttcgcggccagtctgaagagccaggcatcctgttaacgatagggctgtcgatttttatcgcgaataccgcgttactcctcgcaggcacctcaccgcaaaaaattgacgggccattgcctaatgccccgatctttatcggaccggttgtattgaccgagatgcgcctgttcgcggtggcggtttgcgccgtgctgatcctcggcgcgcatctgatcatcaaaaaaacccgactgggacgcgcaatgcgcgccacgtttcaggatcccatggctgcgcagctggtagggataaaaatttcccatgtttacgccagtacttttgccatgggaacggtgctggcagccagtgcaggcatgctgttgggcgcgatctacaccacccaggtcaccgtcggtgggttggtgagcctcaaggcttttgtggtagttatcctcggtgggatgggcagctttgccggtgcgattatcggtggcctgttgttgggcatcgccgaggcgatgtggggcggttatatctctaccggcatggtcgacattatcggcttcctgatcgttattgtgatgctggttttccgaccctatggcctgttttcaacacgcgcggagagggcatga

SEQ ID NO: 1776 - protein, 290 aa, Klebsiella oxytoca
MDLFLQFFANGLVSGTFYALSALGLTLIFGLMRVVNFAHGEFYMMGGMLGWFVTHALGLNFFTGLLAVAIIMAAFGWLVDRLLIQRVRGQSEEPGILLTIGLSIFIANTALLLAGTSPQKIDGPLPNAPIFIGPVVLTEMRLFAVAVCAVLILGAHLIIKKTRLGRAMRATFQDPMAAQLVGIKISHVYASTFAMGTVLAASAGMLLGAIYTTQVTVGGLVSLKAFVVVILGGMGSFAGAIIGGLLLGIAEAMWGGYISTGMVDIIGFLIVIVMLVFRPYGLFSTRAERA

SEQ ID NO: 1777 - DNA, 987 bp, Klebsiella oxytoca
atgaaatttgaacgcaataccctgctgctgctggcggcgctggcggcggcattcccgctgctggtacaggatcaatacctgctgcatattggcgtcatggtacttatctatgcggtactcgccagcagcctgaacctgaccgtgggttatatcggtgaattctcgcttggtcataccgcttttcttggtctgggagcctatgcggccgcgctgctgtccagtgatttcggctggccgctctgggcgaccatcccgatggccggtttgatcgcagcgatagcgggtgccttaatcggcgctatcacgctgcgcctgcagggaccgtattttgtgattatcaccctggctttcgctgaagtgttgcgcatcatagccaataactgggtggcagtaaccaatggtccgatgggcgtggcgggtattgctcagccgcactttatggcgggactggccgcgctggatattaagcgcagctactactatctggccttgctgattgccatgctggcgctctacctgatctatcgctttgtttactccagccaggggcgcgccgcggttacggtgcgcgaaaatcgttatgtggctcagtcggtgggcatctggcccttcgcttatgccatgaaagccttcgtcctcggtgcgtttctcgctggcctggcgggaggtttttatgcgcattacatcacctttgtcggaaccgacgtattccagttcagctttatggtgtcgatgatcatcatggtgctactgggcggaaaaggcacgctggttggaccggtcatcggcgcgctggttgtcacgctgttaaatgaatatctgcgtgaagcccaggagctacgtatgtccatcttcggcctaattgttatggccgtggtactgtttcttcccagggggctgatgggttttctgactcagcgccgggagcaacgcagccgggccgcgacggcaaaaacgacccaggcacagcaggagaaaaccgtatga

SEQ ID NO: 1778 - protein, 328 aa, Klebsiella oxytoca
MKFERNTLLLLAALAAAFPLLVQDQYLLHIGVMVLIYAVLASSLNLTVGYIGEFSLGHTAFLGLGAYAAALLSSDFGWPLWATIPMAGLIAAIAGALIGAITLRLQGPYFVIITLAFAEVLRIIANNWVAVTNGPMGVAGIAQPHFMAGLAALDIKRSYYYLALLIAMLALYLIYRFVYSSQGRAAVTVRENRYVAQSVGIWPFAYAMKAFVLGAFLAGLAGGFYAHYITFVGTDVFQFSFMVSMIIMVLLGGKGTLVGPVIGALVVTLLNEYLREAQELRMSIFGLIVMAVVLFLPRGLMGFLTQRREQRSRAATAKTTQAQQEKTV

SEQ ID NO: 1779 - DNA, 783 bp, Klebsiella oxytoca
atgagcacctcttcgcaacccacgctggcagtacaaggattatgtaaaacctttggcggcctgaaagcggtgcaggatatcagtttcgatattatgccgggtgagctggtcgggctaattggaccgaacggcgcaggcaaaaccacctgttttaatttaattaccggcttttataagcctgatggcggccgggtgctgttttgtggagaagagatcaccggtaaggctcctcacacgcttgcccgccgtgggctggtacgcagctttcagaaaaccaacgtgctcaaggcgttaaccgcgtttgaaaacgtgctggcaggacattatctggcggccaggcaatcgttaatggatatctttttgcctcgcgcacatgtccgtcataccgaacagaaagtacgcgaaagcgccgccagcatcatcgacataatgggcctgtcacatcgcatcaacacgccagccagcgtgctctcttgtggggagctacgtttgctggaggtggcggtggcgctggcggcaaaaccccggttgctgatgctggatgagcccgccgccgggttaaacagccaggaggcgcgcgtatttggtcagattttacagcgtctgctgggaacccacgtggagtcgatggtgatcgtggaacataacatgcatctgatgatggaaatttgtcaccggctggtggtgatgaactttggtcagaagttgactgagggtacgcccgaagcggtgcaacgccatccgcaggtgatcgaagcttatcttgggaaggcgagcgcatga

SEQ ID NO: 1780 - protein, 260 aa, Klebsiella oxytoca
MSTSSQPTLAVQGLCKTFGGLKAVQDISFDIMPGELVGLIGPNGAGKTTCFNLITGFYKPDGGRVLFCGEEITGKAPHTLARRGLVRSFQKTNVLKALTAFENVLAGHYLAARQSLMDIFLPRAHVRHTEQKVRESAASIIDIMGLSHRINTPASVLSCGELRLLEVAVALAAKPRLLMLDEPAAGLNSQEARVFGQILQRLLGTHVESMVIVEHNMHLMMEICHRLVVMNFGQKLTEGTPEAVQRHPQVIEAYLGKASA

SEQ ID NO: 1781 - DNA, 726 bp, Klebsiella oxytoca
atgaaaagttctgaaccctgcatgttaaaaatcgaaagcttacaggtggcttatggcaacgctaccgctctgcatggcatcgatatggaaatccagcgtggcgaaattatcgccttgatcggcgctaacggcgcggggaaaagtactacgctgcgcaccatctccggtctgttaaagcctaaaaacggcacgatttactggcagggcaacgcgataaatggctggtcaacggaacgtattgtcgccgcgggtattgcgcactgtccggaagaacgccacgtctggccgaccatgagcgtgtatgaaaacttaatgatgggcgcttatctctgccgttcaggaaaagaagtcgaagagcggatcgggatggcctttcaccgtttcccacgcttacgtgagcggcataagcagctggcgggtacgctgagtggcggtgagcagcaaatgttggccatcgcacgtgcgctgatgtcggaacctgagctgctgttgctggacgagccgagcctcggattatcgccacgtatggcagatgaggtctttgatgtgatccgtgacattaatcagcacggggtaacggcgttgatcgtcgagcaaaacgtctataacgcgctttctgtcgcttcccgcgcttatgtggtggagaccggacgtatcgccactcatgccatggcggcgagcctgcttgaggacaaagagttactcaatgcttatctgggcgggtaa

SEQ ID NO: 1782 - protein, 241 aa, Klebsiella oxytoca
MKSSEPCMLKIESLQVAYGNATALHGIDMEIQRGEIIALIGANGAGKSTTLRTISGLLKPKNGTIYWQGNAINGWSTERIVAAGIAHCPEERHVWPTMSVYENLMMGAYLCRSGKEVEERIGMAFHRFPRLRERHKQLAGTLSGGEQQMLAIARALMSEPELLLLDEPSLGLSPRMADEVFDVIRDINQHGVTALIVEQNVYNALSVASRAYVVETGRIATHAMAASLLEDKELLNAYLGG

SEQ ID NO: 1783 - DNA, 1230 bp, Klebsiella oxytoca
atgaaccataaattacgagttggaatcattggcggtggaattggcggtgcggcgctggcgcgcgctttgcagcagcaaggtatcgatttccacctgtttgaacgtgctcccgcgtttggtgaagtgggggcaggcgtacagatgacgcctaacgcggtaaaagtgctgaaagcgctgggactcacagagcctcttaaacaggtaggttttttaccggaagcgatggtaggacttaactgggaaagcggcaatgaactcttccgcacgccgctaaaatcaacttgccccgaggtttacggcgcggaattttatcatgtccaccgtgccgatttgcatagcctcctgacgtcggatattcccgccgaaaaggtcacctttaatgcgcaatgcaccgccgttcagcatagccccctgtcagcgacagcattttttgctgacggtacctcttttgaagcagacctgattgtaggcgctgacggcatccattctgcagtacgcagcgcgctctggggtgatgaaaaaccgcagttcaccgggcatatgtgctggcgagcactggtatcggttgctgagcacccattgccgtttgtcggaccttacgccgccttttggatgggaccttcagcccatgtcgttacttactatgtcaaaggcggcaaggcggtgaacattgttgcggtcactgaaaccgcagaatgggtaaaagagtcgtggaccgaagccagctcaaccgatgaattattaaacgcttaccagggctggcatccggatgtgattcagctgtttgaacgcaccgatccgactcagacctttaaatggggcttgtttgatcacgatccgatggcgcagtggtctgttcctcatgtcacgctgttaggcgacgcagcgcacccaatgctgccatttttatcgcagggcgcggcgatggccattgaggatggctatgtactggcgcaggcgctggcgcatttcggcggcgatgttcctgcggcgctggcagcctatgaagctgaacgccgtccgcgcacgtctcaggttcagctccaggcccgtgaacgtggtcgcacctatcatctctcctcgccggaagaattacgacaacgagacctcgcgtttcaacaggagcaggcgaaaaaccctaatgcggtgggtatccgcgctgaatggatttacgaatatgacgccactcgctgtcgcgagcgatttgatgagacccgagcgcacgcgtaa

SEQ ID NO: 1784 - protein, 409 aa, Klebsiella oxytoca
MNHKLRVGIIGGGIGGAALARALQQQGIDFHLFERAPAFGEVGAGVQMTPNAVKVLKALGLTEPLKQVGFLPEAMVGLNWESGNELFRTPLKSTCPEVYGAEFYHVHRADLHSLLTSDIPAEKVTFNAQCTAVQHSPLSATAFFADGTSFEADLIVGADGIHSAVRSALWGDEKPQFTGHMCWRALVSVAEHPLPFVGPYAAFWMGPSAHVVTYYVKGGKAVNIVAVTETAEWVKESWTEASSTDELLNAYQGWHPDVIQLFERTDPTQTFKWGLFDHDPMAQWSVPHVTLLGDAAHPMLPFLSQGAAMAIEDGYVLAQALAHFGGDVPAALAAYEAERRPRTSQVQLQARERGRTYHLSSPEELRQRDLAFQQEQAKNPNAVGIRAEWIYEYDATRCRERFDETRAHA

SEQ ID NO: 1785 - DNA, 207 bp, Klebsiella oxytoca
atgagcaaccgtatccctaacttcggctggaaccgcctgaagctggcaacgctcacctatgagcaactggctcaactggaagagcaagtgaaggccgaacatgcctgcaaaaacggaattcacctgttcgacaaagcaggtcagcgcaaactcgatgcccttagctgggccgtatacaacaagcagaaggcggagcgtgcagcatga

SEQ ID NO: 1786 - protein, 68 aa, Klebsiella oxytoca
MSNRIPNFGWNRLKLATLTYEQLAQLEEQVKAEHACKNGIHLFDKAGQRKLDALSWAVYNKQKAERAA

SEQ ID NO: 1787 - DNA, 234 bp, Klebsiella oxytoca
gtggatcacccggttaaatttctcatgagcaaaaagttgggcaataccttcacgatccgccagatcgattttatggaaactgaacaggggggattgcagcaaatccagccgggcctgcttcagattgacatcatagtattcgttcatgttgtcgagtccgacaacctcatgacccgcctgcagaaggcgtttgcacgcatgaaaaccgatgaatcctgcggctccagtcactaa

SEQ ID NO: 1788 - protein, 77 aa, Klebsiella oxytoca
MDHPVKFLMSKKLGNTFTIRQIDFMETEQGGLQQIQPGLLQIDIIVFVHVVESDNLMTRLQKAFARMKTDESCGSSH

SEQ ID NO: 1789 - DNA, 654 bp, Klebsiella pneumoniae
atgataaaaaagtattttcttctcgcgctttcgctttctttgtcaggttgtgccttatctcctaacgaggcgataaactaccagaaagaacatgattttgagaatgtaacatttcagacaaaatcaaatgaaaggctgtctgtgtttaatttaagaaataaattcaagaacacaacaggaatggaacttccaaatcaaaacacctatgaatgtcaaagagatgtattatgttattatggaaaatatgctagtgcctatgactctctaatggaaaagtaccaagaagaaaaagataaacagaataaaatattcgctaagcagaaagaagctgagtgtcaggctagtaaagagtgcatggccaagcgtgagatcgattccgcatcttacactttaaataatgtctactattctctaatggcccgatatccataccagcaagctgattctgatgctggggtaaggcatatgtgccgggtggctggagcagcccaaagggaaggtgtgacccttgagtttatgaagaagcacattagcttaacagaaggaattagccctgaaatgagataccaaataatccaggttgctgaggcttgctggaaaatgagcaagtatggcgttccggacggaaccacgcagatcaaatcaatgtattaa

SEQ ID NO: 1790 - protein, 217 aa, Klebsiella pneumoniae
MIKKYFLLALSLSLSGCALSPNEAINYQKEHDFENVTFQTKSNERLSVFNLRNKFKNTTGMELPNQNTYECQRDVLCYYGKYASAYDSLMEKYQEEKDKQNKIFAKQKEAECQASKECMAKREIDSASYTLNNVYYSLMARYPYQQADSDAGVRHMCRVAGAAQREGVTLEFMKKHISLTEGISPEMRYQIIQVAEACWKMSKYGVPDGTTQIKSMY

SEQ ID NO: 1791 - DNA, 465 bp, Klebsiella oxytoca
gtgtcagttttgatgtacaggtataatgttgccatatctttaataggagcagtcatcgctgtattcgttgtgccaaaagattggaagcctctgtttattattttcgtgccatctgttgttgcgtgttatttaataatagaaaaaacaatgatattgcatgagtttggaaagttcagaaatttagctatatttacgttagcattcatgccctctggattttacagcgtagggactttcaatgctcaaaatataataaatggagtaaagacttacattatcagttcggacacgccatgcacaactgattctcatgatagctatagatacattgcaacaatttcagacaaagttttcgcactttctttaaaagataaatcagtttgtatattcaaatataattttttgaagctaacgcctgaacctcttcaaacctacaatcagtcactgccaaatgatagcgcctaa

SEQ ID NO: 1792 - protein, 154 aa, Klebsiella oxytoca
MSVLMYRYNVAISLIGAVIAVFVVPKDWKPLFIIFVPSVVACYLIIEKTMILHEFGKFRNLAIFTLAFMPSGFYSVGTFNAQNIINGVKTYIISSDTPCTTDSHDSYRYIATISDKVFALSLKDKSVCIFKYNFLKLTPEPLQTYNQSLPNDSA

SEQ ID NO: 1793 - DNA, 747 bp, Klebsiella oxytoca
atgccagctcaaactgaccacccatgctttaaacaaccagaatcgaacaaaatcactgtatggaaatacatggattttactaagttcgtctcacttatatcttcggggaagttattctattgtcgcgccgataagttcagagacccatatgagggtacttaccctataaaaaatagagaggcagatgacctaatatttgcaagcatccctccagaacatagagcaagtattgcaaataggctttatgaacacattaaatggacgcgccaatggacatacatcagttgctggcacattaatgagttcgagtctgctgcgatgtgggacctttatgcccgaactgaggaagccatcgccattgaaactacttatgagcgactagcctcaagcgtatctggtcacgcatacatcgggttagttgagtacataaactaccaagaagattatatacccgtagacaacgtcttttatccgtatctctttaaaagaaaatcattcgaacatgaaaaagaagctcgcattttgtttcaggagcacccaacaggaaatgatgatgctgacacacctttaattaatgaatgtactggaaaacaagcagaagttaatctagatgtattaataaaaagcattcgcatctgtccaagcgcacccaattggttttatgaattagttgaagagataaaaaataaatatggaattactgccccgatagtaaaatcagacttatatagcgaccctgttctttaa

SEQ ID NO: 1794 - protein, 248 aa, Klebsiella oxytoca
MPAQTDHPCFKQPESNKITVWKYMDFTKFVSLISSGKLFYCRADKFRDPYEGTYPIKNREADDLIFASIPPEHRASIANRLYEHIKWTRQWTYISCWHINEFESAAMWDLYARTEEAIAIETTYERLASSVSGHAYIGLVEYINYQEDYIPVDNVFYPYLFKRKSFEHEKEARILFQEHPTGNDDADTPLINECTGKQAEVNLDVLIKSIRICPSAPNWFYELVEEIKNKYGITAPIVKSDLYSDPVL

SEQ ID NO: 1795 - DNA, 441 bp, Klebsiella oxytoca
gtggatagagagttaagtgagtacgttatgattgagcgggtcgagatgattgcgcgtttgacgacggaaggtacttgtcaggaaagagaccgtgaaattgcgttaaatttgattgcggagatagcaagaggtaatctaatgaaaaataataatttttctgttgttttctacgcaccgcccattgatgaacgctttgcaaggggggggaaagtgaaagttaacatcacgttagataaaggccagcaaataggccagccgattattgatgcgttccggtgtgagttaaccaggaggatacaatctgtttttccgtcaacgtctgttatcgttaaaaagggatctgttgccggtgtcgagctagtggggttcgataaagattctgaccgtgaagcgctggatactatccttcgagaggtttgggaagatgagagctggcgctag

SEQ ID NO: 1796 - protein, 146 aa, Klebsiella oxytoca
MDRELSEYVMIERVEMIARLTTEGTCQERDREIALNLIAEIARGNLMKNNNFSVVFYAPPIDERFARGGKVKVNITLDKGQQIGQPIIDAFRCELTRRIQSVFPSTSVIVKKGSVAGVELVGFDKDSDREALDTILREVWEDESWR

SEQ ID NO: 1797 - DNA, 837 bp, Klebsiella michiganensis
atggatcaagactcacaaagcacagattcactatttgattatttttatgtggataaagagcgtgtaaatgctataactgcgcagcttttcccttctggagttcttaatagtattaagcagacgtctggagagtctgaaaaagaccttaaagagcttaaggctgggctgtcattgataggcgttaaaactaacgcctctgaatcttggaatcgcagtcaagaaagattatttgactcatcatggagcatcccgctgaatcttttagataaactttctgaatcaggaaggataaaagcgagcttaaatgatgctagactaggcgacatagtcctaataaaaggcatgatgaaaatattcgatgcacaaatggttcacttgtgcatgccaatagttaaaaagataaaaatcaacgagatgaagaatgagaaaaatcctaaagctaagggcctgctgaaggaaagcatctcagtatttgaaaatgcggaggagttagtaaagatgcttcctccaactacgcacattgactttgctgatagttatggaaactacagttggatgtcggttgaaccatccaacctgacaactaccttgagcgatgtttctttaaagtacggccccttcattcccggtgagtggcatatactatgtattgttgatgcttatgctgatgatacaaaactggataatccaaccgcaccataccctacagtatccaatgatttaaaagatgccatgaatagcatgttaatcatgatgagaaatataatggggagacctgtaggatcctttggtataacaccactaattatttttcgtggcttagcaaaccatctttaa

SEQ ID NO: 1798 - protein, 278 aa, Klebsiella michiganensis
MDQDSQSTDSLFDYFYVDKERVNAITAQLFPSGVLNSIKQTSGESEKDLKELKAGLSLIGVKTNASESWNRSQERLFDSSWSIPLNLLDKLSESGRIKASLNDARLGDIVLIKGMMKIFDAQMVHLCMPIVKKIKINEMKNEKNPKAKGLLKESISVFENAEELVKMLPPTTHIDFADSYGNYSWMSVEPSNLTTTLSDVSLKYGPFIPGEWHILCIVDAYADDTKLDNPTAPYPTVSNDLKDAMNSMLIMMRNIMGRPVGSFGITPLIIFRGLANHL

SEQ ID NO: 1799 - DNA, 303 bp, Citrobacter freundii
atgaaacttctaaatacatacgaagataaagatgaagccgaggaggccttgactaaaatatctggagagaaaagattagcgagcgagcgcgatagtactgtcgttatttacaatctctttggtactccatcatgggggaatttttataaactaggtatgtttaatcttcctgagttgcagaaaatactggagttgcgcaggacgggacaatctattgatttggagaagtataatgaatacatcagaacgcttagctatgctgctcgtttatttgatttagccattccaaagcattggttgtaa

SEQ ID NO: 1800 - protein, 100 aa, Citrobacter freundii
MKLLNTYEDKDEAEEALTKISGEKRLASERDSTVVIYNLFGTPSWGNFYKLGMFNLPELQKILELRRTGQSIDLEKYNEYIRTLSYAARLFDLAIPKHWL

SEQ ID NO: 1801 - DNA, 708 bp, Citrobacter koseri
atgaaacccattattggattcaatcggcatttagagatggattggcttgttcaaaccgcatcctggtcagcgaatgggattcacgggctggcattaaaaaataaaattgatagtttacttgcccctagttttgacagcaaagtagcacaagataaaactagaaatcttctttttggcatttgggattcagaatcgaaatcggtacccaaagcatttcattcagacgcctgtaaattgctcattgaacacagcgaaataaatatagctattcattggggaatgatgcttgttaaataccccttcttttataatatcgtagtacaaattggtagaatgaccaagcatgaaggtttgttcatttacaatcaattagaacaacgcattactgaaagctatggagatacttcaactatcaagcgttgtatgcaatttgttgttagaaccttaataaatttagagttattatccaaccctaaatcaggcacataccagttgcgaaaatcaattgagattaagcacgacaacgttatcgcctggctgactgaagtatcagtgagggctcaaggaaactcaagcaaaagcatgtctgctattattaatgatccagcttggttcccctttgatattaatttcaatgaaaacagattatcttccaatatacggctagatgttcatcatcaagctaatgatgccatcattttcctatga

SEQ ID NO: 1802 - protein, 235 aa, Citrobacter koseri
MKPIIGFNRHLEMDWLVQTASWSANGIHGLALKNKIDSLLAPSFDSKVAQDKTRNLLFGIWDSESKSVPKAFHSDACKLLIEHSEINIAIHWGMMLVKYPFFYNIVVQIGRMTKHEGLFIYNQLEQRITESYGDTSTIKRCMQFVVRTLINLELLSNPKSGTYQLRKSIEIKHDNVIAWLTEVSVRAQGNSSKSMSAIINDPAWFPFDINFNENRLSSNIRLDVHHQANDAIIFL

SEQ ID NO: 1803 - DNA, 321 bp, Klebsiella oxytoca
atgaaaacttatgccgttatcacactcgttaccgctgcatcgttgctgagtggctgtaacagcgaaccttccgaacaggatatttacactgccatgaataaggtcgttgcgcaggcgaatgctttcgtgaaatctatagcaggcaaggatgtcccaaaagacgcactgcgcgaattaaaatcagtcaaaaagcatgactgcgtagaagtctctgataaaagttataaatgcaatgtgacggctattgtcgataacgaaaagcgtactgctgctgtaacccttgtcaaaacggatgatggctggcaggtcgttgataagtaa

SEQ ID NO: 1804 - protein, 106 aa, Klebsiella oxytoca
MKTYAVITLVTAASLLSGCNSEPSEQDIYTAMNKVVAQANAFVKSIAGKDVPKDALRELKSVKKHDCVEVSDKSYKCNVTAIVDNEKRTAAVTLVKTDDGWQVVDK

SEQ ID NO: 1805 - DNA, 2262 bp, Citrobacter pasteurii
atgactaataatactttatcagacttttcagcttcattgatagatgaaattaatttcatctatcatgaccgctacatgaaaatcttactgtttattgtgccggtgtttttattaacttttgtcatcgctatcttcagttctggtgtgcctgagaaaatacctgtcgcactggtagattatgatcattcatcattgagtcgggaaataatcaaaaatattgatgcatcgaagagtattgagttaatagaaacaacggacaatatttccctggctcaacgcctgatgaagagtatgaaaatttatgcttttatagagatcccccgaggtgcatctggatcaactatccgtcaggatgataataaggtcgtaattcgttataacgggcagttaagaacaactggtaatgctgcgtttatcggtttgcaggcagcggtgaatgatgcctttaactcaataaataacaggaagtcactgggtgttgagcataaaggtacgggcaactcaatgccaaatatacaagtaatcagtatcagcaatccacaaaatagctatgaaagattcttgaccccaattgcagtgccggtgttgctgagtatagttctaagcagcgctgtaatttgcgctatcggacgtttttttgaagaaggtaatctctgtgacgattggattaagaaaaaaacaatatatttatcagttcagattgcttcccgttgcctaccatatataaccatcatttttctttggggattaatattcaatgtctggcaagtagtggggcggggttggccaattttaggtaattcatggttgttaattctggcgatgtttatgttgtgtcttcttactgcatctatcgccattatgtttatttcaataacgcgaaatgtacttacagctttaagtatctcaacggtatatgctagtgctgcgttaacctactcagatggtacgctttctattttgaatgccaatggttgggctaaattctggagtaattttcagccattcacccactattaccgaatacagttagagcaggtcaatcttggcagttatatcacaacgagtttttcccaatttggtatcttgtcactctatattatcattcctttaactatttcttttattattcttgcaagacgtaattatagtcaacagccggtagtctttcaggagaatgtaaaactcgatggtgttttacagagttttattagtactgttaaatcaataagaaaatgtcaacctatattttcaacggcagttatgtcattgattctttatagtgttttttatccaagcgcctacaaggcacaaattaacctcaaacttcccgttgcggtagttgattttgatcaatcatcattgtcacgtaatctgatcgataatctgcaaaccacacgtgaaattgatgttacccaggttgatagttctctgtctgatgcattaattttattgcgaaacagaaaagtttccgcggtgatagctattgataatgattttaaaaagaatcttatcagaggagagaacgcagggatcgatgtgcacctatcaggcggttatatggctgttgctgccgatttgagaacggcagtgactaatgcaataaacgctacgacggatgttaatagattaacatctaaagctactaataacatcattcctcttcctctatataatccaacattgggatacgaatcttttattatgccgctggtttttattataatacttcagcaaacacttatctttaccagttctatgcttattgcattgcgtaatagtatcggtttaacaaaaattaattcatctcagtttatcgggacgttttttgggttgtttatggttggtttttttggagcggtttttgtgtttggttgggtttattatttgcaagggtatcccaatgaaggaagtatgtttttacaggttttgttgattgttcttttttctgcggcagtaagttcaatggggatgttgattggtagttttctggataacatcaaccgtccaatgcagatcctatcggctacctcgatggttattttttatgcgtcaggagcctcgtttcctacatttaatatgcctgaatgggttgtgaaaacgatggtgattttcccatcaagtacaatgataagtgggtttactatgctgaactctcagggggcaggtatctatgagttggcacccgtaataataaaaatatctttgctagcaattatattatttttacttgctatgtatcgtctagtttggcagaagtaa

SEQ ID NO: 1806 - protein, 753 aa, Citrobacter pasteurii
MTNNTLSDFSASLIDEINFIYHDRYMKILLFIVPVFLLTFVIAIFSSGVPEKIPVALVDYDHSSLSREIIKNIDASKSIELIETTDNISLAQRLMKSMKIYAFIEIPRGASGSTIRQDDNKVVIRYNGQLRTTGNAAFIGLQAAVNDAFNSINNRKSLGVEHKGTGNSMPNIQVISISNPQNSYERFLTPIAVPVLLSIVLSSAVICAIGRFFEEGNLCDDWIKKKTIYLSVQIASRCLPYITIIFLWGLIFNVWQVVGRGWPILGNSWLLILAMFMLCLLTASIAIMFISITRNVLTALSISTVYASAALTYSDGTLSILNANGWAKFWSNFQPFTHYYRIQLEQVNLGSYITTSFSQFGILSLYIIIPLTISFIILARRNYSQQPVVFQENVKLDGVLQSFISTVKSIRKCQPIFSTAVMSLILYSVFYPSAYKAQINLKLPVAVVDFDQSSLSRNLIDNLQTTREIDVTQVDSSLSDALILLRNRKVSAVIAIDNDFKKNLIRGENAGIDVHLSGGYMAVAADLRTAVTNAINATTDVNRLTSKATNNIIPLPLYNPTLGYESFIMPLVFIIILQQTLIFTSSMLIALRNSIGLTKINSSQFIGTFFGLFMVGFFGAVFVFGWVYYLQGYPNEGSMFLQVLLIVLFSAAVSSMGMLIGSFLDNINRPMQILSATSMVIFYASGASFPTFNMPEWVVKTMVIFPSSTMISGFTMLNSQGAGIYELAPVIIKISLLAIILFLLAMYRLVWQK

SEQ ID NO: 1807 - DNA, 972 bp, Escherichia coli
atgagcgaaataatggatttagtcgtcatcgagaaaaagaacgcgatggcggttttcaccaataacgaccaactcgatccgcttatcgaagcgatcgaaaaagaggctcgcagtctggtgcctgacgtgaccaccaaaaaaggccgcgacgccatcgcatccatggctcacaaggttgcacgctctaaaacctacatcgacaacgcaggtaaagaccttgtcgctgagttaaaggcgctgccaaagcagatcgacgaaagccgccgcgttgtccgtgagcgtctcgacgcgctgaaagatgaagtgcgtcgcccgctgactgaatgggaagccgagcaggaacgcattaaggccgaagaagccatgaacgcccttcacgtcgaagcactggccatgaatgaagacttcgatcggcagttggcagctcgtattgagtctgaccacgaaatggctctgctgatgaatgacgctttcgaccgtgagcaggcagataaagcagctgaggctgagcgccagcgcattgcccatgaagaagaaattaagcgactggcagcagctgcagcagcccgcgaagttgagcagcgcgcacagcgtgaacgtgaagaagcggcgcatcgtgaagctgtgttgaaagcacaagctgagcaggcagagcgagatcgcattgcagccgagcagaaagctgaggctgacaagcaggccgctatcgaagcggagcgccgcaaagctcaggaagaagccgatcgcatccgccgagaggcagagcagcgtgaacaggcccgcctggccgaagagaagcgcaaagctgatgatcaggcgcgccgcgaagccgacgttaagcatcgcaaagctgtcggtactgaaatcgtcaaggctttgctggccaataccagcctaacccgcgatcaggcgattgaagtcctgactgcgattaaagacggaaatatcccacataccaggatcagctactga

SEQ ID NO: 1808 - protein, 323 aa, Escherichia coli
MSEIMDLVVIEKKNAMAVFTNNDQLDPLIEAIEKEARSLVPDVTTKKGRDAIASMAHKVARSKTYIDNAGKDLVAELKALPKQIDESRRVVRERLDALKDEVRRPLTEWEAEQERIKAEEAMNALHVEALAMNEDFDRQLAARIESDHEMALLMNDAFDREQADKAAEAERQRIAHEEEIKRLAAAAAAREVEQRAQREREEAAHREAVLKAQAEQAERDRIAAEQKAEADKQAAIEAERRKAQEEADRIRREAEQREQARLAEEKRKADDQARREADVKHRKAVGTEIVKALLANTSLTRDQAIEVLTAIKDGNIPHTRISY

SEQ ID NO: 1809 - DNA, 744 bp, Klebsiella oxytoca
atgaagatatcagtgaacaccagaacgatagcgggcacggtcctggcggccggaatgctggccggcgcaacagccccggcggagtcggcggtcaggccgcagctgacgcgcatcgtggcgtacgctgaggacagggaaacgccggcggagattatcaatgaaagtacggaaacgtacatggtgcagtcctggctggaagatacggacgggaaggataaagatataccggtggtactgacgccaccggtgatgaagctggaaggaaagaagagcgggaagctgcgtctggtggtgatgaagggaaatatccctcaggacagagagtcggtgtactggctgaacctgcaggagataccgcctaaggcgaaggatgcggaaaacagtctggtgatagcgatacgcagccggctgaaggtgtttgtgcgcccggcggggctggatgcgcagggtaacgcggaggcaccgtcgaagctgacgtggaaaatggagtcggcaggcgggaagcgctggctgcgggcgacaaacccgacgaagtatcatgtgagttttggggagcttgcggtaggtatgccgggtaagaaggggcagcgtctggaggacaagtaccggatggtaccgccggagggaagtgagcgatatgaaattcccgccacgataaagagcaacagcgtgagcgtgacgtggagcgggatgaacgactgggggggcgcgggcaaggagcagacggtggaggtgcatcagtga

SEQ ID NO: 1810 - protein, 247 aa, Klebsiella oxytoca
MKISVNTRTIAGTVLAAGMLAGATAPAESAVRPQLTRIVAYAEDRETPAEIINESTETYMVQSWLEDTDGKDKDIPVVLTPPVMKLEGKKSGKLRLVVMKGNIPQDRESVYWLNLQEIPPKAKDAENSLVIAIRSRLKVFVRPAGLDAQGNAEAPSKLTWKMESAGGKRWLRATNPTKYHVSFGELAVGMPGKKGQRLEDKYRMVPPEGSERYEIPATIKSNSVSVTWSGMNDWGGAGKEQTVEVHQ

SEQ ID NO: 1811 - DNA, 354 bp, Escherichia coli
atgccacattcacctgaagataaaaagcgtgccctcagccgggtaaggcgcatccgcggccaggttgaagcgctcgagcgggcgctggaatctggcgaaccctgtatgaccattctgcaacagattgcctctattcgcggcgccgctaacggcctgatgggggagatggttgagattcatctgcaggacgaactggttagcggcgaaacgacgccagaccagcgcgccgccagaatggcggaagtcgggcatctgctacgatcctatttaaaatataatcaccacgaggaagagagatatgaaatcacgtgcagccgtcgcgtttggcccaggccagccgctttcaatcgttga

SEQ ID NO: 1812 - protein, 117 aa, Escherichia coli
MPHSPEDKKRALSRVRRIRGQVEALERALESGEPCMTILQQIASIRGAANGLMGEMVEIHLQDELVSGETTPDQRAARMAEVGHLLRSYLKYNHHEEERYEITCSRRVWPRPAAFNR

SEQ ID NO: 1813 - DNA, 429 bp, Klebsiella oxytoca
atgttgaacaaagttaatgctgtttttacccgatacacagatcatcctgattttggcaagcttctgctccggcttacttttggcatactaatgttgtttcacggtgtggcaaaagtaagccatggggtgggctggatttctgacattctggagaacaaagggcttccgggtttcatcgcctatggtgtgtacatgggcgaaattatcgcgcccattcttatcattactggctggtttacccgccccgcagcattcatttatgccttcaatttgctggttgcgactctgctggttggtacggggaaatttttcacaatcacggatgtaggggcatgggggttggaaagtgaagctttgtatttcttgggcgggttgtcaattatgtttctgggggcaggaaaataccgactgggtagcgggaatgaatga

SEQ ID NO: 1814 - protein, 142 aa, Klebsiella oxytoca
MLNKVNAVFTRYTDHPDFGKLLLRLTFGILMLFHGVAKVSHGVGWISDILENKGLPGFIAYGVYMGEIIAPILIITGWFTRPAAFIYAFNLLVATLLVGTGKFFTITDVGAWGLESEALYFLGGLSIMFLGAGKYRLGSGNE

SEQ ID NO: 1815 - DNA, 1161 bp, Klebsiella oxytoca
atgaagaaatatcgaatccggcctgtagccgttacactcgttgtgtcgctggcattggtggcatgcaaacaagaggatgctggaaatacagctacggcagataaaaaactggacgtcggggttgtaactatacaatcccaaccattagctttgttaaccgaactcccaggacgcaccactgctgtcaatcgggcagaagttcgcccccaagtcagcggcgttattcttaagcgtttattcaaggaaggtagtgacgtcaaggcaggacaacaactttatcagattgatccggcaagttttcaagcaacccgtgataaagctgcagcaacgctgttttcagcgcatgcacaagctcaacgcgacaagcctctcgctgcagctaatgccattagtcaacaacagtacgtgtcagatatagcatctgagcgcgaggccgcggctgatctgaaaacgacagatatcaatctcaattatacgcaagtccgtgccccgttatccggtacaattggccgctcatcggtaaccgaaggggctctggttactgatgggcaaagtactgcactggccacaattacccaactcgatcccatatatgttgatgtaacccaatcttatggcgacattttacgtatgcgccgtgagttcgacagcggtcagctgacacgtgttggtgataatgcagtaaaggtaagcctgaccctggacgatggatcgacctattcactggccggccggcttgagttttccgaagtgtctgttgatgagggcacaggttctgtcacattacgggccaccttccctaatcctaagcatcttctgcttcccggtatgtttgtgcatgccaagctaaacgaaggaactaaccagaatgctattctggttcctcaaaaggctatcagtcgtgacagtcagggcaatgccaccgtcttcgtagtagatggtaatgatcaggccaagcagataagcattaccactagccaaatgtacggcggtaattatctggtcacaaatgggctatccaatggtgacaaagtcatcatcaacaacctgcaaagcgtcaaagacggtcaaaaagttaatccgactgaagcccaaccatcaagctctaagaaaaagcagagcagcggaaatatgtcattcattgaatctgcagagcgctga

SEQ ID NO: 1816 - protein, 386 aa, Klebsiella oxytoca
MKKYRIRPVAVTLVVSLALVACKQEDAGNTATADKKLDVGVVTIQSQPLALLTELPGRTTAVNRAEVRPQVSGVILKRLFKEGSDVKAGQQLYQIDPASFQATRDKAAATLFSAHAQAQRDKPLAAANAISQQQYVSDIASEREAAADLKTTDINLNYTQVRAPLSGTIGRSSVTEGALVTDGQSTALATITQLDPIYVDVTQSYGDILRMRREFDSGQLTRVGDNAVKVSLTLDDGSTYSLAGRLEFSEVSVDEGTGSVTLRATFPNPKHLLLPGMFVHAKLNEGTNQNAILVPQKAISRDSQGNATVFVVDGNDQAKQISITTSQMYGGNYLVTNGLSNGDKVIINNLQSVKDGQKVNPTEAQPSSSKKKQSSGNMSFIESAER

SEQ ID NO: 1817 - DNA, 3153 bp, Klebsiella oxytoca
atgtccaaatttttcattgatcgacccgtccttgcatgggtggttgctatcgccatcatgcttttcggtgccatttgcatctttcagatgtctattaaccagtaccccagtatcgcaccggtacaaatatcagtgacggcaacctattctggtgcctctgcacagactgtacaggacacggtggtaaaaccgatagagcaagagctcaccggactggataatctacgttatatcaccagtcaagccaacaatgatggcagtgccaccattatcgtaacgttcaatcaggggaccaatcctgatattgcccaagtgcagacacagaacaaggtgtcattggcggagtcgtcccttccttctgccgtcactgatcagggtctggatgtgcgtaagtaccagcaaaactttttccaggtcattagtatttcatcaaaaagcgggaggctgagtagtgcacaactgggcgacctactcgtttcaaatctacaggattccattgcgcggacggccggtgtaggtgactatcaggtcatgggggctgaaggagccatgcgtatatggatggatcccgctaaactgcacaagtacaacctgatgcccagtgatgtggtcaacgccattgatgcacagaacgtccagttgtcatccggtcagataggtggcgcgccgacccttccgggtacgcaaacaaatgcgactatcatgagtaaaagccggtttaccaacccggatcagtttaaaaacatattgctgaaagaaaatacggatggttcacaggtcagggtcaaagatatcggcacagtggaattcggctctgaaaattattccatatcatcaagttataatgggcaaccctctgccgggatagcactgcgattggcttctggcgccaatgttttggaaaccgtcaaagcggtggagaaaacgattgaggcacatctatccagtcttcctgatgatatcgaagtccagttcccgtatgacaccgcaccggtaacatccgcctctatcgaagaagtcgtcaagacactccttgaggcgatcgcactggttttcctggtcatgtacttgttcctgcaaaatatccgggccacgctggttccaacgctagttgtccccgtcgtgttacttggcaccttcggtatacttcacatctttggttataccatcaatatcttgaccatgttcgggatggtattagccatcggcctattggttgatgatgcgattgtcgttgtcgaaaacgtcgaacgcgtcatgcaagagaaaaaactgggggcccgagaagcaacaagggaatcgatgggggaaatccagggagcccttgtcggcattggtatcgtgatcactgcagtcatgctgcccatggccttcatgagtgggtccaccgggattatctaccgacagttttctatcaccgttgtgtcttccatgctgctctcggtggtgatggcattaatctttacaccggcgctctgtgcttctctattgcgcgcaaaagatgttcagggcgagagtaaaaccggtttctttggctggttcaaccggttagtggaaaaatccactaacggttatgtcagcagtgtcgcgggtgttattaaacgacgtattctgttttcggcaatttatattgtggtccttgctgctgttatcttcttttattcccgccaggcaaccaccttcctccccgatgaggatcagggagtagtcatggttcagctcacgcttccccccaatgcctctgcagaaagaacccaacaggtgattagcgatgtcaccaactatgaactcgaacatcataaggatgccttgagttctgtcttttcagccaatgggttcagttttgcaggtcgcgggcaaaatatggcaatcgggtttataaaactgaaagactggagccagcgaacagagtctgccgatcagatagccagtgccaccatgcagcacttcgccaattacaaggatgccaaaatactggccatgattcctccggcggttatggagttggggaatgccacggggttcgacttcttcctattagacagccaaaacaagggacataatgcgctaatgaacgcgaaggatcagcttttagctctggcagccaaggacccccgcctgtcccaagtgcgtctcaatggtatagaagatacaccgatgtaccagatcaatattgatgatgaacggcttcaagcccttggtatttcgatctctgatgtaaacgatacattacaggatgccttggggggcaactataccagtcagttcacctatgagaatcgcaccaagaaggtgtatatacaggggcgcgcccggggacgtgtgacgccggaagatattaaccagtggtatgttcgcaatagcagcggcgacatggtgccattctccgccttcgccagtggacactggagttatggttctcctgaccttcatgctttgaatggtactgcgggtgtggaaatccagggctccccaggaaagggttatagctcaagtgatgcaactagagctattgaagagatagtgcaaaaactgcccgggtattcattacagtggtacggtctctcctatgaggaacaggcggcaggttcccaggcgccaatgctgtataccctctccattatcgtggttttcttggctcttgcagggctctatggcagttggtcgattccaatttcgattctgatggttgtgccattcggcgtgttgggtgccttactggctattctgttccggggcattgacagcgatattttcttcaacgttgggctgctcattacagtggggttatccgcgaagaacgcaattctcattgtcgaattcgccaaagatattcatgagaaagaaggcaaaagtttgttggacgccgcattgcaagcttcccgtattcgcatacgtccgatcataatgacatcaatggcatttattctgggcgtactgccactctcttttgcttcaggtgccggtgcaggtagtgaacattccatcggtacgggggttgtgggaggcatgatcgcggccaccttccttgccatcttttacgtaccacttttctatgtgctggtcgtgagcttattcaatcgccgtaaagagaaaagtataacccaagccagcagtcagcttgcggcggaggactcccgaaatgatcaataa

SEQ ID NO: 1818 - protein, 1050 aa, Klebsiella oxytoca
MSKFFIDRPVLAWVVAIAIMLFGAICIFQMSINQYPSIAPVQISVTATYSGASAQTVQDTVVKPIEQELTGLDNLRYITSQANNDGSATIIVTFNQGTNPDIAQVQTQNKVSLAESSLPSAVTDQGLDVRKYQQNFFQVISISSKSGRLSSAQLGDLLVSNLQDSIARTAGVGDYQVMGAEGAMRIWMDPAKLHKYNLMPSDVVNAIDAQNVQLSSGQIGGAPTLPGTQTNATIMSKSRFTNPDQFKNILLKENTDGSQVRVKDIGTVEFGSENYSISSSYNGQPSAGIALRLASGANVLETVKAVEKTIEAHLSSLPDDIEVQFPYDTAPVTSASIEEVVKTLLEAIALVFLVMYLFLQNIRATLVPTLVVPVVLLGTFGILHIFGYTINILTMFGMVLAIGLLVDDAIVVVENVERVMQEKKLGAREATRESMGEIQGALVGIGIVITAVMLPMAFMSGSTGIIYRQFSITVVSSMLLSVVMALIFTPALCASLLRAKDVQGESKTGFFGWFNRLVEKSTNGYVSSVAGVIKRRILFSAIYIVVLAAVIFFYSRQATTFLPDEDQGVVMVQLTLPPNASAERTQQVISDVTNYELEHHKDALSSVFSANGFSFAGRGQNMAIGFIKLKDWSQRTESADQIASATMQHFANYKDAKILAMIPPAVMELGNATGFDFFLLDSQNKGHNALMNAKDQLLALAAKDPRLSQVRLNGIEDTPMYQINIDDERLQALGISISDVNDTLQDALGGNYTSQFTYENRTKKVYIQGRARGRVTPEDINQWYVRNSSGDMVPFSAFASGHWSYGSPDLHALNGTAGVEIQGSPGKGYSSSDATRAIEEIVQKLPGYSLQWYGLSYEEQAAGSQAPMLYTLSIIVVFLALAGLYGSWSIPISILMVVPFGVLGALLAILFRGIDSDIFFNVGLLITVGLSAKNAILIVEFAKDIHEKEGKSLLDAALQASRIRIRPIIMTSMAFILGVLPLSFASGAGAGSEHSIGTGVVGGMIAATFLAIFYVPLFYVLVVSLFNRRKEKSITQASSQLAAEDSRNDQ

SEQ ID NO: 1819 - DNA, 1422 bp, Klebsiella oxytoca
atgatcaataatcacctgctgcagcatatcgtattggcaagcgccatgacgttggcactgagtagctgttccctggaaccgaaatatgaacaaccctccgcgccggtgccaggccagtatcctggggaacaagggaagaacggtaatgtccagaaggtcgtggatatcggctggaaaagctattttattgacccagccatgcagcagttgatcggtattgcccttgccaataaccgggatctgcgtatttcagcattgaatgttgaaaaggccgcggcacagtttcgtatccagcgctctcagctctaccctgcgttggatattaactcatcgcttactggccaacatttacccaaagggttatatcaaacccagacctctgggccggtgacttatcacgacaacagcgccaatgtggggatcagttcctgggaaattgacttctttggacgcctgcgcagtttgaaacatcaagcgttagaaacgtacctggctcaagttgccacgcaacgttcggagcgaatcagcctggtggccgaagtcgccgagggatatatgacgctcgctgccgacaatagcctgctggatcttgcgcaaaaaacctataatagccagctcagtacattacgcctggagcagctcagtttgcagcatggcaataccaatgcccagaacgtggctcagacagaaatgacggttcagtcggcagcggtcgatattgcccaataccagcgtcaggttgcagacgatattaacgcactacagttattgttaggcgcaccaataccgcacgctattattggcaatgcgaaattggaaaatgttgccgctttccgcgaactccccgcaggtttaccttcagatctgctgacccaacggccggacattattgctgcggaagagacactgaaagccgccaatgcgaacattggcgtggccagagcagcctttttccccagcatcagtctgacagcgacggccggcaccgaaagtggttcactcgggaacctgtttgccggacatcagggagcctggaccttcgaaccctccctgaatttaccgatcttcgattggggctacaatcaggccaatttagatgtcgccaaaattgaaaaacgcagcgatatcgcaagttatgaaaagacgatccagacggcgttcagagaggtagccgatgcccttgcggctcgctcgacctacgcagatgaacttaaggcccgggaagaaaaccagtccgcaagccaacgcaattttgatttggctacactgcgttatcatcagggcgaagatagctctctggacgtccttgttgcgcaacgttcattatacagtgcgcagcagactatgttatcgacacgactttctgcattgaaccagcagataaccttatacaaaaccctggggggcggctggaaagagtaa

SEQ ID NO: 1820 - protein, 473 aa, Klebsiella oxytoca
MINNHLLQHIVLASAMTLALSSCSLEPKYEQPSAPVPGQYPGEQGKNGNVQKVVDIGWKSYFIDPAMQQLIGIALANNRDLRISALNVEKAAAQFRIQRSQLYPALDINSSLTGQHLPKGLYQTQTSGPVTYHDNSANVGISSWEIDFFGRLRSLKHQALETYLAQVATQRSERISLVAEVAEGYMTLAADNSLLDLAQKTYNSQLSTLRLEQLSLQHGNTNAQNVAQTEMTVQSAAVDIAQYQRQVADDINALQLLLGAPIPHAIIGNAKLENVAAFRELPAGLPSDLLTQRPDIIAAEETLKAANANIGVARAAFFPSISLTATAGTESGSLGNLFAGHQGAWTFEPSLNLPIFDWGYNQANLDVAKIEKRSDIASYEKTIQTAFREVADALAARSTYADELKAREENQSASQRNFDLATLRYHQGEDSSLDVLVAQRSLYSAQQTMLSTRLSALNQQITLYKTLGGGWKE

SEQ ID NO: 1821 - DNA, 1185 bp, Klebsiella oxytoca
atgatgaaagatgtttctatcaagcgcatcgcaccagtactcggcctactcggtgcgatcggaccactttcaatcgacatgtatcttcctggtatgcccctcatcgcggccgatcttggcgttaatgagggcatggttcagtatagcctcatgtctttttttattggcctgatgattggtcagttattttatggtcccgcatcggataaattcgggcgtcgatcaatgatatttatagggttaagtatatttaccgtagcatctatagcatgctctctgggaaatactgccgacgaattgattgtatggcgctttgctcagggcttcggaggttccatcggcatggttatcgctttagcgatagcacgtgatctttttgttggccgtcaggcggctacactcgttggtgtaattatggtggtaaccggcgtcgcgccaatcattgccccactgctcggaaccgccattctgaaaatacttccgtggccccttctttttgttttaatggcgctattcagcgcattttgcttattcctggtagcagaacagcttcccgaaacacgcacaaaattattacggaaagaaagtaacccacttgaagcagtaaaaaactatgggcgtcttctctgcaaaagaaacttcatagcatacgcgggtacgcaagcttttgcccaagcgggctttctagcctatcttgcaggatcatcttttgtatatatatcggtctataaagtttctcctgtgatatatagtctactttttgcgttaaatgctattggcatgatcggcggggcccaactggcaccacaacttatgaaatatttcaatcctaaaacaattatccgaggcgcattgttggtctatacaattgtggcgattctgctagtgatgctgcaaattagcggtagtgccagacttttatgggtagctctattgctttttctagtggtatcttcactgggttgtattgtcccacttagtgggacactggccctcgagtcatatggcaatatttctggtacagcatcagcattgatcggggcgctgcaatttggtgttggagctattgcttcattttttgttggtgtagctgctgatggaactgctctgcctatggtagcaacaattgcgcttagtgggtttgccgcatgttccatcgcgttttgttgttttcctcatagataa

SEQ ID NO: 1822 - protein, 394 aa, Klebsiella oxytoca
MMKDVSIKRIAPVLGLLGAIGPLSIDMYLPGMPLIAADLGVNEGMVQYSLMSFFIGLMIGQLFYGPASDKFGRRSMIFIGLSIFTVASIACSLGNTADELIVWRFAQGFGGSIGMVIALAIARDLFVGRQAATLVGVIMVVTGVAPIIAPLLGTAILKILPWPLLFVLMALFSAFCLFLVAEQLPETRTKLLRKESNPLEAVKNYGRLLCKRNFIAYAGTQAFAQAGFLAYLAGSSFVYISVYKVSPVIYSLLFALNAIGMIGGAQLAPQLMKYFNPKTIIRGALLVYTIVAILLVMLQISGSARLLWVALLLFLVVSSLGCIVPLSGTLALESYGNISGTASALIGALQFGVGAIASFFVGVAADGTALPMVATIALSGFAACSIAFCCFPHR

SEQ ID NO: 1823 - DNA, 537 bp, Klebsiella oxytoca
atgacgaaagccaaagactttgccgattacgtcgataagctgatgactacggacaaacgaccacgaaatttcgtcaatgttgaattttcacgccgatcagctgcttcttatcagatgtatgataatccaccactcagactggatggacataaattcaccaatcttaatgtgatgcagatttattttcctgttggcgtggaaatgcgtaactgctggattaaggcggaagaaaaaccaatgaagtggataagtgtgagtttttctgatgcgaatttatctggcatgagaattgagggcggcctggaaggcagtcggtccagattttcatcgattggattttcatctgtcaacctgatcaacgcaggccagtttatcgaaaatcttatagcccagtggccggtgcagatgccggaaagcaatgcttccgtcagggtaatcataaacggtaattttttcacctgctatgcgcgaattttgttcagtgggttcaatgatatacatcactttatcatactgaaaagtcagtgctttcgataa

SEQ ID NO: 1824 - protein, 178 aa, Klebsiella oxytoca
MTKAKDFADYVDKLMTTDKRPRNFVNVEFSRRSAASYQMYDNPPLRLDGHKFTNLNVMQIYFPVGVEMRNCWIKAEEKPMKWISVSFSDANLSGMRIEGGLEGSRSRFSSIGFSSVNLINAGQFIENLIAQWPVQMPESNASVRVIINGNFFTCYARILFSGFNDIHHFIILKSQCFR

SEQ ID NO: 1825 - DNA, 927 bp, Klebsiella oxytoca
atgctaagaaaaaacaccccttcgagcatcatgaataaagaggcagactggttaactataaatgaagctataaaactagctagtaagtcgaaaggtagaaaaatcaaagccagtgatatctatcgtcatgcattaagcaaaaatatttatctttcaatttattttcaatctcccatttttatacgaaagataaaaacaataaaaaacaaactaaagttaactcctcttaataacccctccatggctagactttgttttcttgaaggtcattgttttttaaataatcggaagtgtattctcagtactaaaggaaagtatatttgctcaaggcaacggattatagatacaagtctagatggttacgaatacattttagcacaaaaatacctagctctgtcattaaatattccattaccaataactggagcaaatgatgttaattatggcatcacggtaagattagctggggaaatataccaaatctttgaaagaacaacctggtcggagagagtgaaatatcaactcagtaggtttcctagtactttatcgcacgaaataacaaatcaactagcttacgaaaaaacggacagattttcttcaaaaggatatttcccccttcatgacttgccaaaggatgcttgctttgtcataaggtatactgaatttgaaaaacttatcgacctatgcaataagaatgtaaaagagccgacttccacaactcgcatatctactccactatctcgattattctggcttgcctgcaaaaataatgaaaccattcgccctttaattaaacagccatataagttgttgtctatatttgaacagtgggcttctaatgatggaatcacggatcgactaagtggtgatacgcttaaatcagcactggaacgtggttccccttcctctacatctttacccggctaa

SEQ ID NO: 1826 - protein, 308 aa, Klebsiella oxytoca
MLRKNTPSSIMNKEADWLTINEAIKLASKSKGRKIKASDIYRHALSKNIYLSIYFQSPIFIRKIKTIKNKLKLTPLNNPSMARLCFLEGHCFLNNRKCILSTKGKYICSRQRIIDTSLDGYEYILAQKYLALSLNIPLPITGANDVNYGITVRLAGEIYQIFERTTWSERVKYQLSRFPSTLSHEITNQLAYEKTDRFSSKGYFPLHDLPKDACFVIRYTEFEKLIDLCNKNVKEPTSTTRISTPLSRLFWLACKNNETIRPLIKQPYKLLSIFEQWASNDGITDRLSGDTLKSALERGSPSSTSLPG

SEQ ID NO: 1827 - DNA, 585 bp, Klebsiella oxytoca
atgatcccatctattaattataccatcctgaccgatgcattgcatgcgctgaaagaaggcaaccttcgtcactgcgaagcactgggattcactttcgacgaaatgagcgcccttaatcagttgtcacttgatgagctgtttattgtcagccaatcatcagcaccgtttgtcgcggtcagcgtccgccatgacgttttgtgccacctccttgcgctgtcccgtcaggaggttcagcgccaacagcagattaaccgggcgatcctgctgggtggttcgatcgcattactcaaccagtattttggcctcacttctaatgaagtctgccttcgccgccggttacttggcgtcagtgtcccctatggccggacgcctgaaccggatgaagagacggatgcggctatctggcagcaatggcaacagtgccgggtggataagcttgaatcgcctgaggcactgaccgccatgatgcaggtcactgaaaatctgttgccggacgccggaggtctgtcactcaccaccgtcagaaagcgtatcgtactttgcgaacaggaagccgctgacaggaggacgtcacatgccggatga

SEQ ID NO: 1828 - protein, 194 aa, Klebsiella oxytoca
MIPSINYTILTDALHALKEGNLRHCEALGFTFDEMSALNQLSLDELFIVSQSSAPFVAVSVRHDVLCHLLALSRQEVQRQQQINRAILLGGSIALLNQYFGLTSNEVCLRRRLLGVSVPYGRTPEPDEETDAAIWQQWQQCRVDKLESPEALTAMMQVTENLLPDAGGLSLTTVRKRIVLCEQEAADRRTSHAG

SEQ ID NO: 1829 - DNA, 558 bp, Klebsiella oxytoca
atgaaaattgcattcatgggaatatcgggtagtggaaaagatttccttgctaattatctaatatccaactatgaatttgttagattatcatttagcgatcaactcaaaaaattggccaatcatatttacccttggatggaaaaggattatagccctgaaaagaaaacgttatcactcaatataaccttacctacaggcgactttatcaaccattcaccaagagatatatggctgagcttagacaaactaagggaaattgaagaaaaaatatttattagaatgctatcagaagagttgaaagttttagaggaaaatgaagggacgaataaaaacataataattactgacataagatcaaatgaagaattcgcatggtgtaagaacaatcaattcacaatagttcatatagaacgggaaaataataattataaaagatacgaaattgacaagtatgtaaatgagaacaaaacaaaatcagactatcattttaacaatagtgtgaacggaattgatagttttaaaaactttttcgaaagggtattatttagtgaacagtaa

SEQ ID NO: 1830 - protein, 185 aa, Klebsiella oxytoca
MKIAFMGISGSGKDFLANYLISNYEFVRLSFSDQLKKLANHIYPWMEKDYSPEKKTLSLNITLPTGDFINHSPRDIWLSLDKLREIEEKIFIRMLSEELKVLEENEGTNKNIIITDIRSNEEFAWCKNNQFTIVHIERENNNYKRYEIDKYVNENKTKSDYHFNNSVNGIDSFKNFFERVLFSEQ

SEQ ID NO: 1831 - DNA, 222 bp, Klebsiella oxytoca
atggcgactgtggttgtctcagcccaggcgaatggactcaaacgggtgatacggcgccaggggaaaggagcaggcacccgccgcaacgacgaagagcgcgggcgcgaaacggcgttgccctgcagagtgccggcagctttcgccggcacggtgaaagcggcgcggccggaacggtcgcagcaagcgctgccgttgaccctgacctcagacatcagacactag

SEQ ID NO: 1832 - protein, 73 aa, Klebsiella oxytoca
MATVVVSAQANGLKRVIRRQGKGAGTRRNDEERGRETALPCRVPAAFAGTVKAARPERSQQALPLTLTSDIRH

SEQ ID NO: 1833 - DNA, 933 bp, Klebsiella variicola
atgtcattgaagccaaaaaacttatataaataccttacatttaatgaaaatacattaaaactattgtgtacgttacaagtatattattctgatcctgccttttttaatgacccattggattgccaaccgatagtacgtaatgatttaactttgcacgaactcaaagagattttcatacagataatgttaaagaaatctgaaaaacagttctcgcagagtttgaaaaacttaagattttcaggtgaaaaaacaaatgagagagcgtttaaactcgcagagagtgaggttaaagggattattaactctttagaatatgaatctactgatccaatgattaaaaatcagaatggttatcttgagttaaattacgtatcggcgattcagaaagaaatagtaaattcctttaaaaccggagtgttgtgcctgagttcaaaatttgacagtcctttaatgtggtcacattacgcttcccaacatcgtggaatatgtattgagtatgatatgacggatgtcaaagatgataaggtccataaagttgtttacgggggttcaagattaatagttacaagtgaaataaatgaatggttatataagccttcagattctagcagattaaagcaggtatgcttgttaacaaagtctgaagaatggcgctatgagtcagagtggaggatttttagccgagttggattaggcgattcaatacctccagtaaaatcgataatatttggtttgaaatgtgatgatgtaaccatttatacagttatgaaagcgatgatgatcgaaggccgagatttgaaattttggaaaattgttaaccgcggtgataagttttccctcaaaagagaaagaatttaccctgacgactattatgcgactttgccttgtatactttcatcaagtcaaatagattctatgcttgatgatgaataa

SEQ ID NO: 1834 - protein, 310 aa, Klebsiella variicola
MSLKPKNLYKYLTFNENTLKLLCTLQVYYSDPAFFNDPLDCQPIVRNDLTLHELKEIFIQIMLKKSEKQFSQSLKNLRFSGEKTNERAFKLAESEVKGIINSLEYESTDPMIKNQNGYLELNYVSAIQKEIVNSFKTGVLCLSSKFDSPLMWSHYASQHRGICIEYDMTDVKDDKVHKVVYGGSRLIVTSEINEWLYKPSDSSRLKQVCLLTKSEEWRYESEWRIFSRVGLGDSIPPVKSIIFGLKCDDVTIYTVMKAMMIEGRDLKFWKIVNRGDKFSLKRERIYPDDYYATLPCILSSSQIDSMLDDE

SEQ ID NO: 1835 - DNA, 960 bp, Klebsiella oxytoca
gtgacagtgttcaacatgtctgatgattttcattttatattcccgaaaaaggcagacaggtataagaacgtgatggccacatctgttgattttcgtcggctggaaaaggaatattgcatttgtttttataaaaaagctgataatggtcgcatcgaagaggttattaatcttattactttcttaaggtttgagtatgcagggttacagcatggaaaattgatttttaattcagaaagtaaaaaaaattgtgagcgagttaaaaagtttgtgctggaggtgattaaaaaagatatagatagaaaaatgagaatgttcactactgccagacagtttcataacgatatgaaaaacagatataaaaactctggcacactctgtttctctttattcgccgaaggtgtctccggggagcccattccagagcacatgaaaacactaaaagcgctaagttctcgcttttttaataatatccgatctagaactacatttaagcaccatgttctgggctatttctgggttgtgttaaagaacagatatgataatcggccttacttacatgttaatttttatgtagatactcgggattttaataatgttattggtgaggaaataaatgcttgctggtttaatgctctcaaagccatggaggacaaagaaggaggagtactacaccttactgtggcaaaagaatttcagaatgggttgctcttaagaagtaccagtggttacagtgagcagtctggagagaatcacgctatttttactcggttcaattctgatgcaagtgtgattactaaagatttgaatgctgctaattcagaaatatacaagcagtttaccaacaataaagataaacagtatttcatacattatctttatgcactcgctaaggagtcttactttattgctgagaacactcatttctttggttcttcctcagtggtaaaacgattgaaataa

SEQ ID NO: 1836 - protein, 319 aa, Klebsiella oxytoca
MTVFNMSDDFHFIFPKKADRYKNVMATSVDFRRLEKEYCICFYKKADNGRIEEVINLITFLRFEYAGLQHGKLIFNSESKKNCERVKKFVLEVIKKDIDRKMRMFTTARQFHNDMKNRYKNSGTLCFSLFAEGVSGEPIPEHMKTLKALSSRFFNNIRSRTTFKHHVLGYFWVVLKNRYDNRPYLHVNFYVDTRDFNNVIGEEINACWFNALKAMEDKEGGVLHLTVAKEFQNGLLLRSTSGYSEQSGENHAIFTRFNSDASVITKDLNAANSEIYKQFTNNKDKQYFIHYLYALAKESYFIAENTHFFGSSSVVKRLK

SEQ ID NO: 1837 - DNA, 2832 bp, Klebsiella oxytoca
atgatgcaaaacggtttattctcaaatgatgatacgccacaggggcaaacagttggtccagtaacctgtttgggaaaaactttcgctaatgaccatgagcgtcgtcaatattttttgaaattgctggctgaaaaactcaaagatccagaatttcgcaaaatcgaaggttttcctatcggtaatgatgatgatattttgaatctaagtgacccaccttattatactgcctgccctaacccgtggattgccgaatttgttatggaatgggaatctcagaaaattgagagtgaggaagagtatcaccgcgaaccttttgctgcagacatcagcgaagggaaaaatgatcctatttataatgctcactcttatcatacaaaagtaccccataaagcaatcatgcgttatatattgcattatacaaaccctggtgacattgtgttcgatggattctgtggaactggtatgaccggggttgcagcacaaatgtgtggtgaccgaaatgttatattgtcacttggatatcaagttctccctgatgggactattttgaaagaagaagttgatgaggaaaatcattccatatggcaacctttttcaagggttggttcaagaaaagcaattttaaatgatttatctcctgctgcttcatttatctcacacaattacaacacgcctgtagacccggttgcttttgaaaaggaggccaccagaatccttaaagctatcgaatctgaatgtggatggatgtatgaaacaacgcacactgatggacgtataggaagaataaattacactgtctggtcagatgtctttgcatgtcctgaatgtactacagatattgtattttgggatgaagctgtagatcaagaaaatggctgtgttcgtgatactttcccatgccctaattgtggtgctacattatccaagcgtctaatgaaaagagcatgggttacgaattttgatccaattattggtcaaccaacaactcaagcacgtcatgcgcctgttcttattaattattctgttgatggccttccgggtcgattcgaaaaaagacctgaccaagatgatttagaattaataaataaaatcaattctgagccagtcctagactgggtccccagcaatgaattaccagatggttttaatactgagcagcccaaaaaatcacatggttttactagcgtacatcatttttacacaaaaagaaatttgaaagtgttggctgctctacgtcgacttctaaaatcctcaaatatggaaaagcaattgctttgtctagtcggagatcagcttcctcgggcaagcaaaatgcataaaatagcaattagccgccttaatacaaatttatcgaaaactgcaggagtacttgcaggtacattatatgttccttcaaatcaaatagaatactgcttaatttccatgattggcttcaggattgcggatataatatcttatcaaaaaaaacgggatggttatactcgacagattgtatctaccgcctcaacacatgtgatggaaataaaagataactctattgattatatgtttttcgatccacctttcggctccaacataaattattcagaattaaacttcctatgggaagcttggctaaaagtattcactaacaatgggcctgaggcaattgagaataagattcaaaataaaagcataaatgaatacaggattttgatgacaaaatgctttcgtgaatcttatcgtatcttaaaagaaggtcgatggctaacagttgagttttccaatactaaggctagtgtttggaataatatacaatcagctttaactgaagccgggtttattgtagctaacgtctcggcccttgataagaaacagcatacaattaaggctcttacaacacccagtgctgttaaacaggatcttgttatatcggcctacaaaccaaataagaatttcgaagaacgattttcaagtgaagctaaaacagaagagggtgtttgggacttcgttcaaactcatcttcaatatttacccgtaactaagttacagggccaaagtttgctttcaatccccgaaagagaccctaggattttatttgaccaattggttgcttattatgtaagaaaaggctatcaagtccctctcgatagcagggagtttcagcttggcctttctaaacgcttttcggagcgagatggtatgtacttcttacatgaacaagcagcagaatatgataaaaagaaaatgacatctaaatcattcatgcagccttctctttttgttaaagatgaagcatctgctattgattggcttcgtcaatgtttaaaggataaacctcaagcattttctgatattaaccctcaattcatgcaacagcttagtggttggagcaagaacgaagtagtgctcgatctccgcgaacttttaattcaaaatttcctatgctacgacagccaagatgatgttcctgaacagatccatagctatctctccagcaactggaaagagctacgcaatttaccaaaaaatgattccagtttaattgctaaagctaaggatcgttggtatgtacctgatcctaataaatctggagacttggaaaagttacgtgaaagatctctacttaaagagtttgaagaatacaaggcagccaagaaaaaactaaaactgttccgtatcgaagcagtacgtgttggctttaagaaactatgggagcaacaggattttgcaaccctgataaacgtatctgataaattgccaagcaacgtattggaagaagatccaatattattgatgtattatgaccaagcactaaccttaagccaaaccgataccgatgacggatggtaa

SEQ ID NO: 1838 - protein, 943 aa, Klebsiella oxytoca
MMQNGLFSNDDTPQGQTVGPVTCLGKTFANDHERRQYFLKLLAEKLKDPEFRKIEGFPIGNDDDILNLSDPPYYTACPNPWIAEFVMEWESQKIESEEEYHREPFAADISEGKNDPIYNAHSYHTKVPHKAIMRYILHYTNPGDIVFDGFCGTGMTGVAAQMCGDRNVILSLGYQVLPDGTILKEEVDEENHSIWQPFSRVGSRKAILNDLSPAASFISHNYNTPVDPVAFEKEATRILKAIESECGWMYETTHTDGRIGRINYTVWSDVFACPECTTDIVFWDEAVDQENGCVRDTFPCPNCGATLSKRLMKRAWVTNFDPIIGQPTTQARHAPVLINYSVDGLPGRFEKRPDQDDLELINKINSEPVLDWVPSNELPDGFNTEQPKKSHGFTSVHHFYTKRNLKVLAALRRLLKSSNMEKQLLCLVGDQLPRASKMHKIAISRLNTNLSKTAGVLAGTLYVPSNQIEYCLISMIGFRIADIISYQKKRDGYTRQIVSTASTHVMEIKDNSIDYMFFDPPFGSNINYSELNFLWEAWLKVFTNNGPEAIENKIQNKSINEYRILMTKCFRESYRILKEGRWLTVEFSNTKASVWNNIQSALTEAGFIVANVSALDKKQHTIKALTTPSAVKQDLVISAYKPNKNFEERFSSEAKTEEGVWDFVQTHLQYLPVTKLQGQSLLSIPERDPRILFDQLVAYYVRKGYQVPLDSREFQLGLSKRFSERDGMYFLHEQAAEYDKKKMTSKSFMQPSLFVKDEASAIDWLRQCLKDKPQAFSDINPQFMQQLSGWSKNEVVLDLRELLIQNFLCYDSQDDVPEQIHSYLSSNWKELRNLPKNDSSLIAKAKDRWYVPDPNKSGDLEKLRERSLLKEFEEYKAAKKKLKLFRIEAVRVGFKKLWEQQDFATLINVSDKLPSNVLEEDPILLMYYDQALTLSQTDTDDGW

SEQ ID NO: 1839 - DNA, 1428 bp, Klebsiella oxytoca
atgagatacccaatatccctttcaaaaagaatcgatgaagttaagaacatagttgaaagctggcctgttgagaaagatattaatcaggttcttaattggctaatgcagtttgataatgatgacattgatttggctatcaggataataaagaaccttaacgttatcggttttgaagatttaaatacagcactcatcattgcatatagtaagctagaacggatgtccatcgagaaaggaacaagaataacgagtaaaaatacattgtttgcgggaattggagatggtgcaaaaagtggtgccatgattggatacaacttcagaattattaatgaattacctgaaggtaatttcatgggtgaatattcattagattaccttgaaaaaggtcttatagataatattgttttagttgatgatattgttggaacaggccgacaagcgactgaggaaattaaagagctaacccaaaaggtcacccctcttggagtgaaaaatatttttttacttacggcgattggcatgcgagatggtattaaggaaatatccataaatactaaagcccatgtttttagtgcttacgagtatacagagttagatacagttacatgtttagattcacccttttatgacggaatcccacacgaagagagggcagacgccaaatctcgccttgagtattacggcggaatgattaataaatctcctttaggttatggtggtataggggcattgatttctttttattacaatacgccaaacatttcgctaccgatgatatgggggagtaaaaattcatggcttccacttttcaaaagagctgtgaaaataaatggaataaactcctactataagcaaattgaatcaagcattaataaaaagaagaaagatggcactgtattaacttctaaagaaaatcagctaactattttggtgaaagggtcattcgacgaaatgttctttgattacataatttcattaatcaaagataaactaccttttgaaaaaatatctgtaatagctcttggtggctttagttctaagaagttaatagataacatcgtaaagttgaatagccactgtttatttattgttgaggatgatgaacaaagcccaagaggatttatggagcgacttttgaataacatcggagataatccgtatatgttagtcaagcctttcactttttatctcaaccttgattcaatgatccagagtgacaaatggtcacgtgttttccctaaatctgaaactattgaggaacaaagcaatttgaacagaatgaatactgtagagcaaagaattaaaatgagaacacatcgaaacgaagcccgatttaaagagctattagaaaattacctagatgaacccaagattcagttattgatcgatgatttattatcaaaaatattaaatagcacagttcaatga

SEQ ID NO: 1840 - protein, 475 aa, Klebsiella oxytoca
MRYPISLSKRIDEVKNIVESWPVEKDINQVLNWLMQFDNDDIDLAIRIIKNLNVIGFEDLNTALIIAYSKLERMSIEKGTRITSKNTLFAGIGDGAKSGAMIGYNFRIINELPEGNFMGEYSLDYLEKGLIDNIVLVDDIVGTGRQATEEIKELTQKVTPLGVKNIFLLTAIGMRDGIKEISINTKAHVFSAYEYTELDTVTCLDSPFYDGIPHEERADAKSRLEYYGGMINKSPLGYGGIGALISFYYNTPNISLPMIWGSKNSWLPLFKRAVKINGINSYYKQIESSINKKKKDGTVLTSKENQLTILVKGSFDEMFFDYIISLIKDKLPFEKISVIALGGFSSKKLIDNIVKLNSHCLFIVEDDEQSPRGFMERLLNNIGDNPYMLVKPFTFYLNLDSMIQSDKWSRVFPKSETIEEQSNLNRMNTVEQRIKMRTHRNEARFKELLENYLDEPKIQLLIDDLLSKILNSTVQ

SEQ ID NO: 1841 - DNA, 1743 bp, Klebsiella oxytoca
atgggatattataatagtaatcttattgtaaaaatgatacatactctttcaaatagaagagatgggttaattttgcttgatggaaattgggggactggaaaaacttattttataaaaaataggtttcctaattactaccacaaaaatgccttctattatatttccttactcggtatgaaatccttatcagatttcaaagctaaaattattgattgttactacctccaagatatacacacacttcaatcggggcttgaaagtatttctgggatcggtagtattacctccggttcacctgcaagtgctaatattattaacaacatgtttaattccattggggcaagtgttagagagaatattctctctaagttagaaggcattttcattttggatgacattgagcgaatatccgagacatcattagctaatgaaatcttaacatattgccataccctttatatggcaggaacaaattcaaatttagacttcattattgttggcaattcatcatctgagtctggattgaaagttgaacacaaagaaaaattaattgcagagactctccattatactccatatccacgggagatattggaaatggatataataaaagaaaagctttctcatttccctcaacacgataaaaaactatttgaggaagtagtaataaataacaacatagttaacattcgagttttaatacgtatgttaaataccatcaccccaatttatgagcatattgaatcgcatcctgaattgacttggagcataccatcttcaacactcttaaattcaatgtgttcgttcttcatactattatttttacataataaacctctagatgaacttctaacaaagcaaaactcaatcctttcgtcaaatactgataaatctaacgactcggagagaaaattatggtcatcgttgaatagttacataataacctccgagattaaaaaatattttagcggtcataactcattgcatgatgtattagatattttattccatgaggctaaaccacttacattgagatatattgcaacgtccactcgcccagaattacatgagataaatgaaaaagaattctccaaaactctcatatctttaatttgtcgcgatttagattgtgatttttatgagtggtttagagcattccagaattacgaatatttaaccaggcataaatatctttccaaatcaccaattataactttgaaatttgtcacttcaattctgaataatttcactaacagtgagatcttagaatctttccagcaataccagcttgatgaaagaagcagtttaaacagtggatttgaagatagcagcttactgttctccatttcattcacgcgctatcaaaaaacaatcaataaagataagcttgacataatcaaaaagcaaatagaatctaatggctgggcctcgttcgatgtcgatttattaacaaccttagatccattcgggaattacaagccacttggggtacttggcgctccatttatagctaaatgcattttgaagcattggaaagttaaagacatagaacatttccgttctttcttgcgaagcaactatcaaattagcaatataaaacagtttgctataaatgaaagagacaagcttatttacctcagtcaaatacttgaaatattttgcctttcaaataaagaggggtttaaatttggggctatttatgatcttaataaagtagttaaaaatgccattgctatgttatga

SEQ ID NO: 1842 - protein, 580 aa, Klebsiella oxytoca
MGYYNSNLIVKMIHTLSNRRDGLILLDGNWGTGKTYFIKNRFPNYYHKNAFYYISLLGMKSLSDFKAKIIDCYYLQDIHTLQSGLESISGIGSITSGSPASANIINNMFNSIGASVRENILSKLEGIFILDDIERISETSLANEILTYCHTLYMAGTNSNLDFIIVGNSSSESGLKVEHKEKLIAETLHYTPYPREILEMDIIKEKLSHFPQHDKKLFEEVVINNNIVNIRVLIRMLNTITPIYEHIESHPELTWSIPSSTLLNSMCSFFILLFLHNKPLDELLTKQNSILSSNTDKSNDSERKLWSSLNSYIITSEIKKYFSGHNSLHDVLDILFHEAKPLTLRYIATSTRPELHEINEKEFSKTLISLICRDLDCDFYEWFRAFQNYEYLTRHKYLSKSPIITLKFVTSILNNFTNSEILESFQQYQLDERSSLNSGFEDSSLLFSISFTRYQKTINKDKLDIIKKQIESNGWASFDVDLLTTLDPFGNYKPLGVLGAPFIAKCILKHWKVKDIEHFRSFLRSNYQISNIKQFAINERDKLIYLSQILEIFCLSNKEGFKFGAIYDLNKVVKNAIAML

SEQ ID NO: 1843 - DNA, 360 bp, Klebsiella oxytoca
atggaccttggtttattgacatggctatttgacaaaatagctgagtttgcgggctatcagaaagctaaaagacttgcagcaattgaaggtttaactccggctgtagctgcgacaatcgcatataacgagagaataaactccggatatgcaaggaacgacgctgaagagaggcgcttgcacgaactatggtacacggcctcctctgctgtgagccgttatgacagagaattggctagagtatgtaaagaaaaggcccagtactggcttagatatgatgagtataatgatggtcatgtagaagaattgaacatcaagctaaaaagcgtcgctcaaagactagaagacctaaaatacccataa

SEQ ID NO: 1844 - protein, 119 aa, Klebsiella oxytoca
MDLGLLTWLFDKIAEFAGYQKAKRLAAIEGLTPAVAATIAYNERINSGYARNDAEERRLHELWYTASSAVSRYDRELARVCKEKAQYWLRYDEYNDGHVEELNIKLKSVAQRLEDLKYP

SEQ ID NO: 1845 - DNA, 627 bp, Klebsiella oxytoca
atgaaaaaggaaaaagcattagaattttacgaaaaactttatttctctgagattgagaataaagataaaatacatactcgtgctcaagctgaattcggcttaatagttatcactgcaactatactcacgtatctcgcaaaaaacacatcttatgaagttcatccatttcttgcttgcgtcgtttttttattcacagcgttttctttttttttgattcttgcttcatcttttttattaaaaaaagtcatttggggcaatgaatttaaatattgccctgctcctcaagcgctgcatgattatcacactcagttaattaactatgaagtaacatataaaaaatattgtgaagataatggaattgcatatgataataatcataccccagatgataagctatgggatgttattcagcaagaaattagagaatgtgcaagttggaatagtaatatcaacgaagtgcgttccagcaaactatttgagtcaacaaaatatcttttttggtcttggattccaattctcatagcagtaaccatatttattttggctgatttagatgcagcaacaccacgaaaggaaaatgcccctacctatttgataattcctcttgaaaacgtcaggagaacttga

SEQ ID NO: 1846 - protein, 208 aa, Klebsiella oxytoca
MKKEKALEFYEKLYFSEIENKDKIHTRAQAEFGLIVITATILTYLAKNTSYEVHPFLACVVFLFTAFSFFLILASSFLLKKVIWGNEFKYCPAPQALHDYHTQLINYEVTYKKYCEDNGIAYDNNHTPDDKLWDVIQQEIRECASWNSNINEVRSSKLFESTKYLFWSWIPILIAVTIFILADLDAATPRKENAPTYLIIPLENVRRT

SEQ ID NO: 1847 - DNA, 2007 bp, Klebsiella oxytoca
atgactgaattaaaaaatatctatccagggaaacatttctctgtgagagaagaacattttagccaagaagaaaaagacatcattaatgttttatcaaaagagttttacgtaacaaatggtgggggggtaataacgcttacatcaaacagtaagtataaatacatattactacgacccactgatatatatatagagatgtttaacctcgatagagagataatagttcttttcagtgattatacaaattttcaatcgcgtacattggatgctatagagcaggcggcaaaacaactttcatctttaagagtcgataaaacatgttgtattttgataagtaaagatcaagatatagaagaaaatatcagtgacctgattaaaaaagaacctgaaactgcaaatataataccgtttacctataatgaaacgcaaaaaggaaactctgatggttatttttttagaaacagagttcaaaaatatttgtataatagagatttgttttcatttgaagctccgttgaaaagtgattggcttttctttggaaggaatgaaatcatattgtcgactattaatcggatgaagggtggcaataatgcaggggtttttggtctgcgaaaaactggcaaaacttctcttattaatgccatatcgagaaatttacaaaagaatggcgaagttgttacaactattgattgccagagcccatcaattaataaaagaaaatggaatgaggcaatttattatgtatgtaagaaaacaaaagaagataattatcttcaatccttccttccagaagaggcatatttcaccgagaaggatgctgctgaactcttggcaaaatttgttagagatgtaaacaaagaaaaagataaaaaattattcttgattttcgatgagattgaaaatatttcaagagttacatccccaacagaacattggaggtcaggtgctgattttctttatttttggcagtcaatgagaaccgttttccaaacggtagggataaatttagcatatcttattgttggcacaaatccgtcatgcattgaaactccaagaatagatagttcagataaccctctgttcaatcattttacacctacttatcttcctggtttcgatattcgctctacacgtgacatgattagaagaatcggaaaaagaatgggggtgaattttgaagaggcaatttatactaatattaatgaagaatatggtgggcatccatttctaatccgccaagtatgtagcataattgcaagaaactcttttagtcaaactaaacctgttagcatagggaaaatttcttataaggaggcagttaaatcatttggggaaaatagttttaattatttagaaatgataataggtgtattgaaagaacattataatgaagagtatgagcttctaattactttggcgcatgaagataacgaaacgtttaaggaagcctccagaagaaaacagaattcattagcgcatctattgggttatggaatattaggaaaggacaatggcggttattattttatcatcgattctatgagaagctatcttctggagataaataaatacaggaaaatggaaacaagtattgagcaacggtgggctgaaatatctgaacgacgcaatattgcggagaaaaaattaagaacaataataaaaacaaccttgaaatccatgtatggagaggaattggcaaaaagtgcaattcttgacatattgggggggaaaagaaaagctgaatatacatctaagaattttaatgatattttcgatcctaatctatctacaatttttttcgaagatattagaaaaatcatttcaaaagaatgggggtcttttgagaatatatttgaaaaatcaaagaaagaaactttcgattcccttggttttataaacaaatatagatctgatgcgcatgctaaagatataacgcctgacgagtttgctttgtttagaataagcatgctaaaaattgaaggggatatatctcaatacttctcgtga

SEQ ID NO: 1848 - protein, 668 aa, Klebsiella oxytoca
MTELKNIYPGKHFSVREEHFSQEEKDIINVLSKEFYVTNGGGVITLTSNSKYKYILLRPTDIYIEMFNLDREIIVLFSDYTNFQSRTLDAIEQAAKQLSSLRVDKTCCILISKDQDIEENISDLIKKEPETANIIPFTYNETQKGNSDGYFFRNRVQKYLYNRDLFSFEAPLKSDWLFFGRNEIILSTINRMKGGNNAGVFGLRKTGKTSLINAISRNLQKNGEVVTTIDCQSPSINKRKWNEAIYYVCKKTKEDNYLQSFLPEEAYFTEKDAAELLAKFVRDVNKEKDKKLFLIFDEIENISRVTSPTEHWRSGADFLYFWQSMRTVFQTVGINLAYLIVGTNPSCIETPRIDSSDNPLFNHFTPTYLPGFDIRSTRDMIRRIGKRMGVNFEEAIYTNINEEYGGHPFLIRQVCSIIARNSFSQTKPVSIGKISYKEAVKSFGENSFNYLEMIIGVLKEHYNEEYELLITLAHEDNETFKEASRRKQNSLAHLLGYGILGKDNGGYYFIIDSMRSYLLEINKYRKMETSIEQRWAEISERRNIAEKKLRTIIKTTLKSMYGEELAKSAILDILGGKRKAEYTSKNFNDIFDPNLSTIFFEDIRKIISKEWGSFENIFEKSKKETFDSLGFINKYRSDAHAKDITPDEFALFRISMLKIEGDISQYFS

SEQ ID NO: 1849 - DNA, 519 bp, Klebsiella oxytoca
atgccgtttgaatgtcccagatgtgttatcgacacgaatgtgctatctgacttttacgaaggtggatgcttagggcttatctggcaagtttatccgggaggagtgtggatagatccctatgtatgcgaggaactaaaagttaaatacaatcttgatgtccaggaggaacttgcaaggctaaatcttccatataatttcactaatgactatgaacctgagcattatgttgaaatggctgagattaaaattcgcagacgagcgctgaagtatgctgacataagttgtgttgttaatgcgagaatacatgaagcaacatgcctttcggcggataatgcggtttacaaaacatgtggcgaacggggtgtaaaagcggcgagacatggcgggcttcttcaagaagcagttcgtcgagggcttctcaataagcaacaagccttaacgcattttcaatttttccttgatcgtgggctgactatgaggccttctattcgagaacagatcctagcaagttttgcataa

SEQ ID NO: 1850 - protein, 172 aa, Klebsiella oxytoca
MPFECPRCVIDTNVLSDFYEGGCLGLIWQVYPGGVWIDPYVCEELKVKYNLDVQEELARLNLPYNFTNDYEPEHYVEMAEIKIRRRALKYADISCVVNARIHEATCLSADNAVYKTCGERGVKAARHGGLLQEAVRRGLLNKQQALTHFQFFLDRGLTMRPSIREQILASFA

SEQ ID NO: 1851 - DNA, 303 bp, Klebsiella oxytoca
gtgactatagccatcgatcgacttaaagaagttacaagggtctttggccgcaggcatatcgcctaccagatggccagagagttgctggagatatatcgcggtaacggcccgtcagtgtggaatgtgttgagcgatttccctcctgaagtgaatggaaaatatcttgtcattaccagctacggggatatcagaacagcttgctatgactgtgagtcgggggaatggcgggcatcagatggcgtcattaccggcattatcaagtggatggatttgccagcctacccgcaggagccaaaaccatga

SEQ ID NO: 1852 - protein, 100 aa, Klebsiella oxytoca
MTIAIDRLKEVTRVFGRRHIAYQMARELLEIYRGNGPSVWNVLSDFPPEVNGKYLVITSYGDIRTACYDCESGEWRASDGVITGIIKWMDLPAYPQEPKP

SEQ ID NO: 1853 - DNA, 318 bp, Citrobacter pasteurii
atgagcaacatcacatggggcctgcagcgggatattacgccacgcctgggagcccgtctggtgcaggaggggaaccggctgcattatttagctgaccgggccagcatcaccggtaagttcagtgacgccgagtgccggaagctggatgaaacattcccgcactttatcagccagatggaattcatgttgaccacaggtgaaatgaatcctcgccatgcccactgcgtcaccctgtaccacaccggttttacctgcgaagccgatacccttggcagttgcggctatgtatacatcgccatttatcccactcaacgctaa

SEQ ID NO: 1854 - protein, 105 aa, Citrobacter pasteurii
MSNITWGLQRDITPRLGARLVQEGNRLHYLADRASITGKFSDAECRKLDETFPHFISQMEFMLTTGEMNPRHAHCVTLYHTGFTCEADTLGSCGYVYIAIYPTQR

SEQ ID NO: 1855 - DNA, 1068 bp, Klebsiella oxytoca
atgcgtggcgtgtatcaggcgacgtatctcaatacatttgcacagcgtctgcataactctggtgaaggagtcttagatccaggaaaggcatttgatttaattgtgggaaccagtacgggaggcatagttgcctgtgcgctagccgcgggggtctcacttgaaaaggttcttgcactttatcaagtgcatggcggaaaaatattccctcggcaacgattacgtgcactacctcgagtgggtaagtatgtccgtggcctattttctggtcttgcatctggcgaccaggctctgcgagcagtcctttctgattcattcggtaccgaaactatggggcaggtctatattcgtcgtggaattggtttagccatcactacagtggatctgaataggcatgctgccacagtttttaaaacccctcatatgagtcgtcttaatggacgtgacaacgatcgactattagtcgatgcctgtatggcgactagcgccgcccctatcctgagatcaatagctcgtctaactgaacctggcggtggagccactgttgattatgttgatggcggtctctgggcaaataatccgggggctgtcggcatgatagaagctcatgaaatccttcagcagagaggagagattgaacgtccgattcatttatttatgctcggtacgcttccagtgcaaggaggtgaagaacttaagagcgcagataaattacatcgaggtgttttggggtggggagcagggattaaggccatcacagtaagtatgaattcacaggcagttgcgtacgactacttggctcgaaaaattgcagaattgcgaggatatggaagttttgcatatcgactcccagcacaatgcccatcaggagaactccagaaatatttggaaaatatggacgatgcacgtcctagggtgcttaatgcgcttgcccgacaagccgtctcagatgttgattacgcttgggctacggcagaatcagtaagtaaaatgggcgcgtttcgaactgcattggcaagttcgtccaattatagttgtcataaatccgaggaacaccatgaccattattga

SEQ ID NO: 1856 - protein, 355 aa, Klebsiella oxytoca
MRGVYQATYLNTFAQRLHNSGEGVLDPGKAFDLIVGTSTGGIVACALAAGVSLEKVLALYQVHGGKIFPRQRLRALPRVGKYVRGLFSGLASGDQALRAVLSDSFGTETMGQVYIRRGIGLAITTVDLNRHAATVFKTPHMSRLNGRDNDRLLVDACMATSAAPILRSIARLTEPGGGATVDYVDGGLWANNPGAVGMIEAHEILQQRGEIERPIHLFMLGTLPVQGGEELKSADKLHRGVLGWGAGIKAITVSMNSQAVAYDYLARKIAELRGYGSFAYRLPAQCPSGELQKYLENMDDARPRVLNALARQAVSDVDYAWATAESVSKMGAFRTALASSSNYSCHKSEEHHDHY

SEQ ID NO: 1857 - DNA, 1065 bp, Klebsiella oxytoca
atgaccattattgattgtaataaagagatgagagggtatcactcagaagaggtaaacctctcgaatgcagagcaggcagaaatgcgcggccgccgcgacaatggtcgaacaaggctccgaaacggattgacaaaggctggtcatcctttgccgaaggagttcagttctcaaggctcttatgcgatgcgaacaatggtccaggatgatgcatgtgactacgatattgatgatggcgcgtatttcgataaagaagaccttaagaactctgaaggcgattatcttagtgcgctagatgttcgtaagcgggttcggaaagcattgaaagacgaccgattggcatatgatgcggttgtcaaaaccaattgtgtgcgtcaaatgtatcccgatggatatcacattgatatccccatttatcgtacgacctgttctaaagatatctgggataatgacatcatagagtatgaattagcaagtggcgacgaatggaccaaatcagatgcacgtaaggtaacgagttggtacaacgatgcggttggtaatgaactgaaagcgggggaatctgataccagtcagatacgcaggatcaccaaacttactaagaaaatggctaggagccgtaatacttggaaaaaaaagacaaccagtggcatttgtatttcgaagttagttgtagacaatttcgttgcgcgctcaaatcgtgatgatgatgctttgcgtgatacctggaaggcaatcaaattgcagttagaagtcagtcaacgtattacccacccggtgtttacggacaaaaatcttgctgaggaaggagacgaatgcgttatttttttccgggaatgtttgggtgaggtgctggaaacattaaaggtgctcgacgagcatgactgcacaagtaagaaggctggcgacgcttgggatgaggtgtttaatacaacttattttagtgcccagtgtaccacggataacactacatctaaatcgctgctacggcctgcagttgcggccactgctagcctgtctttccctagttatcccgtacaacctaacaaatcatcggggtttgcctga

SEQ ID NO: 1858 - protein, 354 aa, Klebsiella oxytoca
MTIIDCNKEMRGYHSEEVNLSNAEQAEMRGRRDNGRTRLRNGLTKAGHPLPKEFSSQGSYAMRTMVQDDACDYDIDDGAYFDKEDLKNSEGDYLSALDVRKRVRKALKDDRLAYDAVVKTNCVRQMYPDGYHIDIPIYRTTCSKDIWDNDIIEYELASGDEWTKSDARKVTSWYNDAVGNELKAGESDTSQIRRITKLTKKMARSRNTWKKKTTSGICISKLVVDNFVARSNRDDDALRDTWKAIKLQLEVSQRITHPVFTDKNLAEEGDECVIFFRECLGEVLETLKVLDEHDCTSKKAGDAWDEVFNTTYFSAQCTTDNTTSKSLLRPAVAATASLSFPSYPVQPNKSSGFA

SEQ ID NO: 1859 - DNA, 1767 bp, Klebsiella oxytoca
atgaagtgggctatagacgatcccgtgcgtttcctgagggagaaggatgaactcacacatcttgaaaccgagacgggttggctaagcacggcttggcgtatatctgaagagggctcgatcaccgttgatatcgacatgtttatccatgggcgattgtttgctggggaaatgacatatccggacgcgtttccggattctccgccctacatacgtccgcgagataaatcagagcgatggactaaccatcaatatggcgtgggtggttcactgtgcttgcagtggcgggcagataactggcatagcaatgtgactggtgcagatatggtacgcagtgcgcacgagttgctgagtacagaacagcatcctgaattacctcattctgttccctctgcgcatcgtttgacggaggggcaaaaccttaatttcgtatttcgacgttatgtccctacctccgaagtcgaaaacatatttactatgctcccacttcagtctagaacccgaatatcatcttcaactgtgtataacgaagggtcggcggtaatgttcacagccagagtcgctgacgcacaggatgagctacgaaatgttaccgatatccctcaagggctcatcgattttgttagtattttgtcgttgtcctatgagggctgggtctttagaagcgactactttagccagaggcaatccttagaatctgtagaagcattaatccaaatattgatgatggccggttttaacaccgatgacattctggttaaggaaggggataagttcaaggctaggacgatcatattattaggcaaggaatggtcatcactgcgagtattcctgttagattctggggagcaaccagtgctgcgggaacatcgagttgttagatctccgaactcaaccttaagactttcggaagaatcacagaagttgagtaagatccgcgtaggaattgttggactgggatccgtaggtagcaaaattgcaatttcacttgctcgttcgggtgtcagacaattcttattagtcgatgacgactatctcacgcctggcaacttggtgcgtcatgagttggggtgggcccatgtgggagctcataaggcacgggccgtaagcaatactttagcgcttatagcggcaggtgtgaaagtggatgtaaagactatgcgtcttgcggggcaggaatcggcggtgacagcagcggctgcactaaaggatctgtctaattgcgacttgttgatcgacgctacagctaatccagaagtttttttgctgttagctgcgactgcccagcgaaatggaataccgatgtgctggggggagatattcgcaggtggttacggaggcatgatcgctcgagcacgtcctaaacacgacccaaatccattagctgtgcgtgacgcttaccattcttatctctcaaccctccctgaagcacctttcaagaatatggctagctatgatgggagtgatgaacaaccacttatagcatacgacagcgatgtgggctttattactactgcactgacacggttggctgtggatactgctctatgcagagagccaagcgaatttccgtactctttgtacttgctgggtatgcgacgtgaatggattttcgaggagccatttgacacacggccagtcgaaataagtggagaaggctgggaacgcgacgaaaatgctgtgagagatgaagatagggtcgcagttgcaaaggcattggtaaatatgtttgaaggaaaacaaagtgctaacactgatcctacctcctaa

SEQ ID NO: 1860 - protein, 588 aa, Klebsiella oxytoca
MKWAIDDPVRFLREKDELTHLETETGWLSTAWRISEEGSITVDIDMFIHGRLFAGEMTYPDAFPDSPPYIRPRDKSERWTNHQYGVGGSLCLQWRADNWHSNVTGADMVRSAHELLSTEQHPELPHSVPSAHRLTEGQNLNFVFRRYVPTSEVENIFTMLPLQSRTRISSSTVYNEGSAVMFTARVADAQDELRNVTDIPQGLIDFVSILSLSYEGWVFRSDYFSQRQSLESVEALIQILMMAGFNTDDILVKEGDKFKARTIILLGKEWSSLRVFLLDSGEQPVLREHRVVRSPNSTLRLSEESQKLSKIRVGIVGLGSVGSKIAISLARSGVRQFLLVDDDYLTPGNLVRHELGWAHVGAHKARAVSNTLALIAAGVKVDVKTMRLAGQESAVTAAAALKDLSNCDLLIDATANPEVFLLLAATAQRNGIPMCWGEIFAGGYGGMIARARPKHDPNPLAVRDAYHSYLSTLPEAPFKNMASYDGSDEQPLIAYDSDVGFITTALTRLAVDTALCREPSEFPYSLYLLGMRREWIFEEPFDTRPVEISGEGWERDENAVRDEDRVAVAKALVNMFEGKQSANTDPTS

SEQ ID NO: 1861 - DNA, 228 bp, Klebsiella oxytoca
atgccactcaccgatataattgaagcgaacataatcgtatccagttcctttaaaaaaagcacggagcccaccaatagcatcctcaatacgtcgtacaaaggaagcaaacgtaccacggcgatgtatagttatctcccggacgatgaaagtatttgtcccgacatgttcacccataagaatcccgccgacttcgcgttgaccagcattttggagtgcagtcatcattaa

SEQ ID NO: 1862 - protein, 75 aa, Klebsiella oxytoca
MPLTDIIEANIIVSSSFKKSTEPTNSILNTSYKGSKRTTAMYSYLPDDESICPDMFTHKNPADFALTSILECSHH

SEQ ID NO: 1863 - DNA, 993 bp, Klebsiella oxytoca
atgcttaatctgcttgccaactctgatgcaaagcgttggatcaatgatgctgtcaaacggcattcatcagaaatttatggggatataaaatctgctgtgatttggaccaacgctctggatgagaacggagggttgattgttccaattgatccttacgagctatctcgacgaatcaatcaggagccattcatgatacttcataaccatgacccaggtaacccaaaggggcaggtcttagaaagtgctgtttttgataatggctctggtgttgtctttgttgcagctatcatggggttctatgctggaggtaataccatagaattcagatcaatggatttgaatctacatgatatttaccaatctcctcgagagttgcctgacatgccggaagaatcctcaattgaattggtttttgatccaagagatgtcaatccgcagtggattgaacacatcagcaaaaatgcaccgctaagaattcaggtcaacgaatcatcgtacaatgatgcccaaacgactcaagaactgattagtattgggatcggctacttagctattgtctggaatccttttgtgactgctgttgcatcggaagctggtaaaaaaatgtatacagcttttcacaactggatttcaaaattattcaatgagttatctgaaagaaaaaatcccatcatcaatcttgtttcccatcaaaacggatgccaagtatttttcatattccgtggtaaagacgtgaagcaacactatgctgctcatcaaatgttatcgagtgctggagtacaagctgcagagctgataagaaaattaaaaatgcaggacaaggttccaacacagctaacatatgaatgggataaagaagcacagttatggtatccatcgtacgcagtgcttactgacaaaagcatcattgttgatagagggacacttatcgctatagaacagttgcctaagggcttaagtctcggatttagtaaaggaaaagcaaaagtatga

SEQ ID NO: 1864 - protein, 330 aa, Klebsiella oxytoca
MLNLLANSDAKRWINDAVKRHSSEIYGDIKSAVIWTNALDENGGLIVPIDPYELSRRINQEPFMILHNHDPGNPKGQVLESAVFDNGSGVVFVAAIMGFYAGGNTIEFRSMDLNLHDIYQSPRELPDMPEESSIELVFDPRDVNPQWIEHISKNAPLRIQVNESSYNDAQTTQELISIGIGYLAIVWNPFVTAVASEAGKKMYTAFHNWISKLFNELSERKNPIINLVSHQNGCQVFFIFRGKDVKQHYAAHQMLSSAGVQAAELIRKLKMQDKVPTQLTYEWDKEAQLWYPSYAVLTDKSIIVDRGTLIAIEQLPKGLSLGFSKGKAKV

SEQ ID NO: 1865 - DNA, 201 bp, Klebsiella oxytoca
atggaccaaattactaataggcgtaaggtatcaaaaaagaaatatatgtactacaggtttagagacagggatattgaattaccggagtggttgttttttttgattcactgtaacttattgatactaaattgtttttattttgccttaatagtttgtggagtaattggctacaataaaatcagatttaattactatatgtaa

SEQ ID NO: 1866 - protein, 66 aa, Klebsiella oxytoca
MDQITNRRKVSKKKYMYYRFRDRDIELPEWLFFLIHCNLLILNCFYFALIVCGVIGYNKIRFNYYM

SEQ ID NO: 1867 - DNA, 2493 bp, Klebsiella oxytoca
atgaataatcatatccgaacagccattttgaatggacgatttgtgttactgcttggcgctggcgcctcttttggctgttcaaatcgactcaaatcaaatcctccaatcggtaatgctttatcaaaaataattgcggaagaagcaggatttgaattggaagagggtgacgacttagctgatgtatatgcttccggcttaaatcatttaggcgaaataggaatgcaaaagttacttgaaaaatactataagcattgtcagccctctcaagaatatctggatatgatgaaatatccattcccaagagtttatacattcaatattgatgatgccatcgaaaaagcagctggtgtaactacaaacaaagtgttcaatgtaagaagaagaaatagtagaattgaggatttcgatcctttttttagtcaaatggatcttgttaaactaaatggagatattaattaccctgaggaaggttttattttttctccagcacaatatggggaaggctctgctgaagaaccagtatggtatatggaattagctagagattatcatcgatttacatttgtatttattggtacaaaaatcaaagagcctatttttaggcatcaaattgaaaagtacaaaaaaagaacaggtgatcaaagtcttaaaagctatcttatagtaccagagctaagctccgtacagcagaatagtttatctgggagcaatattgaatatataaatggaactttatcagatttcatgaattggatgaaagatacatttccttctggattaactcccaaagatatattaatgaatactcggcctgagatggcttatttaagcaacggagaagaaccaactttttcaaaatcaatagcaaaagcgttagataaggtggtgcaagttaacagatcagagttattgaagcatactaaaagtatgcaacccacagtaaaggagttctacaaaggattcaaacctacctggtcagatataattaataacattcccgcacttcttgataatactaaaaaaatcattgaagcttgcgtcggaaacaaattaaacaaaaaattgttcttaatactagggccagcaggttcaggtaaaacaacggctttgaagcagttagctttagaaatagcagacagaacggcgaaaaattgttactatgtcgaagggatacccgaagatttaactaatcttctaaaggtattaaataaaagaaatacgtcctctttttacgtcttcttcgagaaacttgctgacattgcatccgatttatcacaattgatcgcaaatggttttgatgaacatgccatatttgttggttcagagaatgtcagaatatgggagtatcgggttagagaacatcttgagcagttctctccatatatccaaagttatgattctataagtgaaaaagatgttgatccaatattaaacaagatagagctatatggtaattgggccagattgaaaaaaatgtcttatagaaatagacgccttgaaattttgaaaaaatccaaacgtcagttgttaattgggcttattgaggctacttctggagagggttttgatcaaataattaagcgtgagttcgcagacattaatgataagagtgaacgagctcttttattactttcagggttggcgacactgcacagaagtgaggcatctgagtccaccttaactcgcgctttatcttacttaggagcgacttcaaatgtaagtgaactttgctcaagattatctggattagtgaattataataacgggtatgtaagtactcgacatagaatatatgttgagcggttaacatctctttttgttgatgaagctgaaatgagtaaacttattacggcttacatatattcattttccgtatatcaatttcctatagttgttaatatttctaagaaagatgctgcagtttataaagggctcgttaattataagtttttaaagaaagtacttcgagattcaaaagaatgcatacttaatatttattccttttttgaaaaacaactagaactagaaggcttgtttttattgcaatatggtttggctctccgtgcatatggagataatgaattagctcttcaaaaattgattaatgcccgagaggcttttccagaatcacctcatatcgagcatgcgtatgcccaacaattacttatcattgctgaaaatactagcgatgcaaatttatcgttagaatatttaggtaaggcgaaagacattctaaataggcttgataaaactaacaaacacgaaagtgatcgctatccgattattaccctctcgattagccatgtccgtattttagataagctaggtagggagggtgaggcgaaaataattgccaagcaatattttgatgaactcacatataaatttggaaaaaatgattccaagctgaatgagatggttattgctaccaaaaaattccttactgtatatttcactaaaggaattattgttgacatacatagttatgattaa

SEQ ID NO: 1868 - protein, 830 aa, Klebsiella oxytoca
MNNHIRTAILNGRFVLLLGAGASFGCSNRLKSNPPIGNALSKIIAEEAGFELEEGDDLADVYASGLNHLGEIGMQKLLEKYYKHCQPSQEYLDMMKYPFPRVYTFNIDDAIEKAAGVTTNKVFNVRRRNSRIEDFDPFFSQMDLVKLNGDINYPEEGFIFSPAQYGEGSAEEPVWYMELARDYHRFTFVFIGTKIKEPIFRHQIEKYKKRTGDQSLKSYLIVPELSSVQQNSLSGSNIEYINGTLSDFMNWMKDTFPSGLTPKDILMNTRPEMAYLSNGEEPTFSKSIAKALDKVVQVNRSELLKHTKSMQPTVKEFYKGFKPTWSDIINNIPALLDNTKKIIEACVGNKLNKKLFLILGPAGSGKTTALKQLALEIADRTAKNCYYVEGIPEDLTNLLKVLNKRNTSSFYVFFEKLADIASDLSQLIANGFDEHAIFVGSENVRIWEYRVREHLEQFSPYIQSYDSISEKDVDPILNKIELYGNWARLKKMSYRNRRLEILKKSKRQLLIGLIEATSGEGFDQIIKREFADINDKSERALLLLSGLATLHRSEASESTLTRALSYLGATSNVSELCSRLSGLVNYNNGYVSTRHRIYVERLTSLFVDEAEMSKLITAYIYSFSVYQFPIVVNISKKDAAVYKGLVNYKFLKKVLRDSKECILNIYSFFEKQLELEGLFLLQYGLALRAYGDNELALQKLINAREAFPESPHIEHAYAQQLLIIAENTSDANLSLEYLGKAKDILNRLDKTNKHESDRYPIITLSISHVRILDKLGREGEAKIIAKQYFDELTYKFGKNDSKLNEMVIATKKFLTVYFTKGIIVDIHSYD

SEQ ID NO: 1869 - DNA, 756 bp, Klebsiella oxytoca
atgagaacgaccagcatcgtgggaacattattagtgcttatgttggttgcgccattctattcagttgcagctagtaaacctcttagtgcatcccaggcaaaattagtgaatggttctaatgctgcaaatgagttgggctgtgaaaggtatgagtcttggtttccagaggatataaacaaacaatcgaaatttaaatcaataaaatcagttctaaaaactgagcaattgatccatggctcaagtgtttactgtatggttaatgcctcgcttgattcatctgatacttcaatttttattagcgagcgcggtgaagttgatggcgtatcaactgagataaaccatggtaatggaacggcgaccattggtgaggggcgggtttttgataacaaagggtgggatgttgcatgcaaacgggataatttcaatgacgagaaatcatgctacgtacgacaatatggccttaccatcagaaaagtgaatgatgtatatttcatttatgtaggaaatgatttagctcctggcggcaaggttgagttaaggctggataataatgaggcgattggtagcgttgatgggaatggaatgcttaagaaagaggatagtgatctattccttaaacaagtaaagaaaaactccacagtaatagttcgctacaacatatatcaaaagcaagcgcctgaggtaagaacgatagatacaaaaacgctaggtgctgccattaaagtaatgaacctgattaatagtttatatatttaa

SEQ ID NO: 1870 - protein, 251 aa, Klebsiella oxytoca
MRTTSIVGTLLVLMLVAPFYSVAASKPLSASQAKLVNGSNAANELGCERYESWFPEDINKQSKFKSIKSVLKTEQLIHGSSVYCMVNASLDSSDTSIFISERGEVDGVSTEINHGNGTATIGEGRVFDNKGWDVACKRDNFNDEKSCYVRQYGLTIRKVNDVYFIYVGNDLAPGGKVELRLDNNEAIGSVDGNGMLKKEDSDLFLKQVKKNSTVIVRYNIYQKQAPEVRTIDTKTLGAAIKVMNLINSLYI

SEQ ID NO: 1871 - DNA, 717 bp, Klebsiella oxytoca
atgggcagtgaaaatggcaagacccggaagtgcgcgaacacaaaccgggtctctatcgaaaataaccgcaaaggaaatatcgacatgactattgtacagaacaaagagctaagtttccacaatgtcgcattagtgccggcgcctgtgaatgatggcatttggctaacatcttcagatattgcgaaggcacttggatacgcttcaccaaagagcgttacaaacatttattcacgtaattccgacgagttcacaagcagcatgtcaatggtcatcaaaatgatgactaacggaataaacaataacttacgtgaaaaatcggtccgtgtgttctctcttcgtggttgccatctaatcgcgatgtttgccactaccgataaggcgaaagaattccgccgctgggtgctggatattctggatcgggaagtggcgcattcgccgattgcgaagcagtttaccgatgatgagttgcagtctttatgttggctctggaagaactcggtaaggatggtaagccatatcgctgacgttgagcctcttctacgtgtagctgaacatcgactggcccctgcttactattctatgccgcgggaatacacccaaaacataaacactgtaagaaagttgttagaaagggaaacgacgcacattcacgccgaccgacacacgatagacaattggcgggtgctaaaccaactaagaattccggagcttcattga

SEQ ID NO: 1872 - protein, 238 aa, Klebsiella oxytoca
MGSENGKTRKCANTNRVSIENNRKGNIDMTIVQNKELSFHNVALVPAPVNDGIWLTSSDIAKALGYASPKSVTNIYSRNSDEFTSSMSMVIKMMTNGINNNLREKSVRVFSLRGCHLIAMFATTDKAKEFRRWVLDILDREVAHSPIAKQFTDDELQSLCWLWKNSVRMVSHIADVEPLLRVAEHRLAPAYYSMPREYTQNINTVRKLLERETTHIHADRHTIDNWRVLNQLRIPELH

SEQ ID NO: 1873 - DNA, 357 bp, Klebsiella oxytoca
atgtcgtctactgcttcatggtcatacaacaagccgtgcacgatatggcgtaagggagcgggcggtaatgacgagtggggcgatccagtcgacccatatgaaccgccagaaaccatcatgtgcgactacatcggcggactgtcagcaaagctcggctccattggcaaagaggttgtcgttaagaacaccttctttactgcgtttgcgctggccgatgagggcgattacatcctgattggtgagagcgttgagccggatccggtcgtggctggtgccgatgaggtgcgccacgttacccgctggaacgacacgctcgacggccaggaagatgactgggcgataattacgggagtgtag

SEQ ID NO: 1874 - protein, 118 aa, Klebsiella oxytoca
MSSTASWSYNKPCTIWRKGAGGNDEWGDPVDPYEPPETIMCDYIGGLSAKLGSIGKEVVVKNTFFTAFALADEGDYILIGESVEPDPVVAGADEVRHVTRWNDTLDGQEDDWAIITGV

SEQ ID NO: 1875 - DNA, 174 bp, Klebsiella oxytoca
atggcgtgggtttcagttcagcaacggctgccgcggacgtttacccgggtatgggtgataaccgacaccgggcgggagaccaccggctacgttaaatcggacggtgagtggcatatcaactgcgagaaaatccgggcgactggcgcgaaagtgctgcgctggaaggagggctga

SEQ ID NO: 1876 - protein, 57 aa, Klebsiella oxytoca
MAWVSVQQRLPRTFTRVWVITDTGRETTGYVKSDGEWHINCEKIRATGAKVLRWKEG

SEQ ID NO: 1877 - DNA, 333 bp, Klebsiella oxytoca
atgacatatgcaatcggtgttggtgctttcattattttcagcgtggtatttcggttcatactaaacccattacgatatctcgtattaccaagagccactcctttagttattggggtaagagttttcttagctggcatgtcaacagtaatggtcatgcaacattatgatttgtcagcaaatccgatttacttaattattacacttttcattatcaactatattataaatgctaaggtgtactctgcgaaccccgtgtttaacaacgccattgaacaggttggtttgatgattggcgctgtggcatttttagtttattacttttacaaattctag

SEQ ID NO: 1878 - protein, 110 aa, Klebsiella oxytoca
MTYAIGVGAFIIFSVVFRFILNPLRYLVLPRATPLVIGVRVFLAGMSTVMVMQHYDLSANPIYLIITLFIINYIINAKVYSANPVFNNAIEQVGLMIGAVAFLVYYFYKF

SEQ ID NO: 1879 - DNA, 480 bp, Klebsiella oxytoca
gtgccagagccagccacatactcagcgattgcagctacttttgcagcattatcagccgcgataaatgcttacattggttttaaaaacaggcaagacgctttagataaacaaattttggatcgtcttctgaaaaaagccgatgagtgcaatcaactcatattgaaaaacggacatacaatcccttataaagatggtgaaatgggcgatgcttcacgcatttacactataatacatctttcaatgagggattacgatcaaattaaaaggggattctcatttctacaaaaaatcccttacattggtgagaaaaacttcgataaaaaagagaggtttaaagattttttctttgattcactacattccacaatatggaatgatttaaaaaacaatacaacgccaactacatataatgacccaactttaatatctcaatttaaggacgtgaaaaaattttatatgaatcaagttaacaaaaaatag

SEQ ID NO: 1880 - protein, 159 aa, Klebsiella oxytoca
MPEPATYSAIAATFAALSAAINAYIGFKNRQDALDKQILDRLLKKADECNQLILKNGHTIPYKDGEMGDASRIYTIIHLSMRDYDQIKRGFSFLQKIPYIGEKNFDKKERFKDFFFDSLHSTIWNDLKNNTTPTTYNDPTLISQFKDVKKFYMNQVNKK

SEQ ID NO: 1881 - DNA, 240 bp, Citrobacter pasteurii
atgtttcactgtccgttctgcaaaaagaccgtgcacgtccgtaccagccggtatctatcggaaaacgtcaaacagcgttatcaccagtgtaccaatatcgaatgttcggccactttccgcaccatcgagtcggttgacggtgtgatacgtgccgcaccggagaaaaccgaccccgccccggtgacgccaccgccgccgcgtaaagtacagggctgctacagctcgccgttccggcattaa

SEQ ID NO: 1882 - protein, 79 aa, Citrobacter pasteurii
MFHCPFCKKTVHVRTSRYLSENVKQRYHQCTNIECSATFRTIESVDGVIRAAPEKTDPAPVTPPPPRKVQGCYSSPFRH

SEQ ID NO: 1883 - DNA, 1527 bp, Klebsiella oxytoca
atgtttggcggacaaggcaatagcccggatattgataatactgatgcagttcttaatgctgtcgcggtagccaaagagctgagttacggaatagatttgcgtggcggtccctggcgaatctctaaaaccatcgatctcacaggtattcgacatattattactgacttttcgggacgctttctccttgatcctgaaaatttcagttatctgcatgatgcccgttttgctgtaacttttggtaacccggatacccgctggagtgatgacagggcggtgaatgtctgcgtcaacggactattacagatacagtgcgacagcagaaacagcctgtctaacgggattttcattaagggcgctctgataacgattgaagcaatgagagcgaccggattcaatggtcacggtatattcctcgggagcgtatgggattcagcatttaagtctgtttcagtagagctatgcggcaacattgcatcctatgcatttcagatttccgcctttggtgatacgtcaaactgtctgtggataggtcgtttacaggttgaacgggcctaccataaacaaatgagtatcaacgttatccgctctgaaatacatacgattcatgctgagcggctgatgatactgaccacagatgatggcacaacgctttcaccctctggacttacctatcaaaattcaaatttattattgagtaatagcgtacttggccaggtagtactggatgcaatgtcttctgatgatgctggcacggtatcgataacacctgctgttacactaaatctgtatgcttcgtttgccagtgcactgtcaatgaataccagcatagtttcgagtacctatggtgactatgcagcgattacggcctcatcattccggggttactataaccatggacaaccaataactatctgcaatagccgcatgtcatattcggacggaagcggggtttgccgtatggtgaatggcgtgctgttcaattgcaccattgacaagctaattccacattatggaacaaacgggcttactgtcatatcgtccactattatcagtgattttgatattgccgctgatactgtgaataacatcacattttactcgtgtatgttcaatggagccgtgaagcggacgcagtctccggcaggaaagcctgtcacattcattgattgtaatctggcacagctgaattcgtactaccaacacaaagcggatttccgtggaggctatattgcgcaggtcaatctggcgagccgggctttcgtcaatctttctggcgtcagaggagccatattctcctatgtcgagggcggtgaccgtggctttacgacaaatgattgtatttttgattctgtgacgcgctgggggcctccgacgcatggttcttttcctgcctgcgttcgcacgcagcgactgggtaatatgaatatggttgataacaaagtggtgaccacagtggttgagtatatcaacactgcgaataatggagtctcttttgctccgttgcttacttatacaccaaccagctaa

SEQ ID NO: 1884 - protein, 508 aa, Klebsiella oxytoca
MFGGQGNSPDIDNTDAVLNAVAVAKELSYGIDLRGGPWRISKTIDLTGIRHIITDFSGRFLLDPENFSYLHDARFAVTFGNPDTRWSDDRAVNVCVNGLLQIQCDSRNSLSNGIFIKGALITIEAMRATGFNGHGIFLGSVWDSAFKSVSVELCGNIASYAFQISAFGDTSNCLWIGRLQVERAYHKQMSINVIRSEIHTIHAERLMILTTDDGTTLSPSGLTYQNSNLLLSNSVLGQVVLDAMSSDDAGTVSITPAVTLNLYASFASALSMNTSIVSSTYGDYAAITASSFRGYYNHGQPITICNSRMSYSDGSGVCRMVNGVLFNCTIDKLIPHYGTNGLTVISSTIISDFDIAADTVNNITFYSCMFNGAVKRTQSPAGKPVTFIDCNLAQLNSYYQHKADFRGGYIAQVNLASRAFVNLSGVRGAIFSYVEGGDRGFTTNDCIFDSVTRWGPPTHGSFPACVRTQRLGNMNMVDNKVVTTVVEYINTANNGVSFAPLLTYTPTS

SEQ ID NO: 1885 - DNA, 387 bp, Klebsiella oxytoca
atgactgacatggaaatcgaaaaagaaatcgtggccaagggaaaaacggccgcgcgagtaaccccagaacgtatccaaagcgttatccgcgccgaacattattttacggcctttgatggcagatctggcgccctggcaagtgggacctatgccggcaaagaggtgccagttgctggcgacgctgatcttgagtcgcttaaattactgacgttttgtgtactggtgttggagaacggattcgtcgttaccggtgaatcagcttgtgcaagcccggaaaactttgatccggagatcggtcgtaagattgcgcgccagaacgcagtcgctaaaatctggccacttgaaggatatctcttaaaacaaagatttaacgaggcaaaacaatga

SEQ ID NO: 1886 - protein, 128 aa, Klebsiella oxytoca
MTDMEIEKEIVAKGKTAARVTPERIQSVIRAEHYFTAFDGRSGALASGTYAGKEVPVAGDADLESLKLLTFCVLVLENGFVVTGESACASPENFDPEIGRKIARQNAVAKIWPLEGYLLKQRFNEAKQ

SEQ ID NO: 1887 - DNA, 543 bp, Klebsiella oxytoca
atgataatctggatcaacggacctttcggcgccggaaagacgacgctcgctaagcggctgcgcgatcggcgttccaaatcgctgatctttgaccccgaggaaatcgggttcgtggtgaaagaaacggtccccatgccagcgagcggagactatcaggatctccccttgtggaggggacttacgatcgcggcggtcagggagattcgaaggaattactcgcaggacatcatcatcccaatgacgctcgtgcacccggactatctgactgagatactcgacggggtaaggcggatcgacgatcagctgctgcacatctttctgacgctcaacgaggacctattgcgtcaccggatcgcgaaccagaccatgcatcctgacccgaatcgaaatgcggagattcgagagtggcgattagcgaatgtcgcccgatgcttggccgcaagggaacggcttccatgcacaacccgtgttctcgatagtggtgcacacaccagcgatgaactcgcagcgatggtgctcgacggaatcgatgggcgcacctga

SEQ ID NO: 1888 - protein, 180 aa, Klebsiella oxytoca
MIIWINGPFGAGKTTLAKRLRDRRSKSLIFDPEEIGFVVKETVPMPASGDYQDLPLWRGLTIAAVREIRRNYSQDIIIPMTLVHPDYLTEILDGVRRIDDQLLHIFLTLNEDLLRHRIANQTMHPDPNRNAEIREWRLANVARCLAARERLPCTTRVLDSGAHTSDELAAMVLDGIDGRT

SEQ ID NO: 1889 - DNA, 264 bp, Klebsiella pneumoniae
atgaacattaacgctttataccgccatccgtccgagcttgaagccgaagcgatgttatcccgcgagcaggcttacccggatgattttacgcttgcagaccgtacagcagaacggatgacccgcgcccgcgatggactggctcacgttatgaccgatttagtcactcaactcgacgatgaacaagccgctatcgtgtattgctggttgagtaaagtcctgacgattatcgatatagccagaattgatgcggaggccagcgcatga

SEQ ID NO: 1890 - protein, 87 aa, Klebsiella pneumoniae
MNINALYRHPSELEAEAMLSREQAYPDDFTLADRTAERMTRARDGLAHVMTDLVTQLDDEQAAIVYCWLSKVLTIIDIARIDAEASA

SEQ ID NO: 1891 - DNA, 234 bp, Klebsiella michiganensis
atgagcatcagaaaaaatgacgtaactgtaaccatttctggtcctgttggttctggtaagtctgctatctatgccgaaatcgccattacgctgacggctctgggaatatcggtcaagcacgctgatcccaagtcctggcaagctgaagttaacgctggcgtatacaccaccgctcacgacatgctggatatgtataaccccatcgtctctatgcgcgaggttctggaaaaatga

SEQ ID NO: 1892 - protein, 77 aa, Klebsiella michiganensis
MSIRKNDVTVTISGPVGSGKSAIYAEIAITLTALGISVKHADPKSWQAEVNAGVYTTAHDMLDMYNPIVSMREVLEK

SEQ ID NO: 1893 - DNA, 696 bp, Klebsiella michiganensis
atgccactgacagagcgccgctacgacaggctggcggtcaggctgtcgctgattatcagccgtcttgtggcgggtgaaacgttagagatgcaaaaactggcgaccgagtttgatgtgtcggtccgtaccctgtaccgggattttcgcgaacgactgatgtacctggacctcgaatgtcatcagggatgctatcgcctgcggaccggtgcaggtccgcagggtgaactggatgtgctgacttttgcataccgggccgggctggccgatatctttccggggctggaccggcgtctggcgggcgcactgctggcatcggatggaaccccttgcctggtgtggcagtcaccacagccgataacgaccaccagcccgctggtattttatcgactggtcagcgccatcaccggcagccagcgtgtattgctgctcgcggacggtgaacgttgtgacggactggccccgtaccgtctgatatttctcgacggctgctggtacctcaccggtgaacttaacgggcatataaccgtgcatcctctggcgaccatccatgcagtgacaatcctgaacaccacttttacccctcgaaaacgactcagcctgttaaccactcaggcaggctttatccgggcacttcctcacttcagctgtatccgtgaagttttgtcacaggctgccgataacgggggatcgggatga

SEQ ID NO: 1894 - protein, 231 aa, Klebsiella michiganensis
MPLTERRYDRLAVRLSLIISRLVAGETLEMQKLATEFDVSVRTLYRDFRERLMYLDLECHQGCYRLRTGAGPQGELDVLTFAYRAGLADIFPGLDRRLAGALLASDGTPCLVWQSPQPITTTSPLVFYRLVSAITGSQRVLLLADGERCDGLAPYRLIFLDGCWYLTGELNGHITVHPLATIHAVTILNTTFTPRKRLSLLTTQAGFIRALPHFSCIREVLSQAADNGGSG

SEQ ID NO: 1895 - DNA, 225 bp, Klebsiella michiganensis
atgacatggcattacgagataaatggcgtacgtcacgacaatgtgaccgaagacgacatcaccggcctgattgttcacggtgaactgactgccgccactctggtttggcgacagggaatgacggagtggcaaccgatctccgccaccccactagcttcggtgctacttcagagcgccatacgcgagcatacgcccacagcccctgacgcatcaggggctttataa

SEQ ID NO: 1896 - protein, 74 aa, Klebsiella michiganensis
MTWHYEINGVRHDNVTEDDITGLIVHGELTAATLVWRQGMTEWQPISATPLASVLLQSAIREHTPTAPDASGAL

SEQ ID NO: 1897 - DNA, 909 bp, Citrobacter koseri
atgaaaagaaaatctttctctgcaaatgtgaaatggagttggttggcattgtctgtggcactgatggccccgactgtagtccaggcaaccgccaaaacggcggtagaagccaagaactgtcagtcagaaaacaatacatgcccatatcctttcgacctgtacaaaaccgacccagcgtacaaaaagtcgtttgatgagaccatgaatcagaatggtttaccggcgatgctcgacgagatgaatggtccagcgggtccgatggaaccagtaaaaattgacggtaaagtctacctgaaaggttttatgtgtgaagacggtaactgtggtaaccacaatctgacattcttgtaccagcctgacctccataacttcgtgggcttctacagcaacggtaaagatgggcaatgggttaacaccccaagtgatggtgagctgaaagtaatacgtgcattagtcaatgggactgcggaaccaacacacacgccaaccgccactaccacgtccaatgatgcaccaccagcgaataccatctgggaatttaccgggggtaacggtgacactctgtggaacatgtgcggcggtaaacataacagttgtgtgattgttggtaataccaaacacgtggccgccgtgttaaatcacaaatctgcaagtgggtgttcattaggtgatttttacatcattgacagggatgaccgttcctggcaacagcgagatactggaacctgtagtccaaatgcttgggtgcgcaaaggctccattaaaggtggtcaatatctgtctgttgacatcggcgtcggtgatgaaactgttatccagtaccctatcggttactggtcagacatgaaagagttttccggcccgaaccgaccatcctgggaaaaagcaaaacaagctgctaagcagtag

SEQ ID NO: 1898 - protein, 302 aa, Citrobacter koseri
MKRKSFSANVKWSWLALSVALMAPTVVQATAKTAVEAKNCQSENNTCPYPFDLYKTDPAYKKSFDETMNQNGLPAMLDEMNGPAGPMEPVKIDGKVYLKGFMCEDGNCGNHNLTFLYQPDLHNFVGFYSNGKDGQWVNTPSDGELKVIRALVNGTAEPTHTPTATTTSNDAPPANTIWEFTGGNGDTLWNMCGGKHNSCVIVGNTKHVAAVLNHKSASGCSLGDFYIIDRDDRSWQQRDTGTCSPNAWVRKGSIKGGQYLSVDIGVGDETVIQYPIGYWSDMKEFSGPNRPSWEKAKQAAKQ

SEQ ID NO: 1899 - DNA, 141 bp, Klebsiella michiganensis
atgggtgaaggctatatgaaaatttttttcacgtacgtgatcggagcgttatttttcacctctttactccggcataaaagagaaattggcaataatctcaggcattgtgcgtggttgcgtggtataaaaagccctcattaa

SEQ ID NO: 1900 - protein, 46 aa, Klebsiella michiganensis
MGEGYMKIFFTYVIGALFFTSLLRHKREIGNNLRHCAWLRGIKSPH

SEQ ID NO: 1901 - DNA, 819 bp, Klebsiella michiganensis
atggatattaaggtggatagattgaaaaaatatttattgatagaatggattaagtgtttttattctcgtttgaatgttagtcaaaaattgcatttaaattatattttattgtttgtctatacatacgtaatatttcttgtattgagtcatggtcaaatattcaggtctgcattcttattggctattgtattttggtgtattgcattggcatatgatgctattcttctatataagaaaatttatgaaaatgttatagggaaagcattgttaacaataatattggttgtcgggactaatttttctatatctattgctgggatcatattaaatgatgttagcggagttgagccttctaattttcctcatgcattaattattgtttctattttaaccattccattcattacagctttaattgctttgtttttatattatatcttagccttaattgtttttccttttatacttctatattttttattattggatgctaaagtaaatgattttttattccccttcaaaagtgaaaaagatgatatttatctaaagaaatccacaatactaatcaagatttttagttttggcattttttttgttttcatttatggagtatcacaaaatactatgtcatggtatgaaaagaatttatcaaaatttgcagagaaatttatatatacatttgagatgtattcgaaaagcccatgcgatcttggtagtgatactaaatcattgtttataaatgatgatagaattatttttgcaaaaaaagttggtgatgaagttatttttcaagttgaggaatgtaattataaaaaatag

SEQ ID NO: 1902 - protein, 272 aa, Klebsiella michiganensis
MDIKVDRLKKYLLIEWIKCFYSRLNVSQKLHLNYILLFVYTYVIFLVLSHGQIFRSAFLLAIVFWCIALAYDAILLYKKIYENVIGKALLTIILVVGTNFSISIAGIILNDVSGVEPSNFPHALIIVSILTIPFITALIALFLYYILALIVFPFILLYFLLLDAKVNDFLFPFKSEKDDIYLKKSTILIKIFSFGIFFVFIYGVSQNTMSWYEKNLSKFAEKFIYTFEMYSKSPCDLGSDTKSLFINDDRIIFAKKVGDEVIFQVEECNYKK

SEQ ID NO: 1903 - DNA, 978 bp, Klebsiella michiganensis
atgagcgaatcaaaagagttggttttggtaacactgccagcagcggcagaacttgaggcggcattcattagcgatgactacatcaatcgccttatttctgacatacgtcagaaagcgacgtcagtcgttggtgacgtaaatacggttaaaggtcgtggcgtttatatcagcatggcttcaaccgtccgccgcacaaaaacggtaattgatgatgccgggaaagcactggttgcagaaatgaaaaagcgcccagcactggtagatgcgagccgtaaaaaggttcgtgacgcgcttgacgaactggctgttgaaattcgtagcccagcaactcaatgggaagaagaaaaggcccgtctggatgctgaagaggctgcaaaaaaagcagctgaagagttggcagcaaaagtcgagctcgatcacgagatggcgctgttgatgaataaagatatcgaccgcaatcgtgccgaaaaagcagcagaggcagagcgccagcgcatagcacacgaagaagagattaagcgtcaggctgaagaaaaagcgaaacgtgaagcggcagaactggcgcaacgtgaaatagacgcgatagctgccagagagcgcgaggcgattctggcgaaggagcgcgccgaacgtgagcagaaggaagccacagaaaaggctgagcgtgaagcaagagccgcagcagaaaaagcagaagccgacaaacaggcagctatcgaggcagaacgtcgcaaggctcaggaagaagccgatcgaatccgccgtgaagccgaagaaaaagagtcggctcgcctggctgagcagaaacgcattgcagaagaagaagcgcggcgcgcagctgataaagaacatcgccgcacaatcaatcgtcaggcaattgctgatcttattgaaagcgggcttacgcaggaaatggcggagaaagcattgatcgccatagccagcgggaaagtatctgcggtccagatcaaatactga

SEQ ID NO: 1904 - protein, 325 aa, Klebsiella michiganensis
MSESKELVLVTLPAAAELEAAFISDDYINRLISDIRQKATSVVGDVNTVKGRGVYISMASTVRRTKTVIDDAGKALVAEMKKRPALVDASRKKVRDALDELAVEIRSPATQWEEEKARLDAEEAAKKAAEELAAKVELDHEMALLMNKDIDRNRAEKAAEAERQRIAHEEEIKRQAEEKAKREAAELAQREIDAIAAREREAILAKERAEREQKEATEKAEREARAAAEKAEADKQAAIEAERRKAQEEADRIRREAEEKESARLAEQKRIAEEEARRAADKEHRRTINRQAIADLIESGLTQEMAEKALIAIASGKVSAVQIKY

SEQ ID NO: 1905 - DNA, 210 bp, Klebsiella pneumoniae
atgaaaatcattactcgtgtcgatgcggcaagggccggattgaaacgctactacaccggcaagcaatgcaagcacggccatgacagtgagcgctgggtttataacgggcattgtgtcgaatgcactctcgagaccaaccgtcgtcgccatgctgagataaaacggctaatgcatgaggcctcaagaggtaatgctgtggaggtgatctga

SEQ ID NO: 1906 - protein, 69 aa, Klebsiella pneumoniae
MKIITRVDAARAGLKRYYTGKQCKHGHDSERWVYNGHCVECTLETNRRRHAEIKRLMHEASRGNAVEVI

SEQ ID NO: 1907 - DNA, 792 bp, Klebsiella oxytoca
atggcccgcattcgcaccattaaacccgagttctggaccgatgaagatatggcagaagtatcggaaccggcctgtctgctggctattggtctgctcaactacgcagatgatgaaggctatttcaatgcaaacccaaagcttataaaagcagcggtttttcctattcgtgaaccatccattcctattaccgtactaatacgggagctttccaactgtggttatttatccatattttccacacctgacggcaagcattttggtctgataaataacttcctcaaacaccaggttgtaaacaaggcaaaagaaagcaaaatcaaagcgttaaacctattaccgtacaactacggtactgagcaggtattagtacctttaggaatggatcagggatcagggatcagggaaagtaaaacccctctctctgcgcgtgaagaagaagaagatttaacacctccgcaagaaccgccggcaccggtagatgttccagggcttaaccaaccaattggtaaatttccaatgaatcagtcctggaggccttcggaagattttgtcatgcgtgccagattgtgggggcatgcgctaccagctgatggttacaaagaaactgacctcgccgaatttgttacttattgggctgctgaagggaaagtgatgcagcacgttcaatgggagcagaagttcgctcgtattttgatgcagaaactatccaaatcagcagtgcggaaaggtgatgtctccgatggaaacttaccgcactggaacagtccagaggcatgggaggaattcctgtga

SEQ ID NO: 1908 - protein, 263 aa, Klebsiella oxytoca
MARIRTIKPEFWTDEDMAEVSEPACLLAIGLLNYADDEGYFNANPKLIKAAVFPIREPSIPITVLIRELSNCGYLSIFSTPDGKHFGLINNFLKHQVVNKAKESKIKALNLLPYNYGTEQVLVPLGMDQGSGIRESKTPLSAREEEEDLTPPQEPPAPVDVPGLNQPIGKFPMNQSWRPSEDFVMRARLWGHALPADGYKETDLAEFVTYWAAEGKVMQHVQWEQKFARILMQKLSKSAVRKGDVSDGNLPHWNSPEAWEEFL

SEQ ID NO: 1909 - DNA, 1062 bp, Klebsiella oxytoca
atgcaacgtctgaacgtccgaaacatccccgatgagatctacaggcagtttgagcaggaagccgcccgccaggagcgcagcaccgaggcgcatgcccgttttgtgatcgcacagtccgtgcagcgcgaagccgcgctcaccggcgccgatcgctaccgccgggagctgagcgcccggctaaggcagctattgcctgtggtcaacgaggcggcctcacgccccggtcccaactatcagccaccgatggacgcggcctccctggcagagcgcctcggagaggccaatccgctggctgtaatgaactggttctctggtgatgatgtgccggattttgagcaggccgaccgtctggccacctacctgggctgttctgcacgctggctgaaatttggcgagggacgcccgttcgcgttcggttcgccgcggcgtctcaacggtcacggcagcgcgtatgacgatgcgcgcgccctgctgacgccggacgccgccggtaatccggtctataagatcagcatcatccgcgatgactccccggaggggcatatcctcatcctgcgtgagttccgcaacagcctgcgggcggagattttctggaccaacctgaacctcagcgagcacgtcggcaacggtggttttcacgatctgtgtgattttttcgtcatgctggagcagctgtacattttctataccaataacgacctgttcgtgaagagttacgatattgcccggggacgtctgcagtacgagtttgaggaaaacaactgtcacccactgctgatcacaaaacgctgcggtcgggaaaatatctggtgggaggatatctggcacgaggaaatgctgggtcagcgtaatccggaacgcaacggcgggtatttctggccggacgatcgggagattatcaatcgtgtcatggcgcacctgaaggagaggaaacgtctgatgaataaggaagacctcgagatgctgacgcgttattctttcgggatggacgaacaacgttcccgttacaagctcgccgatcacgccggtacgacagaacaggagtctgacaatgaaagatga

SEQ ID NO: 1910 - protein, 353 aa, Klebsiella oxytoca
MQRLNVRNIPDEIYRQFEQEAARQERSTEAHARFVIAQSVQREAALTGADRYRRELSARLRQLLPVVNEAASRPGPNYQPPMDAASLAERLGEANPLAVMNWFSGDDVPDFEQADRLATYLGCSARWLKFGEGRPFAFGSPRRLNGHGSAYDDARALLTPDAAGNPVYKISIIRDDSPEGHILILREFRNSLRAEIFWTNLNLSEHVGNGGFHDLCDFFVMLEQLYIFYTNNDLFVKSYDIARGRLQYEFEENNCHPLLITKRCGRENIWWEDIWHEEMLGQRNPERNGGYFWPDDREIINRVMAHLKERKRLMNKEDLEMLTRYSFGMDEQRSRYKLADHAGTTEQESDNER

SEQ ID NO: 1911 - DNA, 267 bp, Klebsiella oxytoca
atgagcaaattccctagccaagaaatggacaggtttaatgtaaggttgcctgttggcatgcgcgatgccatagccgatcgcgctaagcggaacggcaggtctatgaactctgagatcattgctgctttggattcctggctttctggggagccaatggaggaagttaaccaaagaaatatagataccatggtaaggatagccactaaggcttttacagaagagatctctaaaaattacgacctagtgccgaaatcaaaggataaataa

SEQ ID NO: 1912 - protein, 88 aa, Klebsiella oxytoca
MSKFPSQEMDRFNVRLPVGMRDAIADRAKRNGRSMNSEIIAALDSWLSGEPMEEVNQRNIDTMVRIATKAFTEEISKNYDLVPKSKDK

SEQ ID NO: 1913 - DNA, 414 bp, Klebsiella oxytoca
atgagtgccactactctaaagaacctaatccccttcatctttgctgcaatcatcataggattcatcgctaagctcggcgcagataatcgtcaattgagaatcagtaacgcatcgcttcagaatgaagcaaagcaactgaacatcaaaaacaacgatctcgccaatacgctacagaatctcactgatgcagtgacgagcatgaataaactggttggtactgaggcccgtcgccgatcagccgcggagatgaaatcacaacgcctgcaggaagaagtgaaagatgcgctcaaaaacaataagtgctctatcgagcttattcctgattctgtcgttgagcagttgcgccgacaagcggactcagtacgaaatggtaaagacgccgatagccccaataccagaaagcctgctgattga

SEQ ID NO: 1914 - protein, 137 aa, Klebsiella oxytoca
MSATTLKNLIPFIFAAIIIGFIAKLGADNRQLRISNASLQNEAKQLNIKNNDLANTLQNLTDAVTSMNKLVGTEARRRSAAEMKSQRLQEEVKDALKNNKCSIELIPDSVVEQLRRQADSVRNGKDADSPNTRKPAD

SEQ ID NO: 1915 - DNA, 627 bp, Klebsiella oxytoca
atgactaaagaccaattcatgaaggctgccggattatctcaggcgcttgctgataagtggtatcagcacatcatcgacacgatgaaagaattcggcattgataccccaaaaaggcaggcgcactttatcgcccaggtaggcactgaatcaaatgggttccgagctgtccaggaatcactgaactactcggtcactggacttcaaatttttggttcgcgactcacagcagttcagcgcgaaaagcttgggcgtaagcctggtgagcttgctttatcccctgccagacaggctgacattgcgaacatagtttatggtggcagatacggaaacaatcagagcggtgacggctggaaataccgtgggcgtgggctgaagcaggttaccttcaaagacaactattcagcctgcggcaaagtgctgggactgaacctcattgatgatcccgacctgctgctactggataagaacgctgcccgctctgccggttggttctggaaagcaaacaactgcaatcagtttgctgatgccggcgacgtaaatgggctgaccaagcgtatcaatggtggatttaatggcctccaggacagagctgaacgcacaaggaaagcgggggcggtgttgatatga

SEQ ID NO: 1916 - protein, 208 aa, Klebsiella oxytoca
MTKDQFMKAAGLSQALADKWYQHIIDTMKEFGIDTPKRQAHFIAQVGTESNGFRAVQESLNYSVTGLQIFGSRLTAVQREKLGRKPGELALSPARQADIANIVYGGRYGNNQSGDGWKYRGRGLKQVTFKDNYSACGKVLGLNLIDDPDLLLLDKNAARSAGWFWKANNCNQFADAGDVNGLTKRINGGFNGLQDRAERTRKAGAVLI

SEQ ID NO: 1917 - DNA, 627 bp, Klebsiella oxytoca
atgacatccatccgattaacgaatgcaattcgcgagcaaatcgctaaaaacgcactgataaagtccggaattgttgcagcacttgaagccttgcaggttaagcgccatgaagtggcaagggatgcacgtgtctttgcttttggtggcgcagagaaaaccgcaaaggctgataaggcgtatgaaaagctggaaaaagctttgtctgaactccgcgaatccggctgttctgcttacgcatcaagcggcctatcgtcctcaatatatatatctatctccgggcgtcaacttggttggtgtccttacggaaatgacgctaagggcggggatattctccaggttactccgaaccgagacttatgccgctttggtgcggagcatgaaataacgaagcgctttgatgaaattatcaatgaagagcaaaagttgaatgatagatcaaaggaaattaaagcaactgtatgggcggcgctaaactccgttaccaccctgaaacgcctcgtcgaagtctggccggaaagcaaagaacttatccctgaaaatagcgatagcgttaaatcaacgcttcccgctttaaaggttgaagaccttaaccggatgataggacttccaacagaagaagccacctaa

SEQ ID NO: 1918 - protein, 208 aa, Klebsiella oxytoca
MTSIRLTNAIREQIAKNALIKSGIVAALEALQVKRHEVARDARVFAFGGAEKTAKADKAYEKLEKALSELRESGCSAYASSGLSSSIYISISGRQLGWCPYGNDAKGGDILQVTPNRDLCRFGAEHEITKRFDEIINEEQKLNDRSKEIKATVWAALNSVTTLKRLVEVWPESKELIPENSDSVKSTLPALKVEDLNRMIGLPTEEAT

SEQ ID NO: 1919 - DNA, 291 bp, Klebsiella pneumoniae
atgagaatgaacagattcgccgctggtactgcgctgatttgcctgatgctgtgcgccagttgcaccagcgcgccgcctgtgccgacgccggtgattgtttacaacgcttgcccgagggtcagcctttgcccgatgccgggaagtgacccgaccaccaatggcgatctgagcgcggatatacgccagctcgtaagcgccctcgagggctgcgcgcttcaggtcagaacggtaaaaaactgccaggacaaaatcgatgtacaagtcaaagagtctgcgaaaagccttaactga

SEQ ID NO: 1920 - protein, 96 aa, Klebsiella pneumoniae
MRMNRFAAGTALICLMLCASCTSAPPVPTPVIVYNACPRVSLCPMPGSDPTTNGDLSADIRQLVSALEGCALQVRTVKNCQDKIDVQVKESAKSLN

SEQ ID NO: 1921 - DNA, 546 bp, Klebsiella oxytoca
gtgcgaaaattaagcaaggggaatgaaggcgcgatagacaaaaaaattgaattaatgataaaggttattattcgtactgactcttatctaaactcagcaaacactaagtctactatattacttagtttgtcatcagcactattagttgctctgtctgtaaacttcaagaacatcacgggtatggtgatagttgattcagataaagctgttcttgctgttctgataagtttgatgatttttttactaataacgtcaattgttttctcgcttagaggtattactccatatattaaaccaagtacggtaagtaacaccttttcatttgttgatatttcaattaatttccatgagttacatttatataaagaacgttttaattcagtatctaaactggagtatttaaatgaattaatttcattaaaccataatttatccaaagcgctcgttgcaaagtataataagcagattactgcaataacctgtattgaagcaactgcgtacgtcctgtgtttttcagtgtatatgattattatagctaattgctaa

SEQ ID NO: 1922 - protein, 181 aa, Klebsiella oxytoca
MRKLSKGNEGAIDKKIELMIKVIIRTDSYLNSANTKSTILLSLSSALLVALSVNFKNITGMVIVDSDKAVLAVLISLMIFLLITSIVFSLRGITPYIKPSTVSNTFSFVDISINFHELHLYKERFNSVSKLEYLNELISLNHNLSKALVAKYNKQITAITCIEATAYVLCFSVYMIIIANC

SEQ ID NO: 1923 - DNA, 1359 bp, Klebsiella oxytoca
atgtcggctaaaaatatatattctaatttggaaaaaagcttagagaaaactatttctgagtccaggagtatacggttgcgtgattctggctatatttctgaggcagcatcgagttcccttgcagggatggaaaatctagatagtagatatgattttgtgaaaagctctgttgccttagaaagcgtgcgtgctgattctaatgaacaacattacgggataactgaattagtgaggcataattttggaaagcatggccgattaatgccaagttttggatgtcatcctgatttcgataatatggatgaaggagagttgagaaatggctactcagttactatgtttatggatatcattggctccactaaacttggtgtaatcttcagtcctgaaactgtttttaaaataaaaaatgatattattagatgtgcaatagaaacagtaaactctttcgatggacatgtgcatcgtattatgggtgatgctgtgatggccttctttagaagtgataagtgcgagagagaaggtcgcattgcagacagtgccattgatgcattgaattgcgcgacatatttaatcgatatgtttaaaagtacggtaatccctaaactaaatgagctgggggtagatgaaaatcttggcatacgtataggaatcgactatggagcacatgaccaagttatctggggtaaatatggttatatggaaagtcaggaggtaactgctacatctttttttgtcgacgtagcagctaaactacaacaaaaggcaccgaaaaactcgattatgataggtgatagtttagcagaacttttaggctttgataccaatcaactggcagtgagaacaaaaataaaaaataatgaagaggtttctcttcattatatcaccccgaattataaggatgcgtcggggaaatcaattaattacaggcagcatcttttaaagaatgagtcatactacaagcttttgccaacagggatgcttgatagtgatttctatatacgagccagtctgaaaagagacaaaaacgatccatctgatgataattatatttcttgctctcgggtggttagaaaaggaatgggtatttcatttaaggggtattatcattctacgatcacttacgacaaccccaaatttaaatttagagtaaaaaatactggagcggaagcggcagatgctgagaataatggagatcattatttttttgagcctgcaaagtattcagatggtagatatttcgctccgcattgggaagatacaaaatataaaggccttcatcatatgtatgtgtctttctgggatggtgaacaactaattgaaccggaaaaatgcttctcagtattcataaatgactga

SEQ ID NO: 1924 - protein, 452 aa, Klebsiella oxytoca
MSAKNIYSNLEKSLEKTISESRSIRLRDSGYISEAASSSLAGMENLDSRYDFVKSSVALESVRADSNEQHYGITELVRHNFGKHGRLMPSFGCHPDFDNMDEGELRNGYSVTMFMDIIGSTKLGVIFSPETVFKIKNDIIRCAIETVNSFDGHVHRIMGDAVMAFFRSDKCEREGRIADSAIDALNCATYLIDMFKSTVIPKLNELGVDENLGIRIGIDYGAHDQVIWGKYGYMESQEVTATSFFVDVAAKLQQKAPKNSIMIGDSLAELLGFDTNQLAVRTKIKNNEEVSLHYITPNYKDASGKSINYRQHLLKNESYYKLLPTGMLDSDFYIRASLKRDKNDPSDDNYISCSRVVRKGMGISFKGYYHSTITYDNPKFKFRVKNTGAEAADAENNGDHYFFEPAKYSDGRYFAPHWEDTKYKGLHHMYVSFWDGEQLIEPEKCFSVFIND

SEQ ID NO: 1925 - DNA, 2952 bp, Citrobacter rodentium
atggaaggttactggaaccgcccaatccgattttacgaatcagaacgacgtaattttctcggaacattgttcagtgaggggggattaccgttccgcttactgaaagaatcggatagccattttcagaatgtattctcccggattctcaatcaatatgggcaggcacaactggcaggattttccatactttctctagtaagaactgtcatagaaaaatcagccctgccaactgtttttagcgaagacacctctgtagaactcatcagccatatagcggaaaaactcagctcgctggttctaatgtacaacctgagcaatcataccgaacccgtgaagcagcttgataaagtgcatccaaaatggcgtgatgagttccctatgcctttggatgatgaaacaggtactcgctttcttaatgggttgctatgtactgcctccgtagaggctaaatcccacttacaaaaaaataagggttccggttgtcaattctattggtcggaaaaccatcccaatcaaatccaggcgataatttcgctgcctgatgaactcaccttcccaatcatcagcactccctcaacgacgcgatttgaacttgccatttatgaagatggtgaagaagtcacctgtctcggccccgcctatgcatccctggagaacgcccatgccaaagttcgcctgcgtaaaagtgagtcgagatttgtcagacgccagccagctgcgagcttaacgattgttgcacgaactggaggaatgattgttggcaccataaaacttgaagatagtgaaatcgccgttggcgaggtaccacttacttttgttgatgatgaggaacgctggttattgcaagggcaagcttcttgtactgtacgtaatagcaatgttcttattgccttacctcaagaaaaaaccactatttcagggtgtgaaggctctccaggtacagcgtcgttattaggactcagaacactgtccgtaaaaggacgccaggatataaccatttccggagatgaaacatacaggatccgcaccgggagggaacaatctaatcagagcggatttgatttttatggaaaacatgttacctggaattgccatcctgatgaaacattccttggtgtacctaaagttacggcgaaaaacctgaatgctgaagatatacaattcaaacgttacctgagtggcatatcgttagatgaatgtcaggtacaagagatgatgggtacgcaatatgtttctgtcagaaatactcacaatgaaactctactgcgtcgaaaaattgggatcttgccggcagattttaacattgaaataaagggtggtgagctagccaatgaaggttccattgttatctcaacgcaacatccctgcatgtctgtcttaaaagataaaacactagaggttgctcgcaaacgctcagcaggacaaacagaaatattacttaaagcagaaggaatacctcctgcgtttgtctctttgcagatttacccaaatttgggtgcagccccagtagagatgactctacctttccctgcaaaaggttgcctggcccttgatgcaaatggatgcactctggataaaaatattactctgcatgatttgctgggttcgagagcctttttatttggtaaaaatggcgatccgacacgtttttcactggaattacatttacgttccaaaagtgggttacaggcatggcatgaatggtgttataccgcgggggaacaccccgtcgaactcaatttatacagcctgagagagcatattgaaaacttactgtctcttgagacaggaattgaccaggttgttgagatgcaaatcaaaggcgcaggtgctgtaatgagctggcagattcgccgctataaatacagtttacgctatgattatgaaagagaacttctcgtcagccagtcaacccattatcgtaccgagcaaatgtcttcacctgtcatcatgttattgagtgagccggagagaaaaatcaccccattatcatcaagaatgagcgaaggtgtaccgacaggtgaatatgaactgagttcggttattaacaaaaatgggccgtggttagtcgtccccaaacagggtgaggaaatggcgtttcgcccctgcttcattcgtggggaaccgtcgttacctgtggatgaaagtagtattcgttcattgcagaaagcgacccagctttttaatccccagtctgaagttaataccattacactggtacttgaacagatggctaacgatcccgctcattccggctggcaatttatgcgttgcctgtacgaccaatttggttatctgccgctggcaacctttgaagtttggcgtgcgctagtacagcatccacgagcactggcgatgtcgctatttaaatttgagatgtcagctgagtatctgagccgcattgaaaatgagttccctattttatgggagttcttccccatcttcgaaatcaaaaccgcagccgatcgatttaaattgttcctgagccaaaagggtgcaccggaagaaacccagaatttactggtgaagagcttgtatcagcgattggggctcgttttcccgacatatgccgacgaaattgagaaatggttaagttatggacaattccctccgcccattccagagttcttcattcgcgagtggtatcaggagcttttacgtgagcatagtgaagctcgctggccagagtacggcagcaagcggctgcatagctggatgacatcacaaaaaaatccagtgatcagcattaatcctgacgcagaataccgctattccgttgcctggttacccgtcttcgccgcagctgtagcaagcggcaatacctcttttgaagccgtatttgaccgtaaaccgggtgccgtatttttcctgagacaggtcagggacttcgattcccgctggtttaaggccatcttccagtgcagcctgttgcgttattttgctcaaaaataa

SEQ ID NO: 1926 - protein, 983 aa, Citrobacter rodentium
MEGYWNRPIRFYESERRNFLGTLFSEGGLPFRLLKESDSHFQNVFSRILNQYGQAQLAGFSILSLVRTVIEKSALPTVFSEDTSVELISHIAEKLSSLVLMYNLSNHTEPVKQLDKVHPKWRDEFPMPLDDETGTRFLNGLLCTASVEAKSHLQKNKGSGCQFYWSENHPNQIQAIISLPDELTFPIISTPSTTRFELAIYEDGEEVTCLGPAYASLENAHAKVRLRKSESRFVRRQPAASLTIVARTGGMIVGTIKLEDSEIAVGEVPLTFVDDEERWLLQGQASCTVRNSNVLIALPQEKTTISGCEGSPGTASLLGLRTLSVKGRQDITISGDETYRIRTGREQSNQSGFDFYGKHVTWNCHPDETFLGVPKVTAKNLNAEDIQFKRYLSGISLDECQVQEMMGTQYVSVRNTHNETLLRRKIGILPADFNIEIKGGELANEGSIVISTQHPCMSVLKDKTLEVARKRSAGQTEILLKAEGIPPAFVSLQIYPNLGAAPVEMTLPFPAKGCLALDANGCTLDKNITLHDLLGSRAFLFGKNGDPTRFSLELHLRSKSGLQAWHEWCYTAGEHPVELNLYSLREHIENLLSLETGIDQVVEMQIKGAGAVMSWQIRRYKYSLRYDYERELLVSQSTHYRTEQMSSPVIMLLSEPERKITPLSSRMSEGVPTGEYELSSVINKNGPWLVVPKQGEEMAFRPCFIRGEPSLPVDESSIRSLQKATQLFNPQSEVNTITLVLEQMANDPAHSGWQFMRCLYDQFGYLPLATFEVWRALVQHPRALAMSLFKFEMSAEYLSRIENEFPILWEFFPIFEIKTAADRFKLFLSQKGAPEETQNLLVKSLYQRLGLVFPTYADEIEKWLSYGQFPPPIPEFFIREWYQELLREHSEARWPEYGSKRLHSWMTSQKNPVISINPDAEYRYSVAWLPVFAAAVASGNTSFEAVFDRKPGAVFFLRQVRDFDSRWFKAIFQCSLLRYFAQK

SEQ ID NO: 1927 - DNA, 207 bp, Klebsiella oxytoca
gtgactatcaaagcattaagcgtaaaaactaacagcagaggtattacatattgcctgcgatcctgtggggatgaattcgaagtttggaaattatgcgaaaactattgtcgccttacaaaaggcgggattcgtaagacctggcgttatgtcgaaaagggaatgacgctggagagtgcgcaaaaactgtttgagcgccgcacgaaatag

SEQ ID NO: 1928 - protein, 68 aa, Klebsiella oxytoca
MTIKALSVKTNSRGITYCLRSCGDEFEVWKLCENYCRLTKGGIRKTWRYVEKGMTLESAQKLFERRTK

SEQ ID NO: 1929 - DNA, 435 bp, Klebsiella oxytoca
atgattttttccccggctttacagcaaattaaggacgtcggaacaggctcgtttgttgcggctgaggttttggctcgttggtgctgcgaaggccagatgcttactccatcggagttgtcatcacctcctaattggggcttggtagatattgagattgccaggttcattcaagataacctttgccattgcagtgaggaatatcaggctctttttgttaatgtgtcagagcagactttgaaatctgacatcatctttcatacgtgggctcagataattagggcaatcacgaagaattatccattaaggcttgtcatcgagatcactgagggggttcaagacaaatctctagcatttagatggagctctcttactgcgatgggggttaatctagctcttgtgacctgctccccgttgattagtacaccccgatgttag

SEQ ID NO: 1930 - protein, 144 aa, Klebsiella oxytoca
MIFSPALQQIKDVGTGSFVAAEVLARWCCEGQMLTPSELSSPPNWGLVDIEIARFIQDNLCHCSEEYQALFVNVSEQTLKSDIIFHTWAQIIRAITKNYPLRLVIEITEGVQDKSLAFRWSSLTAMGVNLALVTCSPLISTPRC

SEQ ID NO: 1931 - DNA, 5487 bp, Klebsiella oxytoca
atgatcaatttcaagcctaaacttccggcgttgcttggcgctctggcggttcttaccgctggtgctgctcatgcagagctgctggagtacaccttcaaggctccagatggtgctcaacggtctctgcctccgaatgccaactatgccaacccgacgggcaacgtttcgtttgctctgagtgcaggtattgatcgcaaggtcaaagtatcggtgcgtcggtctgatggcacggtggtttcaacggcgaccagccaccttcttggtgctacggatcgcatcacagtgggtggaaagtcttactatggtgcggaactacaactagcggctcctgctgctggcgcatatacaatcagagcagaaattcttgcatctgacggttctaccgttcagagcgatgattaccctctgaccgtggatgtgacccctcccaagtacacctcacttgcgccagtctatggtacatacggacaggttattagcggtgatgtatggaaactcggcactgggggctcagaggagaatgcctttttaatttcaggcatctctgatgattctccagttaaagaggttaaagctaagctgtaccgccaagatggttcactctacaaagatgtatcagtgaactacgatgatgccaacaaacaagccagacagtattttgaaagtggctttttcccagcgtctgatttggatgaagtgttcactcttcaattccagctcagtgatagcgcagggaatagttacctttcaccaccgcaaaaggtgatgtttgacaacctaacaaatgcaccgtcttcgccgtttggtgtctatgacccggccagctcaagcacattggggccagggttatctgggtttgttgcctataaggctggaatgacggttaaaaccaacccgatcaagttggcatggcgcgttccgcgtaataattggcatgaataccgcgagggcggcatcaacatggtcaactctttgggagaaatgaccaaggttggtgaagatggcaactacgtttacctcgtcacaacggcaccttatggaaatacagatggaaactattggcggtgggtgaatttcggtcagtggggtggcggggtcataacttatgacctttcgctgtctccatctgcaccccagagtcccaagttgcttggtgtggattacaactacagcgacatagggtggtcgaacatgtaccgctattgggtagacagctccgttctgcccgtcacagtgagcagcatccgggttaaagtagaaccaaggccttacgttcaaactgcggtgcatcgaggaagttgtgaagtgcctgtcggtcaagatagttgtgtgattgctaacagcttcacaatgtcaaagggaacgacagggtatatccacgacaatgcaacagtcttcaatgcagatcagtctcttcgctcaaaccctctttgggcagaagtaaactggaacgatcagcattatcctcagttaagccagcagtacgaccaaaacaataaggtatttaccttattcgttaaccaacctggacgaggcgcgtactttgataggctgcgtctgcgcagtgcctggatcgaagatagcaaaggcaacaagctgtctccgaccggggggctaattgccaataactgggagaactacacctatcagtgggatctcaaaaccctccccgaggggcagtacagtcttgttgccgcagcagaggaaatgcacggacctttaactcggcaacccatgttccagattacgtccgataaaactgccccaacactgacgatcagtgttgcagatggggctgcgattcagacactggacgatgtggtcattactttggctgatgctattgacccgtcacctaagctgacctctattgcccttgttggaggcccggcgaatgacaaagttcagttgtcctggcgtgaagaatcgaaagggcgattccgtcttgagtatccggtaatgttcccgtcgttgaaggaaggggagtcatacaggctgactgtttccggggcggatgcgcagggcaatgcggttaaaaaggtggttggtttcgagtacaaacctcgccaggtaatgctggcagatggtatggatggcaaggtaatggtccccgctgtcactcatgaatttgttcatgcagatggcaagcggatcatcgagaccaagccgctgacgctcagtgatggtgctatcgtgacaggttcatacgacgtgtttgcgaccctccgttctgatgcgaaagtgccgctggtggtgaatggggtgcgaatcgagccgggccagacaatggggatcatgagccaacatgacttcggtgcatcagggggacgtttgagtatccctgtcaaaccggctatccctgatgtggtcggttcatccagccttcttgtcatgacttctgcgcctaactcaccaatcctcgttgtggacattaatacctggaaaggggcggctaaactctctgctgagtcgtggacaattcgccaggttatcgacccggtgaaaatctatgccttgccggaaacaggggttccttgccggttcaccacgaaggcagatgttgctatggccgcagatccgattcgtgacccagtatgtttgctacagtgggacagaactccggatgaagctgaacaaaccacccaagacaccaacggtatgaaggtggcagggctggtggggcaagcagtaagcattggggagcaacctgtcgaatacagcttatacctgttcagtggtgacggttccaaggtgaaagttggctcaggctcacagaacctgactgtaactacagcctatggctccgttggctacaccccgattgatgacattgcacaagtgaatcgtgtcattgaaaactttaatgtgaacctcaagcagaacaaggggccagactgctctataaccctcagtgcagaccgggcgaagaaagaggccgcaagcaagggggccgggagtgccagtagaacctgtctgtttgagtggcagcagatccctgatgggttgctccaggaacagctatcggaatccccttcgctttctggttcattggcctccaacggcaatcatccactgggatggcgggtaagcattttcacccgtaatggtacacgggtgacgttgaacgaccagacgttcaacatcgaagctgttgatccaccagctccgactgttgaactgtcatctaaattcaacttcaaagacaacatctacatggtgccgatgacaggtaactacctgggggatgccataatcagctctgaacgcgctgatctggatattgccatctcgcgcaactctggtgtcctggagtctgaaactttcgctccaggatggggagccaccaataaggtgtatcgtcgcataaatactgatgagcgagctttgtgggaggagactacttacaaggtgaatgcggcgtacaacaaggtccctgatgtgaaaacggaggcgatctatcgggctatcgcagcaccttctgacagcatccgtcctgtcgttgaagttgatggtgataacgcgattgacactcaggcattgcctgttcgcgtcctcattcgtgatcagtacaaacctgatggtggttatgacgccaacacaatgggtgtgtggaaagtacgtctgattcagcaaaaggcctacaacgagacggttgctctcactgattatgcggaagcatcaaacggagaagctcagttctcggtcgatctgtctggcgtggatacttcctctgtccgcatagcggctgaggctgttttggacagccccgttgaaggttacaacagaacagagctgtccatcaggcctgctttcttaactgtgcttcgtggtggagccatcgctgctggagtagaggctcgcaagttgtctggtgaagccccgttcaccgctgtgttcaagctggctctggataaccgtcaagatctccgtgctaccggccaggtggtgtgggaaaccacgaaggatgacggtaaaacttgggagcagttcatcccggaagagcgttacaagtatcagcttgtgaagaccttcgacaagggggagtaccaggttcgagccaaagtggtgaacgtaaactcaggcgcggaaaaatacaccgaagcggtcagtgttgtcgcttacgacaaaccggatattgctgttgtcggcccgaccacgttgtttgtgggaagtgaaggcaagtacacggcgagtctggcgctgaacgatgagccgatcacggatggcaatgccgttgttgagtggtccactgacggtggaaaaacctactcacataaagggaacagcatcacgctttcaagtgatgaagaaacccgataccgcctgtgggctcgtgtgcgttctgctaatgcaccggctgatgacgactatgcctatgacgttgctaaaacggcggttgacttccgagctgtgaaggcaccccgcccttatgtggtagggcctcaagtcattgagacgggcaagaagtatgtgttcagtgccaaaaccagcctgccttaccgtggtatggacgtgaagctgaacgggttcttcacgctgcctgatggctcgattgtggagggtgataccgctgagtacgtgccttcggacaatgacctcaaccaggcaactgtagaaacgaagtacaccacctggatcgaaggataccgcgataagggtgcagaagcctcgcatagtctacgctcccgcgtttggcagtatgtgtggccgggcttcgcaatgcaggtccggaagagcgcggacgcggctcctgcgacgatcactgcgtcagtacggccaattgccttcaacggtaagctggaagagcctacctacgaatgggagttgccggaaggggccgtgattcaggataagaagcaagatattgtcaggtcctttgtggtcaatgagccgggcgattacaacatcaaggtgactgttcgtgatgctcgcgggcatgaggctgtgatcgagaaatcgttcaagatcgaccagtccaagccctacgccattgacctgcaatactctggctcgaataaatacgagcgtgagcctttggatgtactgttgagaccgtacatttctggcggccacccacgcgaccgtattttgactcatgtttactcggtcgatggcacaccgttggaaaacagcggttactacggcaaagcaactcttcgcgctggtgagcacagcatcaagctgaaaataacctcagagatggggcatgaagctgagggtgaggtgagcatcaatgtggcagagaacaagttgcccgtgtgtagcctgaaatcacgagagaccgttggatcgtggatcgtctatgcgaactgcgaagataccgatggacgcatgaagtcctacgaatggaccattgccggtgagttgaagagcatcagctctgatcgagtaactatcagcaagggccccaataaaacgatgccgaccatatctctggttggagtcgatgactcaggtggcagatccgaagctgttacgatgaactaa

SEQ ID NO: 1932 - protein, 1828 aa, Klebsiella oxytoca
MINFKPKLPALLGALAVLTAGAAHAELLEYTFKAPDGAQRSLPPNANYANPTGNVSFALSAGIDRKVKVSVRRSDGTVVSTATSHLLGATDRITVGGKSYYGAELQLAAPAAGAYTIRAEILASDGSTVQSDDYPLTVDVTPPKYTSLAPVYGTYGQVISGDVWKLGTGGSEENAFLISGISDDSPVKEVKAKLYRQDGSLYKDVSVNYDDANKQARQYFESGFFPASDLDEVFTLQFQLSDSAGNSYLSPPQKVMFDNLTNAPSSPFGVYDPASSSTLGPGLSGFVAYKAGMTVKTNPIKLAWRVPRNNWHEYREGGINMVNSLGEMTKVGEDGNYVYLVTTAPYGNTDGNYWRWVNFGQWGGGVITYDLSLSPSAPQSPKLLGVDYNYSDIGWSNMYRYWVDSSVLPVTVSSIRVKVEPRPYVQTAVHRGSCEVPVGQDSCVIANSFTMSKGTTGYIHDNATVFNADQSLRSNPLWAEVNWNDQHYPQLSQQYDQNNKVFTLFVNQPGRGAYFDRLRLRSAWIEDSKGNKLSPTGGLIANNWENYTYQWDLKTLPEGQYSLVAAAEEMHGPLTRQPMFQITSDKTAPTLTISVADGAAIQTLDDVVITLADAIDPSPKLTSIALVGGPANDKVQLSWREESKGRFRLEYPVMFPSLKEGESYRLTVSGADAQGNAVKKVVGFEYKPRQVMLADGMDGKVMVPAVTHEFVHADGKRIIETKPLTLSDGAIVTGSYDVFATLRSDAKVPLVVNGVRIEPGQTMGIMSQHDFGASGGRLSIPVKPAIPDVVGSSSLLVMTSAPNSPILVVDINTWKGAAKLSAESWTIRQVIDPVKIYALPETGVPCRFTTKADVAMAADPIRDPVCLLQWDRTPDEAEQTTQDTNGMKVAGLVGQAVSIGEQPVEYSLYLFSGDGSKVKVGSGSQNLTVTTAYGSVGYTPIDDIAQVNRVIENFNVNLKQNKGPDCSITLSADRAKKEAASKGAGSASRTCLFEWQQIPDGLLQEQLSESPSLSGSLASNGNHPLGWRVSIFTRNGTRVTLNDQTFNIEAVDPPAPTVELSSKFNFKDNIYMVPMTGNYLGDAIISSERADLDIAISRNSGVLESETFAPGWGATNKVYRRINTDERALWEETTYKVNAAYNKVPDVKTEAIYRAIAAPSDSIRPVVEVDGDNAIDTQALPVRVLIRDQYKPDGGYDANTMGVWKVRLIQQKAYNETVALTDYAEASNGEAQFSVDLSGVDTSSVRIAAEAVLDSPVEGYNRTELSIRPAFLTVLRGGAIAAGVEARKLSGEAPFTAVFKLALDNRQDLRATGQVVWETTKDDGKTWEQFIPEERYKYQLVKTFDKGEYQVRAKVVNVNSGAEKYTEAVSVVAYDKPDIAVVGPTTLFVGSEGKYTASLALNDEPITDGNAVVEWSTDGGKTYSHKGNSITLSSDEETRYRLWARVRSANAPADDDYAYDVAKTAVDFRAVKAPRPYVVGPQVIETGKKYVFSAKTSLPYRGMDVKLNGFFTLPDGSIVEGDTAEYVPSDNDLNQATVETKYTTWIEGYRDKGAEASHSLRSRVWQYVWPGFAMQVRKSADAAPATITASVRPIAFNGKLEEPTYEWELPEGAVIQDKKQDIVRSFVVNEPGDYNIKVTVRDARGHEAVIEKSFKIDQSKPYAIDLQYSGSNKYEREPLDVLLRPYISGGHPRDRILTHVYSVDGTPLENSGYYGKATLRAGEHSIKLKITSEMGHEAEGEVSINVAENKLPVCSLKSRETVGSWIVYANCEDTDGRMKSYEWTIAGELKSISSDRVTISKGPNKTMPTISLVGVDDSGGRSEAVTMN

SEQ ID NO: 1933 - DNA, 342 bp, Klebsiella oxytoca
atgaagaaaatcattacggtcacagcagtctgtctgctgtcattttcgtcgctggctgcgtcttcaccggtcagtgtcagcgtcagcccgggaagctacagtcactattcatcgattcggattacatcaaaagtcgattcgattgtgattaaacaactcattgtcaaccggggaaactgccaggatgcagaattcgccagcccgtggaaacctgtacgtctgggatttggcggtgctgtatcccatgaatttaccggcaagggactgatggttccctgtaatgtactggaagtggtggtccagacaagcgaaggcgcatggcagtttgattttgacagctga

SEQ ID NO: 1934 - protein, 113 aa, Klebsiella oxytoca
MKKIITVTAVCLLSFSSLAASSPVSVSVSPGSYSHYSSIRITSKVDSIVIKQLIVNRGNCQDAEFASPWKPVRLGFGGAVSHEFTGKGLMVPCNVLEVVVQTSEGAWQFDFDS

SEQ ID NO: 1935 - DNA, 465 bp, Klebsiella oxytoca
atgaaaaataaactgattatttcatttttactggcttcagtgctgacgccttctgtctcgcatgcgtttggcaatcgtgatagctgggtaagtggctatgcgcagggaacgtctgaatacaccatcctcggtaaagggcaatcacaactatacctcgcctgcgacagttccggctcacagccagcgaccattatcttcactgacgtgaacggccatcaggtcaggatggacagtggccagacacttaccatgagaattgataacgctgaagaagtgaatatcagcgagagcgagtctcatgtggggtctgacaatgtgatgtgggcatggaacaaattacgcaccggcaaacgtgttgtggtttcaggtagcggggtaaaacctgccactttcactttagcgggggctgccgcaattcttcctgcgttcggtgacaacggctgcgtgcccggctttgcactgtaa

SEQ ID NO: 1936 - protein, 154 aa, Klebsiella oxytoca
MKNKLIISFLLASVLTPSVSHAFGNRDSWVSGYAQGTSEYTILGKGQSQLYLACDSSGSQPATIIFTDVNGHQVRMDSGQTLTMRIDNAEEVNISESESHVGSDNVMWAWNKLRTGKRVVVSGSGVKPATFTLAGAAAILPAFGDNGCVPGFAL

SEQ ID NO: 1937 - DNA, 636 bp, Klebsiella oxytoca
atgtataagagccttgaagagctgatggcgggtatttacgagatggccgcaccacatggcatcatctgtaacgaggtttccaagttccttgcggccaaccaggtcaagccagaagacataagctccgggatctggttttttctatggcttaaatcagcccccaaggatgcaaagccaatccaaaaagaaatccccggattcggtgtcgttctaaacatgccgacttatggcggaaccctcaacgaagcaatcactaagttgatcgagaatgagtgccgtcaaatacagcttgccgaaggacatcctagccttgaggcttggcttgaattggtattggccggtcgagatgacgaagaggaaaatgaggctgcggccagtatcgtggacttgcttaatgggtgtcacgacttgctggatacagcaataattaactacctctccaaggtgggtaaaataaatgaacaagaaatcttgtcgcttatttattatggggagctgtgtgatcactctctttttggggtcgtttgcgggagggggcggaatcctacgctaaggctttggccagcgatattctccggtgagattgatgtgttcccatccgagcggcgaaacatgggccaagagatcgggcgatag

SEQ ID NO: 1938 - protein, 211 aa, Klebsiella oxytoca
MYKSLEELMAGIYEMAAPHGIICNEVSKFLAANQVKPEDISSGIWFFLWLKSAPKDAKPIQKEIPGFGVVLNMPTYGGTLNEAITKLIENECRQIQLAEGHPSLEAWLELVLAGRDDEEENEAAASIVDLLNGCHDLLDTAIINYLSKVGKINEQEILSLIYYGELCDHSLFGVVCGRGRNPTLRLWPAIFSGEIDVFPSERRNMGQEIGR

SEQ ID NO: 1939 - DNA, 327 bp, Klebsiella oxytoca
atgctggctaacacaattgattatggagaatggaaattcggaattcgaaacgatggcttagtctacagtggcggcagtttcagtgccatccttggtagcggcattgcttctagaggcattggttggatccttggtatggccggatacatacctggcaatgtaactactcaaccgattattgttctctttacattacaaatcctatttatctacgtcccaatcattttgagtgcattatctctttttttattacgactctacaccctggagaaaatatacccatcgataataaaagatctttctttgcgcactgaaaatatttattga

SEQ ID NO: 1940 - protein, 108 aa, Klebsiella oxytoca
MLANTIDYGEWKFGIRNDGLVYSGGSFSAILGSGIASRGIGWILGMAGYIPGNVTTQPIIVLFTLQILFIYVPIILSALSLFLLRLYTLEKIYPSIIKDLSLRTENIY

SEQ ID NO: 1941 - DNA, 204 bp, Klebsiella oxytoca
atgagaaagcaaaccaagatgatatcgaacagtcggataatcggtggaaacaccttaaccttgacgatctgcaagcgcttttctcacgaatgggaggtgatattaagtcgctacagggggcctctctacgtgagttcaccgggaacggcggtcggcgtacgtcaagtgcggttgcggctcagggggcacgggatacagcactaa

SEQ ID NO: 1942 - protein, 67 aa, Klebsiella oxytoca
MRKQTKMISNSRIIGGNTLTLTICKRFSHEWEVILSRYRGPLYVSSPGTAVGVRQVRLRLRGHGIQH

SEQ ID NO: 1943 - DNA, 549 bp, Klebsiella oxytoca
atggatatcaactactacgatgaacatcaggaagaatttgaggcggttaaactggcgctgaagggcgaaatggagaggatctggggctccatgctgaaagaaagcggggatagcctggatgatgaagccacgtacctgaacctgtttgaagaactgcagtacaccttctctccgtccagcttcagtaagctcaccccgtcgcaggatctggatgaagataaaattgccgcctttgtggccagaacccgcggctataagtacggcatcacgatcaaagcccggccaggccatctgcagaaatggctgaaaggccgaatccagccacttgaggacgcggctggcacaaacctgtgctggatcgacacagccaccattgtgcatatcggtgccggtcagcagttcgacgatcagtattacctcaccgtgaccacaaagaccggacagagctaccgcgtgaatgatgtccgtctgccaggtcgtcttctggaagccgcacaggaaaccctgttgttcagggcgctggattcaagcactggcggtaatttctga

SEQ ID NO: 1944 - protein, 182 aa, Klebsiella oxytoca
MDINYYDEHQEEFEAVKLALKGEMERIWGSMLKESGDSLDDEATYLNLFEELQYTFSPSSFSKLTPSQDLDEDKIAAFVARTRGYKYGITIKARPGHLQKWLKGRIQPLEDAAGTNLCWIDTATIVHIGAGQQFDDQYYLTVTTKTGQSYRVNDVRLPGRLLEAAQETLLFRALDSSTGGNF

SEQ ID NO: 1945 - DNA, 720 bp, Klebsiella oxytoca
atgaacatgcgaggcattctttttgtactgccattgtgcgccgggctcctggcgggctgtgataacaaacaggaagcgctgaagtttgaagccgcccgcatggcggcgctgaaggccgacgatccgtttctggcgctggactcgttcgaacagcagtccggcgactacggccgggactgcgactcgctgggggcatttctgtttggtaattttgcttccacggataaagcatgtcgggcgcgggatgaggccacgcgggatatggtcctgaaagccgttgaaaagggttccgtaccggcactggtgttcctgtttgacccaggcagcaagacgccggatgtgtatccgcgcgatattgatccacagaaggccgggcaggcggctgagcggcttgttgcactggcagagtcggcgccggtggacagcaaaaatcaggcgttgctgatgcgtgccggcgatgtactgcaggcgggccagtacgttctgcaggattcccggagagcggcgaccctgtacgtcaaagcctggcaggcgggcgatcagcgtgccgcgggcgagctggtcaacgtctatcgttttctcaaggacagccggcgtacctacttctgggaggtacggagcaaagacgtgctgcagctggacagtcgggaccatctgaccggggatgagatcagtgcaattcagaaacttgccgcggacagttctcggaccgacatttga

SEQ ID NO: 1946 - protein, 239 aa, Klebsiella oxytoca
MNMRGILFVLPLCAGLLAGCDNKQEALKFEAARMAALKADDPFLALDSFEQQSGDYGRDCDSLGAFLFGNFASTDKACRARDEATRDMVLKAVEKGSVPALVFLFDPGSKTPDVYPRDIDPQKAGQAAERLVALAESAPVDSKNQALLMRAGDVLQAGQYVLQDSRRAATLYVKAWQAGDQRAAGELVNVYRFLKDSRRTYFWEVRSKDVLQLDSRDHLTGDEISAIQKLAADSSRTDI

SEQ ID NO: 1947 - DNA, 522 bp, Klebsiella quasipneumoniae
atgaaaaaaatattgggcgttttatctttagtagtttttgctatagcatttattattgcgttaaggcaaccaatatcaattgtgtttctttttgctgttttggttattcctttaaaatatatagataagattggcggggaaattgcttctcttttgataattctcggttctgtttttgtcttgttttttgttaactcaatggtccctttgtggggggagaggtatgagaaccatgaggagctaatgagaattagcgagaacgataggcagaaaagatacaacaacatgaatgttatatcagcaagcaaccctagtgttaaggctgaattaaaagaccccgaatctgcaaccttcaaaaaccagatcattggtcgtgacggatatgtatgcggacaagtaaatgctaaaaacagctttggtgcatatgctgggtttaaaaggtatgtaagtaaaagtggaataaccattattgatgatggtggaactgaattttctaaactatggggcgagatttgtagttga

SEQ ID NO: 1948 - protein, 173 aa, Klebsiella quasipneumoniae
MKKILGVLSLVVFAIAFIIALRQPISIVFLFAVLVIPLKYIDKIGGEIASLLIILGSVFVLFFVNSMVPLWGERYENHEELMRISENDRQKRYNNMNVISASNPSVKAELKDPESATFKNQIIGRDGYVCGQVNAKNSFGAYAGFKRYVSKSGITIIDDGGTEFSKLWGEICS

SEQ ID NO: 1949 - DNA, 1170 bp, Klebsiella oxytoca
ttgcttaattctaacattcttttgggttcctcagaggattatttcgttttagtagggcgaaatggtagtgggaaaagcacattattgcatgaacttgcagagagcgttcatgatgatggatatagtactgttgcagtatccaacactttgtttgataaatttaaagttcatccgcaaagtttgaattacaactacttaggcagtaagctaggtaggaattttcctgctcaggcaataaaaaagactctatcaactaaaaatcaaaataaggtgagtaggatcttttcggttctaaatcacattggttatgagaaaaaaattggtgtgaaaataaaatttagaaggaagtttttagaggcaattagatattctactaattcattaggtaatgtttatccaatttattttgatgaaagcaagtataatatccccgaagaattgataatggcaattgataaagcggttcatgtaagaggccgaggttatagtagtcttgaatggttaacagataatgataacgtttttcaagaaggtagctttgactcttatttgcatctgttaaggcatgagcttcttttgaagaaagcaaaaataatctctggtattgaagtctttttaagcaaggatggggattcattcccaatctcttttgcaagttctggtgagctttcttttatcgctttacttgttcatattgctttttgtgtaaatgatagttcctttatattcatcgatgagccagaaaatagtctgcaccccaaatggcaacgagagtatttcgaattattgagaggtgcgattggttataataaatgtactgttgttgtagctacacattcacctctcataatagcttcaatttcacaaaatgacatggctgttatctacaaacgtgatcataatgggttcaataaaataaaacattatgatgacagtgcagaagagttatatattgactactttgatacaataacaccaaaaaatagagctttatcaaataggtgcgttgaaattattgatgattttacggtggggaatatatcatttaaaattgctaaggaacgcttgtcaaaatttaaattaatggctgctgatcctatacaggagaaatttctatctggagttggtttgttgcttgagaaaatttccgttcaaaagaggaatggttaa

SEQ ID NO: 1950 - protein, 389 aa, Klebsiella oxytoca
MLNSNILLGSSEDYFVLVGRNGSGKSTLLHELAESVHDDGYSTVAVSNTLFDKFKVHPQSLNYNYLGSKLGRNFPAQAIKKTLSTKNQNKVSRIFSVLNHIGYEKKIGVKIKFRRKFLEAIRYSTNSLGNVYPIYFDESKYNIPEELIMAIDKAVHVRGRGYSSLEWLTDNDNVFQEGSFDSYLHLLRHELLLKKAKIISGIEVFLSKDGDSFPISFASSGELSFIALLVHIAFCVNDSSFIFIDEPENSLHPKWQREYFELLRGAIGYNKCTVVVATHSPLIIASISQNDMAVIYKRDHNGFNKIKHYDDSAEELYIDYFDTITPKNRALSNRCVEIIDDFTVGNISFKIAKERLSKFKLMAADPIQEKFLSGVGLLLEKISVQKRNG

SEQ ID NO: 1951 - DNA, 348 bp, Klebsiella oxytoca
atgcgttatctctgggttagtgcggttactttagttttaattactggctgttcaacaaaaaattatggtcgacaaggtgaactcactcagtatgagaaagaaactatgtcatgccgtgaaatagagttagaggaagccaaggttcatggttttctccagcatgtcgataaagaaagtcagttcgatggtcgttcagtcctctcgtttttaggtgactttggcatcggtaatacgatggaaaaaaatagtgcacttgaaagcgcgaactctcggctatcgcaattacaactacttagtgttaaaaacggttgcactacaggtatttcccaacccccctcaaaatcatag

SEQ ID NO: 1952 - protein, 115 aa, Klebsiella oxytoca
MRYLWVSAVTLVLITGCSTKNYGRQGELTQYEKETMSCREIELEEAKVHGFLQHVDKESQFDGRSVLSFLGDFGIGNTMEKNSALESANSRLSQLQLLSVKNGCTTGISQPPSKS

SEQ ID NO: 1953 - DNA, 603 bp, Klebsiella oxytoca
atgagcataatccactgccaggccccccgattttaccgccgccagcaggcgctgttggaactggctttgcagcgccgccgcttcggtattcagcgcgcgcagcgccgctttttgctcttccgcaagcgtggctcccgcaagggtaaagcgttgccaggttacctcaaggagacgtctggactcggcgtcaagggagagcgattctcgccgctcccacaccagcttcacccgctgaaaaagagcatcgttgagccagatatcgttagccagttcagccagctcggcggaaaactgctcatcgagtgcctgaatggtcgggttagtctccgcgcctgccatcgcaaaaaagacgttggttacccgcgccagcagctgaccgctctgctccagggcctccagggtattggcaaaatcagccggctgcgggttattaacgatagcggcaatttctttacgctggcgacgaacgccttcgtcgaaggcgggtcggtaatggctgacgtcaaccagatcgaaacgcggcgcctgataaggcagcaggctaacgctgaaaaaaggattgttctccgacatcttcatctcctgaaaacgattatcctgtaa

SEQ ID NO: 1954 - protein, 200 aa, Klebsiella oxytoca
MSIIHCQAPRFYRRQQALLELALQRRRFGIQRAQRRFLLFRKRGSRKGKALPGYLKETSGLGVKGERFSPLPHQLHPLKKSIVEPDIVSQFSQLGGKLLIECLNGRVSLRACHRKKDVGYPRQQLTALLQGLQGIGKISRLRVINDSGNFFTLATNAFVEGGSVMADVNQIETRRLIRQQANAEKRIVLRHLHLLKTIIL

SEQ ID NO: 1955 - DNA, 732 bp, Klebsiella oxytoca
gtgcccggctttcggtttctgatagttacagacgttgtagataaccggatgctgcgcacgcagggtggattgttcgacaaatacgcccatccacgccccgccgcttttgctatcccgcgagaaatagtcgccataaaaaagtgcgataccctcgccgctagcgtcgatgatttcccagacccgcacgtcagggtgataaaccgggatatcgaatcgttccacaaagcgaatgccaaacagctgtgtcgctgcccagaatacgccatcacgcagaacgcgctcgagagcaaaatagggcttaagctgtgcttcatcgatagcaaatttcgcccggcgcacctgttctgcgtaatagagccagtcccacgctgccgcgcggaagtcgccgccttcctgatcgataacctgctgaatatccgccagctcctgttcggctcgcgcccgcgccgccggagcgattcgccgcataaaggcaaacgcctctgccggggcgcccgccatctgatcggccatcgaccagctggcaaagtcatctgcgcccagcagttgcgctttgcgcgcgcggattgccgtcaaccgcagcaccagctcgcgtgtgtcattcgcatcgcccttctgatttcgcgtccagccagctgcaaaaagattttctcgcgtttgccgatcatgcaacgaaagcagcgcaggctgctgggtggtattgagcagagaaagcagccagcgtccgcttaa

SEQ ID NO: 1956 - protein, 243 aa, Klebsiella oxytoca
MPGFRFLIVTDVVDNRMLRTQGGLFDKYAHPRPAAFAIPREIVAIKKCDTLAASVDDFPDPHVRVINRDIESFHKANAKQLCRCPEYAITQNALESKIGLKLCFIDSKFRPAHLFCVIEPVPRCRAEVAAFLIDNLLNIRQLLFGSRPRRRSDSPHKGKRLCRGARHLIGHRPAGKVICAQQLRFARADCRQPQHQLACVIRIALLISRPASCKKIFSRLPIMQRKQRRLLGGIEQRKQPASA

SEQ ID NO: 1957 - DNA, 501 bp, Enterobacter cloacae
atgccccactttgggcgcggcgttgggcgccgcaagatgaaagctctgtgtgaaggcttggatattaagaccttggatgatttcaatgccatcaccgaagagcagatcgttagcgtcgacaaattcagctacaaaactgccgcaaaagtgcttgcaggtatggctgaacatgccgagctattcaacaagattcaatcaatcatcgggttcaaacagcaggtcacttcgggggatcgttttaccggtgagaagatcgtgatcaccggttttcgtgacgcggccttggagaagctgattgaagctgagggtggtgaagtgcaatcatcagtctcgtcgaagaccaccatggtgatcgcggcatccacttccggatcttccggcaaattgaagaaagtgcacgatctcaacaacagcggaaaggcaaatatcaaactgattgatctggccaccttccgtaagcaatatctggaacaaccagcatcgactggtttggagttttaa

SEQ ID NO: 1958 - protein, 166 aa, Enterobacter cloacae
MPHFGRGVGRRKMKALCEGLDIKTLDDFNAITEEQIVSVDKFSYKTAAKVLAGMAEHAELFNKIQSIIGFKQQVTSGDRFTGEKIVITGFRDAALEKLIEAEGGEVQSSVSSKTTMVIAASTSGSSGKLKKVHDLNNSGKANIKLIDLATFRKQYLEQPASTGLEF

SEQ ID NO: 1959 - DNA, 570 bp, Enterobacter cloacae
atgagtcacccacaacttgagctaatagtcgctgtggattctaagttgggattcgggaaaggcggcaagattccatggaaatgcaaagaagacatggcgcgatttacgcggatttctaaagagatccgcgtgtgcgttatggggaaacacacgtatactgacatgcgtgacatgcagttagaaaaggatggcgccgaggagcgaatcaaggagaaaggaattctccccgaacgcgaatcgttcgtgatctcctcgacgttaaaacaagaagatgtcataggcgctactgtcgttcctgatcttcgtgctgtgatcaacctgtatgagaataccgatcaacgcattgctgtcattggtggggagaagttgtacattcaagctctttcatcagcaacgaaactgcacatgaccataattccaagagagttcgactgtgatcgatttattcctgttgatccgatccagaacaattttcacattgattccagtgccagcgagactgtggaggcaaccgttgatgagactcaagagcgcattcactttgctacttacgtgcgtaacaatcagtaa

SEQ ID NO: 1960 - protein, 189 aa, Enterobacter cloacae
MSHPQLELIVAVDSKLGFGKGGKIPWKCKEDMARFTRISKEIRVCVMGKHTYTDMRDMQLEKDGAEERIKEKGILPERESFVISSTLKQEDVIGATVVPDLRAVINLYENTDQRIAVIGGEKLYIQALSSATKLHMTIIPREFDCDRFIPVDPIQNNFHIDSSASETVEATVDETQERIHFATYVRNNQ

SEQ ID NO: 1961 - DNA, 669 bp, Klebsiella oxytoca
atgagactcaagagcgcattcactttgctacttacgtgcgtaacaatcagtaacgcgctggcagtggaagaacaagaaccagaaacgaagcagacggtgttggccgtctgcttcgaaacatcattattggctcgagaactgatcgagaataccattcttgcggacgacatccaaaacaatacagaaaagatagctttgcagttgtcggagcccctccccccaacttataatgggattattgctgggctaaacaatgctgtcgccatgcgtgggacagcaaacgttgaatcgccatcaagagcatccacagatttacgtgcagccgtcatcggtttatggtgtataaatgacaccatagccgccctgaatcagactgataatgcagtcttacaggacggcgagttgcaacaaacacttgtcgattattacaacaacttattggctgacatcgtttgtcgttttcagaagacggctgcactgaacgtcagaagccgactgcactatagcagcggaggggttggatccatcaggcaacgacgggctgctgccggccatcagcggacgcagggaggactttccgcaaccggccgttcgatgcggcaccgatggccttcgcgcaggggtagtgaatccgccaggattgacttgcgctgccctacctctcactag

SEQ ID NO: 1962 - protein, 222 aa, Klebsiella oxytoca
MRLKSAFTLLLTCVTISNALAVEEQEPETKQTVLAVCFETSLLARELIENTILADDIQNNTEKIALQLSEPLPPTYNGIIAGLNNAVAMRGTANVESPSRASTDLRAAVIGLWCINDTIAALNQTDNAVLQDGELQQTLVDYYNNLLADIVCRFQKTAALNVRSRLHYSSGGVGSIRQRRAAAGHQRTQGGLSATGRSMRHRWPSRRGSESARIDLRCPTSH

SEQ ID NO: 1963 - DNA, 861 bp, Klebsiella oxytoca
atgcgttatattcgcctgtgtattatctccctgttagccaccctgccgctggcggtacacgccagcccgcagccgcttgagcaaattaaacaaagcgaaagccagctgtcgggccgcgtaggcatgatagaaatggatctggccagcggccgcacgctgaccgcctggcgcgccgatgaacgctttcccatgatgagcacctttaaagtagtgctctgcggcgcagtgctggcgcgggtggatgccggtgacgaacagctggagcgaaagatccactatcgccagcaggatctggtggactactcgccggtcagcgaaaaacaccttgccgacggcatgacggtcggcgaactctgcgccgccgccattaccatgagcgataacagcgccgccaatctgctgctggccaccgtcggcggccccgcaggattgactgcctttttgcgccagatcggcgacaacgtcacccgccttgaccgctgggaaacggaactgaatgaggcgcttcccggcgacgcccgcgacaccactaccccggccagcatggccgcgaccctgcgcaagctgctgaccagccagcgtctgagcgcccgttcgcaacggcagctgctgcagtggatggtggacgatcgggtcgccggaccgttgatccgctccgtgctgccggcgggctggtttatcgccgataagaccggagctagcaagcggggtgcgcgcgggattgtcgccctgcttggcccgaataacaaagcagagcgcattgtggtgatttatctgcgggatacgccggcgagcatggccgagcgaaatcagcaaatcgccgggatcggcgcggcgctgatcgagcactggcaacgctaa

SEQ ID NO: 1964 - protein, 286 aa, Klebsiella oxytoca
MRYIRLCIISLLATLPLAVHASPQPLEQIKQSESQLSGRVGMIEMDLASGRTLTAWRADERFPMMSTFKVVLCGAVLARVDAGDEQLERKIHYRQQDLVDYSPVSEKHLADGMTVGELCAAAITMSDNSAANLLLATVGGPAGLTAFLRQIGDNVTRLDRWETELNEALPGDARDTTTPASMAATLRKLLTSQRLSARSQRQLLQWMVDDRVAGPLIRSVLPAGWFIADKTGASKRGARGIVALLGPNNKAERIVVIYLRDTPASMAERNQQIAGIGAALIEHWQR

SEQ ID NO: 1965 - DNA, 1125 bp, Klebsiella oxytoca
atgacatatcaattacatgtcggacgctgtgaagatgttctcaagacgctgccggataactcagtcgatgccatcgttacagatcctccatatgggctgagcttcatgaaccacaaatgggattacgacgtccctaccgtcgaccagtggcgggaatgtctgcgcgttctcaaacctggtggacacctgctggcatttggtggatcacgtacctatcaccgacttgttgttaacgctgaggatgctggcttcgaaatcagggaccaaatcctatggatttacggtagcggcttccctaagtcacacaacctcgatggtgattttgatggctggggaacggcgctgaaacctgcgcatgaaccgatcgtaatggctcgaaagccattcaagcaaaccgtgtcagccaacatgaacgagcacggtaccggagcaatcaatatcgacgcctgccggataccgaccgatgaggcgcttaatggaggcactggcggcctgctttcgcatcagcgtgacggtacccaaccggttgccgactacgagcaggcgccggaaggacgctggccggccaacattattcacgacggcagcgaagcagtcgtgtcggcatttccggatgcgaaaggacagcaaggggatttgaaggaaaccggacgcgcacgaccatctcagggtcgatatggagatatggcgccgccaaaggcgcatgctgccagggttgaaagtgaaaaaagcgccgcccgcttcttctactgcgccaaggtcaaaccgaaggagcgcgacgaaggcctcgagcgattcatagcgacatcagccagcgatatgaccggcggccgtaaagagggaagcgtcggcattaacgacccgcgggccggtgccgggcgtacaaatggcgctaagaacaaccaccctaccgttaagccgatcgctctcatgagctatctctgccgactaataacccctccaggtggaaccctgcttgatccgtggatgggaagcgggagtactggccgggctgccatcgaggagggttttaacttcatcggaatcgacctgaacccggattacgtaaccattgcttccgcgcggatcgcttactccttcaaaaaatcgacggaggcagcatga

SEQ ID NO: 1966 - protein, 374 aa, Klebsiella oxytoca
MTYQLHVGRCEDVLKTLPDNSVDAIVTDPPYGLSFMNHKWDYDVPTVDQWRECLRVLKPGGHLLAFGGSRTYHRLVVNAEDAGFEIRDQILWIYGSGFPKSHNLDGDFDGWGTALKPAHEPIVMARKPFKQTVSANMNEHGTGAINIDACRIPTDEALNGGTGGLLSHQRDGTQPVADYEQAPEGRWPANIIHDGSEAVVSAFPDAKGQQGDLKETGRARPSQGRYGDMAPPKAHAARVESEKSAARFFYCAKVKPKERDEGLERFIATSASDMTGGRKEGSVGINDPRAGAGRTNGAKNNHPTVKPIALMSYLCRLITPPGGTLLDPWMGSGSTGRAAIEEGFNFIGIDLNPDYVTIASARIAYSFKKSTEAA

SEQ ID NO: 1967 - DNA, 972 bp, Klebsiella oxytoca
atgaaacgcgcccccgtcattccaaaacattctgcgagtaccgcacctgcggaagtggcaacgtcccccgctccggccgcgccaatggttgattcgttgattgctcgtgttggggcaatggcccgtggaaatgcaatcgctctgcctgtatgtgggcgagaagtcaaatttacactggaagttatcccaggtagctcggttgaaggtaactccagagtctggtcaggtaatgaacgtgatcaggagcttctgacagaagacgctctggacgacctgataccatccttcttactggcaggccagcaaacacctgctttcgggcgtcgggtttcaggtgttattgagattgcggatggtagtcgtcgacgaaaagctgccatcctgacatccagtgactatcggatccttgtcggcgaccttgatgatgaacaaatggcggcgctgtcacggctaggtaatgactatcgtccaaccagcgcctatgaacgagggcatcgttatgcaactcgcctgcagaatgaatttgccggcaatatctctgcgcttgccgatgccgaaaacatctcgcgcaagattatcagtcgctgtatcaatacatccagattgccaaaatcggttgttgccctcttctctcatcctggggaactttcagcccgggcaggtgaaaccctctttaaagcttttgccgataaagaggaattactgataaaacaggctgctaacctgcatgggcaaaagaaagcgggagtgatttttgaagccgatgaggttattactttactgaccgctgttctgaaaaatacacctgcggttagatctaatctgagctcgcggcatcaatacgcaccaggtgcatctgctctctacaagggggataaagttatactgaacctcgacagaacgcgcttgcctgcagaatgtattgaaagaattgaagccattttaaaagaactgggatctacagcttcataa

SEQ ID NO: 1968 - protein, 323 aa, Klebsiella oxytoca
MKRAPVIPKHSASTAPAEVATSPAPAAPMVDSLIARVGAMARGNAIALPVCGREVKFTLEVIPGSSVEGNSRVWSGNERDQELLTEDALDDLIPSFLLAGQQTPAFGRRVSGVIEIADGSRRRKAAILTSSDYRILVGDLDDEQMAALSRLGNDYRPTSAYERGHRYATRLQNEFAGNISALADAENISRKIISRCINTSRLPKSVVALFSHPGELSARAGETLFKAFADKEELLIKQAANLHGQKKAGVIFEADEVITLLTAVLKNTPAVRSNLSSRHQYAPGASALYKGDKVILNLDRTRLPAECIERIEAILKELGSTAS

SEQ ID NO: 1969 - DNA, 393 bp, Klebsiella oxytoca
atggacagaatcagtgaagaaagacagacaggcacagacgtgatgaacgtcgccttccacaccatgcgcaagtacggcatgaatatcatcaccgccacgcagcatatggatattaatgcttacgtgaaatccgacccgcggatgccgagaacgcggctgcgccgctacctggggcagtatggcctgcgcggtgaggcgctgagcagggaggtcagacgtatcgttgcgggacctgagcgacgcgacagcacgctgaaggacgggatttactatacctggccttatggctgggagccctgtgattttacgccgatgatgcggcgcatttttcgcgggaagcggacccgccatgtgatgatgtttgatgaaatgccagcgctgtttggcaaataa

SEQ ID NO: 1970 - protein, 130 aa, Klebsiella oxytoca
MDRISEERQTGTDVMNVAFHTMRKYGMNIITATQHMDINAYVKSDPRMPRTRLRRYLGQYGLRGEALSREVRRIVAGPERRDSTLKDGIYYTWPYGWEPCDFTPMMRRIFRGKRTRHVMMFDEMPALFGK

SEQ ID NO: 1971 - DNA, 939 bp, Klebsiella oxytoca
atggcgaagatccaggccagaaatgttgacgatgcgctgtttgcgcgcattgagcagtcagcaatgaaaaatgaacgttccctcgagggggagatccggattgccctccgggagtattatcagcccgtggttcaggccgggcccgcgatgtctgacagggagcgctggcagcatgaaacgggcaagcggctgaagtggttgttcaaccggctcatggcggacaattacttccgggaatttgccggagccagaccgccggacacgtttgacctggtccgcttcggcaggcaactggatacctcgccgggtgtgctgatggatatcatggaaggacgccaggagctgtcctttacgctggcagatacgatcgcccggaattttgatgcctcggcggactggcttctgggtgaaagcgggcaaccttttccgtttgtccgcctgggctctgcggggtacagggagtttttctttcccgtcggcagtacaggcgaccacacgtttgagtttctcagaatagccggcggcaggcatgacggcaccctgatcatcctgcgtcaggatatacagacgaagcgggtcacacccggcgttgtcacggagagtttttacctgcgcagcggcatgggaagcggcggatacggcaacctcaaaaggtttctcctctttctcaaaacagaaggtgcacggctgtccatcaacacttatgactggacgccggagcacccggattttgatttctggacggtcatcggccagcatcatcacgtctatttccaggactcgccccgccgttcatcggcccgctggctgcagcaggtactcaacggtgaagatccgggagaatggtttcagggcggctggacaccgatactgaaggaagtggctgcggccaccgggccggatacggcttccggacatactgaccaccaggatgaatga

SEQ ID NO: 1972 - protein, 312 aa, Klebsiella oxytoca
MAKIQARNVDDALFARIEQSAMKNERSLEGEIRIALREYYQPVVQAGPAMSDRERWQHETGKRLKWLFNRLMADNYFREFAGARPPDTFDLVRFGRQLDTSPGVLMDIMEGRQELSFTLADTIARNFDASADWLLGESGQPFPFVRLGSAGYREFFFPVGSTGDHTFEFLRIAGGRHDGTLIILRQDIQTKRVTPGVVTESFYLRSGMGSGGYGNLKRFLLFLKTEGARLSINTYDWTPEHPDFDFWTVIGQHHHVYFQDSPRRSSARWLQQVLNGEDPGEWFQGGWTPILKEVAAATGPDTASGHTDHQDE

SEQ ID NO: 1973 - DNA, 150 bp, Klebsiella oxytoca
atgaaattaataatgtgcagtacattatttaaatgtgtagaaacgattcgtgtacgaatccaaagagagtcgttagtgaattgtacgcaattcagtagtgactatttttttgaaaaacatttatttgcaagtgccatgaatctatattag

SEQ ID NO: 1974 - protein, 49 aa, Klebsiella oxytoca
MKLIMCSTLFKCVETIRVRIQRESLVNCTQFSSDYFFEKHLFASAMNLY

SEQ ID NO: 1975 - DNA, 705 bp, Klebsiella oxytoca
atgtgtgcgatggatcgtagtagcgatgacagcttaagtcaatcagtaagggatgctcttaatcacataaaagagttgtatcattcttcgcctgtctcagtttgtgtcagaaatgaccgccatgaagtattatatgctaattcctcctttcaacaggtgtacgatttttttcagcttgaaagtaataaatctattttttcaggtaattcagttaagcttgagtacattctttctcagtttgagtttgattgtatgtccctgggaaaaggttgtgttctttgtaaaaatttttcctgtggagactattacttccaggttcgcatggaatgcatgttcatttcagatgaatgtctatatgttttgtggcaaataaacctattaattcaacttccattagtcgggcgtaaaattgagttccccgataatccgaatgcggatgttagttttgaatttgtgatttctaagattccagttagaaacctggcggtattgtcgttttctattttagggttcacatatgcggaaacggcattttacgttgatcttccggtatcaacagttagaaaaagagttgagaaatcacgggagatcattaaagagtccttttcatcttacagtatttttataatgcatatttataaaacgaaaaggatattcttttttgtcgacttcgtttcagaactttttgatgttaaacatttgtga

SEQ ID NO: 1976 - protein, 234 aa, Klebsiella oxytoca
MCAMDRSSDDSLSQSVRDALNHIKELYHSSPVSVCVRNDRHEVLYANSSFQQVYDFFQLESNKSIFSGNSVKLEYILSQFEFDCMSLGKGCVLCKNFSCGDYYFQVRMECMFISDECLYVLWQINLLIQLPLVGRKIEFPDNPNADVSFEFVISKIPVRNLAVLSFSILGFTYAETAFYVDLPVSTVRKRVEKSREIIKESFSSYSIFIMHIYKTKRIFFFVDFVSELFDVKHL

SEQ ID NO: 1977 - DNA, 942 bp, Klebsiella oxytoca
atggctgagaataattttaagccgtttgccgttggtgcaggtgcaaatgtgtcttcgcagacagactgggaaaaactggtggcgctatctactggtttcactgcgggtatagcccgttcagaccaggtcaacaaagcattacgtcaggcaacagttattgccagcgttctggctcagtttattgcgaataaaacaaactcagatgtacttgatgatggtgatactgatgcgttgctcatcaaattagttcaggctttaaatcttagtggtgacgagcgctttctgaagactgcaaacaacttatctgaaatatcaaataatggaagcgcagccaaagcgagtgcaagaacgaatctgggtctggggtcagcagccacccgcaatacgggaactgatggtgatgctatccccttgttgtccggcgtaaacgtatggtccgccactcagtctatggctggttccggagaggtagataacggagaggttcgttccgcggctgatatgttttatccctatggaaccagcggaacaatgtggtctgaattctatagctcagacatttcagaagaccattttgaacaccgtatcgtggttagtaagagcggtgcccgtaagtactttcgttttaaagaaagcggagagttatctgccgaaggagatatcaaggccggaggtggcgtttatgataaaggtggtcgtgtatacagtcctgataataaacaaccgcccaattatattgatgaaataggagcgtacgcttttgcctggtatgatggggtagttgaatataacgctacggtaagtggaacagcgctgtttccatcaaccggcgatggaaaccattcctcatcggcgctaagcggaacatggcgctgcatggggcgcactgaaacaataaatgatcagcacagaacgaccctctggcagaagattgctaattaa

SEQ ID NO: 1978 - protein, 313 aa, Klebsiella oxytoca
MAENNFKPFAVGAGANVSSQTDWEKLVALSTGFTAGIARSDQVNKALRQATVIASVLAQFIANKTNSDVLDDGDTDALLIKLVQALNLSGDERFLKTANNLSEISNNGSAAKASARTNLGLGSAATRNTGTDGDAIPLLSGVNVWSATQSMAGSGEVDNGEVRSAADMFYPYGTSGTMWSEFYSSDISEDHFEHRIVVSKSGARKYFRFKESGELSAEGDIKAGGGVYDKGGRVYSPDNKQPPNYIDEIGAYAFAWYDGVVEYNATVSGTALFPSTGDGNHSSSALSGTWRCMGRTETINDQHRTTLWQKIAN

SEQ ID NO: 1979 - DNA, 558 bp, Klebsiella oxytoca
atggcagctcgaggcgtgaataaagtcattctggttgggcatctggggcaggacccggacgtgcgttatatgcccaacggcggcgcggtggcaaacctgacgctggccacgtctgaaacatggcgtgacaaacagagcggggaactgcgcgaaaacaccgaatggcatcgtgttgtcatattcggcaagctcgcggaagtggcgggcgaatacctgcgtaaaggcgcgcaggtctacatcgagggccagctgcgtacccgccactggcaggacgatgccgggatcacccgctatgtcaccgaggtgctggtcgggcagaacggcaccctgcagatgctgggtggccgtcgtgagggtaatccgtctgagagcaccgcccctcagcaacccgagcagccgcagagtcctgccgccccggcacaacctgctgaggctcctgttaaatccccgaaaacgaagggcggtaaaaaagccccacagagtgccgcaccgtctcagcaacccccgcagccgtccccggatgattacccgccgatggatgacaatgcccccttctga

SEQ ID NO: 1980 - protein, 185 aa, Klebsiella oxytoca
MAARGVNKVILVGHLGQDPDVRYMPNGGAVANLTLATSETWRDKQSGELRENTEWHRVVIFGKLAEVAGEYLRKGAQVYIEGQLRTRHWQDDAGITRYVTEVLVGQNGTLQMLGGRREGNPSESTAPQQPEQPQSPAAPAQPAEAPVKSPKTKGGKKAPQSAAPSQQPPQPSPDDYPPMDDNAPF

SEQ ID NO: 1981 - DNA, 204 bp, Klebsiella oxytoca
atgaatctccttaatccattgtttgcttttaaaaaccatcacccgttgagtttcgggagccgcggttttgacgtttgcgggaacctgctgttttgttcccgatggtatgaccttcacccgtttgagaaccttcgccgcaagggcgtaaacgagcacggcccggtgcagatgtccggggtgagcgggaaatttttatcggtctaa

SEQ ID NO: 1982 - protein, 67 aa, Klebsiella oxytoca
MNLLNPLFAFKNHHPLSFGSRGFDVCGNLLFCSRWYDLHPFENLRRKGVNEHGPVQMSGVSGKFLSV

SEQ ID NO: 1983 - DNA, 1200 bp, Klebsiella oxytoca
atggcttttactaaaatcagaatcgacaatcttttttgctttgaaaacagtgtccttgacctgagtttcacaagaaccccagttaatagctcactggaaggcgagtacattgaggggtatgaaaagttttacttcaaaaaagtgtgcattgtatctggcgcaaatgcatcaggaaaaacatcacttggccgggtaatgatctccgtactacgatttcttagcaccggggtttttaatccggaaccattaaaattaatggacaaaaagaaacctgcttatattgaaatggacttctttcaggcccatttgaaatctttattcaggactggtatttggcttaaagctacagacgactctgtcactgtagagaaaattgctatggcatcagttgatttacgcaagtccgattcttgtgcaaaaacgactaaaagattagacattgtctggaatgatcaaaaattcgaactaaatggaccaaacaaatatttctctactgagaatgctaatccaaaggagttttctcaatatctagataatttagggtttgttctaggatggcattttatactttctgaaaaccaagaaaatacgaataagatatctcgtattggaagcaatattctaaagagtatacttaaaacctttgacaatacagttaaatccgtttctggactaattgttaaagatgatgaaggcaatcaaaatctgcaagggtactctgtgattttcaataatggtgataaagtcattattgacatggagggggagataactaacaaagatagattatcccgagggacttatgatgctgtaaaaatatcgcacctcctttcagggatacttgaagataaaactgaagaaactgatatgaatttcccatgtagtggcctttattttttggatgagaaaatggccttcactcatacagagttagaaaaaataatggtcactttgataatatctaaactctgcagatatggtcagtttatatatacaactcataattacgatatattgagtttagatttaccgactcactcgtttacatttactaaaaaaataaacgggtcaaccacatttattgaagcgacctctcagcataaaaagaatgaccgaaatcttttaaataaagttaaaaacgattgtttcgcgaccatccctgatgtttcattaattgaagaaatgctttttgaggattga

SEQ ID NO: 1984 - protein, 399 aa, Klebsiella oxytoca
MAFTKIRIDNLFCFENSVLDLSFTRTPVNSSLEGEYIEGYEKFYFKKVCIVSGANASGKTSLGRVMISVLRFLSTGVFNPEPLKLMDKKKPAYIEMDFFQAHLKSLFRTGIWLKATDDSVTVEKIAMASVDLRKSDSCAKTTKRLDIVWNDQKFELNGPNKYFSTENANPKEFSQYLDNLGFVLGWHFILSENQENTNKISRIGSNILKSILKTFDNTVKSVSGLIVKDDEGNQNLQGYSVIFNNGDKVIIDMEGEITNKDRLSRGTYDAVKISHLLSGILEDKTEETDMNFPCSGLYFLDEKMAFTHTELEKIMVTLIISKLCRYGQFIYTTHNYDILSLDLPTHSFTFTKKINGSTTFIEATSQHKKNDRNLLNKVKNDCFATIPDVSLIEEMLFED

SEQ ID NO: 1985 - DNA, 519 bp, Klebsiella oxytoca
atggcggccaaaaaatttgctattgtcctcgttgagggggaaacggaaaaggcattattcagtgatttcaaaacatcgcttgggtaccctataaaaaaaatagtgattgcaaacttatggaatgttagcataaaaaaaatcatgccagctttgactgaagttagtgagatcgtagtggtttttgatactgaccgaattgagaacatagaacgatttaaaaccaacataagtcttctaaaggccaagaagcatacaatctacttatttcaacaaacaaaaaattttgaagatgagattgctaaagcgtgcaacataaacaaccgtgctttgtattcttctttttgctcaaaaattgtttcctcagataatttcaaaaatgaatttattgctttacacaacagaatgccaaagctcgacggtctcaacattaacaaaagcttactatggagcagaggcataattccacaattgaatgattattcttcacatacctcatcccatgatgcttatttttcatag

SEQ ID NO: 1986 - protein, 172 aa, Klebsiella oxytoca
MAAKKFAIVLVEGETEKALFSDFKTSLGYPIKKIVIANLWNVSIKKIMPALTEVSEIVVVFDTDRIENIERFKTNISLLKAKKHTIYLFQQTKNFEDEIAKACNINNRALYSSFCSKIVSSDNFKNEFIALHNRMPKLDGLNINKSLLWSRGIIPQLNDYSSHTSSHDAYFS

SEQ ID NO: 1987 - DNA, 333 bp, Klebsiella oxytoca
atgaatactttacctgcaataaaccagcgggctgttcagacatgcttatcacccgtggttgtctggcaaatgctgcttgctcgactacttgagcagcactatggcctgaccttaaatgacacgccgttcagcgatgaggctgttcttaaaagacatatcgaagctggtatcacgcttgtcgatgccgttaattttctggtggagaagtacgaattgatccgtatcgatcgcagaggatttagctcacagggacaagtgccatatttgaccgtgacagatatccttcatgccaggagagaatgtggattaacgaacagttgtccttatcggtaa

SEQ ID NO: 1988 - protein, 110 aa, Klebsiella oxytoca
MNTLPAINQRAVQTCLSPVVVWQMLLARLLEQHYGLTLNDTPFSDEAVLKRHIEAGITLVDAVNFLVEKYELIRIDRRGFSSQGQVPYLTVTDILHARRECGLTNSCPYR

SEQ ID NO: 1989 - DNA, 3141 bp, Klebsiella oxytoca
atgaaggctggattcaatagcaaacgcctctttggcataacacgctcgaaaggtaagatgtacgagtttggtctggatgagtctctgcatctcagaatgcctgaaggttcagatcctctgcagctgtttattatgaccgtagcaaccttgggcgacgttaccggggtgctggctgagctgtcactgccattagtttctcttccccctgagccgcaagcggagctgaatttctgcgccagcttttttgacgcagttctggattcaggatttgcacaaggcctcgaaagcacaacattactattagcctctgccgcctattatgtggctcgacgcccgggaagtagcttagtccttgcccgtcgaattgaacctaaagaagaagacaacaatgttgagcatttgcttcaatggttgctcaaagcggactggaggacttactggcttttagacgacaaacgttatggaccgctgctaacatcgttttcgcgtgctgttgctaaccattttgccgaaggtacccagctacaagagattgatgtactgatgaaactcctcaggaatgaggcttataaaatgggcactcccgaggaagtgctttatgcagatgtcgccatatcgatttgtcgtatgaggcttgcagcatctgcttgggtaaccctctcccaatattcaggtttatcagtggatcattggcggccggtcattcagagggaacgctttcctaaagaactctggccttctcagattcttttaggggaaagagggatattcagaggtgactcgggcttgattcagatgcctacaagtgccgggaaaactaggtcgattgagttagttctgcgcagtgcattcatgtctgggcgcacgaagcttgcggttgtggttgcaccctttcgggcactctgccatgaaattgccttatcacttcggcaagatttggccggcgatgacattaaagtcaatgaactgacggatgccttgcagattgacttcgttgaacaaattgctgaccttctgggaagtgccccgccctcaacatcgaacgtattagtcctcacacccgaaaagtttctctatgtgctgcgtcagtcctctcaggctttgaaacacattggtcttgtcgtttacgacgaggggcaccagtttgatactggcgtgagaggtataacctatgaattgttgctcaccgaaatcaagggattgctgcctgatacagcgcagactctacttatttcagctgtgatgcaaaatccacaggccattgctagctggctgatgggtgaggataaggcacaggttattgacggcgcaacgctattacctacgagccggtctgttgcctttgcaagctggacagagtcgcttggacagttaatgttttatgaaaatggatatgacaaagaggactactttgttccgagaataatcgaagcggcacagctatcgggaattaaagcagacagctcgatatttccgacccggacgaaatcgagcgacgtatcgctctatttgggtctacgcgttattagtaagggatccgtagctattttctgtgggacaaagttgattgcaaatggtatagcaaaaagggctgtccagattgcggatgcaggatataacacgttatggccttcaacctacgctaatcctgaagaagtcatggcactgaaaactattattgagggtaatttcggtagcaattcctttcttttaaaagctgcaaagctgggtatatacacgcatcacagtaatacacctcagggtatacgcttagcactagaacatggtatgcagaaaggactgattaactttattgcatgcacatctacgcttgctcaaggtgtaaacttgcctattcgctatcttatcgtgcagggagtatatcagggggtaggacgtgtcaaagttcgcgacttccagaatcttattgggcgtgccggtcgtgcagggatgcatactgagggggttgtaatcttcgctgattcaacagtttgggacagaaggaaaaattggcaggaaggatggaaatttcaaagcgctgtggagcttctctctcctgaccgcgctgaaggcgttaccagttcactccttttattgttaaaaccttttgcactcccccgtaaccaagaattgccctttgctgggggcgatttgctggattttatggataaggaggttgagtgggaaggctgggctaatctggtggcggattcagaccctcgcctcagtaagtcgcaaaaagatgctctagtaaaagcgctgttgagctccttggcagaacggaaaaagatgacgcatacacttgaaagctatctaatggcaaactgtgctgcgatggatgcaaccgcctttgaacagagggccggggaacttgcacgcgagacattggcgtactcgcttgcctctgccgaagaggctgagaaacttgaagaatacttcagattggttgccagacgtattgagtcggttgagagctcacccttaaagcaggcattcttcggcaagacattgctgggcgcaaagcagactaaatttattgaagtatggtcaggcgaacatagagcaatgctgctagcgctggattcctctaatggatggctcaatgccgtctggccactactgaccgagctctgcgacaatcgttttttccgtagcgtcgagcctgcaggtgcagggttcgagatcgcactttcgtggatgtgcggaatgagttacggagaaatcttcaagaaagcatctcagatgcaggttaaaaagaaagccggtaagcgtaaacaaaaagtgagtgacgacgatattcttaagttcttggagagcacactggcatttgattgttcgctcattctggcagctcttgcacaattcctttttagtccagaggaaataatcggagagcaaggggcatcgctcgctcattttcagaagagcctaaaaaatggcctccctgacgtgctatccatgagtatatttgaggcgggatttgctgaccgttttatttctcaagctattcgcgacgctctcctccaggatggatatggaggcagctcatttgatgaggctaggcaaaatcatttaagcgttattgagcaagttgtcaaaggaacccctgcttatttcaattacgttttaagctcatactga

SEQ ID NO: 1990 - protein, 1046 aa, Klebsiella oxytoca
MKAGFNSKRLFGITRSKGKMYEFGLDESLHLRMPEGSDPLQLFIMTVATLGDVTGVLAELSLPLVSLPPEPQAELNFCASFFDAVLDSGFAQGLESTTLLLASAAYYVARRPGSSLVLARRIEPKEEDNNVEHLLQWLLKADWRTYWLLDDKRYGPLLTSFSRAVANHFAEGTQLQEIDVLMKLLRNEAYKMGTPEEVLYADVAISICRMRLAASAWVTLSQYSGLSVDHWRPVIQRERFPKELWPSQILLGERGIFRGDSGLIQMPTSAGKTRSIELVLRSAFMSGRTKLAVVVAPFRALCHEIALSLRQDLAGDDIKVNELTDALQIDFVEQIADLLGSAPPSTSNVLVLTPEKFLYVLRQSSQALKHIGLVVYDEGHQFDTGVRGITYELLLTEIKGLLPDTAQTLLISAVMQNPQAIASWLMGEDKAQVIDGATLLPTSRSVAFASWTESLGQLMFYENGYDKEDYFVPRIIEAAQLSGIKADSSIFPTRTKSSDVSLYLGLRVISKGSVAIFCGTKLIANGIAKRAVQIADAGYNTLWPSTYANPEEVMALKTIIEGNFGSNSFLLKAAKLGIYTHHSNTPQGIRLALEHGMQKGLINFIACTSTLAQGVNLPIRYLIVQGVYQGVGRVKVRDFQNLIGRAGRAGMHTEGVVIFADSTVWDRRKNWQEGWKFQSAVELLSPDRAEGVTSSLLLLLKPFALPRNQELPFAGGDLLDFMDKEVEWEGWANLVADSDPRLSKSQKDALVKALLSSLAERKKMTHTLESYLMANCAAMDATAFEQRAGELARETLAYSLASAEEAEKLEEYFRLVARRIESVESSPLKQAFFGKTLLGAKQTKFIEVWSGEHRAMLLALDSSNGWLNAVWPLLTELCDNRFFRSVEPAGAGFEIALSWMCGMSYGEIFKKASQMQVKKKAGKRKQKVSDDDILKFLESTLAFDCSLILAALAQFLFSPEEIIGEQGASLAHFQKSLKNGLPDVLSMSIFEAGFADRFISQAIRDALLQDGYGGSSFDEARQNHLSVIEQVVKGTPAYFNYVLSSY

SEQ ID NO: 1991 - DNA, 810 bp, Klebsiella oxytoca
atgctacccgaccatttaaaaggtttacatttaaggtcagcaggtttgataaccgttgaaggccggaccataaatgtttgggagttctcgcccccaactgatccggcgattcttgacagttgggcactgcattttcgtcggcaatactgtacagaccaggagcttcctgagctcttgtgcgggacaggaatgacgatagaacagtatctaaatgcacatattttccccgacaaagtcaaggctcccgggccatcaattcgttctggtgatttcgctgaatttctcatttccgactacttggagttcacgctcaatctgtgggtgccccgaggaaaatacgctgacaaagccagcaacaatgagtccgtcaaaggcgttgatatactaggcttccatcagttggatattgctactcccaatcgaggggatgccctttatgcctttgaagttaaagcgtctctttcaggtggtatatatggtggccagctccaaaatgctgttgacgatggttctaacgatcaacacataaggcaagctttcacgttaaacgccactaaacgtaggtaccttcgtgaaggaaagacactggaagtgagccgaattgcacggtttcagaatcctgcagataacccttatacatattactcaggtgcggttgctgttctttgcaacacagctttcaatgaagaagagcttgccaagacactggccaacacgcactcaaatgaggcagcactttatctgatggttgtgagatccgatcttcagatgaaactggttcatgaactttacgagagggcctgcaaatga

SEQ ID NO: 1992 - protein, 269 aa, Klebsiella oxytoca
MLPDHLKGLHLRSAGLITVEGRTINVWEFSPPTDPAILDSWALHFRRQYCTDQELPELLCGTGMTIEQYLNAHIFPDKVKAPGPSIRSGDFAEFLISDYLEFTLNLWVPRGKYADKASNNESVKGVDILGFHQLDIATPNRGDALYAFEVKASLSGGIYGGQLQNAVDDGSNDQHIRQAFTLNATKRRYLREGKTLEVSRIARFQNPADNPYTYYSGAVAVLCNTAFNEEELAKTLANTHSNEAALYLMVVRSDLQMKLVHELYERACK

SEQ ID NO: 1993 - DNA, 558 bp, Klebsiella oxytoca
atggctcgtatcgcttgtcttggatggggttccttaatttgggagccaagaggtttacctgttcaggggaaatggtctgaggatggcccacttatatccgttgaattcgccagacagtcgctagatggacggattacgcttgtgctagtcgaaactgatcgattagtgccttccctgtgggcgataatggaatcagtggatcttacctctagtattgaggctttacgttgccgtgaaggtatcccaataaaaaatattgaaaagcatgtttgcaggtggtctgctggtcagccttctccaaaactgatcccaggattgtctgaatgggctgacaccaataacgtggaccatgtggtatggaccggtctccctccaaaattcaacggtaaagaaatccttccaacagccgaaaaaattgtgaagtatttagaacaactatctggagaacaaagagatagggcggagcaatacattcgtcgtgcaccgcgtcagatcgacaccatgtatcggcgtattattgaatcatcgctccagtggcattcaacgggcggtgaatag

SEQ ID NO: 1994 - protein, 185 aa, Klebsiella oxytoca
MARIACLGWGSLIWEPRGLPVQGKWSEDGPLISVEFARQSLDGRITLVLVETDRLVPSLWAIMESVDLTSSIEALRCREGIPIKNIEKHVCRWSAGQPSPKLIPGLSEWADTNNVDHVVWTGLPPKFNGKEILPTAEKIVKYLEQLSGEQRDRAEQYIRRAPRQIDTMYRRIIESSLQWHSTGGE

SEQ ID NO: 1995 - DNA, 516 bp, Klebsiella oxytoca
atgaacatctcaacagtaaacgagctcattcagtcgctggagtctgctggcgagctgtcgatcagagagcggaagtatctggagctggcgaaagcttaccagcagctggctgcggagaacgtggggctgaatgagaagctagataaattagctatctggcccggcatcgaattctactcctcatcgtgggagtttaataacaatgatggcaatgaagccattgagttcatgtgcgatatcgaaacccccgccaccgatcgcatcgtagccgggattaaggctgatggtcgcgcagagggtatcaactttgccgcaagccgccttgcagccgctttcaatcacggatttgttgataagccaatggctgaggtaggtggcgtggtacgtatgattctgaccgcaaaagaggatttagcaaacgacccggtcttagccgccgatggactgtcaggtgagtacgcagaaaaatcactggctgagtgggaagcagcactgcgcgagggggcagacaaatga

SEQ ID NO: 1996 - protein, 171 aa, Klebsiella oxytoca
MNISTVNELIQSLESAGELSIRERKYLELAKAYQQLAAENVGLNEKLDKLAIWPGIEFYSSSWEFNNNDGNEAIEFMCDIETPATDRIVAGIKADGRAEGINFAASRLAAAFNHGFVDKPMAEVGGVVRMILTAKEDLANDPVLAADGLSGEYAEKSLAEWEAALREGADK

SEQ ID NO: 1997 - DNA, 486 bp, Klebsiella oxytoca
atgatatccttaaagccattggtggctgatggatttaggggtcaccagatggcatttaaagggacactttctggatactttcgcgatggcgaaaatgatactgaattctgcactgactggaaattcttaactaaagaagaaaaaactgaaatcattaatttcataaaagaaattgctgagaaagagtttatcactggtaaaaataaggaatcttgggtggatgataatcaccaggatatccccggagccgatggttatagagatgagaactattggcattaccattgcggtccggattgggccggcgggcgactgaaaagtatgacaaagtgccttttcttcaaccctggcggaatggcttcacaacagtgtatacactactatccattagaaaatgaagagaatgagatagttataattgggtattcaagaaaccatatcccttttttgttgcctgatgacccaaataacaagtttttttcctga

SEQ ID NO: 1998 - protein, 161 aa, Klebsiella oxytoca
MISLKPLVADGFRGHQMAFKGTLSGYFRDGENDTEFCTDWKFLTKEEKTEIINFIKEIAEKEFITGKNKESWVDDNHQDIPGADGYRDENYWHYHCGPDWAGGRLKSMTKCLFFNPGGMASQQCIHYYPLENEENEIVIIGYSRNHIPFLLPDDPNNKFFS

SEQ ID NO: 1999 - DNA, 183 bp, Klebsiella oxytoca
atgcaagtcctgtttgtggacattaaaatggggcagattttggggcaaaatgtcgtttggggcacgatttggggcgttcaaatgtccgcatttgtccgtatttgtccaaatgtcaatcttgctatctcattgaaagtattgcagatcattgaatttgctaaactatttttttgcatgccataa

SEQ ID NO: 2000 - protein, 60 aa, Klebsiella oxytoca
MQVLFVDIKMGQILGQNVVWGTIWGVQMSAFVRICPNVNLAISLKVLQIIEFAKLFFCMP

SEQ ID NO: 2001 - DNA, 315 bp, Klebsiella oxytoca
atgttgacgaatgacagggggcggcaggtgcggagggcgcggttgcttcgtcatatgaagcaaagtcacctagctgaattaatgggtgtggatcaggcaaccgtgtcgcgctgggagcggggcacccttgcattgtcggatgggaggtggtcagcggttcttcaattgcttaccgggccttccgattcatcgtacgacgctgcgctgaagcgtctggtgcaatcctccgcccacaaagtccatctggtagcgaccggacacattgtttgctcgcggcatctccggccaggcaaagggaattgcggattgacctag

SEQ ID NO: 2002 - protein, 104 aa, Klebsiella oxytoca
MLTNDRGRQVRRARLLRHMKQSHLAELMGVDQATVSRWERGTLALSDGRWSAVLQLLTGPSDSSYDAALKRLVQSSAHKVHLVATGHIVCSRHLRPGKGNCGLT

SEQ ID NO: 2003 - DNA, 660 bp, Klebsiella oxytoca
atgaacaagctccaacgcgaggccgtgatccgaaccgcgctcgaactgcttaacgacgtgggcatggaaggtctaacgacgcgccgactggctgagcgcctcggggtgcaacagccagcgctctactggcatttcaagaacaagcgtgcgttgctcgacgcacttgccgaagccatgctgacgataaatcacacgcattcgacgccaagggatgacgacgactggcgttcgttcctgaagggcaatgcatgcagttttcgacgggcgttgctcgcttatcgcgatggcgcgcgtattcatgccgggacgcggccagccgcgccgcagatggaaaaagccgacgcgcagcttcgcttcctttgcgatgctggcttttcggcaggtgacgcgacctatgcgttgatggcaatcagctacttcaccgtcggcgctgttcttgagcagcaagctagcgaggcagacgccgaggagcggggcgaagatcagttgaccacctcagcgtctacgatgccggcgcgcctacagagcgcgatgaaaatcgtctacgaaggcggtccggacgcggcattcgagcgaggcctggctctcatcatcggcggtcttgaaaaaatgaggctcactacgaacgacattgaggtgctgaagaatgttgacgaatga

SEQ ID NO: 2004 - protein, 219 aa, Klebsiella oxytoca
MNKLQREAVIRTALELLNDVGMEGLTTRRLAERLGVQQPALYWHFKNKRALLDALAEAMLTINHTHSTPRDDDDWRSFLKGNACSFRRALLAYRDGARIHAGTRPAAPQMEKADAQLRFLCDAGFSAGDATYALMAISYFTVGAVLEQQASEADAEERGEDQLTTSASTMPARLQSAMKIVYEGGPDAAFERGLALIIGGLEKMRLTTNDIEVLKNVDE

SEQ ID NO: 2005 - DNA, 333 bp, Klebsiella pneumoniae
atgaatacatatattttcctgggaggggctattgtggctgaagtcataggcaccacctttatgaaatattcagaaggatttacacgcctgtggccgtctgtaggaactgcaataagttattgcgctgccttttatctgctttcccaaacattggaaaatatacctaccggtattgcttacgcaatttggtctggtgcgggaattgtactaataagcctagctggttggttggttagcggtcaaaaacttgattggcccgcaattgcaggaatgttccttatttgcgttggagttttggttattaatattttttcaaaatcttctgcgcattaa

SEQ ID NO: 2006 - protein, 110 aa, Klebsiella pneumoniae
MNTYIFLGGAIVAEVIGTTFMKYSEGFTRLWPSVGTAISYCAAFYLLSQTLENIPTGIAYAIWSGAGIVLISLAGWLVSGQKLDWPAIAGMFLICVGVLVINIFSKSSAH

SEQ ID NO: 2007 - DNA, 171 bp, Klebsiella oxytoca
atgcacgaaccccccgttcagtccgactaccacgcccgttccggtaactatcaacttgagtccaacccggaaagacacgacaaatcgccagtggcggtagccattggtaactgggttcacggagcagagattgtagagaatgcctacagagttcttgaagtgaaagcctga

SEQ ID NO: 2008 - protein, 56 aa, Klebsiella oxytoca
MHEPPVQSDYHARSGNYQLESNPERHDKSPVAVAIGNWVHGAEIVENAYRVLEVKA

SEQ ID NO: 2009 - DNA, 651 bp, Citrobacter braakii
atgactagttttctaaaattgggtattttcgagcgagaagccaaagccccggaactaaatattaaacaacttgcactacttatgtgtggggtagatccgacagttaaaactgctgatatccctgaggcaaaagttgaagcttacaatatatactatcgacaactgagtagatggttatcagcatctaaattatttcgaggtggaaactcaacagcatatcccgcagactatatgtttgctctggcatatcctcttattgatgaagatattacaccacaacccataaaagacagatgccttgcggcggtggctataattgctaatcaaaacaaagggaaagagcatctttatgctatgggaggggatgagcttttacaggtcggaattgcattgaaaagcagcaaacgcggcttgcatcgtaaagaagatgaaaaggaatataatgataaattaatggggatgctggtcaagcttatagcacataagataggccattcgtttggcacctctaaaaaaccaagcatctcggctattttaaacgaactatataaattagctgatgaggaaggtatatctaaaactggattatccaaatcagcaatatatgagaaaattcgtaaggcattaaattctatttattatacggaatga

SEQ ID NO: 2010 - protein, 216 aa, Citrobacter braakii
MTSFLKLGIFEREAKAPELNIKQLALLMCGVDPTVKTADIPEAKVEAYNIYYRQLSRWLSASKLFRGGNSTAYPADYMFALAYPLIDEDITPQPIKDRCLAAVAIIANQNKGKEHLYAMGGDELLQVGIALKSSKRGLHRKEDEKEYNDKLMGMLVKLIAHKIGHSFGTSKKPSISAILNELYKLADEEGISKTGLSKSAIYEKIRKALNSIYYTE

SEQ ID NO: 2011 - DNA, 693 bp, Citrobacter braakii
atgaaaaagattaatgccctccacgggcagggattcgctcaccctgtagccagccagcacgatatttcagcgaaccgtaaacaggttatttccggtgactggtcgcccattaatcgcggtgaatttacgcttgccgatctggggttgcgccacaacggtaacgggctggtgtggctgcgttccggcgtgtccgtgcatgaggcagaccatgatgcagggataagcggcaaggacaagaccaaaggaagggttaacggccttccttttgaatttgtcggccagtggcaggaatacccgactaaacgcagctttgccgtttcagtatctacggaactacggcgccagtattacccggacgatgccgcattcagtaaggcaatgcgtgaggctggttatgttccggtgcgcactcgcaaactgaccggaaaggatgctcgtttttggctgtaccgtgtaacgggcaatgataagggggttgtcgcagcagaatccgcgccacacaaggcttgcgcgccagttgtccagaccatatctaagcctcatccgtggtttaagcgtgtggcactcgatggtaaatggcagtacgtctacgcagatcacatccgctttctgacgaaaaagcgtcatcgcgtcgatggtgttcgggttcaggggtataccgctggcgggctgaaagtggaggctattgtatga

SEQ ID NO: 2012 - protein, 230 aa, Citrobacter braakii
MKKINALHGQGFAHPVASQHDISANRKQVISGDWSPINRGEFTLADLGLRHNGNGLVWLRSGVSVHEADHDAGISGKDKTKGRVNGLPFEFVGQWQEYPTKRSFAVSVSTELRRQYYPDDAAFSKAMREAGYVPVRTRKLTGKDARFWLYRVTGNDKGVVAAESAPHKACAPVVQTISKPHPWFKRVALDGKWQYVYADHIRFLTKKRHRVDGVRVQGYTAGGLKVEAIV

SEQ ID NO: 2013 - DNA, 438 bp, Klebsiella oxytoca
atgggaaaacttgggaaacccgctcttttagactttaccagcgctacagcaaacgagatcgtggaggcaatcgacgctggcattacaactgctcaaaatctacacgcattccgcacccgcatgggcggagctgcaaaagccgataaacattatcccgagacgcgaaaagcgttgaatatcctaaagcgtctgaaatcacagaatcgcggcgctaaaaacatcaaaaaaattctctctccgtataacgccgaactggcgaaagagcgcgatgtcttggacatcatccaacccgtgttgacggcgtggcggttgcattacgcccgtcaaggtatcgggctgattaacgaccagatcttgatcctgaaaatggttgaggcggctggcgaacttgagaagctgaccggcgaacctgtcccggacatggtgacggcggactga

SEQ ID NO: 2014 - protein, 145 aa, Klebsiella oxytoca
MGKLGKPALLDFTSATANEIVEAIDAGITTAQNLHAFRTRMGGAAKADKHYPETRKALNILKRLKSQNRGAKNIKKILSPYNAELAKERDVLDIIQPVLTAWRLHYARQGIGLINDQILILKMVEAAGELEKLTGEPVPDMVTAD

SEQ ID NO: 2015 - DNA, 411 bp, Klebsiella oxytoca
atgaagcaaacaatctttctccgaagtaaacaacagcagcaatcagcaataaactccattctcgcagcgcctctgaacaccgataaacccgtcaccatccgcatcaccgaatataaacgcaacctcgaccagaatgctcgcttccacgcgatgctgggtgatattgcgcgacagattcagtggtgtggaaaacagctaaagccggagcaatggaaagttttgctgataagtggtcatgcagtagccacaaagcagcaggcggagattgttcctggtcttgagggtgagttcgtcaatatcagagaaagcagcgcagagatgagcgtaagccgcatggcgagcctgattgagtacaccatggcgtgggctattggtcagggcgtcagattcacagacaggaggtatggatga

SEQ ID NO: 2016 - protein, 136 aa, Klebsiella oxytoca
MKQTIFLRSKQQQQSAINSILAAPLNTDKPVTIRITEYKRNLDQNARFHAMLGDIARQIQWCGKQLKPEQWKVLLISGHAVATKQQAEIVPGLEGEFVNIRESSAEMSVSRMASLIEYTMAWAIGQGVRFTDRRYG

SEQ ID NO: 2017 - DNA, 177 bp, Klebsiella oxytoca
atgatgaaaaagactggagagtgcaaaaatagaaaatgtaaaaaacctatttccgagtatggagaggccaatgaaaatcgttattgtgaagaacactatcagttatctgtagaaaaaaacaaaaaaaatcttcaaaaaagaataagtaaaattgctgacagcaaccatatccattaa

SEQ ID NO: 2018 - protein, 58 aa, Klebsiella oxytoca
MMKKTGECKNRKCKKPISEYGEANENRYCEEHYQLSVEKNKKNLQKRISKIADSNHIH

SEQ ID NO: 2019 - DNA, 288 bp, Klebsiella oxytoca
atgaccaaatccacagacgtacatgacctgttaactgcttaccagaaacaggcgcggaaaatccctgcaaagggtgtttatgcatctaggcatcggcaagttgaggtcaatgcggcccacgtgcgcaagataatgcgcaagcgtcggcggtcagtcggcaagtcaaataagcttggctgtcgctttactgcggaaatgcgcgtagcgctgatttgcgacatgaatttttgggcgctggtatgccgctctaaccgcaaccaggtaaatacgacgggagccaaccaatga

SEQ ID NO: 2020 - protein, 95 aa, Klebsiella oxytoca
MTKSTDVHDLLTAYQKQARKIPAKGVYASRHRQVEVNAAHVRKIMRKRRRSVGKSNKLGCRFTAEMRVALICDMNFWALVCRSNRNQVNTTGANQ

SEQ ID NO: 2021 - DNA, 1530 bp, Klebsiella oxytoca
atgcctcaaaataataaaagcattaccaatcaaaagcttaattcaattaagattgaaaaattaaaatgtataaatgaattgaatgagattttttttcatccacatccactaactgctattcttggtccgaatggaagtggaaagtctacgatcctccatgcattagctagcatatatatgcccgaaacgggtttccccggtgaagataataagctaggtgatttttttccacgtagtcctcaggctgaatggaatggcagtaatttcaacatcaatataacataccgccgtgatggtgttttaattgaaaatgaaacaaaaaattatgcaaaagctaattatagaggctctaggtggattcaaatatatgctaggcgcccaatgcgtgaagtctattatttaggtatcgataaatgtgttcccatgattgaatctgagaggaataataatgtaaaatatgaaacaaataatgtaactaatgccttaattactacaatgcttcacaaagcatcttatattttgaataagcgatataccagttttaatcatcatcggaaacctaatggcactcaatttattggtgtggaaattgacggtcttgcgtactcatctcttagcatgagcgctggggagcaaaagatttttcttattcttgagacagtcttcaaagcagataagaatgcccttattttaattgacgagcttgatctattgttgcatgacgaagcattaaaaaaattgatctttgttttgtcagaacatgcaattgaaaaaaataagcagattatctttacgacgcatcgtgaattgataatagatatggccgataaagttaatatacgacatgtggtgtcattgaataatcgatcatattgctttgacgaaaccaagcctgatgctattaatagattgacaggggagcaagttaaacctatagaaatatatgtagaggatgatgtagcaagtgcgattgcaaggaaaatatgctcttcacttcaagctagtagatacgtaaaaatctatatgtttggtgcggcaattaatgcatttacattactttccagttcgctcattagaaatgaggatatatccaataaaatatatatattagatggtgacgagtataatacgccagctaaaaaagcagcggcgttagatagagtattaacaggtacagaagaaagaacacgacaattgaaggttgaaggagaaggaaaggttatacaattcaaccttcctgagaacctgaagcctgaagtctaccttcatcatttaataacaacgattcctgttgatggcctagagaatgatgcattagagattatcgaagttgcgaataacatccaatacgaaatggattctcatagttatattactaatgttatcaatagattaggtcttgaccgtgcctctgggttagccaaaactattgatcttgcgtcaaagcaccctgagtggaataattatgtccaaagtgtatcggactggctaaccccattggttcatcaattgagagagaatgttggctaa

SEQ ID NO: 2022 - protein, 509 aa, Klebsiella oxytoca
MPQNNKSITNQKLNSIKIEKLKCINELNEIFFHPHPLTAILGPNGSGKSTILHALASIYMPETGFPGEDNKLGDFFPRSPQAEWNGSNFNINITYRRDGVLIENETKNYAKANYRGSRWIQIYARRPMREVYYLGIDKCVPMIESERNNNVKYETNNVTNALITTMLHKASYILNKRYTSFNHHRKPNGTQFIGVEIDGLAYSSLSMSAGEQKIFLILETVFKADKNALILIDELDLLLHDEALKKLIFVLSEHAIEKNKQIIFTTHRELIIDMADKVNIRHVVSLNNRSYCFDETKPDAINRLTGEQVKPIEIYVEDDVASAIARKICSSLQASRYVKIYMFGAAINAFTLLSSSLIRNEDISNKIYILDGDEYNTPAKKAAALDRVLTGTEERTRQLKVEGEGKVIQFNLPENLKPEVYLHHLITTIPVDGLENDALEIIEVANNIQYEMDSHSYITNVINRLGLDRASGLAKTIDLASKHPEWNNYVQSVSDWLTPLVHQLRENVG

SEQ ID NO: 2023 - DNA, 1659 bp, Klebsiella oxytoca
atgccagtaagtctgaattttcatctgacttcagttttaaaaccatccaaaaaaagaatacatgtaaaaagcgaaaattcttatggcgcaataattaaacaaattgaaaaagaaatagccaacttagatagatggcaaaaaaaagcagcgattgaatccccagaaaaaccacaaagaatacgtggtttggctggttgtggtaaaacgattattttggcgatgaaagccgcttacttgcacgcatataatccaacattgaggattgcagttacatttcaatcaagagctttgtaccaacaatttaatagattgattgataaattctatttccaacataccaatgacgatccagattataactttttgaaaattcgccatgcttggggaagtaataaagaaattggaatctattctgaaatatgcaatcaattaggtattgagccattaagtttctacgctgcacaacaaaaatttggatatgacaacgcattttcaggtgcatgtgaagaagctttaaaatattctgaaaaagtagatgttgaaccaatctatgattatgtacttattgatgaagcacaagatttcccatcagccttctttaaattagtctacaaattctcaagtgagaaaaaaagagtagtttgggcatatgatgagttgcagaatcttggcgattttaccatgctaccgccggaagaattatttggtgttactaaactaggaactccagaagtcacacttgtgaatgaaccaaataagcctcagcaagatataatgcttccaatatgttacaggaacccaccttggacactttctttagcattggcgctagggttaggtatttatcgtgagggtggtttagtcaaaatgttccatgacccatctttctggaaaaacattggttatgaagtggttggtggtcggttagaattatctaatcttgtaaacttgcaacggagtagtgacagaactccagattatttcaatagattattgacaccaaatgattccattaaatatcaatcatttgatgatcctcaagctcaagccgaatgggtagcgaaggatatattgactaatttgatggaaaatgagctagagcctaccgatattttagtagtgttcccaaacgcttatacgttaggcagtgcatcagcatatctcatgaatgaactaagaaaatatggtgttaattgtcatgttgctggaaaaaacacaagcagagatgtaatttttctagacgactcaatcgcgataactcatattcatcgtgctaagggtaacgaagctcctatggtatatgcaatgaactctaattattgtaattccggacttgaactaggaaaaaaaaggaatgcattatttaccgctatcacaaggactaagtcttggctgcgtataacaggtgttggcgagggtatgcgcgagttagttcaggaaattgataaagtatttgaaaaagattttcgtctagaatttaaatatccttctatcaaagagttagaaaagcttgatagtgcttatcaagataaaactgatagtgaaaaacaagaaatatacgaagggtttggacagctgaaaaagcttaaagctatgtttgaatccggtgaactttcgattgaagatgtgccgccagacttgagagactttttcgagtga

SEQ ID NO: 2024 - protein, 552 aa, Klebsiella oxytoca
MPVSLNFHLTSVLKPSKKRIHVKSENSYGAIIKQIEKEIANLDRWQKKAAIESPEKPQRIRGLAGCGKTIILAMKAAYLHAYNPTLRIAVTFQSRALYQQFNRLIDKFYFQHTNDDPDYNFLKIRHAWGSNKEIGIYSEICNQLGIEPLSFYAAQQKFGYDNAFSGACEEALKYSEKVDVEPIYDYVLIDEAQDFPSAFFKLVYKFSSEKKRVVWAYDELQNLGDFTMLPPEELFGVTKLGTPEVTLVNEPNKPQQDIMLPICYRNPPWTLSLALALGLGIYREGGLVKMFHDPSFWKNIGYEVVGGRLELSNLVNLQRSSDRTPDYFNRLLTPNDSIKYQSFDDPQAQAEWVAKDILTNLMENELEPTDILVVFPNAYTLGSASAYLMNELRKYGVNCHVAGKNTSRDVIFLDDSIAITHIHRAKGNEAPMVYAMNSNYCNSGLELGKKRNALFTAITRTKSWLRITGVGEGMRELVQEIDKVFEKDFRLEFKYPSIKELEKLDSAYQDKTDSEKQEIYEGFGQLKKLKAMFESGELSIEDVPPDLRDFFE

SEQ ID NO: 2025 - DNA, 258 bp, Klebsiella oxytoca
atgaaaggcacagacactaagcaggttgattatctatatcgtggaattatggattattatagtaatatttctggtctagatataacaatagatcaactaacaataagaaataaatttatatccgacagcgctatcgtttgcgatgactcacttgatgagcatatactatccctgcagaatgagtacattgctgccgatggtaacacgtcagagcagagagcaatcatagagaaaactatcgaattacttggcgcttaa

SEQ ID NO: 2026 - protein, 85 aa, Klebsiella oxytoca
MKGTDTKQVDYLYRGIMDYYSNISGLDITIDQLTIRNKFISDSAIVCDDSLDEHILSLQNEYIAADGNTSEQRAIIEKTIELLGA

SEQ ID NO: 2027 - DNA, 387 bp, Klebsiella oxytoca
atgaaaaaacctttattaattcttttgctcttcgcctctcagaccgctttcgcagacaagatcccaacctccatcgaaaatttgattgctgcaaatgacaccagaacacacagtctggaaaacggggagttaatcgtaagatatggcagaccagaggttacgctcacaatggttgaatcaatgcttaatgacatatgcggcgattactttatgaataagtggaaacctacgacgattaaaaagataacgctacttaacattacccgtgaccagggctacacaatcaatgcaggcggggaggagtgtcaaaaaactggctctatgacctatgagcaagataaagcatataaagccagcattatagaaagcgcaaagaaattcgagtga

SEQ ID NO: 2028 - protein, 128 aa, Klebsiella oxytoca
MKKPLLILLLFASQTAFADKIPTSIENLIAANDTRTHSLENGELIVRYGRPEVTLTMVESMLNDICGDYFMNKWKPTTIKKITLLNITRDQGYTINAGGEECQKTGSMTYEQDKAYKASIIESAKKFE

SEQ ID NO: 2029 - DNA, 798 bp, Klebsiella oxytoca
atggctactgtttttcgttcgttagatgtcgaaattaccggcagcggtttaaaaccgatttacgttccgtttaaaactattcccgggctgattgccggctggaggcctggacaatctggtctgaccgatatcagcggaaacgggcacacgttgacggcagtcggtgagccggttgttacggagctatcttttatcggcgatatgctgaacgggtttaaaacctcagtccccgatggactggagaggtcaatacttgccgtgtaccgtcacccggttgacgttgataccgtagcgcccgcgtcaacatatggctatccggtcagcaatctgatgcagcaagtttccacactcggaacggggttcgggattgtcggtaccagtaacgtatcggcggctctgtcgcgccgtaacgcgcttgtaggcgcaaatgtaaaggcgtcaacgctgttatctgtggcgactggcccggcagatccgttggcccgcagaacagaatttgcgtttacaggcgctgataccagcggcgctaatttatctgcgcatatgtattaccctaaaaacagtgaatcgctacaggcaggggttctgaatactgcatcaggaacgttggccacccgagcgacaggcgtagattttaacctgctgtgctgggaagatccgagcacgccagctgtaccgtactcaggtatggaattactggaggttttattttacgaccatcagctgactctggctgaatatcaggctcagtatgctcaatcgaaagcgtacgcggcatcaatcgggttttcgatttaa

SEQ ID NO: 2030 - protein, 265 aa, Klebsiella oxytoca
MATVFRSLDVEITGSGLKPIYVPFKTIPGLIAGWRPGQSGLTDISGNGHTLTAVGEPVVTELSFIGDMLNGFKTSVPDGLERSILAVYRHPVDVDTVAPASTYGYPVSNLMQQVSTLGTGFGIVGTSNVSAALSRRNALVGANVKASTLLSVATGPADPLARRTEFAFTGADTSGANLSAHMYYPKNSESLQAGVLNTASGTLATRATGVDFNLLCWEDPSTPAVPYSGMELLEVLFYDHQLTLAEYQAQYAQSKAYAASIGFSI

SEQ ID NO: 2031 - DNA, 2028 bp, Klebsiella oxytoca
atgaatattagtgaaaaaccacaatgggaaaataatatcagcatgcttgcccgccaacaaaaggttgaaggcgggagagatggtgcggctaatattcaggcccagcaactggctaaccgcacgcaatatctgaaggagcaactagatgcatataacaatatgattaaatctggagaattacccttctctgatttagccaccgcacaggccgcaatagatgccggaaaaattccactggacgcccctttctcttatcgttctgatagcgatgagatctgggcgatagaggggaaaaatgtcgcaggtactgcaacgccagttgttgataaagatggcaagcttaaggcataccccactgcgaaggcagtagaaaccgccgcagttgtggtgcgggaagttgacgacaggacctctgaagtattacgcgtaccgagaatgtttgacgaggaagggttgaggattgtcggtggttttcttgataaagaaggtcactccccggtatacggtaatgaaaatggagatgtaggggttgcgaatttaaaggtgaaaattattacggatgaccttgcgctggccgcttttcatagccgggacatgacaaccgaattttttcgcctgtcaaaaaacggcggggtcattataggtaatgtggaaatattccagattccggggcctgctggaattgtctggacggataaaaactatatcccttatgccgctgatccaaaattcgcagcatcgtcagggcaggacattccagcgatggggggcggggttactccagttgccaaatctgtcaggatcaggatgtgtgacagtatgggggtgcgatctgatgggcagtcgctttctttggggctggccactaacctgataaacaatcatgcgttatcaattattcagcgctatgcaaataagggtttcggcaaaaataataactccgataccaccgatactgacacgatggtgccgctggttgaaaaagactatacaccggtagagggcacataccctggcggtgaaactccctgcaccgccatgaccgataagcttaccgaattactgatgcaggaatcggggcttgattttggcgaaatgggcagttttttcttttcttctgcgccaggaaaaggcggtcagcctattgagaacctgatgaaaggcactgtcccctatcagcgcatgcttgatcacgtatcaaacacggttcggctttgttctgcacagggcctgacccatgccgaactggcggcggtttttatgcagggtgagtcagattacagtgcatcaactactcgggcggtgtatctggagcgtcttctgcaataccgggatgactccgctgcggataaaatggcaataaccggccaacaatttgagccgttatttctcagctatcagttaagcgcgcataaagcgtataacaaatctgttcccgtcattgctctggcccagcgagacgcagcattgcagggtaaatcctggctcagtgctcccggctatattatggattacaacgctgatcatattcacgctgtcaattactcgtatcaaatgtgggcgtattaccacggcatcctcatttacaaattattgcaggatgacctgaatgacagagaacgcggcatgcatcgcctggacgtgatcaatgagttcaggcaaggggttattaatgacctgttgctaaacgttccggtaaaacccgtggtattcgataccacctgggtcaccgctgcgcccaatatggggtttgatatccgcagcgtctctaatgtgctgattgacattatttcatctgtttcaatcgtcgggcaggatcgaatccgaattattacaacccgaccactggcggacggggagtttatctcttacggctggggacggactggcgacgccgcaggtaacgggcgagtgtccggcccgcgagggaatgtccgcgacagccagggagaccttaacggatataactacatcgacggtgccggaacaacgcgcgcacttcacaactggttaaatattattgggtga

SEQ ID NO: 2032 - protein, 675 aa, Klebsiella oxytoca
MNISEKPQWENNISMLARQQKVEGGRDGAANIQAQQLANRTQYLKEQLDAYNNMIKSGELPFSDLATAQAAIDAGKIPLDAPFSYRSDSDEIWAIEGKNVAGTATPVVDKDGKLKAYPTAKAVETAAVVVREVDDRTSEVLRVPRMFDEEGLRIVGGFLDKEGHSPVYGNENGDVGVANLKVKIITDDLALAAFHSRDMTTEFFRLSKNGGVIIGNVEIFQIPGPAGIVWTDKNYIPYAADPKFAASSGQDIPAMGGGVTPVAKSVRIRMCDSMGVRSDGQSLSLGLATNLINNHALSIIQRYANKGFGKNNNSDTTDTDTMVPLVEKDYTPVEGTYPGGETPCTAMTDKLTELLMQESGLDFGEMGSFFFSSAPGKGGQPIENLMKGTVPYQRMLDHVSNTVRLCSAQGLTHAELAAVFMQGESDYSASTTRAVYLERLLQYRDDSAADKMAITGQQFEPLFLSYQLSAHKAYNKSVPVIALAQRDAALQGKSWLSAPGYIMDYNADHIHAVNYSYQMWAYYHGILIYKLLQDDLNDRERGMHRLDVINEFRQGVINDLLLNVPVKPVVFDTTWVTAAPNMGFDIRSVSNVLIDIISSVSIVGQDRIRIITTRPLADGEFISYGWGRTGDAAGNGRVSGPRGNVRDSQGDLNGYNYIDGAGTTRALHNWLNIIG

SEQ ID NO: 2033 - DNA, 843 bp, Klebsiella oxytoca
atggcaacattacttttagcagtgattttggttagtggttttatatatgtaaacctatcactttcaacacgttatagatataagcgttccaatggctgggacgcttatttttttgtggctgcatggggaattgtctttttcctcgctggcggcttccttaccttcgctcttaacatcagcggtgggtttcgctggttttctaatgcgctgaatctgactccagacagctttaacggcatgttatccaccacaaccgataaaccgcagcgcatcaatgaaattaagcaaatcgcgtgggttgtgatttcaatagttctggcggcactgttcggttggctaaacaaacgccgtacttcaaagggggatcgccgttgggatgcactggcaaaggcagtgggaaacaatgcttttgaatcgctgctcatggaagcatcagctcgccagtttcctatcattgctacactttcatcacgcaaaatctatgtagggctggtgacttgccctgcgttggaaaatggattgtcggaacaccttgaaattctccccttgctgagcggatatcgtgataaagacgacctaacgataaatatcacgacaaactatcatcagcactatcttgaaagcggtgttatcagtgggatgtcgcgcctgaatatccaggatttccgtgtgctgatccctaaagacgaagttgaaaccatctcgttttttgatactgaaacgtataacaaatttaaagaaaacgaagcgcgtgaccggaaagactgccgcaagttgggtggtaaaaagccatccacacgcaggagaaagacttctggcgacgcagagcagggtagtgcatga

SEQ ID NO: 2034 - protein, 280 aa, Klebsiella oxytoca
MATLLLAVILVSGFIYVNLSLSTRYRYKRSNGWDAYFFVAAWGIVFFLAGGFLTFALNISGGFRWFSNALNLTPDSFNGMLSTTTDKPQRINEIKQIAWVVISIVLAALFGWLNKRRTSKGDRRWDALAKAVGNNAFESLLMEASARQFPIIATLSSRKIYVGLVTCPALENGLSEHLEILPLLSGYRDKDDLTINITTNYHQHYLESGVISGMSRLNIQDFRVLIPKDEVETISFFDTETYNKFKENEARDRKDCRKLGGKKPSTRRRKTSGDAEQGSA

SEQ ID NO: 2035 - DNA, 219 bp, Klebsiella oxytoca
atgtcaagtatcgccgcattgaagctgggtaatccagttgaacgtttggcacgggttctgaaagagaaccaggacaagctcaatctgagtaaagatggttttgtgtccgtagatttgtccaacgaagaagctatgaaagccatccgagatcagatggataagcttgaaggcatcaaaacgagcactgttaaagcaaaatattattacagaacccgataa

SEQ ID NO: 2036 - protein, 72 aa, Klebsiella oxytoca
MSSIAALKLGNPVERLARVLKENQDKLNLSKDGFVSVDLSNEEAMKAIRDQMDKLEGIKTSTVKAKYYYRTR

SEQ ID NO: 2037 - DNA, 150 bp, Klebsiella oxytoca
atgcgtgtcgaaataatgattgataaagagcagaaaattagcctggcgacactggaagcacttgaaaccgagctttaccgcaacctgacccctttgtatcccaagacggcgatccgcattcgtaaaggagtgccaacggtatcgagttga

SEQ ID NO: 2038 - protein, 49 aa, Klebsiella oxytoca
MRVEIMIDKEQKISLATLEALETELYRNLTPLYPKTAIRIRKGVPTVSS

SEQ ID NO: 2039 - DNA, 504 bp, Klebsiella michiganensis
atgaaaagcgggctaacggttagcgaggacaattacgccggtgtcctcgacgcgctaaagcagctttccggcactgacgtgctggtgggtattccggcggataaggcgcaacgtgaagaagggccgctgaataacgtcgaaattggttatctgcaatccactggcgccacggtggagatcgacggcgaaaccgtcacgcttccgcccaggccttttctcgacatggggattgaggattcgcgggataaaactaccgctcggttaaaacttgccgcacaggctgcgctggatggcaacgtagcgctggcggagcagcatcttgaagccgcagggcagattgcccgagacgccgcaaaagcggttatcggcgacggtgaccgccttacgcctctctcagagaaaacgctccagcggcggcgagagcagggattacctggcgacaagccgctttatgctcatggtttcctgttgcgggcgattaactacgtcgtgaggaaaaaataa

SEQ ID NO: 2040 - protein, 167 aa, Klebsiella michiganensis
MKSGLTVSEDNYAGVLDALKQLSGTDVLVGIPADKAQREEGPLNNVEIGYLQSTGATVEIDGETVTLPPRPFLDMGIEDSRDKTTARLKLAAQAALDGNVALAEQHLEAAGQIARDAAKAVIGDGDRLTPLSEKTLQRRREQGLPGDKPLYAHGFLLRAINYVVRKK

SEQ ID NO: 2041 - DNA, 1110 bp, Klebsiella oxytoca
atgaccaaagtttcatttgaaaataacacattacttattggcagataccatataattcgctatttagccgcaggcggtatgcaagaagtatatttatgtcatgatactgttctaaatagagaagtagttttaaaaacaccaaaagcagggactaaggatagaagatttaaacgaggcgctgaaatgggtgccagaataaatcattccaatgttgcatctactttagattactatgaagatgagaatttaacatttttgatagaggaattcatttctgggcaagatctttccaaaagaatgtctgctgaatttcattatttagacccacatacatgtgcccatgtaataaaaaatcttgcaaaagcactacatgaagctcataaagtaggaatctgtcatagagatttaaaacccagcaatataatggtatcaaatgattttaatttatctatggtcaagttaacagattttggtattgctaaactagctgaaagcgaaatcgaatctgaaatagaactttttgagaaagatgaaagtaccttaacaacatctcaaacactattaggggcagtaccttacatggcccctgaatgttgggatgactggaaaggtgcaggtcaggaaatggatatttggtcattagggtgtattgcttaccatttattatcaggtcaacttccttttggctctggtcgaagagcaattagagaagtcgctagattccaggataataatacaaaacttgtaaaaccgcaaaatattgggctccacgcatcttctgcaattttagaaaaagaattatgggctttgattacaaattgtattgtcgctgaccctcaaaaacggcctaccgctgcgaatattctagatgcattcgactctatttgttattcgaatgagccacgtcgtttcggtacaatttatgattttggtgtgccttatcgagaaacaggccatataattgacaacggtagacaagcggggatgttattcttccactcttcagaattttacggtaactcgttacctcagcaggggaaaaatgttacctattcagtatatcccggattaccacacgatagatgctctacaattctattattgaaataa

SEQ ID NO: 2042 - protein, 369 aa, Klebsiella oxytoca
MTKVSFENNTLLIGRYHIIRYLAAGGMQEVYLCHDTVLNREVVLKTPKAGTKDRRFKRGAEMGARINHSNVASTLDYYEDENLTFLIEEFISGQDLSKRMSAEFHYLDPHTCAHVIKNLAKALHEAHKVGICHRDLKPSNIMVSNDFNLSMVKLTDFGIAKLAESEIESEIELFEKDESTLTTSQTLLGAVPYMAPECWDDWKGAGQEMDIWSLGCIAYHLLSGQLPFGSGRRAIREVARFQDNNTKLVKPQNIGLHASSAILEKELWALITNCIVADPQKRPTAANILDAFDSICYSNEPRRFGTIYDFGVPYRETGHIIDNGRQAGMLFFHSSEFYGNSLPQQGKNVTYSVYPGLPHDRCSTILLLK

SEQ ID NO: 2043 - DNA, 2487 bp, Klebsiella oxytoca
atgcgtcttttggaattggctgaacagaatagaaaagaagcgaacaagctactcaaccccaagaccaaatcagcactcggtcagtttatgactccagccccgatttgtctgttcatggcaagtctgttcgacaacatcgaaagagacgttaagttacttgaccctggatgtggagtgggatcactttccgctgcattcgtagatcgagccttatccttgggggttgaaaggctagagcttgaggtctatgacatcgaagaggtgatgttgccattcctggataacacactaaaatcatgtgcaaatgagtttggaaaaaaattctcacataaaatcaacaagaaagacttcataatcgagacaagtctgcgcatagaaaaccttttcaacccggaagagattgaaacgtacagccatgtcatcatgaatcccccatacaaaaaaattctatcctccagccctcaccgaatctcgatgagcaatgcaggcatagaaacagtcaatttatattcggggtttgttgctttagcgttaaaacagttaaaacccggtggggaattagtggcaatcattcctcgatctttctgtaatggcccgtactatcaacctttccgggaacagttgctttctgaaacatccatcaagcatattcacatttttgacacacggaatactgcatttgcagaagatgaagttcttcaagaaaatatcatcattcattgcgtcaaaggtgtatcccagggtgaggttacgatcacttcaagcccaacgtctgattttcatcttgatgaagaaactgggcaaataacagctactgacatgacacaacgtaaggtttcaatcgataaaattgtaaaccctacggataaacagaagttcatacatatcgcagcaagcccgcgtgagcaggacataattgaaagattgtcaccattcacatcaacattagacgatctaaaaattcaggtcagtacaggacctgtcgttaactttcgacttcgagacgatctgcgcgaaactttagatgcagaatccgtcccgcttcttttcccccagcatttaaacgggaaagttcattggcccctcgacggaaaaaaaccaaatgctataagggtgtcagattcatcacgcccatggctctggaaaaatgagggctattttctgatcattaaaagatttagcagtaaagaagaaaaacgtcgaattgtagcaactttgtatgactcatcccttccaggtgagttgataggttttgaaaataaaaccaatgtctttcatattaaaaaagttggtatggacgcagatcttgcccgtgggctttatgtttatttgaactgtactttgttggacaaatactatcgccagtttggtgggcacactcaaataaatgcctcagacttaagatcgatccactatccgccactggaagttttgcggaaaatgggcagtgcattagacagtgaagtacttagtcagaaccaaatagatgaaataattaatagggaattagatctgatgacagaaggaaaatcgactgatccactgaaagctcaagaaaaaatcgaacaatctcttgagatattgcgtttgcttgggatgccgcgcgctcagataaatgaacgttcagcgctgaccttactcgctctccttgaccttcatcctgatggagactggtcaaaaatactacgacctatgataggtgttactccgatcatggattggtgtagagatgtatatggtaaagaatatgcgccgaacacgcgtgagactttccgccgacaaacactgcatcaattttgtgatggtggaattgccctatacaaccctgatgaacccaaccgcgcagtaaactcacccaaagcctgctatcaaatagcacctgaattgcataccgtgctgctaacgtatggtactcctaaatgggatgaatcactcaaagagcacatgggaagcatatccaccttggttgaacagtatgcaatggcaagaaaaatggaaatgatccctttgaagctgaacgatggaacggatctcatcttaagcccaggtgcccacagtcagttaatcaaggatatcattgttgagtttggccctcgcttcgccccagaagccgaagtgatatacatcggtgacactggagcgaaggaggatcattttcgcaaggagcgacttgcagagctgggggtaacagttaaccgcaaaggaaaactgcctgatgttgttctctattgggaagaacgtaattggttactgttaatcgaatcagtcacctctcatggcccggttgacggaaaacgccacggtgaattagcgaaattatttgcgaatgcaaaaccagggttggtttatgttacggcgtttccagaccgtaaagtaatggctaaatatcttatggatctatcatgggaaacagaggtttgggttgctgatgcaccaactcatatgatccatctgaatggtgatcgattcctcggtccacatacgtaa

SEQ ID NO: 2044 - protein, 828 aa, Klebsiella oxytoca
MRLLELAEQNRKEANKLLNPKTKSALGQFMTPAPICLFMASLFDNIERDVKLLDPGCGVGSLSAAFVDRALSLGVERLELEVYDIEEVMLPFLDNTLKSCANEFGKKFSHKINKKDFIIETSLRIENLFNPEEIETYSHVIMNPPYKKILSSSPHRISMSNAGIETVNLYSGFVALALKQLKPGGELVAIIPRSFCNGPYYQPFREQLLSETSIKHIHIFDTRNTAFAEDEVLQENIIIHCVKGVSQGEVTITSSPTSDFHLDEETGQITATDMTQRKVSIDKIVNPTDKQKFIHIAASPREQDIIERLSPFTSTLDDLKIQVSTGPVVNFRLRDDLRETLDAESVPLLFPQHLNGKVHWPLDGKKPNAIRVSDSSRPWLWKNEGYFLIIKRFSSKEEKRRIVATLYDSSLPGELIGFENKTNVFHIKKVGMDADLARGLYVYLNCTLLDKYYRQFGGHTQINASDLRSIHYPPLEVLRKMGSALDSEVLSQNQIDEIINRELDLMTEGKSTDPLKAQEKIEQSLEILRLLGMPRAQINERSALTLLALLDLHPDGDWSKILRPMIGVTPIMDWCRDVYGKEYAPNTRETFRRQTLHQFCDGGIALYNPDEPNRAVNSPKACYQIAPELHTVLLTYGTPKWDESLKEHMGSISTLVEQYAMARKMEMIPLKLNDGTDLILSPGAHSQLIKDIIVEFGPRFAPEAEVIYIGDTGAKEDHFRKERLAELGVTVNRKGKLPDVVLYWEERNWLLLIESVTSHGPVDGKRHGELAKLFANAKPGLVYVTAFPDRKVMAKYLMDLSWETEVWVADAPTHMIHLNGDRFLGPHT

SEQ ID NO: 2045 - DNA, 225 bp, Klebsiella oxytoca
atgaaaaaatgtacaatttcagttttaaccttgttggccctgctgacatgtcagccactgacagcacacgcaggtcggatcacgatgcaactcactgaacaagaggagacagcaaacggcaaaaccttatgccgctatgaaaattccatttactcattcagctatgtgacgcggagcaagcattgccccagcgtgaaaaccttcaacacggatgattcagactaa

SEQ ID NO: 2046 - protein, 74 aa, Klebsiella oxytoca
MKKCTISVLTLLALLTCQPLTAHAGRITMQLTEQEETANGKTLCRYENSIYSFSYVTRSKHCPSVKTFNTDDSD

SEQ ID NO: 2047 - DNA, 474 bp, Klebsiella oxytoca
atggtggaggttatacagcggtatggcctgagcgccagccgtggcgcgggttcgttaaatttgtctgccgatatcatggctcgcctgttcatcgcggtgctaaaccaaatccgctcacgacgccccatttctctgcaaaaaataattcttcgccaaaaaccagaaaagatgagaatcgcctcgcttttcagcccgattttcaggctcacgggacgctctctggagggcgctgtgattgtggtcactgttagtacctgttatgggaaagcgtcgtggtgtgcttctggtgaagcgtgggagggattgccggatggtgcaaaggctgaggccggaaatgttgtcggatgtggcaaagatcaaaggcgggaaccgggacacatcgccagcgcctggcgtcatgtggtggggaaaccttgcttatcaggtagagggaaagctactcccagagttaggtcacactattatcaactgtga

SEQ ID NO: 2048 - protein, 157 aa, Klebsiella oxytoca
MVEVIQRYGLSASRGAGSLNLSADIMARLFIAVLNQIRSRRPISLQKIILRQKPEKMRIASLFSPIFRLTGRSLEGAVIVVTVSTCYGKASWCASGEAWEGLPDGAKAEAGNVVGCGKDQRREPGHIASAWRHVVGKPCLSGRGKATPRVRSHYYQL

SEQ ID NO: 2049 - DNA, 222 bp, Klebsiella oxytoca
atgaaactttcgcttgatgacgaaacctacgcgattctacgcgaggagtcggatcgcctggggatgccggttcccagaatgatccgcatcatgtgccaggacatggcgcagaatattaaaaaaagagacgccgcgaacggtgaacgcctgataacgggccagccactacccgaatcactaacgaacccacagggaatgaacaatgagagtaaaaaaaactaa

SEQ ID NO: 2050 - protein, 73 aa, Klebsiella oxytoca
MKLSLDDETYAILREESDRLGMPVPRMIRIMCQDMAQNIKKRDAANGERLITGQPLPESLTNPQGMNNESKKN

SEQ ID NO: 2051 - DNA, 162 bp, Klebsiella oxytoca
atgaaaggcatgagcaaaaacccgcagtttaacctgcgctggccaaaagagattctggatatggttcgcaaagttgctgaggaaaacgggcgttctgtcaactcagagatttatcagcgggtgatggaaagctttaaaagagaagggcgcgttggcgcttaa

SEQ ID NO: 2052 - protein, 53 aa, Klebsiella oxytoca
MKGMSKNPQFNLRWPKEILDMVRKVAEENGRSVNSEIYQRVMESFKREGRVGA

SEQ ID NO: 2053 - DNA, 288 bp, Klebsiella oxytoca
atggcttttgcgaaaaaaatcaacattacgattgtcaagaatacgcctgccggtgtatttatcggggaagaagtgcaggaaataaccgcatcatttaaagtgaaggttgttaatatctctgaggaatctgcttttgcagacttatatgttaattatggtgacggggactggaagtttcaccagtcttacaatttcagtcccgattattcctcaggcattgatgcgcttatgcaggcggaaaacgctgtacggctccttgatgaatatgctgacgctataagtgagtaa

SEQ ID NO: 2054 - protein, 95 aa, Klebsiella oxytoca
MAFAKKINITIVKNTPAGVFIGEEVQEITASFKVKVVNISEESAFADLYVNYGDGDWKFHQSYNFSPDYSSGIDALMQAENAVRLLDEYADAISE

SEQ ID NO: 2055 - DNA, 2115 bp, Klebsiella oxytoca
atgacagttaaatattttgccatccttacgagtcagggggcagccagactggcaaatgcggcggcgcttggcgttaagctcaatattacccaaatggctatcggtgacgggggtggtgagctttatacgccggaggactcgcaaacaaaattaaaaaatcagctgcgcattgcgcctctgaatatgctgagtattgaccccaaaaatgccagtcagattatcgcagagcaaataatacctgaaaatgaaggtgggtactggattcgtgaaattggcctttatgatgatgacgggattctgattgcggttgcaaattgccctgagacgtataaaccaaaattacaggaagggagtgggcgcacgcagactattcgcatgattttgattgtgtcgagtacagcgtcaataacgttaaaaatagacccgtcagtcgtgctggcgacgcgtcagtatgttgatgaaacctttattgaaattaaaagctatgcagatgagctaatcagtaagcacgtcgcggaacataacccgcactcgcaatatccggtgattgaaaacgccctgaaagaaatggctgatgaggggcttgttgatgaggttctggaaaatctcagattaagtgatgtcgtaacattgcgcgaagaactggcctctgatggtggaagtatactggttaacaccgaaacggggcgggatataggtacctctgttcgtgccgcatccggtgcatcacatgctttatttcctaatctgatggctaaactgaatgcgtataaacatggtgcaagtgacagccagtcaatgtacaggttatacgggtttgggtcatccgttggggacggtgcgacgatagggggtaaagaatctcctgaaacacctgttgccaagtttttcgaatttatgaatgacgcaatcaactttggcgggatctaccctgtaagttttttaaataaatccgtcagcggtagcgcgattaataattttaatcaggaacagtggcccgctgttatctctgagggggtttaccctgatattgcgctttttgtatacggcatgaatgattttccgaccgcacaatataacgccgggcgtaccttcagcgaggttaacggattcgtcaatagcatgagaaatgctatacgcagcgttcgtgctgcggggggtgacgttgtcctgacaacaaccccgcaccccaatttgtcaatttatagctggagcatgcctgacggtattgctcaggtctggccctcatatgttcccgcaccggtttctgacaatgacattattccttctgccgcacattcgaacgtcacgtttgaatggaacggggtaaatattcaggctggcgtccgttttctgcgtggtaatgatgctatcagaaggttagccgtagaaatggggtgtgtgctgattgatgtcgaaaaatactggtttgatgctgtcgcaaaatacggggagtcggcgttattcgatgcaggtcagacggtacaccctaatttattagggcatcaacagtcataccaactggcgtttaaagagttttttgcaaatgtggctcacaatggatggactgcgccggactcatcgcataatgatgtttttgatgttggtggggtgagtcaatatccaaaccctaaagagggggatatagatttacaggcgggagggtatcgaaagtatgcgcatgtattgcgtgataagttttcgagaatacttgaacgtactgaccagtcaggtaataaagtgaaaacatcttataccagtcaataccccacctcatcggtgccgggatacaaacaggactggtctgaatatcacacccgcacaaaggggctgttttcagcaggtgaatcatttgctatcgcgattacaaacagggaaaccaaaaagttattaattgactgctggtcatcagcgcaaaacggatgggctcaatgctatgaattgttcgtttcaaacagggagggcgttattgaatatacggttatcggggagcatgataacacccccggaaagcaaaggctgtttgcattaagctcgggagagggggtgcttatggttaatgtcaagctaagtaattcgtcattaaaatacaaaatctgtggctttggattgtaa

SEQ ID NO: 2056 - protein, 704 aa, Klebsiella oxytoca
MTVKYFAILTSQGAARLANAAALGVKLNITQMAIGDGGGELYTPEDSQTKLKNQLRIAPLNMLSIDPKNASQIIAEQIIPENEGGYWIREIGLYDDDGILIAVANCPETYKPKLQEGSGRTQTIRMILIVSSTASITLKIDPSVVLATRQYVDETFIEIKSYADELISKHVAEHNPHSQYPVIENALKEMADEGLVDEVLENLRLSDVVTLREELASDGGSILVNTETGRDIGTSVRAASGASHALFPNLMAKLNAYKHGASDSQSMYRLYGFGSSVGDGATIGGKESPETPVAKFFEFMNDAINFGGIYPVSFLNKSVSGSAINNFNQEQWPAVISEGVYPDIALFVYGMNDFPTAQYNAGRTFSEVNGFVNSMRNAIRSVRAAGGDVVLTTTPHPNLSIYSWSMPDGIAQVWPSYVPAPVSDNDIIPSAAHSNVTFEWNGVNIQAGVRFLRGNDAIRRLAVEMGCVLIDVEKYWFDAVAKYGESALFDAGQTVHPNLLGHQQSYQLAFKEFFANVAHNGWTAPDSSHNDVFDVGGVSQYPNPKEGDIDLQAGGYRKYAHVLRDKFSRILERTDQSGNKVKTSYTSQYPTSSVPGYKQDWSEYHTRTKGLFSAGESFAIAITNRETKKLLIDCWSSAQNGWAQCYELFVSNREGVIEYTVIGEHDNTPGKQRLFALSSGEGVLMVNVKLSNSSLKYKICGFGL

SEQ ID NO: 2057 - DNA, 183 bp, Klebsiella oxytoca
atggttggcgaacatttcagccgaacgcagcaaaagtgggcttgtgtgcaatttattgccgaggtatctctgattgcaaactgcaagccatcagacttaaagctcgcgctcactctcattgcagacctagcaaacagcgaaaataacgaaaccgaagatgatattttttataaggctgattag

SEQ ID NO: 2058 - protein, 60 aa, Klebsiella oxytoca
MVGEHFSRTQQKWACVQFIAEVSLIANCKPSDLKLALTLIADLANSENNETEDDIFYKAD

SEQ ID NO: 2059 - DNA, 372 bp, Klebsiella oxytoca
atgtcagatgcaaaatcaatctcgacgcatgattcgcaaaactcacaaaatcaaactgtgctgttagatccaacgcagtttgatgccatcgttaccgccatgctgccagccctgcagacaatgattcgcgccgctatgtcagacacgatgacagtgaaagacttcgccgccactcgcggtgttagcgagcgtctggtctggcaatggctcgatgatggcatccttctcaaagctccgaccaaagacttttccaacaaagaggaagctgctaaacgaagccgaaccctcgtaaatgtaaaagcatggcgcgataagctgactcaacaagcgattgattgtcgctacatcgaccagcgcaccgctcttaactga

SEQ ID NO: 2060 - protein, 123 aa, Klebsiella oxytoca
MSDAKSISTHDSQNSQNQTVLLDPTQFDAIVTAMLPALQTMIRAAMSDTMTVKDFAATRGVSERLVWQWLDDGILLKAPTKDFSNKEEAAKRSRTLVNVKAWRDKLTQQAIDCRYIDQRTALN

SEQ ID NO: 2061 - DNA, 339 bp, Klebsiella oxytoca
atgaaacgtaaactttttttaactctacttttaacactttcatttggtgtagctgctgctgagaagagtaaagagatagacggcgctgcatatggtgacaagtggcctctaacctttgaaaaggcaaaggtatcatgtgttaaccgtgcttatgcttttgtgtatgacattaaaactgatgatagatatccactgaatggcatggcggtagatgctgttaaatcaggaaagctggagggttctaacttagatgacgtatggaaggatgaccctgagtatgacggcgttaaaatttcaatttcaccggtgattgatgccgctacagccctttgtaattaa

SEQ ID NO: 2062 - protein, 112 aa, Klebsiella oxytoca
MKRKLFLTLLLTLSFGVAAAEKSKEIDGAAYGDKWPLTFEKAKVSCVNRAYAFVYDIKTDDRYPLNGMAVDAVKSGKLEGSNLDDVWKDDPEYDGVKISISPVIDAATALCN

SEQ ID NO: 2063 - DNA, 1227 bp, Klebsiella oxytoca
atggaaaataaaaacaagataaaagatgagaaaaaacacactttgtggattaattatttcttagagaagttattaacacacacagaactgaatccaccgtttaaaatcaaaggggatatcgcaagtgatttctccaatcgttgcaatatttacaatgaccttcttgatgttgtaatcaaagaaaacgtaaatgagtgtggacgctaccttaaacccttcattagcaggataaaaaatattcaaacttgtatccagaagtctttagaggagtttttatccggtgacattaagtcagcatatgatgtatttgatgaagtgatgtctaaagaggcgacagtaactcaactgaattatatcagcgtattgcttaaggatatttgtagtaaagatgaacctctatatcgagtaagaaaatcagaatctgccttaacagaccacgaacatattttccacataccattttcaaaaagatatcttgttaatgctcagcgctattctgttgctggtcaaccatgtttatatcttggcacatctttatatgtttgttggcaagagatgggaaaaccagattttgacaaactatacatatcatcgtttattactgatgatgataaatcaaaaatattaaattttgcatcacaccacctaacgcttccaataaaaaacacagccagtgatgaacaattatattttgacaatagaactaaagcatcttattttatattttggccattaataatagcttgtaattatctgaaaacaaatgagagtgcctcattcacgccagaatatatcattccgaatcttttaatgcaatggattggacgtcgagtcaaatccccaattgctggaatagcatatttttctactaaaatgcccacatcaagaaatagcagatactcaatcaatgtcgtattaccacctaaggcgacatataaacagtcggtaacgaacgaatactgtccaagattgagttcatcgtttgaatttacagcaccaatgtcttggcaagtacttaaaactcttgattatcaaaaccatttacccctttctaaagagcaagagaatgcaatcatgtatctgaagaaaaaagaaaagctctcaggtattgcaaactttgaggaagatatcgtcaaactatatccacttactgatttttacaagttacaactactagtagatcgactgtttaagcatcaaaaaatcgttcaaaaggtgtcgagctaa

SEQ ID NO: 2064 - protein, 408 aa, Klebsiella oxytoca
MENKNKIKDEKKHTLWINYFLEKLLTHTELNPPFKIKGDIASDFSNRCNIYNDLLDVVIKENVNECGRYLKPFISRIKNIQTCIQKSLEEFLSGDIKSAYDVFDEVMSKEATVTQLNYISVLLKDICSKDEPLYRVRKSESALTDHEHIFHIPFSKRYLVNAQRYSVAGQPCLYLGTSLYVCWQEMGKPDFDKLYISSFITDDDKSKILNFASHHLTLPIKNTASDEQLYFDNRTKASYFIFWPLIIACNYLKTNESASFTPEYIIPNLLMQWIGRRVKSPIAGIAYFSTKMPTSRNSRYSINVVLPPKATYKQSVTNEYCPRLSSSFEFTAPMSWQVLKTLDYQNHLPLSKEQENAIMYLKKKEKLSGIANFEEDIVKLYPLTDFYKLQLLVDRLFKHQKIVQKVSS

SEQ ID NO: 2065 - DNA, 150 bp, Enterobacter cloacae
atgcagaacagcagcattatggcgttagcgctcgcgctgtgcaacgtagagcaaggtcaagcggttaaagtgccagcaatggccgggagtaatttccatcttgccatttacaaaaccttacatttgtgtgattttgaaccatttttttaa

SEQ ID NO: 2066 - protein, 49 aa, Enterobacter cloacae
MQNSSIMALALALCNVEQGQAVKVPAMAGSNFHLAIYKTLHLCDFEPFF

SEQ ID NO: 2067 - DNA, 1518 bp, Klebsiella oxytoca
atgacactggcattcagttacgtaaggttcagtaccaagcaccaagcgtcaggtacttcgttagaacggcaggtaaatgcttctaagctgttctgttcacaaaatggactaactctgtccaatcagtcttatcatgacctaggcatctcagggttcaaaaacgtcagacgcccagagctagagcaaatgcttgaagccattcaaactggtgatatcccatcaggcagttatatcttgattgaggcgattgaccgattaagtcgtaaaggaatcagccatacacaagacatcctgaagaaaatccttcagtacgacgttaaggtcgcgttcgttggtgaagatgccaaaacacttcaaggacatattctcaataaagactctttgaacgatttaagctcagtgatattagttgcactagcagctgatttagcgcacaaggagtcattaagaaaatcaaaacttgttaaagcttcaaaggctattgcccgtgaaaaagctgctgatggtgaaatccttcccggtaagtcagtgttctatcttgattatgacaggaagaacaaaaagtacgtgttcaacaaacgtgttgatttagcgagaaaaattattcaaatgcgtgttgaaggaaaaggcgttagaaagattgcccgcatactaaatgaagaaaatattcctggtccaactggaaaacaatggtaccagatgtcagtaaagaggttgttaaaaagcccagttctttacggagcttatcagacacaccagattattgaagaaaaatacattcctgtttcattgattgaaaactactaccctgccctgattgattatcaaacattttcacaaattcaatttgatgataaacgagtatcaaaaggaagaccgtcaagacacaaattcagtggtgttctttactgtgaatgtggtgctgttctatgcaggaaagttaatacatcagtaaccaaaaaaggaattaaagagtatcagtactttaattgcttcggtgcatttgaaagcaggtgtaagaacaacaaagctattagagaccttcatataccacttgaaaaggctattgataaactacagattaaaactcgttcagttaagaatattaagaatgaacagataatagctaagcgtgaaaagatagaccaactgaacaaaatgcttcttgaattggaaatgcctccagtttctgtacttaaaacgataagtacgctggagaaagaactacaagaacttcttgagcaaccagatgttcaaccaccaaaatcagctgatatcaagacattggttgaaataaaagacgctgaacagtataatctatacctaaaacggctggttaaaaggataactatcttccagttgaatggtcctaagaatatcaggattaagattgaaaaaactgacgggcattatcagagctttatagtcaataacggcaagataatgttcaatgcagatactaaagctctacaagagcatttacgtaaactaaaagaaggaacttctgatgaagtatga

SEQ ID NO: 2068 - protein, 505 aa, Klebsiella oxytoca
MTLAFSYVRFSTKHQASGTSLERQVNASKLFCSQNGLTLSNQSYHDLGISGFKNVRRPELEQMLEAIQTGDIPSGSYILIEAIDRLSRKGISHTQDILKKILQYDVKVAFVGEDAKTLQGHILNKDSLNDLSSVILVALAADLAHKESLRKSKLVKASKAIAREKAADGEILPGKSVFYLDYDRKNKKYVFNKRVDLARKIIQMRVEGKGVRKIARILNEENIPGPTGKQWYQMSVKRLLKSPVLYGAYQTHQIIEEKYIPVSLIENYYPALIDYQTFSQIQFDDKRVSKGRPSRHKFSGVLYCECGAVLCRKVNTSVTKKGIKEYQYFNCFGAFESRCKNNKAIRDLHIPLEKAIDKLQIKTRSVKNIKNEQIIAKREKIDQLNKMLLELEMPPVSVLKTISTLEKELQELLEQPDVQPPKSADIKTLVEIKDAEQYNLYLKRLVKRITIFQLNGPKNIRIKIEKTDGHYQSFIVNNGKIMFNADTKALQEHLRKLKEGTSDEV

SEQ ID NO: 2069 - DNA, 399 bp, Klebsiella oxytoca
atgaagtatgataaagagtattttcttggtgaacatgagtgtgaagaaggctgcccttgtgagtgttatagacacccagagctttatatagatgataaaggcaactggagatcatcattattttctatgtatgaggcgaataaaaatgaaattgtccctcatcgacttttcttagatgaaaatggaaaatacaacattgaacttgctgagaatgaaacgaacccgatgactaaggcatttagtattagcaaagaaaaggccgtggaatggaatagtaaagatattacagagaagaaatattttgatgggaataacgttaagccaatgacagaatatatctacatcaaacgctcaactatatcagatgaagatatagagaaattattaaaagaattataa

SEQ ID NO: 2070 - protein, 132 aa, Klebsiella oxytoca
MKYDKEYFLGEHECEEGCPCECYRHPELYIDDKGNWRSSLFSMYEANKNEIVPHRLFLDENGKYNIELAENETNPMTKAFSISKEKAVEWNSKDITEKKYFDGNNVKPMTEYIYIKRSTISDEDIEKLLKEL

SEQ ID NO: 2071 - DNA, 315 bp, Klebsiella oxytoca
atgaacttccctacatattctcaagacgaacttaaaaatattactatcaatggaatttgcccagaaagtatgacacttctgtatgattgcgctgatatcaaaattgaacggtttaaaaagaacttgctgaacgataaagacgtatttgttgtaagtacacaaaagaaaaaacctgtgcatcgctttaaagagtaccaagaagtcacggtcaatagccagtatctctttggcgatgttgaggcttattgttttggcaagacagaatttatccataaaggatttaggatgattgcttattactttcaactaaaataa

SEQ ID NO: 2072 - protein, 104 aa, Klebsiella oxytoca
MNFPTYSQDELKNITINGICPESMTLLYDCADIKIERFKKNLLNDKDVFVVSTQKKKPVHRFKEYQEVTVNSQYLFGDVEAYCFGKTEFIHKGFRMIAYYFQLK

SEQ ID NO: 2073 - DNA, 450 bp, Klebsiella oxytoca
atgacgcaagatcgcgagttccccgctttcatggccggccagttcctgcaccaccacacgctcagctttccagcgacgcgggcgctcgctgtcttgtccgttatcaaggttgccaccactggcgctcagcagcggcaatgcggcaaccacctcaacagcctcagagccgtttgcggcatacaaatcacagaccggcggaatattatccgccagatccgtatcaaccatcgtgccatcctggaaacgtacgaccagacggatggcattcaggcgcgcgagcgccagtgcagcatcatcaaattctgccgcaaccacgccccagggatgagaaaaccccatccgggcgaccatgtcggcaacgtattcactccagcgggcctgctgctggaattgttgcggggccagagcggccccatcctcccaaagtgggcggtaaattttcatccctga

SEQ ID NO: 2074 - protein, 149 aa, Klebsiella oxytoca
MTQDREFPAFMAGQFLHHHTLSFPATRALAVLSVIKVATTGAQQRQCGNHLNSLRAVCGIQITDRRNIIRQIRINHRAILETYDQTDGIQARERQCSIIKFCRNHAPGMRKPHPGDHVGNVFTPAGLLLELLRGQSGPILPKWAVNFHP

SEQ ID NO: 2075 - DNA, 660 bp, Klebsiella oxytoca
atgtctgagattaataatatcaaacaaagatttgaagagttatgcaagaaccctgattttatcagtgcatataacgatttcaatggcacaagtcttgcctcactaagtcttagccagttattttctgttggtactttgttccacttcgtaagtatcaaaactcatgataatcaagaactactcattacagatgcttactttgatgttcaatatcaaggaaagacttatcttgctactggtgattttacggacattagtactattcaagaaagtaaagagattaataacattggtatgacagttcgtctatcaaacgtgcggactgagtatatcagtcttattcgttccaaagctcttgataactctgaagtaaaaattgatatcggctttattaacccaaacaacggttcagttcagacgagttttaacatctttactggtgtcattgataagttaagtattcaacttgattataatgatgcagaatgtaagaacgaaacagaagcaactttagatagtatctgggctgtacttgaaaaatcagctcgtaatcatgcatcagatggtgtccatcgtgcttatccaggtaatgaaaatgacagtttctttgctcgaattggtaagtggaatagtgaagcacgttggacgtcagtcaaataa

SEQ ID NO: 2076 - protein, 219 aa, Klebsiella oxytoca
MSEINNIKQRFEELCKNPDFISAYNDFNGTSLASLSLSQLFSVGTLFHFVSIKTHDNQELLITDAYFDVQYQGKTYLATGDFTDISTIQESKEINNIGMTVRLSNVRTEYISLIRSKALDNSEVKIDIGFINPNNGSVQTSFNIFTGVIDKLSIQLDYNDAECKNETEATLDSIWAVLEKSARNHASDGVHRAYPGNENDSFFARIGKWNSEARWTSVK

SEQ ID NO: 2077 - DNA, 720 bp, Klebsiella oxytoca
atgttgaacaatatagaaagaatgaaatatgcattaaccgaatgggctattaaagagggcgtatttgatgatgcaactttctatactcaaagtgagtggaaagaacgtggagaggattttcacaatgatgcggtaatggtgcttgtgatcgatggtagtggattattccatctgcttaattatggctgtgacacaactgaatttgaggatttggtcgaatcctttgggttcttctatgaacaaggttatagctggagcgttggattttatcctgtagatgactatgactacagaagacagaccggaagttaccgttctaaattacgtgatcctcggtggttaaggaaatccgagttagttaaaaaacaagcggggaatcactgccaagattgtggagcagtgggacgtctcgaagctcatcattgttattatacgacgatgagcaaaggttatgaaccatgggagtatcctctgagcgcatttagagcactttgccctacatgtcatgataagcgtccaatacctgaaatcagagcacgtgctttcttggctagattaactcattcccaactaactggattgcttgagggattagacaatggttttaatcgatttgaagcagattcttttattgagtttatgaagaaggccacttttgacaagaagcgcatggaagaagcgttattacttctaaagaaaaatggtgaaatctatgattaa

SEQ ID NO: 2078 - protein, 239 aa, Klebsiella oxytoca
MLNNIERMKYALTEWAIKEGVFDDATFYTQSEWKERGEDFHNDAVMVLVIDGSGLFHLLNYGCDTTEFEDLVESFGFFYEQGYSWSVGFYPVDDYDYRRQTGSYRSKLRDPRWLRKSELVKKQAGNHCQDCGAVGRLEAHHCYYTTMSKGYEPWEYPLSAFRALCPTCHDKRPIPEIRARAFLARLTHSQLTGLLEGLDNGFNRFEADSFIEFMKKATFDKKRMEEALLLLKKNGEIYD

SEQ ID NO: 2079 - DNA, 411 bp, Klebsiella oxytoca
ttgcgcggcaaactggtgtatcgcctggccaccgatactctggttgtcgtcgataaactcaaattcgccatagccagaaaggtgctctttcatcgcttcaataaacaatgcgctaggagagaacggcgcgcccaccacacctccgccagtggacccagcccccaggcctatggaggagccgggcgtggttataattatgcgcttcttggttacagttctgacgccattgctgaacgaaattttaccgaatggcgaggtattggcctgagttccgtcaccgataagctttttgctcagtttaacgtaggggtcagtgattgcaccctgcagagtggtgacatcgcttatgagattcagaatgtcggtagtcgggtccccggcatacagcaatttaaagttattctgtggtga

SEQ ID NO: 2080 - protein, 136 aa, Klebsiella oxytoca
MRGKLVYRLATDTLVVVDKLKFAIARKVLFHRFNKQCARRERRAHHTSASGPSPQAYGGAGRGYNYALLGYSSDAIAERNFTEWRGIGLSSVTDKLFAQFNVGVSDCTLQSGDIAYEIQNVGSRVPGIQQFKVILW

SEQ ID NO: 2081 - DNA, 252 bp, Klebsiella oxytoca
gtgaacaaccttttttaccgatgcactggcgcgaatcagaccggttcccctggtggctatcaggacgtcttctgtattgctccgggtatgattgccaccgttcatgcgcgtctcacggtccaacatctcaagcagatcattgaagtccaccagctctccggcgttaagcgccttgttgaagcggtcagcagcgttctgattcagttttacccaggtaaagcctttcattgttctgacccggaaaccccatga

SEQ ID NO: 2082 - protein, 83 aa, Klebsiella oxytoca
MNNLFYRCTGANQTGSPGGYQDVFCIAPGMIATVHARLTVQHLKQIIEVHQLSGVKRLVEAVSSVLIQFYPGKAFHCSDPETP

SEQ ID NO: 2083 - DNA, 297 bp, Klebsiella oxytoca
atgcgacggtgcatagaactcatatttgctcaatgcaccaatggcgatcagttccttcatcgtcgttggcttaatcagacgctggtagtaattgcccaggaatttagcgaaaggcgtaccggaaaggccgatcaccttcgttgctgtgttgcgagtaagattgtcgataacctccagcagttttttgcgcttcaggtgggcttcatcaacgatcaacaggtcaatattgtccgggaactcacggcgaatcagcgtatccgcactggcaatctggatcagagcagtggggttgtatga

SEQ ID NO: 2084 - protein, 98 aa, Klebsiella oxytoca
MRRCIELIFAQCTNGDQFLHRRWLNQTLVVIAQEFSERRTGKADHLRCCVASKIVDNLQQFFALQVGFINDQQVNIVRELTANQRIRTGNLDQSSGVV

SEQ ID NO: 2085 - DNA, 324 bp, Klebsiella oxytoca
ttgattctgaaggcgatgatatgccgcgccacgttcaaggggagtaagtgccagcccttgcgagcttgtcaccatgaaagcaatcttatcggcttcagtaccgacaaaatctttgcattcgaggcgcacaatgtcgtggcccatagcgatagcagcgagcgcaccgtgatagcggtggtgaccgtcgatcaccttcacaccacgctcagtaacttctacggccagcggcggaatatattcaccggcgataaacgcgtcgcggaactcatcgacatgcgcctgattcagttcgcgaacgttgtaaccttcttccgcataaattga

SEQ ID NO: 2086 - protein, 107 aa, Klebsiella oxytoca
MILKAMICRATFKGSKCQPLRACHHESNLIGFSTDKIFAFEAHNVVAHSDSSERTVIAVVTVDHLHTTLSNFYGQRRNIFTGDKRVAELIDMRLIQFANVVTFFRIN

SEQ ID NO: 2087 - DNA, 594 bp, Klebsiella oxytoca
atgaaattcgaagaatggttatcgcaacaaggcggggtaattgaggtcgattgtggctgtgttaccacggaggcgttttaccactggatgcgtgtggcttatgaggctggcaccctcaccaatgaggataccaagcagactggcaactctccggtaatcggcattgacctggcggccggtccagaccgtactgtcgaggttcgctacgttgcgcctcctggttacgtgatggtgccgaaggagatgactgacgctattggagaggctatagccatgcatgcgaactgttgtggtggtatagcgcttgatatttacgaagccatgctcgaagccgccccgcatgatacccccgctctgaactcgctacagagcgtcgatagtgttgtaggtagatgggttccggtaagcgagcggatgccggaagatggccagcacataatcatattttgcgatgacgcattcgttttatctgctcaataccgggatggcgaattttttgacgttgttcgtgacggtgatgagttttttgaaactaccagcaggtgcgtcactcactggatgccacttccagccgccccgcaggaggtaaggtga

SEQ ID NO: 2088 - protein, 197 aa, Klebsiella oxytoca
MKFEEWLSQQGGVIEVDCGCVTTEAFYHWMRVAYEAGTLTNEDTKQTGNSPVIGIDLAAGPDRTVEVRYVAPPGYVMVPKEMTDAIGEAIAMHANCCGGIALDIYEAMLEAAPHDTPALNSLQSVDSVVGRWVPVSERMPEDGQHIIIFCDDAFVLSAQYRDGEFFDVVRDGDEFFETTSRCVTHWMPLPAAPQEVR

SEQ ID NO: 2089 - DNA, 204 bp, Klebsiella oxytoca
atgcgcaccattgaggaaattggcaggcatgcagcattgctgaagtggaagcgtcagtttggcccatttgagaaatgcccggtctgctacgggcttctttcttcctgcgagctgtgccacggtagcggcaaggtgattcaggaagatatcgactcttggaatgacccaattgccaagattagacgggaggcgactgatgcctaa

SEQ ID NO: 2090 - protein, 67 aa, Klebsiella oxytoca
MRTIEEIGRHAALLKWKRQFGPFEKCPVCYGLLSSCELCHGSGKVIQEDIDSWNDPIAKIRREATDA

SEQ ID NO: 2091 - DNA, 513 bp, Klebsiella oxytoca
atgaattgggaatttactagtgccgactggaacctggttattgcagcagttacggcatttggtggcttggctgcggcatatgcagcattcttaagtagacagacagcaactaaatctcttcaactgcaaagcagaatgaatgcttatgagtcattaaagaactgcgcagagagggctaacggatatgctaaagggaagcaaggttctgattggacatttcatgatggagcaaacattgtcagaagcctgcgacaggcgatgaaaatcatacagggttatagtgagtacggtgatgacaaggaaagggaagaattaaaagaatactttataaatcaaattaatatggagctatttgaagagttgaaccaccaaaatgcgcctggagctttctttaaagggacaggggattcgtctgttgaagttaatatttacgagcaatgggaagatattgtcgcttttttcaacttaatggttgccacagatgctgatcttgcagattcaagatctgaataa

SEQ ID NO: 2092 - protein, 170 aa, Klebsiella oxytoca
MNWEFTSADWNLVIAAVTAFGGLAAAYAAFLSRQTATKSLQLQSRMNAYESLKNCAERANGYAKGKQGSDWTFHDGANIVRSLRQAMKIIQGYSEYGDDKEREELKEYFINQINMELFEELNHQNAPGAFFKGTGDSSVEVNIYEQWEDIVAFFNLMVATDADLADSRSE

SEQ ID NO: 2093 - DNA, 483 bp, Enterobacter cloacae
atgagcccagactcatggagtgctatcgctggttgcgcctctgccgtcgctgctggcatcagtctttttgttacatggaaaggaattcattttcagaagcaagcattcagagaaacactaagaagaaatattcaggatgcactcacttatcaggccgaaagggcaaatttatcttctacggggaaaagtgatgctgaatggactttcccgcaatttgcgaacattattctcgccatcgatacggcgagaaacatggtatctcgtttggataaaaacgcaggaatgagcaaggaagaagcgggcgaatatttcttagaacggctgaaccacaatatcgtaaactcatttagaaagggatcaccgcctgatggggcctttcaaagcaaaggtcctatatcggagattcgtgaattagttacgctatggaatgctaatgcccattttctggggtttagagatgtgaattttagccctgacctttga

SEQ ID NO: 2094 - protein, 160 aa, Enterobacter cloacae
MSPDSWSAIAGCASAVAAGISLFVTWKGIHFQKQAFRETLRRNIQDALTYQAERANLSSTGKSDAEWTFPQFANIILAIDTARNMVSRLDKNAGMSKEEAGEYFLERLNHNIVNSFRKGSPPDGAFQSKGPISEIRELVTLWNANAHFLGFRDVNFSPDL

SEQ ID NO: 2095 - DNA, 261 bp, Klebsiella oxytoca
atgaacattgctacttatctaaatacggggttagcgcttcttggctgggtttacatcatgtcaaaaacagttgagtggataattaaaaacgggctgaagcagtgggacaagcgccgccatcagtctcgccgccagaaagctgtaaatgagctttatgaagcgtttgaacttgacaagattgagccaggttcaacagttcgcatggcgacccaaggcggcctgacaatcatgatgatgcgcgttgagggggccgacaaatga

SEQ ID NO: 2096 - protein, 86 aa, Klebsiella oxytoca
MNIATYLNTGLALLGWVYIMSKTVEWIIKNGLKQWDKRRHQSRRQKAVNELYEAFELDKIEPGSTVRMATQGGLTIMMMRVEGADK

SEQ ID NO: 2097 - DNA, 195 bp, Klebsiella oxytoca
atggctgaaaaatcatctttggaacgtctgcgggaaatcaatgcagagaataaacgcgtagttagagtcagcatcggagttcttaaagcggccagaagtgaaattaacgctcatgtttcagttaacgggaagggtgtaatgacggacatggttcttaactctctgaacgcgattatcgaaggagccaaccaatga

SEQ ID NO: 2098 - protein, 64 aa, Klebsiella oxytoca
MAEKSSLERLREINAENKRVVRVSIGVLKAARSEINAHVSVNGKGVMTDMVLNSLNAIIEGANQ

SEQ ID NO: 2099 - DNA, 264 bp, Klebsiella oxytoca
atgaccagcaaattaaccataaccgatcatcgccttgctgcgattcacgctgaatgtgaagagcgtgacccggcgatagtagaaatcagggcgatgattgaggagctacaggaacgccgcaaacagtcgggcgaattaacgatgtgggttaagcgattagcccgttcactgaaaaacgcgaatccagacagtaagttaccacgcgacgcgatggactacttgactgcaaaggggctgattagtgtgggggatattttgcgatga

SEQ ID NO: 2100 - protein, 87 aa, Klebsiella oxytoca
MTSKLTITDHRLAAIHAECEERDPAIVEIRAMIEELQERRKQSGELTMWVKRLARSLKNANPDSKLPRDAMDYLTAKGLISVGDILR

SEQ ID NO: 2101 - DNA, 234 bp, Klebsiella oxytoca
atgagaatcgaagtaaccatcgacaaagacaaaaaacttcctgacggagctgtgcccgccttgcagaaagaactgcttcgcagaatcagcaaaaaatacaataactgtacactctctattcgtcgggccggatctgatggtctcagtgttttcggtggcgcagatagcgacaaagaaaccatcgcagaaattctccaggagacatgggaaagcgccgacgactggttctactga

SEQ ID NO: 2102 - protein, 77 aa, Klebsiella oxytoca
MRIEVTIDKDKKLPDGAVPALQKELLRRISKKYNNCTLSIRRAGSDGLSVFGGADSDKETIAEILQETWESADDWFY

SEQ ID NO: 2103 - DNA, 237 bp, Klebsiella oxytoca
atgtcattttcagcaagaacggcgcaaaaagcagcagagatttctgatggaaaagatactttcagtggcggtctgtccattgatttaacctacacaaagttatccacaaggttgcgtggtgtttatattcttactgaggcggccatgtcggcacttgtcagtggtcgggtaaagctaacgttcttcaaccttcctgatgatggctggaaatcaggaatggaaaaggtgaaaaagtag

SEQ ID NO: 2104 - protein, 78 aa, Klebsiella oxytoca
MSFSARTAQKAAEISDGKDTFSGGLSIDLTYTKLSTRLRGVYILTEAAMSALVSGRVKLTFFNLPDDGWKSGMEKVKK

SEQ ID NO: 2105 - DNA, 222 bp, Klebsiella oxytoca
atgatttatcccttcgatgcgtcctatgctcaggaagtgctgagaaaacattatcagtatgcggatgtcctcgctaatccccgcgaaagtcttgccgcaaagacaactgggctcattgatcatgacaggcttctgtcgaaatgggatggcgataaaagcacatctgaaattcgcaggaagttgtcgagaagcgccgaagatatagaaaccagggcgtcataa

SEQ ID NO: 2106 - protein, 73 aa, Klebsiella oxytoca
MIYPFDASYAQEVLRKHYQYADVLANPRESLAAKTTGLIDHDRLLSKWDGDKSTSEIRRKLSRSAEDIETRAS

SEQ ID NO: 2107 - DNA, 543 bp, Klebsiella oxytoca
atgacgaaagacgacatttttgacgcaatcctcggcaaagagggtggctacgttaatcaccctgatgacaaaggcgggcctacgaaatggggcatcacccaggctgtagcgcgagcacatggctataaaggggatatgaaggacctgacccgccagcaggcgctggatattctaacggctgactactggaccggcccgagattcaatctgattgctgctgtatcacctgcaatagccgctgaactgtgtgatacaggcgtgaacatggggccttcagttgcggcgaaatggttccagcgttggctaaacgccttcaacaaccagcagaagttttatcctgacctcattgttgacgggcaaataggcccgcgaagcattagcgctctggaatcttatctgactaccagagggaaagagggtgacctcgtgttacttcgagccttgaattgcagtcagggccagcgttatctggaactcgccgaacaacggccagcaaacgagtcatttgtttatggttgggtaaaagagcgggtagcactatga

SEQ ID NO: 2108 - protein, 180 aa, Klebsiella oxytoca
MTKDDIFDAILGKEGGYVNHPDDKGGPTKWGITQAVARAHGYKGDMKDLTRQQALDILTADYWTGPRFNLIAAVSPAIAAELCDTGVNMGPSVAAKWFQRWLNAFNNQQKFYPDLIVDGQIGPRSISALESYLTTRGKEGDLVLLRALNCSQGQRYLELAEQRPANESFVYGWVKERVAL

SEQ ID NO: 2109 - DNA, 345 bp, Klebsiella oxytoca
atgaacaaagaaccccgcatctacggcagcaaatgggagaaagcccgcttatccttcctgcgcgccaatccactatgtgagatgtgcaggcagcaggggagggtcacacctgcaaccgttgttgaccatattgaacctcacaagcttaaagatgccctgaagtccaataacaggatcgcaatagctaaggctcagcatctgttctggagtaaagagaactggcaaccactatgcaaagcccatcacgattcaaccaagcaaagaatggaaaaaggtggcgtgatcattggttgcgatgttaacggctatccactcgatcctgcatcacattgggctaaggaatga

SEQ ID NO: 2110 - protein, 114 aa, Klebsiella oxytoca
MNKEPRIYGSKWEKARLSFLRANPLCEMCRQQGRVTPATVVDHIEPHKLKDALKSNNRIAIAKAQHLFWSKENWQPLCKAHHDSTKQRMEKGGVIIGCDVNGYPLDPASHWAKE

SEQ ID NO: 2111 - DNA, 288 bp, Klebsiella oxytoca
atggctttcaagttatcagcacctaaaaccgttcagatccattatctcggcgggtatctctgtgaaaaagaaatcaacattgatctgatttacgccgtcgaaagcgtcagacaagacgacgctggcgtggtcaaggtgtcgttatccgtgcgctacgatgaccaggccaaaatcaatgttggtgattatccggtgactctggatgtctcatcgtctcagtcatgggcagaacaggctgaggctcagattatggcactggatgagttctctggttcgactgcgctataa

SEQ ID NO: 2112 - protein, 95 aa, Klebsiella oxytoca
MAFKLSAPKTVQIHYLGGYLCEKEINIDLIYAVESVRQDDAGVVKVSLSVRYDDQAKINVGDYPVTLDVSSSQSWAEQAEAQIMALDEFSGSTAL

SEQ ID NO: 2113 - DNA, 258 bp, Klebsiella oxytoca
atgccgcagatgtggcgccacgcgctgccgggcctcggcaaccagtggctggtgctgctgaaggataccgcactggtgagcctcattagcgtcaacgatctgatgctgcaaaccaaaagtatcgctacccgaacccaggagccgtttaactggtatatcatcgcggcagcaatctatctggtcatcaccctgttgagtcagtacattctgaaacgtattgatcagcgagcgacgcgcttcgaacggagaccaggctga

SEQ ID NO: 2114 - protein, 85 aa, Klebsiella oxytoca
MPQMWRHALPGLGNQWLVLLKDTALVSLISVNDLMLQTKSIATRTQEPFNWYIIAAAIYLVITLLSQYILKRIDQRATRFERRPG

SEQ ID NO: 2115 - DNA, 222 bp, Klebsiella oxytoca
atgacgtacgatgatgcgatggttgcggtatctgaaggcaaacttgtgacgcaccccgggctgccggggggttttgtagtgatggatgtttctaaatccggaattatttccggcatgccattggttatttataaaaacggcatgttagccggtgagtacaggacgacagaagaggatatggccgtagaggactgggctgtcattgaggtcgcgcaggactga

SEQ ID NO: 2116 - protein, 73 aa, Klebsiella oxytoca
MTYDDAMVAVSEGKLVTHPGLPGGFVVMDVSKSGIISGMPLVIYKNGMLAGEYRTTEEDMAVEDWAVIEVAQD

SEQ ID NO: 2117 - DNA, 2163 bp, Klebsiella oxytoca
atgtatcatctcgacaataccagcggcgttcccgagatgccggaaccgaaagatacccagactatttctacacgctggttcggtgagagtcaggagcaagggggaataagctggccgggtgcggactggttcaatactgttcaggctgagctgcttaatttgctcgaggcggctgggattgatccggataaaaaatcttatgaccagttgagccaagctatacctgttctgggggatgcccgccttcgcaatgacctaggttcaggtgacggactgaaacaaatcggtcagtgcgcgcatttagatgaccttcgcgttgtcgagccgtcagctgacggacagcaaatttatttagcggagagaatacgccgctggccagttatcgatgcagggctgccgtggggcgggggtaaatttcgtcacatcgcaaatcttcccgatgaactgcaaattgacgacggcggaagcattattatggccgggggtaaatgctggctcagagaagaactgttgagcggacagggagaagttcgtgttgagtggtttctcgaccacgctccttcttttgacaatgatgcaagtgccgcattgcaggctgctgcgaacacagctaaattgctggcgcaatactcaggtcgcaataaaacgattcgtctcgttatgccatctaaaatatatataaccagaacggtcacgataaatacccgcggagtgagaattgatggtaatcatggtacggtattgtttagtaagaccggagactacacgaattactcaaacctaagcaccaactctaatataactgcgaccccggacactggcacagcagctaaagcctgcattaatctgacgcacggttcagtcggtccagggctcccgaaccctgcatatccaggacaagaattaatcaaggacttgaatctggttctgggagcgccagacggggcggatagctacaccgtttccccactttcggatagcggtctgattgctttatgccactggggaaccagcacagtagcagcagcgcagggttttttcaggaacgtatcattccagggctttggcgttggttatatcaatgggaataacacctggggatacgattttattgaatgtaaatggataggatgctggttgccagtgtggttaattgagggagcggataactcggagcgatattcgttgttcggctgtgttatgcagaacggctaccgttgcgtatattctccgtggggcggtgattttaatatcgttaagggctcctatgtctggaataccgggccgtacttcgaatttccgacagcgggaaatatgattgagcttaatccgtcgcgtattgagatggtcaacacagcgaagccgttgttaaaggttggtacaaaaactgaggctggtggcacatcgcaaggctatcctcttgttaagctccacggcgcaatgtttttgctggatgcgtctgctctccagcctgaaaattatcttttcagcgtcggtaaatgcgcgaagcttattgtcagggataatacgtggtcaaataaaaacatgaacacgctggctaatctgaaactgttaaacccatcggacactggtggcaaggttttattttctaacaatacaatgcgcgtgggaatattttccgaaatggggcgcgacagcaggctgctcacaagcacgactccggcggggcgtctggcttctgacggcatcacgctatccggaacgaattcagtccgggccagcatcagcgctagtggcgcaacgctgacgctgacggttaacgagacagctgctgggacaatgacgttattattgcgcgtgcctgtggatatcgacatgaccgactgggatagtttttcctggaaagcagaattcacaaatctgaatatttctggcaactggacaatcaactgttttgctaatgttgcgggtactcactatgtaaacaatcgtctcgaccttgggtctgtgacgctgaatgccgtgacagatatcagtgatgtctgtagcgccaactcttacgggttcaggaagattcagaagcgcgccgacggcggctgggaccgcgtaccaacggaggtgtatttttacattgctggcggcaacacgcagacagccggagaaacgctcactattagcaggctgggcctgctgggatattga

SEQ ID NO: 2118 - protein, 720 aa, Klebsiella oxytoca
MYHLDNTSGVPEMPEPKDTQTISTRWFGESQEQGGISWPGADWFNTVQAELLNLLEAAGIDPDKKSYDQLSQAIPVLGDARLRNDLGSGDGLKQIGQCAHLDDLRVVEPSADGQQIYLAERIRRWPVIDAGLPWGGGKFRHIANLPDELQIDDGGSIIMAGGKCWLREELLSGQGEVRVEWFLDHAPSFDNDASAALQAAANTAKLLAQYSGRNKTIRLVMPSKIYITRTVTINTRGVRIDGNHGTVLFSKTGDYTNYSNLSTNSNITATPDTGTAAKACINLTHGSVGPGLPNPAYPGQELIKDLNLVLGAPDGADSYTVSPLSDSGLIALCHWGTSTVAAAQGFFRNVSFQGFGVGYINGNNTWGYDFIECKWIGCWLPVWLIEGADNSERYSLFGCVMQNGYRCVYSPWGGDFNIVKGSYVWNTGPYFEFPTAGNMIELNPSRIEMVNTAKPLLKVGTKTEAGGTSQGYPLVKLHGAMFLLDASALQPENYLFSVGKCAKLIVRDNTWSNKNMNTLANLKLLNPSDTGGKVLFSNNTMRVGIFSEMGRDSRLLTSTTPAGRLASDGITLSGTNSVRASISASGATLTLTVNETAAGTMTLLLRVPVDIDMTDWDSFSWKAEFTNLNISGNWTINCFANVAGTHYVNNRLDLGSVTLNAVTDISDVCSANSYGFRKIQKRADGGWDRVPTEVYFYIAGGNTQTAGETLTISRLGLLGY

SEQ ID NO: 2119 - DNA, 1197 bp, Enterobacter cloacae
atgacaccagcgctgcgacagaacctgacgctggcagtcctggtactgactgggatcaatatgcggccgctgcttacctccattggtcctttgctgccggacatccgcgcagccagcggcatgagctataccctggccgcactcctgaccgcgctgccggtgatcgcgatgggggtgctggcgctggccgctggctgggtcgatcgctatatcggtcaaaagcgcagtattgcgctgagcctgctgattatcgcggcaggcgccctgctgcgggaaatcgccccgaatagtggcttactgctcaccagcgctctggccggaggaattggcatcggcattattcaggccgccatcccggcggtaattaagcacctctttccccgacggacgccgctggtgatgggactatggtcagcggcgctgatgggcggcggcgggttaggcgccgcgttcaccccatggctggcgtcacatagcgcggcctggcatgatgcgctagcctggtgggcgctccctgcgctcctggctctgctcagctggctggcgatttgtcggcatttgcctcgcgcaccgcatcagaccagcgcttcctcccgggtcgcgattattggccagcgccgcgcctggacgctgggactctatttcggactgatcaatgccggttacgccagcctgatcgcctggctgcctccttactacatccagctaggcgacagcgcccagtacagcggttcgctgctggcgctgctgaccgtcgggcaaaccgccggcgcgctgctgctcccggcgctggctcgccaggaggatcggcgccagcttcttctgctagcgctggcgctacagctgattggcttctgcggctttatctggctgccagagcatttctctgcgctctgggccattgcctgcggcgtgggattgggcggcgcgtttcctctgtgcctggtgctggcgctggatcacgccggacaaccggcggtggccggcaggctggtagcctttatgcaggggatcggatttatcatcgccggtctgtcgccctggctttcaggcctgctgcgtagcctgagcgggaactacacgcttgactggtcctggcatgcgatctgcgtcctgctactcatggcgctgacgctgcgctttatcccggcacactacccggccgagtggcgacagcgcgcctcagacctgccctga

SEQ ID NO: 2120 - protein, 398 aa, Enterobacter cloacae
MTPALRQNLTLAVLVLTGINMRPLLTSIGPLLPDIRAASGMSYTLAALLTALPVIAMGVLALAAGWVDRYIGQKRSIALSLLIIAAGALLREIAPNSGLLLTSALAGGIGIGIIQAAIPAVIKHLFPRRTPLVMGLWSAALMGGGGLGAAFTPWLASHSAAWHDALAWWALPALLALLSWLAICRHLPRAPHQTSASSRVAIIGQRRAWTLGLYFGLINAGYASLIAWLPPYYIQLGDSAQYSGSLLALLTVGQTAGALLLPALARQEDRRQLLLLALALQLIGFCGFIWLPEHFSALWAIACGVGLGGAFPLCLVLALDHAGQPAVAGRLVAFMQGIGFIIAGLSPWLSGLLRSLSGNYTLDWSWHAICVLLLMALTLRFIPAHYPAEWRQRASDLP

SEQ ID NO: 2121 - DNA, 459 bp, Enterobacter cloacae
atgtccgctcacgatcgttatcttcagcgcgcattagtgctggcaaaacaaaacattgctgacggtgggcgccccttcggcgccgtgctggtgcggaatgatgagattgtcgctgaaagcgtcaatacctttcatctgagcggtgacccaacggcgcatgccgaactgaacgccgttcgcgatcttgccgccagactgggaagcgcggtgttgcgcgaatgcgtcatctatgccagcggacaaccttgccctatgtgcctgagcgcgctctatttaaccggcgtgcgggaagtgtttttcgccaatagcaatcaggacggggagccttttcagctctcgaccgccgcgatttatcagcagctgcagcagccgctggcccagcaaacgctgtcgatccatcatcgcccgcagccggagggaactgaactttatcagcgctgggcggaacggcagtcatga

SEQ ID NO: 2122 - protein, 152 aa, Enterobacter cloacae
MSAHDRYLQRALVLAKQNIADGGRPFGAVLVRNDEIVAESVNTFHLSGDPTAHAELNAVRDLAARLGSAVLRECVIYASGQPCPMCLSALYLTGVREVFFANSNQDGEPFQLSTAAIYQQLQQPLAQQTLSIHHRPQPEGTELYQRWAERQS

SEQ ID NO: 2123 - DNA, 909 bp, Enterobacter cloacae
atgcttctgcgccaactttcctactttatcgctgtggctgaacattgtggcttttcccgcgccgccgcggcgctgcatgtctcccagcctgcgctgtcacagcagatacgccagctggaagcgatgctggaggttcagcttttcgaccgctctggccgacgtattcgcctgaccgatgccggtgagatctggctggagtatgcccgtcgcgcgttacgcgagcttgaggaaggtcggcgcgccttgcatgacgcagaagatctccagcacggtaaactccgcattgcaatgacgccaactttcactacctatatgctgggcccgctgatggaggcgtactaccgacgctatcctggagtaaaagtgcttatccaggagatgaaccaggagcggatggaggcgatgctgctggaggatgaactggatgtggggattgcctttgacgattgccggtcacaggagattgtggttcagccgctactgacggaaacgcttgcgctggtggtgagccgtgcgcatccgctggcaggagagcgcgacttgcaactgcaggctctcgacgcccagccgctaattttactgagcagcgagtttgctacccgcgagcagattgatcgttattgccgccttcatcggctcgaaccagacgtgcggatggaggccaactccatcggggccgttctgtcggttattcgaagcacaacgttagcaacgctgctgccggcggcgatcgccggacagtttgatgatgtggtggcgattgagctaagacctgcgctgctgcagcgcacggcctgtttattgcagcggcagggcgcctggcagagcgccgcagcgcgcgaattcatcaccctggcccgagagaatgcgataacgattgagcaggaaaaccgccagtcccttgcctga

SEQ ID NO: 2124 - protein, 302 aa, Enterobacter cloacae
MLLRQLSYFIAVAEHCGFSRAAAALHVSQPALSQQIRQLEAMLEVQLFDRSGRRIRLTDAGEIWLEYARRALRELEEGRRALHDAEDLQHGKLRIAMTPTFTTYMLGPLMEAYYRRYPGVKVLIQEMNQERMEAMLLEDELDVGIAFDDCRSQEIVVQPLLTETLALVVSRAHPLAGERDLQLQALDAQPLILLSSEFATREQIDRYCRLHRLEPDVRMEANSIGAVLSVIRSTTLATLLPAAIAGQFDDVVAIELRPALLQRTACLLQRQGAWQSAAAREFITLARENAITIEQENRQSLA

SEQ ID NO: 2125 - DNA, 483 bp, Enterobacter cloacae
atgaaacagatcaccctcagcgatatgcagcagcagagcgaagcggcagccagtgctccgcgcctgcgtgcccatcgcaattttcatcccgaactaagcgacccgatacagcgtctggccatcgccatggaacccggcacctatatccgcccccaccggcacagacataccttcgaacttttactgccgctgaaaggccgatttgtggtactgaattttgatgaccacggcgtggttacccgccgggtggtgctgggtgaaacctgcacggcgctggaaatggaggctggcacctggcatacggtgctctcgctcgacgcaggcggcatggtatttgaagtcaaacaaggcgcttatcaaccgcttgccgaaatggacactatggcctgggcgcctgctgaaggccagccaggcactgccgaaatgatggcctggtatgccatcgcgcaaccgggtgaccgcttcctgtctatgccgcaataa

SEQ ID NO: 2126 - protein, 160 aa, Enterobacter cloacae
MKQITLSDMQQQSEAAASAPRLRAHRNFHPELSDPIQRLAIAMEPGTYIRPHRHRHTFELLLPLKGRFVVLNFDDHGVVTRRVVLGETCTALEMEAGTWHTVLSLDAGGMVFEVKQGAYQPLAEMDTMAWAPAEGQPGTAEMMAWYAIAQPGDRFLSMPQ

SEQ ID NO: 2127 - DNA, 528 bp, Klebsiella pneumoniae
atgacgaccatcaccacaccacgcctttcgcttacccgctttgttaccgatgactggcccttttttctgcgcctgcgccaggatccgcaggtgatgcgttttatgggggaggtgttaagcgaggaggtgctgcgcagcgtcttcgtcagtcgctgtgccgatcccggggtgtttgtattgcgcgataaattcggcgaggcgctgggcgatattgggctccgcatcagtccgaaaaatccgcacgaagctgacgtcggctacgcgctgctgcctcaggctcagggaaaaggctatgccagcgaagcgctgcgggcggtctgcgagtatggtttcaccaccctgggggtgcaggccatcaatgcctgggtgctgggtgaaaaccgtggctcatcgcgcctgctggagaagcaaggctttgtgcgcacccaggtgctggagaaagcctatcatctgaacggcgtcgattacgatgactggatctatcggctggagcgggaagctcatccggcgtccgcagacgccggatga

SEQ ID NO: 2128 - protein, 175 aa, Klebsiella pneumoniae
MTTITTPRLSLTRFVTDDWPFFLRLRQDPQVMRFMGEVLSEEVLRSVFVSRCADPGVFVLRDKFGEALGDIGLRISPKNPHEADVGYALLPQAQGKGYASEALRAVCEYGFTTLGVQAINAWVLGENRGSSRLLEKQGFVRTQVLEKAYHLNGVDYDDWIYRLEREAHPASADAG

SEQ ID NO: 2129 - DNA, 1104 bp, Klebsiella pneumoniae
atgaaagttaaagtactgtccctcctggtaccggctctgctggtagcaggcgcagcaaatgcggctgaaatttataacaaagacggcaacaaattagacctgtacggtaaaattgacggtctgcactacttctctgacgacaagagcgtcgacggcgaccagacctacatgcgtgtaggcgtgaaaggcgaaacccagatcaacgaccagctgaccggttacggccagtgggaatacaacgttcaggcgaacaacactgaaagctccagcgatcaggcatggactcgtctggcattcgcaggcctgaaatttggcgacgcgggctctttcgactacggtcgtaactacggcgtagtatacgacgtaacgtcctggaccgacgttctgccggaattcggcggcgacacctacggttctgacaacttcctgcagtcccgtgctaacggcgttgcaacctaccgtaactctgatttcttcggtctggttgacggcctgaactttgctctgcagtatcagggtaaaaacggcagcgtcagcggcgaaggcgctctgtctcctaccaacaacggtcgtaccgccttgaaacagaacggcgacggttacggtacttctctgacctatgacatctatgatggcatcagcgctggtttcgcatactctaactccaaacgtcttggcgaccagaacagcaagctggcactgggtcgtggcgacaacgctgaaacctacaccggcggtctgaaatacgacgcgaacaacatctacctggccactcagtacacccagacctacaacgcgacccgcgccggttccctgggctttgctaacaaagcgcagaacttcgaagtggttgctcagtaccagttcgacttcggtctgcgtccgtccgtggcttacctgcagtctaaaggtaaggatctggaaggctacggcgaccaggacatcctgaaatatgttgacgttggcgcgacctactacttcaacaaaaacatgtccacctatgttgactacaaaatcaacctgctggacgacaatagcttcacccacaacgccggtatctctaccgacgacgtggttgcactgggcctggtttaccagttctaa

SEQ ID NO: 2130 - protein, 367 aa, Klebsiella pneumoniae
MKVKVLSLLVPALLVAGAANAAEIYNKDGNKLDLYGKIDGLHYFSDDKSVDGDQTYMRVGVKGETQINDQLTGYGQWEYNVQANNTESSSDQAWTRLAFAGLKFGDAGSFDYGRNYGVVYDVTSWTDVLPEFGGDTYGSDNFLQSRANGVATYRNSDFFGLVDGLNFALQYQGKNGSVSGEGALSPTNNGRTALKQNGDGYGTSLTYDIYDGISAGFAYSNSKRLGDQNSKLALGRGDNAETYTGGLKYDANNIYLATQYTQTYNATRAGSLGFANKAQNFEVVAQYQFDFGLRPSVAYLQSKGKDLEGYGDQDILKYVDVGATYYFNKNMSTYVDYKINLLDDNSFTHNAGISTDDVVALGLVYQF

SEQ ID NO: 2131 - DNA, 708 bp, Klebsiella pneumoniae
atgatgaaaaaccgaattcctttaatcctgctgcttaacatcgcgggtgtagcgctattttgctcctggtatctgccagccaaccatggcgcgtggttgccggtcgactccgcgatcttccatttctttaaccatggcgtcagcgtcagccatgcttatgcctggctgctggcgatcatcaacaatcgcgccttcgacgcctgttcgctgctggcgatgggctgcctgatgctgagctattggctaaaggcgccgactgcaggccgtcgtcagatcgccatcatgggcctggtgatgctgctggcggcggtgatcatcaaccagctcgcacaacacctgatgccggtacagcgcgccagcccgtcgctgttttttagcgatattacccgcgtcagcgacgtcgttaacttccccactaaggatgcctcgaaggacagcttccctggcgatcatgggatgatgctgctgatcttcgcgagctttatgtggcgctattttggccgtcgcgcgctgggcgtcgcgctgattatctttgtggtctttgctttcccgcgggtaatgattggcgcccactggtttagcgatattgccgtcggctccctgaccgccgtgctgatcggcgcgccctgggtattgatgaccccgctgagcgataaattgatcgcctttttcgatcgctacttacccagcagaatatcggccaaataa

SEQ ID NO: 2132 - protein, 235 aa, Klebsiella pneumoniae
MMKNRIPLILLLNIAGVALFCSWYLPANHGAWLPVDSAIFHFFNHGVSVSHAYAWLLAIINNRAFDACSLLAMGCLMLSYWLKAPTAGRRQIAIMGLVMLLAAVIINQLAQHLMPVQRASPSLFFSDITRVSDVVNFPTKDASKDSFPGDHGMMLLIFASFMWRYFGRRALGVALIIFVVFAFPRVMIGAHWFSDIAVGSLTAVLIGAPWVLMTPLSDKLIAFFDRYLPSRISAK

SEQ ID NO: 2133 - DNA, 630 bp, Enterobacter cloacae
atgaatattaaaccgccgatcaggccgcaaaagaccattgaccggctgatcgatgtacttgagccacacgcgacccccgttaacgcgatcgccagaaaaagactgacatgggaatataaaggcaaaacccagctctttatttttaaaaaaggcgagctgtcgattattcgtaattccgacaggctactgatggtgaccgtctatgagccgcatcttttcggcgtggcggaaatgctgcagcccagccgcagccacagcctgcgagccgaggtatcatgcgaactgctacggatcgaccacgacctggcttcggcgctttttcgtcagcataacctgtgggaagaggtgaccagcctgttggcttatcatacctcgtatatggtgtatcgtgacgatctggtcctgcagcagcgtacctattcggtcatccgtaaccagctgctggagatgatgctattaagcgaagagacccgacagcgagtatctattcttgagtatattcaggacaggacccttctgtcgcgtagcagtattctcaatgtattgtcagcattaaagaaaggcggttatattgcctttgcccgcggcggttatttacaaaatatcgtctcacttcctgaaaaattctga

SEQ ID NO: 2134 - protein, 209 aa, Enterobacter cloacae
MNIKPPIRPQKTIDRLIDVLEPHATPVNAIARKRLTWEYKGKTQLFIFKKGELSIIRNSDRLLMVTVYEPHLFGVAEMLQPSRSHSLRAEVSCELLRIDHDLASALFRQHNLWEEVTSLLAYHTSYMVYRDDLVLQQRTYSVIRNQLLEMMLLSEETRQRVSILEYIQDRTLLSRSSILNVLSALKKGGYIAFARGGYLQNIVSLPEKF

SEQ ID NO: 2135 - DNA, 702 bp, Klebsiella pneumoniae
atgattactacccgaacagccaaacaatgcggacaagcagacttcggctggctgcaggcccgctacaccttctcctttggccactacttcgacccgaaattactgggcttcgcatccttgcgcgtcctcaaccaggaagtgctggcgcccggcgcttccttccaggccagaacgtacccaaaagtcgatatcctgaacctgattctggaaggcgaagcggagtatcgcgacagcgacggcaaccacgtgcaggccaaagccggtgaagcgctgctgatcgccacccagcctggcgtgagctatagcgagcataatctgagtaaagagcagtcgttaacgcgaatgcaactttggcttgatgcctgcccgcagcgggaaaacccgctgcagcagaaaatcaatgtcgcagacgcgacgctgcagctgctggcctctccggagggcggggataacagcctccagcttcgccaacaggcctgggtctaccatatcgcgctggagaaaggtgagcagatcaacgtgcaattacatggtccacgcgcctacctgcagtcgattcacggctccgtccatgccgtcgcacaggaacagcaaaagcaggctctcacctgcggtgacggcgcatttattcgtgacgaagctaacattaccctcgtcgccgatacgccgctgcgcgctttgctgatagatttaccggtgtaa

SEQ ID NO: 2136 - protein, 233 aa, Klebsiella pneumoniae
MITTRTAKQCGQADFGWLQARYTFSFGHYFDPKLLGFASLRVLNQEVLAPGASFQARTYPKVDILNLILEGEAEYRDSDGNHVQAKAGEALLIATQPGVSYSEHNLSKEQSLTRMQLWLDACPQRENPLQQKINVADATLQLLASPEGGDNSLQLRQQAWVYHIALEKGEQINVQLHGPRAYLQSIHGSVHAVAQEQQKQALTCGDGAFIRDEANITLVADTPLRALLIDLPV

SEQ ID NO: 2137 - DNA, 897 bp, Klebsiella pneumoniae
atggccaaagagagagcattaacgctggaagcgttacgcgtgatggatgcgatcgaccggcgcggaagcttcgctgccgcagctgatgagctgggacgcgtgccttccgccctgagctacaccatgcaaaaactggaggaggaactggacgtggtgctgtttgaccgctcaggtcatcgcacgaagttcactaacgttggaagaatgctgctggagcgcgggcgcgtgctgcttgaagcggcggataaactcaccaccgatgctgaagccctgtcgcgcggttgggaaacccacctgacgatcgttaccgaagcgctggtgcccaccccggatctgtttccgctaattgaaaaactggcgaccaaatctaatacgcagttatcgattatcaccgaggtgctggccggcgcctgggagcggctggagcaggggcgggcggatatcgttgtcgcgccggatatgcattttcgttcctcctcggagattaactcgcgcaaactctattcggtgctcaatgtgtacgtcgcggcgccggatcacccaatccaccaggagccggaaccgctctcggaagtgacccgcgtgaaataccgcggcgtcgcggtggcggataccgcgcgcgagcggcccgtcctcaccgtccagttgttggataaacagccgcgcttaacggtgagcaccattgaagacaagcgccaggccctgttggccgggctaggtgtggcgaccatgccctatccgctggtggagaaggatattgccgaaggacgtttgcgggttgtcagcccggaatacaccaatgaaattgacataattatggcctggcgacgggacagtatgggcgaagcgaagtcttggtgtctgcgtgagatccccaagctgtttgccggcagatag

SEQ ID NO: 2138 - protein, 298 aa, Klebsiella pneumoniae
MAKERALTLEALRVMDAIDRRGSFAAAADELGRVPSALSYTMQKLEEELDVVLFDRSGHRTKFTNVGRMLLERGRVLLEAADKLTTDAEALSRGWETHLTIVTEALVPTPDLFPLIEKLATKSNTQLSIITEVLAGAWERLEQGRADIVVAPDMHFRSSSEINSRKLYSVLNVYVAAPDHPIHQEPEPLSEVTRVKYRGVAVADTARERPVLTVQLLDKQPRLTVSTIEDKRQALLAGLGVATMPYPLVEKDIAEGRLRVVSPEYTNEIDIIMAWRRDSMGEAKSWCLREIPKLFAGR

SEQ ID NO: 2139 - DNA, 369 bp, Klebsiella pneumoniae
atggactggtatctcaaggtattaaaaaactatataggatttggcggccgtgcgcggcgcaaagagtactggatgtttattctggtcaacctcatcctgaccggcgtattgagcatcatcgataaaatgctgggctggcagcgggctggcggcgaaggcattctgaccactatctatggcgtactggtctttttaccgtggtgggcggtgcaatttcgccgtctgcatgacaccgatcgttcggcctggtggctattgctgctgttgatcccggtcatcggctggctggtgatcctgatctttaactgccagcgcggcaccgaaggcaacaatcgcttcggacccgatccgaaacccttctcctattaa

SEQ ID NO: 2140 - protein, 122 aa, Klebsiella pneumoniae
MDWYLKVLKNYIGFGGRARRKEYWMFILVNLILTGVLSIIDKMLGWQRAGGEGILTTIYGVLVFLPWWAVQFRRLHDTDRSAWWLLLLLIPVIGWLVILIFNCQRGTEGNNRFGPDPKPFSY

SEQ ID NO: 2141 - DNA, 987 bp, Klebsiella pneumoniae
atgggacaattagtcgacggcgtctggcaggatacctggtatgacacaaaatccaccggtgggcgttttaaacgttccgtttccgccttccgtaactggctgaccgccgacggcgcggctggccccagcggtgaaggcggttttgcagcggaaaaggatcgctatcatttgtatgtttctctcgcctgcccgtgggcgcatcgcacgttaattatgcgtaaattaaaaggtctggagccttttctccccgtatccgtggtcaatccgctgatgctggaaaacggctggacctttgacgatagcttcccggaagccaccggcgatactctctaccagcatgactttctctatcagctgtatctgcacgccgacccgcactacaccggacgcgtgaccgtgccggtgctgtgggataaaaaacagcagaccatcgtcagcaatgagtcggcagaaatcatccgcatgttcaataccgccttcgatggccttggcgcccgggccggggattactacccgccagcgctgcgggaacaaatcgatgagctgaacggctggatctatgacaacgtcaacaacggcgtgtataaagccggctttgccaccagccagcaagcttacgacgaagcggtggatgcggtctttacctcgctggagcggctggagcagatcctcggccagcatcgctatctgacgggcaatcagctaacggaagccgacattcgcctctggaccactctggtacgcttcgacccggtatatgtgacccattttaaatgcgataaacggcgcatcagtgattacctcaatctgtacggtttcctgcgcgacatctaccagatgccgggtatcgccgagacggtgagttttccgcatatccgtcaccactattaccgcagccataaaaccattaaccctaccggtattatttccattgggccgcagcaggatctcaacgaaccgcacggtcgcgatcagcgcttccgttga

SEQ ID NO: 2142 - protein, 328 aa, Klebsiella pneumoniae
MGQLVDGVWQDTWYDTKSTGGRFKRSVSAFRNWLTADGAAGPSGEGGFAAEKDRYHLYVSLACPWAHRTLIMRKLKGLEPFLPVSVVNPLMLENGWTFDDSFPEATGDTLYQHDFLYQLYLHADPHYTGRVTVPVLWDKKQQTIVSNESAEIIRMFNTAFDGLGARAGDYYPPALREQIDELNGWIYDNVNNGVYKAGFATSQQAYDEAVDAVFTSLERLEQILGQHRYLTGNQLTEADIRLWTTLVRFDPVYVTHFKCDKRRISDYLNLYGFLRDIYQMPGIAETVSFPHIRHHYYRSHKTINPTGIISIGPQQDLNEPHGRDQRFR

SEQ ID NO: 2143 - DNA, 393 bp, Klebsiella pneumoniae
atgaaaaaattagaagatgttggtgtattggtagcgcgtattctgatgccgattctgtttatcactgcaggatggggcaaaatcaccggttatgcgggaacccagcagtatatggaagccatgggcgtcccgggcgcgctgctgccgctgaccatcctccttgagttcggcggcggtctggcgattctgttcggtttcctgacccggaccaccgcgctgttcactgcgggctttacgctgctgaccgcgttcctgttccatagcaactttgcggaaggcgtgaactccctgatgttcatgaaaaacctgaccattgcgggcggttacctgctgctggccattaccggaccgggcgccttcagtattgaccgtgtactgaataagaaatggtaa

SEQ ID NO: 2144 - protein, 130 aa, Klebsiella pneumoniae
MKKLEDVGVLVARILMPILFITAGWGKITGYAGTQQYMEAMGVPGALLPLTILLEFGGGLAILFGFLTRTTALFTAGFTLLTAFLFHSNFAEGVNSLMFMKNLTIAGGYLLLAITGPGAFSIDRVLNKKW

SEQ ID NO: 2145 - DNA, 297 bp, Klebsiella pneumoniae
gtgaatggccgacaggagcgtgaacggcaaaagacgcagctgctgcgccagatccagcagcaacggctggagctcagcgcctgccgccgtcactggcacgaggcgactgcgcccctcgaccgcggctggcatacgctgctgagtttacgttcgtggctgatggttggcagcggtctgatggccgtatggtccgtacgacatccgcattttttaatgcgctggaccaaacgcggactcggactgtggagcacctggcgcctggtgcgcgggatcctgcgccagtcggcagttcgctaa

SEQ ID NO: 2146 - protein, 98 aa, Klebsiella pneumoniae
MNGRQERERQKTQLLRQIQQQRLELSACRRHWHEATAPLDRGWHTLLSLRSWLMVGSGLMAVWSVRHPHFLMRWTKRGLGLWSTWRLVRGILRQSAVR

SEQ ID NO: 2147 - DNA, 399 bp, Klebsiella pneumoniae
atggcgaatactcaacacacgcagggaccgggtcagcgcgttttctccattggtcagcgcatcgtcacgctgctggtcgaaatggtggaaacgcggctgcgtctggtcgtcgtggagctggaggaggagaaagccaacctcttccagctgctgatcatgaccggactgacgctgctgtttgccgcgtttggcctcatgagtctgctggtgctggttatctgggccgttgacgctcagtaccgcctgcacgtgatgatcgccaccaccgttgtgctgctcctcgccgccgcgatcgtgggtatcctaaccctacgtaaggcgcgccgctccacgctgctgcgtctaacgcgtaaagagctggagaacgaccgtgcccttctggaggaggataaatcgtga

SEQ ID NO: 2148 - protein, 132 aa, Klebsiella pneumoniae
MANTQHTQGPGQRVFSIGQRIVTLLVEMVETRLRLVVVELEEEKANLFQLLIMTGLTLLFAAFGLMSLLVLVIWAVDAQYRLHVMIATTVVLLLAAAIVGILTLRKARRSTLLRLTRKELENDRALLEEDKS

SEQ ID NO: 2149 - DNA, 306 bp, Klebsiella pneumoniae
atggctaaagagaatgtgactgacgaccttcgtgcagaactgaaaacgctggcggataccctggaggaagtactaaattcctcggcggacaagtcgaaagaagagatgggtaaactgcgcagtaaagccgagagcgcgctgaaagagagccgcgctcgtttgggtgaaaccagcgaagcgattcttcgtcaaactcgtgagaccgccgcgcgagcggatgattatgttcgcgaaaatccgtggactggggtaggaattggcgccgccgtcgggctggtgctgggtgtcctgctgtcgcgtcgctga

SEQ ID NO: 2150 - protein, 101 aa, Klebsiella pneumoniae
MAKENVTDDLRAELKTLADTLEEVLNSSADKSKEEMGKLRSKAESALKESRARLGETSEAILRQTRETAARADDYVRENPWTGVGIGAAVGLVLGVLLSRR

SEQ ID NO: 2151 - DNA, 369 bp, Klebsiella oxytoca
atgaaacaccgcatcgctctgcttctggtcctgacttcacttagcgccagcgccctagccgcctctccctgccaggaaaaagagcaggatattcaacgagagatcagctacgccgaaaagcatcataatcaaagtcgcattgatgggctaaataccgcgctacgtcaggttcgggaaaactgtagcgacagtaaactcaaagccgatcataagcaaaaaattgccaaacagcgggaagagatcgctgaacgtcagcgcgatctgcaggaagcccggaagaaaggcgatgcggacaaaattaacaaacgccagcataaactcaatgaagcgcaacaggagttaaaaacgctggagtctcgggattactaa

SEQ ID NO: 2152 - protein, 122 aa, Klebsiella oxytoca
MKHRIALLLVLTSLSASALAASPCQEKEQDIQREISYAEKHHNQSRIDGLNTALRQVRENCSDSKLKADHKQKIAKQREEIAERQRDLQEARKKGDADKINKRQHKLNEAQQELKTLESRDY

SEQ ID NO: 2153 - DNA, 663 bp, Klebsiella pneumoniae
atggaactatttacccagttattgaatgccttgtgggctcaggattacgaaacgctcgcgaatccctccatgataggcatgctgtattttgtcttgtttatgattttgttccttgagaacgggttattgcctgccgcgtttttaccgggggatagtctgctcgtgctcgtgggcgtgctgatcgccaaaggggcgatgggttttccggaaactttgctgctgctcaccgccgccgccagcctcggctgctggctaagctatattcaggggcgttggctgggtaatacgcggatcgtgcaaaactggctgtcacacctgccttcgcactatcaccagcgtgcgcatcacttgtttcataagcatgggctctccgcgctgctgatcggccgctttatcgccttcgtacgcacgctgctgcccaccatcgccgggctttccggccttaataacgcccgttttcagtttttcaactggatgagcggcctgctgtgggtgctcatcctgacctcgcttggctatctgctgggtaaaaccccggtattcctcaagtatgaagatcagctgatgtcctgcctgatgctcctgccggttgccctgttggtcttcggactgatcggctcgctggtggtgctgtggaagaaaaaatacagaagccggggctaa

SEQ ID NO: 2154 - protein, 220 aa, Klebsiella pneumoniae
MELFTQLLNALWAQDYETLANPSMIGMLYFVLFMILFLENGLLPAAFLPGDSLLVLVGVLIAKGAMGFPETLLLLTAAASLGCWLSYIQGRWLGNTRIVQNWLSHLPSHYHQRAHHLFHKHGLSALLIGRFIAFVRTLLPTIAGLSGLNNARFQFFNWMSGLLWVLILTSLGYLLGKTPVFLKYEDQLMSCLMLLPVALLVFGLIGSLVVLWKKKYRSRG

SEQ ID NO: 2155 - DNA, 1302 bp, Klebsiella pneumoniae
atgcgtaaaattaaagggttacgttggtacatgatcgcgctggtgacgctgggcaccgtgctgggctacctgacccgtaacaccgtagcggcggccgcgccgacgctgatggaagagttacacatttcgacccaacagtactcctatatcattgcagcctattccgctgcctataccgttatgcagcccgtcgcggggtatgtccttgatattctggggaccaaaattggctatgccttcttcgccatcgcctgggcggtattctgcggctcaacggcgctggccggcagctggggtggactggcgctggcccgtggcgcagtcggcgcagcggaggccgcaatgatccccgccggcctgaaggccagctcagagtggttcccggcaaaagagcgctctatcgcagtgggctacttcaacgtgggttcctctattggcgccatgatcgcgccgccgttggtggtgtgggcgattgtcatgcacagctggcagatggcgttcatcatctccggggtattgagcttcgcctgggccatcgcctggcttatcttctacaaacacccgcgcgaccagaaaaaattatctgacgaagaacgtgactacatcattggcggtcaggagtctcagcatcagaccaataacgcgaagaaaatgtcgccgtggcaaatcctgcgcaaccgtcagttctggggtatcgccctgccgcgcttcctcgccgagccggcctgggggacctttaacgcctggatcccgctgttcatgttcaaagtttacggttttaacctgaaagagatcgccatgttcgcctggatgccgatgctgttcgccgacctcggctgtatcgtcggcggatatctgccgccgctgttccagcgctggtttggcgtcaacctgatcgtgtcgcgtaaaatggtggtcaccatgggcgccctgctgatgattggcccggggatgatcggcctgttcaccagcccgtacgtggcgattgccctgctgtgcatcggcgggttcgctcaccaggcgctgtccggggcgctgattaccctctcttccgatgtctttggccgtaacgaagtcgctaccgccaacggtctgaccgggatggccgcctggctggcgagcaccatgttcgccctggtcgtcggcgcgctggctgacaccatcggctttagcccgctgtttgcggtactggccgtctttgacctgctgggcgcgctggttatctggacggtgctgaaaaacaaaccggctgacgatgactcgacgccgcttagcagccgcaaaccggtcacgcagagttag

SEQ ID NO: 2156 - protein, 433 aa, Klebsiella pneumoniae
MRKIKGLRWYMIALVTLGTVLGYLTRNTVAAAAPTLMEELHISTQQYSYIIAAYSAAYTVMQPVAGYVLDILGTKIGYAFFAIAWAVFCGSTALAGSWGGLALARGAVGAAEAAMIPAGLKASSEWFPAKERSIAVGYFNVGSSIGAMIAPPLVVWAIVMHSWQMAFIISGVLSFAWAIAWLIFYKHPRDQKKLSDEERDYIIGGQESQHQTNNAKKMSPWQILRNRQFWGIALPRFLAEPAWGTFNAWIPLFMFKVYGFNLKEIAMFAWMPMLFADLGCIVGGYLPPLFQRWFGVNLIVSRKMVVTMGALLMIGPGMIGLFTSPYVAIALLCIGGFAHQALSGALITLSSDVFGRNEVATANGLTGMAAWLASTMFALVVGALADTIGFSPLFAVLAVFDLLGALVIWTVLKNKPADDDSTPLSSRKPVTQS

SEQ ID NO: 2157 - DNA, 1413 bp, Klebsiella pneumoniae
atgacatcgtttatgactgaagattttctacttgataccgagtttgcccgccgtctgtaccatgattacgccaaagatcagccgattttcgactaccactgccaccttccgccgcagcaggttgccgaaaactatcgctttaaaaacctgtatgacatctggctgaaaggcgatcactataaatggcgcgcaatgcgcactaacggcgtgccggagcgtctgtgtaccggtgatgcgtccgatcgcgagaaatttgacgcctgggcggccacggttccacacactattggcaacccgttataccactggacccatttagagctgcgtcgaccttttggtattacaggtaagctgttgtcgccatccaccgccgatgagatctgggaccagtgtaatgatttgctggctcaggatgccttctccgcccgcggaatcatgaagcagatgaatgtgaagatggtcggtaccaccgacgatccgattgattctcttgagcaccacgcggctgtcgccaaagacaactcctttgacatcaaagtgctgccgagctggcgcccggataaagccttcaacatcgagttggcgaccttcaatgattatatggctaagctgggcgaggtatccgataccgatattcgccgcttcgctgacctgcaaagcgccctgaccaaacgtctggatcattttgccgcacacggctgcaaagtctccgatcatgcgctggacgtggtgctgtttgccgaagcgaccgacgccgagctggatgacattctggcgcgccgcctggctggcgagacccttagcgaacacgaagtggcgcagttcaaaaccgcggtgctggtgttcctcggcgcagagtatgcccgtcgcggctgggtccagcagtaccacattggcgcgctgcgtaacaacaacctccgtcagttcaaactgttagggccagacgtcggcttcgactcgatcaacgatcgtccgatggcggaagagctgtctaagctgctgagcaagcagaacgaagaaaacctgctgccgaaaacgattctctactgcctgaacccgcgtgataacgaagtgctgggcaccatgatcggtaacttccagggtgaaggcatgccaggcaagatgcagttcggctccggctggtggttcaacgatcagaaagacggtatggagcggcagatgacccagctggcgcagctcgggctgctgagccgcttcgtcgggatgttgaccgacagtcgcagcttcctctcctacacgcgccacgaatacttccgccgcattctgtgccagatgatcggccgttgggtggctgccggcgaagcgcctgcggatatcgcgctgctgggcgagatggtgaaaaacatttgctttaacaatgcgcgtgactatttcgccattgaactgaactaa

SEQ ID NO: 2158 - protein, 470 aa, Klebsiella pneumoniae
MTSFMTEDFLLDTEFARRLYHDYAKDQPIFDYHCHLPPQQVAENYRFKNLYDIWLKGDHYKWRAMRTNGVPERLCTGDASDREKFDAWAATVPHTIGNPLYHWTHLELRRPFGITGKLLSPSTADEIWDQCNDLLAQDAFSARGIMKQMNVKMVGTTDDPIDSLEHHAAVAKDNSFDIKVLPSWRPDKAFNIELATFNDYMAKLGEVSDTDIRRFADLQSALTKRLDHFAAHGCKVSDHALDVVLFAEATDAELDDILARRLAGETLSEHEVAQFKTAVLVFLGAEYARRGWVQQYHIGALRNNNLRQFKLLGPDVGFDSINDRPMAEELSKLLSKQNEENLLPKTILYCLNPRDNEVLGTMIGNFQGEGMPGKMQFGSGWWFNDQKDGMERQMTQLAQLGLLSRFVGMLTDSRSFLSYTRHEYFRRILCQMIGRWVAAGEAPADIALLGEMVKNICFNNARDYFAIELN

SEQ ID NO: 2159 - DNA, 1488 bp, Klebsiella pneumoniae
atgcaatacatcaaaatccattcgcaggataacgtcgcggtcgcgctgacggatatcgctgccggtagcgtggtgacgattgataatgactcggtcaccctcggccaggatatcgttcgcggccacaagtttgcactgcgcgctatcgcgaaaggggaaaacgtcgttaagtacgggttgccgattggccatgcgctggcggatatcgcgccgggcgagcatgttcatgcgcacaatacgcgcaccaatctcagcgaccttgacgcgtatcgctatcaaccggacctggttgcccaaccgccacagcctgcggatcgcgaagtacagatttatcgtcgcgccaacggtgacgtcggcgtgcgcaatgagctgtggatcctgccgaccgtcggctgcgtcaacgcgatggccagacaaatgcagaaccgtttcctgaaagagacgtatggcgctgaggatatcgatggggtacatctcttcagccacacctatggctgctcgcagcttggggacgatcacatcaacactcgcaccatgctgcaaaatatggttcgtcacccgaacgccggggcggtgctggtggttggccttggctgtgaaaacaaccaggtggaggcctttcgcgagacgctgggcgagtttgacccgcagcgcgtgcactttatggtttgccagcatcaggacgatgaagtggaggcgggggttgagcatctgcatcagctgtatgaagtgatgcgtcaggataaacgccagccgggcaagctcagcgagctgaagtttggcctcgagtgcgggggatcggacggcctgtcgggcattaccgctaatccgatgctgggccgcttctcagactatgtgatcgccaacggcggcactaccgtgctgaccgaagtgccggagatgttcggcgctgaacagttgttgatgagccactgccgcgacgaagcgaccttcgacaagctggtgaccatggtcaatgactttaagcagtactttattgctcacgaccagcctatttacgaaaacccctcgccgggtaataaggccggagggatcactaccctcgaagataagtcgctgggctgtactcagaaagcgggctccagccaggtggtggatgttctgcgctacggcgagcgcctgaaggttcatggtctgaatttactgagcgcgccgggcaacgacgcggtcgccaccagcgcgctggccggcgccggctgccatatggtgctgttcagcaccggtcgcggcacgccgtacggcggctttgtgccaacggtgaagatcgccaccaacagcgagctggcggcgaagaaaaagcactggatcgactttgatgccgggcagctgctccacggcaaaacgatgccgcagctgctggaagagtttgtggatgccattgtagccttcgccaacggtaaaccgacctgtaatgagcagaatgacttccgcgagctggccatctttaaaagcggtgttaccctgtaa

SEQ ID NO: 2160 - protein, 495 aa, Klebsiella pneumoniae
MQYIKIHSQDNVAVALTDIAAGSVVTIDNDSVTLGQDIVRGHKFALRAIAKGENVVKYGLPIGHALADIAPGEHVHAHNTRTNLSDLDAYRYQPDLVAQPPQPADREVQIYRRANGDVGVRNELWILPTVGCVNAMARQMQNRFLKETYGAEDIDGVHLFSHTYGCSQLGDDHINTRTMLQNMVRHPNAGAVLVVGLGCENNQVEAFRETLGEFDPQRVHFMVCQHQDDEVEAGVEHLHQLYEVMRQDKRQPGKLSELKFGLECGGSDGLSGITANPMLGRFSDYVIANGGTTVLTEVPEMFGAEQLLMSHCRDEATFDKLVTMVNDFKQYFIAHDQPIYENPSPGNKAGGITTLEDKSLGCTQKAGSSQVVDVLRYGERLKVHGLNLLSAPGNDAVATSALAGAGCHMVLFSTGRGTPYGGFVPTVKIATNSELAAKKKHWIDFDAGQLLHGKTMPQLLEEFVDAIVAFANGKPTCNEQNDFRELAIFKSGVTL

SEQ ID NO: 2161 - DNA, 555 bp, Klebsiella pneumoniae
atgaccgcgtattggctggcccagggggtcggcgtcatcgcctttcttatcggcattaccacctttatcaaccgcgatgaacgccgtttcaggctacagctggcggtctatagcgctattatcggcgttcattttttcctgatgggcgccgggccggctggaatgagcgccgggctcaatgcgcttcgcacggtcatttccttacgcacccgtagcctgtgggtgatgacagtctttatcctcctgacgttgattctcggcctgggtaaactgcagcatgccatggagctgctgccgatcattggcaccgtcgccagcacctgggcgctgtttcgctgcaaagggctaaccgtccgctgcgtgatgtggtgctccaccgcctgctgggtcacgcataatctgtggttgggttccattggcgggacgctgatagaaggcagtttcctgatcgtcaacgggctgaacatcattcgcttccgccggatgcaaaagcgcggtatcgatccgtttaaggttgaaaacgcagtacaggaagagagcccctccgcccgatag

SEQ ID NO: 2162 - protein, 184 aa, Klebsiella pneumoniae
MTAYWLAQGVGVIAFLIGITTFINRDERRFRLQLAVYSAIIGVHFFLMGAGPAGMSAGLNALRTVISLRTRSLWVMTVFILLTLILGLGKLQHAMELLPIIGTVASTWALFRCKGLTVRCVMWCSTACWVTHNLWLGSIGGTLIEGSFLIVNGLNIIRFRRMQKRGIDPFKVENAVQEESPSAR

SEQ ID NO: 2163 - DNA, 999 bp, Escherichia coli
atgaagctgaagcttaactgggaaagcgcgctgctggcgttgctgatcgtggagatcctgctgttcggcgcgctgaatccgcgcatgctggatctcaatatgctgctctttagcaccagcgactttatctgcatcggcatcgtcgcgctgccgctgacgctggtgatcatcagcggcgggatcgatatttcgctgggctcgaccatcggcctgtgcgccatcgccctcggggtgatgacccaggcgggctggccgctgtggctcgcggtatcgctgacgttgctcttgggactgctgtgcgggttattcaacgccgcgctgatccactacaccggcatcagcccgctggtgatcacgcttggtacgctgtatctgtacggcggcggcgcgctgctgctttccgggatggccggcgcgaccggttacgaggggattggcggttttcccgatagcttcaccgccttcgccaatttaaccctcgccggactgccgctgccgctggtgctgttcgcgattatcacctttttcttctggctgctgacccatcgcgggcgctttggccgccacctctttttactcgggcaaaacccgcgcgccgcgcgctatgccgcgctgtcggtgaacggcatcccgtacgtgctgtatggcctggtgggcgtcgcctcggcggtcgcggcgctggtgatggtctcctatttcggctcggcacgttcggatttaggccgcgacctgctgatgccggcgctgaccgcggcggtgctcggcggggccaatatttacggcggctcgggatcgatactgggtaccgcgctggcggcattgctggtggggtatctgcaacagggtttacagatggtcggcatccccaaccaggtgtcgagcgcgctgtcaggggcgctgttggttgtggtggtgatggggcgttcgctgagcctgcaccgtgaatgggtgcgcgcgacctggcggcgtcttttctcgcataaaacaatcggagcataa

SEQ ID NO: 2164 - protein, 332 aa, Escherichia coli
MKLKLNWESALLALLIVEILLFGALNPRMLDLNMLLFSTSDFICIGIVALPLTLVIISGGIDISLGSTIGLCAIALGVMTQAGWPLWLAVSLTLLLGLLCGLFNAALIHYTGISPLVITLGTLYLYGGGALLLSGMAGATGYEGIGGFPDSFTAFANLTLAGLPLPLVLFAIITFFFWLLTHRGRFGRHLFLLGQNPRAARYAALSVNGIPYVLYGLVGVASAVAALVMVSYFGSARSDLGRDLLMPALTAAVLGGANIYGGSGSILGTALAALLVGYLQQGLQMVGIPNQVSSALSGALLVVVVMGRSLSLHREWVRATWRRLFSHKTIGA

SEQ ID NO: 2165 - DNA, 618 bp, Klebsiella oxytoca
atgaactcttataaacacccgctgcgcgtcggcgtcggcggcccggtcggctccggtaaaaccgctctgctggaagcgctgtgtaaagcgatgcgcgatacctggcagctggcggtggtcactaacgacatctataccaaagaagatcagcgcatcctcaccgaagcgggcgcgctggcgcctgaacgcatcgtcggtgtggaaaccggcggctgcccgcatacggcgatccgcgaagatgcctcaatgaacctcgccgccgtggaagcgctgagtgaaaagttcggtaacctcgaccttatcttcgtggaaagcggcggcgataacctgagcgccaccttcagcccggagctggcggatctgaccatctacgtcatcgatgtggccgaaggggagaagatcccgcgcaaaggcggaccggggatcaccaaatccgatttcctggtgatcaataaaaccgaccttgccccctatgtgggcgcgtcgctggaggtgatggcgagcgatacccagcgtatgcgcggcgatcgcccatggaccttcaccaatctgaagcagggcgacggcctgagcaccattatcgccttcctcgaagacaaaggcatgcttggcaaatag

SEQ ID NO: 2166 - protein, 205 aa, Klebsiella oxytoca
MNSYKHPLRVGVGGPVGSGKTALLEALCKAMRDTWQLAVVTNDIYTKEDQRILTEAGALAPERIVGVETGGCPHTAIREDASMNLAAVEALSEKFGNLDLIFVESGGDNLSATFSPELADLTIYVIDVAEGEKIPRKGGPGITKSDFLVINKTDLAPYVGASLEVMASDTQRMRGDRPWTFTNLKQGDGLSTIIAFLEDKGMLGK

SEQ ID NO: 2167 - DNA, 576 bp, Enterobacter cloacae
atggcgacgctcctttatctgcatggctttaacagctctccgcgctcggcgaaggcgacggcgttaaagacctggctggcgcagcactatcctgagatcaccatggtggtgccggagttgccgccttacccggcggaaacggcggagctgttggagtccatcgtgctggagcacggaggcgagccgctgggggtcgtagggtcgtcgctgggcggctactacgcgacctggctttcgcagtgctttatgctgccggcggtggtggttaacccggcggtgcggccgtttgaactactaaacaattttctcggccacaatgagaatccatacaccgggcagcaatatgtgctagagtctcgccatatttacgatctcaaagtcatgcaaatcgacccgctcgaagcgccggatttactctggctgctgcagcagaccggggatgaagtgcttgattaccgccaggccgttcattactacgcctcttgccggcagacggtagaggagggcggtaatcacgcatttgtcggctttgacgatcatttcactcagattatcgaatttctcggcctgcgctaa

SEQ ID NO: 2168 - protein, 191 aa, Enterobacter cloacae
MATLLYLHGFNSSPRSAKATALKTWLAQHYPEITMVVPELPPYPAETAELLESIVLEHGGEPLGVVGSSLGGYYATWLSQCFMLPAVVVNPAVRPFELLNNFLGHNENPYTGQQYVLESRHIYDLKVMQIDPLEAPDLLWLLQQTGDEVLDYRQAVHYYASCRQTVEEGGNHAFVGFDDHFTQIIEFLGLR

SEQ ID NO: 2169 - DNA, 426 bp, Escherichia coli
atggcgatgcgtcttaatgaaaacctggacgataacggcgaaatgcatgagatcaacgtgacgccgtttatcgacgtcatgctggttctgctgattatctttatggtggccgcgccgctggcgacggtcgacgtgaaggtcaatctgcctgcctcctccagccagccgcaaccgcgaccggaaaaacccatctacctgtcggtgaaggcggataagagcatgttcctcggcaacgacccggttaccgaagcgaatatgattaacgccctggatagcctgaccgccggcaaaaaagataccaccgtcttcttccgcgcggataaaaccgtcgattacgagacgatgatgaaagtgatggataccctgcatcaggcgggctatctcaagatcgggctggtgggcgaagagaccgtcaaagcgaagtaa

SEQ ID NO: 2170 - protein, 141 aa, Escherichia coli
MAMRLNENLDDNGEMHEINVTPFIDVMLVLLIIFMVAAPLATVDVKVNLPASSSQPQPRPEKPIYLSVKADKSMFLGNDPVTEANMINALDSLTAGKKDTTVFFRADKTVDYETMMKVMDTLHQAGYLKIGLVGEETVKAK

SEQ ID NO: 2171 - DNA, 288 bp, Enterobacter cloacae
atggaaaatcattttggcaaaggcttaatggcggggctacaggcatcctatgctgacaccgccgcgcatgcggcgaatttttgcgccgactataaacgcgggtttgtgctcggctactcgcaccgcatgtttgaaaaaaccggcgaccgccagctcagcgcctgggaagcggggatcctcacccgtcgctatggccttgacagagatatggtgatggatttcttcaaagaaggtgggtcgggtatggcgatgcgctattttctggcgggctatcggctggaaagctaa

SEQ ID NO: 2172 - protein, 95 aa, Enterobacter cloacae
MENHFGKGLMAGLQASYADTAAHAANFCADYKRGFVLGYSHRMFEKTGDRQLSAWEAGILTRRYGLDRDMVMDFFKEGGSGMAMRYFLAGYRLES

SEQ ID NO: 2173 - DNA, 699 bp, Enterobacter cloacae
atgcatcatgacctggtcgatgtgctaatcattgaagatgagagcgaactggcgcgcctgcacgccgagcttgtgcaaaaacacccgcgactgcggctggcaggcatggcggcctccctcgcccaggcgcggcagctgcttcacgccacgccgccgcagctggtgctgctggataactatttaccggacggcaaaggcgtcacgctgatgaccgacccggcgctggcgaccagccaatgctcggtgatctttatcaccgccgccagcgatatggaaacctgcagccaggccatccgcaacggcgccttcgactatatccttaagccggtatcatggaagcggctgagccagtcgctggagcgctttatccagttctacgatcagcaacgagagtggaaaatcgtcgatcagcaaaacgtcgattccctctatcaactgcaggcgaagaactatcgcgtggatagcggcagcaaggggattgaagagaaaacgctggcgctggtgcagggactgtttagcgaccgggaagcgcactgtttttccgttgatgaagtggtcagcgccgccgggctcagcaaaaccaccgcccgtcgctatctggagcacggcgttgagaccggttttctggaagtggagatgctgtacggaaaaattggccatccgcggcggctgtatcgccgcgctaaggtcaaaagttaa

SEQ ID NO: 2174 - protein, 232 aa, Enterobacter cloacae
MHHDLVDVLIIEDESELARLHAELVQKHPRLRLAGMAASLAQARQLLHATPPQLVLLDNYLPDGKGVTLMTDPALATSQCSVIFITAASDMETCSQAIRNGAFDYILKPVSWKRLSQSLERFIQFYDQQREWKIVDQQNVDSLYQLQAKNYRVDSGSKGIEEKTLALVQGLFSDREAHCFSVDEVVSAAGLSKTTARRYLEHGVETGFLEVEMLYGKIGHPRRLYRRAKVKS

SEQ ID NO: 2175 - DNA, 354 bp, Enterobacter cloacae
atgtatgtcattaccgcgaacgtaaagaaaaaggggcagagcacgtcgcaaatgacaaatgataaagattatcatatgatattggttatcattatcgttgtgagaggtgaaaccatgctgcagcgagcattaggaagcggctggggagtgatgattcccggcgcgctaattgtcgctctcgggtatgccggagtgtcggctgacgtatggcgggtactggtcgcggtgggcatgctgatgtccgcggcgatgatctggcatcgtcaattgcgccattttatcctgctgccatcgtgtgtcgcgttgatcggcggaataatgctgatgattgtggatattaaactgagaggataa

SEQ ID NO: 2176 - protein, 117 aa, Enterobacter cloacae
MYVITANVKKKGQSTSQMTNDKDYHMILVIIIVVRGETMLQRALGSGWGVMIPGALIVALGYAGVSADVWRVLVAVGMLMSAAMIWHRQLRHFILLPSCVALIGGIMLMIVDIKLRG

SEQ ID NO: 2177 - DNA, 1047 bp, Enterobacter cloacae
atgactgcacaaacctggcgagcacactacgcacaaaaatatcaatattccttacggctttttttactgcttaatttcatttcttcctcgctgtcgctggtcacccccctatttacggtagttcgttttacgctgccctgcgccctgatcgtcgtctgcagcgggctgctgctgctctggcactggaaatggccgcaatcgaaaataaatattcccactatctcgttgttatttggcatgctatgggcatggcacgtagtgacaaaagcgatgctattgacaccgccgcattttaactatctggtgatcgccctattaagcattctgtttatcggcaccatcgctttttccaataatatcactgcctttaccctccactctttaccaactttccttgcctgcctgataatggcggagggggaacaatggttgcgtatgacttactgctttatgctgcctatagccggtattaccctgcaaaatattatccagaagcgcagcgatgcctttacgcagggtttaatggataaactgatgcatgaacgcaatacgctcaacgatctcagtatgctcgatcccctgaccggtttgtataatcgccgcggactgcagaaccgcctcgataccctgctggcgctggacggcgacaaccactacgtgctgctcctcgatatcgatcacttcaaggcctataacgatcactatggtcatatgatgggtgaccaggcgcttattcgcgtctctgctgccattcgcaacgctgtacgctcacgcgatattgtcgcccgctttggtggagaggagtttatggtgctgctgaccaatagcagcgaagaaacggcctggaagacagccgaacgtatacgtcagcgggtctatgacctgaagatcccgcatatgtttaatgaaagcgtcgccaccaacgtcaccatcagtattggcctgacgccgctcattaatgacaacattgaacaagcgctggcgcgcgccgacggcgcactctatgaggccaaaaataaaggccgcaacattattcttgccagttga

SEQ ID NO: 2178 - protein, 348 aa, Enterobacter cloacae
MTAQTWRAHYAQKYQYSLRLFLLLNFISSSLSLVTPLFTVVRFTLPCALIVVCSGLLLLWHWKWPQSKINIPTISLLFGMLWAWHVVTKAMLLTPPHFNYLVIALLSILFIGTIAFSNNITAFTLHSLPTFLACLIMAEGEQWLRMTYCFMLPIAGITLQNIIQKRSDAFTQGLMDKLMHERNTLNDLSMLDPLTGLYNRRGLQNRLDTLLALDGDNHYVLLLDIDHFKAYNDHYGHMMGDQALIRVSAAIRNAVRSRDIVARFGGEEFMVLLTNSSEETAWKTAERIRQRVYDLKIPHMFNESVATNVTISIGLTPLINDNIEQALARADGALYEAKNKGRNIILAS

SEQ ID NO: 2179 - DNA, 675 bp, Enterobacter cloacae
atggaaaaaaatagtacaacccgccatgtcgccatcgtagaaaaatgcgtgatgacggaaatggcatggcgctatatctttagtcgtgaagataatcgccgttatcatattcatctgtttaaaaatgtcagtatgctcagggcggcggaaataccgtttccctggtcaaccattattttttctctttcgggaagtcgttcttcacgagccgagagtctgctctttgttcatgaaatggcgcggtgccggccggaagtccaaacgattattctggctaataatgaaagtgaaatgcacctgatcggccatcttatgccggcctgtttgcacggcatactgaataaatccgcgccgcgacgcgggctacaggagcgtttgctgcagctactggacaatcatcatctcagcggcagcgaacaattttgcgacagagaggcgtgcaacgatccgctaagcccgacggagcacgccatccttcggtatatgtcgtggggatattcgctttctgatattgcgatacagctcaaccggaatattaaaacgatccgcgcgcataagtttaacgccatgaccaagctcggagttcgctcagacattggtttattaaacgcggcggatatcctgttgcatttaccgctcaatagtacgacaagcgccgttaaacaggtagcgtaa

SEQ ID NO: 2180 - protein, 224 aa, Enterobacter cloacae
MEKNSTTRHVAIVEKCVMTEMAWRYIFSREDNRRYHIHLFKNVSMLRAAEIPFPWSTIIFSLSGSRSSRAESLLFVHEMARCRPEVQTIILANNESEMHLIGHLMPACLHGILNKSAPRRGLQERLLQLLDNHHLSGSEQFCDREACNDPLSPTEHAILRYMSWGYSLSDIAIQLNRNIKTIRAHKFNAMTKLGVRSDIGLLNAADILLHLPLNSTTSAVKQVA

SEQ ID NO: 2181 - DNA, 723 bp, Klebsiella oxytoca
atgttaccaggacaaggtaagtttggcgtcgttattagtaaaattcccgtcatgcaatcagggttaaaggtgatcttcaatgagaacctccctgattacgaactgagtttttgtcgttctcatgatgagctcacccttttacaactgcggcgggcggtgctggttgtcgcggatatctccggcgagattgcgcacccccgagccgtctgcgagcgttattactccctcatgactcagtaccgtgatattcactgggtttttatggtcagcgacagcctctatccgttggccgttgagctattaattcgtcctgaaagctcgttgatctccgagagcgagccggttaaccggctgattgaggtgatttgcgccggtagccgtgcggctgaacagattagccgtacgctgtttgccggggatgaggacagcgatttcgcaagctaccactctgcggcgatgctcactctttcagagcgtaaagttctgcgccttctggcgaaggggtggggaataaaccagatcgccgcgctgttgaaaaagagtaataagacgatcagcgcgcagaaaaacagcgcaatgcgtcgcttatcgctacgcagcaacgctgaaatgtatgcctggatcaacagcgcgcagggaatgcaagagctgaatatcaattcagcttacggggagcaaatggaatggaaaaaaatagtacaacccgccatgtcgccatcgtag

SEQ ID NO: 2182 - protein, 240 aa, Klebsiella oxytoca
MLPGQGKFGVVISKIPVMQSGLKVIFNENLPDYELSFCRSHDELTLLQLRRAVLVVADISGEIAHPRAVCERYYSLMTQYRDIHWVFMVSDSLYPLAVELLIRPESSLISESEPVNRLIEVICAGSRAAEQISRTLFAGDEDSDFASYHSAAMLTLSERKVLRLLAKGWGINQIAALLKKSNKTISAQKNSAMRRLSLRSNAEMYAWINSAQGMQELNINSAYGEQMEWKKIVQPAMSPS

SEQ ID NO: 2183 - DNA, 882 bp, Enterobacter cloacae
atgccgttcgttcaaactgtgcccgtatttaagctgtatggcgaagagtgcggctggccgacgccggacctgctgcactgtgagtcgattttacagcgcagcagcctgtatcagtggcatattcgcgtccatcagcatgcggaaatggtccagcttctctatctgcatcaggggcgggcggagatcgaaattgaaggcgccaccgcggtgatgacggagtcctgcatccaggtggttcccgccctctgtattcacgggtttaatttttcacccgggacgcaagggtttgtgctctctctggcgctgccgctgctgagccggtttgaaaatcagttcggtcgccctctggatgtgcttagcgtgccgcagtgtgtgccggtgggccgttctcgcgggcgcatgcatacgctgttttcagcgcttcgcgaggagtactgcgaagagcacgatgcgcgagaaatgatgctctattcgctgctggggacgctgttggtctggctgaaccgacagtgccatcccgcgtcccccgcggaagataaagcggagcggaagcgcagcatgatgcgccacttcgcccgccttatcgagagccactaccgacagcatctcccgttggcggagtatgcgaagctgattggactgtcggttacgcacttaaattatttatgtcgtgagttttatggctgtagcgctcttggagtattgcatcagcggttgatgcttgaagcgcgacgcaatctgcagtacacccgcatgacgattacacaactctctgattatttggggtttagcgatgcagcctatttttcgcgttttttccgtcgctatagcggtatgtcacccaaagcatttagagaaacaattaaagataatgcttcataa

SEQ ID NO: 2184 - protein, 293 aa, Enterobacter cloacae
MPFVQTVPVFKLYGEECGWPTPDLLHCESILQRSSLYQWHIRVHQHAEMVQLLYLHQGRAEIEIEGATAVMTESCIQVVPALCIHGFNFSPGTQGFVLSLALPLLSRFENQFGRPLDVLSVPQCVPVGRSRGRMHTLFSALREEYCEEHDAREMMLYSLLGTLLVWLNRQCHPASPAEDKAERKRSMMRHFARLIESHYRQHLPLAEYAKLIGLSVTHLNYLCREFYGCSALGVLHQRLMLEARRNLQYTRMTITQLSDYLGFSDAAYFSRFFRRYSGMSPKAFRETIKDNAS

SEQ ID NO: 2185 - DNA, 471 bp, Escherichia coli
atgattacattattaagggtagaccatcgattacttcacggccaggtggccttttcctggacccaatatgtcggcgccgattgtattttaatcgccaacgatagcgtccctggcgatgagctgcggaaaaccaccattaagcttgccaaaccgccctcggtgaagctggtgattaaaaatataaatgattctattgaggcaataaaaagcggggttaccgataaatataatttatttattgttgtggagtcggttaatgacgcctggcgtattgccagcgccatcgacgaaataaaaagcataaatcttggcggaataaaggctaaagagggcagtaaaaatatctctaaggcgattaatttactgccgacagaaatagaacagctacaacaactggtgggcaagggcgtcgaagtggagattcgccaggtcccgaacgatcgcaaacagctttttgcggaatgcgtgtaa

SEQ ID NO: 2186 - protein, 156 aa, Escherichia coli
MITLLRVDHRLLHGQVAFSWTQYVGADCILIANDSVPGDELRKTTIKLAKPPSVKLVIKNINDSIEAIKSGVTDKYNLFIVVESVNDAWRIASAIDEIKSINLGGIKAKEGSKNISKAINLLPTEIEQLQQLVGKGVEVEIRQVPNDRKQLFAECV

SEQ ID NO: 2187 - DNA, 873 bp, Enterobacter cloacae
atgaacgagtatattgccgtcgattggggctccacccagctgcgggcatggcggatgcgtgatggcgaatgcatcgacaagctgaaactgccctgcggcgtcacgcgtctgaacgggcagcgcgccgaagcggtatttcagcagcagttggcgccgtggcgcggcgaccccgcgctgccggtggtgatggcgggcatgatcggcagcgatgccggttggcaaccggtgccttatctggcctgcccgctggcgctggaggcactcaacggtcagttatatgaggtggcggaaaaagtgtggatcgtgccggggctgaaagtggcgcaggctgcagattacgacgtaatgcgcggtgaagaaacgcagctgctgggcgcctggcaactgatgcccgcggagtgttacgtgatgcccggcacccactgcaaatgggtgcaggtgcaaaacggcgtggtgcgccagttcgccacggcgatgaccggcgaactgcatcacctgctgcttaaccattcgctgctcggccagcaactgcctgcgcagttcccggatgaagcctctttcgccctcggtatagaaaaagggttaaatcagccggcgttattgtccgggctttttagcgcccgcgccgcgcgggtgttaggctcgctggcggcgacttcggtgagcgattatctctccgggctgttgattggcgcggaggtggcgacattcagcgaacgctatcgcgccagccgcgtggtgctggttggtgagcactcgctcaacgcccgttatcagcaggcgatggcggcgcgtgggttagccgtttcctgttgctccggcgaggcggcgtttctttcgggtatagcgaggatgattgatggacaagattaa

SEQ ID NO: 2188 - protein, 290 aa, Enterobacter cloacae
MNEYIAVDWGSTQLRAWRMRDGECIDKLKLPCGVTRLNGQRAEAVFQQQLAPWRGDPALPVVMAGMIGSDAGWQPVPYLACPLALEALNGQLYEVAEKVWIVPGLKVAQAADYDVMRGEETQLLGAWQLMPAECYVMPGTHCKWVQVQNGVVRQFATAMTGELHHLLLNHSLLGQQLPAQFPDEASFALGIEKGLNQPALLSGLFSARAARVLGSLAATSVSDYLSGLLIGAEVATFSERYRASRVVLVGEHSLNARYQQAMAARGLAVSCCSGEAAFLSGIARMIDGQD

SEQ ID NO: 2189 - DNA, 1488 bp, Enterobacter cloacae
atgaataatatgtcatttatgatttggttttccgtttatgcctgcgcgatgattaccttaggctggtacgtttcgcgcaaacagaaaaccggcgaagactttttacttggcggtcgttcgctgccgatgatcctcactctcggttcgacggtcggcaccatggtggggaccggctccagcgtcggcgccgtcggctttggctacagcaacggctgggccgggatgctttacggcctcggcggcgcggtggggattctgctggtggcatggttattcgcgccggtacgtaaacttcgcttcatgaccatgagtgaagaaatgtcgtattacactggcggcagtaaaattataaaaaacctcgtcgcaatacttatttttattgcctctataggctggctgggggcgcatatattaggcggcggattatacctggcgtgggccagcggcattgatattaatgtcgcgaaaattattatcgcgctggcttttgtggtttatgtcggtattggcggctattccgcggtggtgtggatcgataccattcaatcgatcgtgctgttcgtgggctttattttaatggcgatactggcggttcatcacgttggcggctggaaccatattcagcaggccgtcgatccggcggcgcaaagcctgttcgcggtcgataaattaggcgtgttgccggcgctatcattggcgatggtgatcggcgtcggcgtgctggcgacgccttcttatcgccagcgtatttactcggcgaagaccgtctcctcggtgcgccagtcctttaccattaccggcctgctgtatctgggcttctccttcctgccggcgatcatcggtatggcggtatggaccatgaacccgcagctggagaacagcggcttcgctttcttgtttgccacccaggtgctgccgccggtgctggcgatggcgatcctgattgccggcatgtcggccaatatgtcttccggcagctctgatgccatcgccgcggtgtccattatgctgcgcgacctctacaccctggtgaccggccatatgcccgcgccggagaaagcgattcgcctgtcgcggatcttcctggttctggtgattgcgctggcgctgctgtttgccctgacctccaacgacatcatcagctacatcaccaaaatgatctcgatgattatgtccgggatgtttatctgcaccatgcttggccgtttctggacacgctttaactggcagggcgcggtcgccgcgctggccggcggcgccggggcatcggttgcggtgctggtggatagcgactggctggcgttctggggcaacccgtgtattccggcggtgctgacgagcctggtggcctcggttgtggtgacgttactgaccccggccagcagcatgagccgcgagcaggcgctggagatgattacccgcgagcgtgaaagccgcccaacgccgccgccgctgccgattggcaaacgtcatacctcacgcgggtaa

SEQ ID NO: 2190 - protein, 495 aa, Enterobacter cloacae
MNNMSFMIWFSVYACAMITLGWYVSRKQKTGEDFLLGGRSLPMILTLGSTVGTMVGTGSSVGAVGFGYSNGWAGMLYGLGGAVGILLVAWLFAPVRKLRFMTMSEEMSYYTGGSKIIKNLVAILIFIASIGWLGAHILGGGLYLAWASGIDINVAKIIIALAFVVYVGIGGYSAVVWIDTIQSIVLFVGFILMAILAVHHVGGWNHIQQAVDPAAQSLFAVDKLGVLPALSLAMVIGVGVLATPSYRQRIYSAKTVSSVRQSFTITGLLYLGFSFLPAIIGMAVWTMNPQLENSGFAFLFATQVLPPVLAMAILIAGMSANMSSGSSDAIAAVSIMLRDLYTLVTGHMPAPEKAIRLSRIFLVLVIALALLFALTSNDIISYITKMISMIMSGMFICTMLGRFWTRFNWQGAVAALAGGAGASVAVLVDSDWLAFWGNPCIPAVLTSLVASVVVTLLTPASSMSREQALEMITRERESRPTPPPLPIGKRHTSRG

SEQ ID NO: 2191 - DNA, 939 bp, Enterobacter cloacae
atgaaaaaatatatgactggcgcagttcgtttatccgcaatggtcgcgggcatgatgatggcatggcaggcagcggcggcgcagccgaaagagctcaatctgggcattctcggcggccagaacgccacccagcaaatcggcgataaccagtgcgtgaaggccttcctcgataaagagctgaacgtggataccaaactgcgcaactcttccgactattccggggtgatccagggcctgctggggggcaaagtcgacgtggtgctgagcatgtccccctcctcctacgcctcggtttatctcaataatccaaaagcggtggatatcgtcggcatcgccgtggacgacaaagatcagtctcgcggctatcactcggtggtgattgtcaaagccgactccccgtacaaaacgctggacgatttaaaaggcaaagccttcggcttcgccgatccggattccacttccgggtatctgatccctaaccatgcgtttaaagaaaaatttggcggtaacgccgacaacaaatacaacaacaccttctccagcgtcaccttctccggcggccatgagcaggacatcctcggcgtgctgaatggccaattcgcgggcgcggtcacgtgggcctcgatggttggcgattacaacaccggctacactaccggcgcgttcaaccgcctgattcgcatggatcatccggatctgatgaagcagatccgcattatctggcaatcgccgctgatcccgaacggcccgatcctggtgagcaatgcgctgccggcggactttaaggcgaaggtcgtggcggcagtgaaaaagctggacaccgaggatcacgcctgctttatcaaagcgatgggcggtactcagcacatcggcccgggcagcgtggctgacttccagcagattattgatatgaaacgcgagctggtgagcgcgcgttaa

SEQ ID NO: 2192 - protein, 312 aa, Enterobacter cloacae
MKKYMTGAVRLSAMVAGMMMAWQAAAAQPKELNLGILGGQNATQQIGDNQCVKAFLDKELNVDTKLRNSSDYSGVIQGLLGGKVDVVLSMSPSSYASVYLNNPKAVDIVGIAVDDKDQSRGYHSVVIVKADSPYKTLDDLKGKAFGFADPDSTSGYLIPNHAFKEKFGGNADNKYNNTFSSVTFSGGHEQDILGVLNGQFAGAVTWASMVGDYNTGYTTGAFNRLIRMDHPDLMKQIRIIWQSPLIPNGPILVSNALPADFKAKVVAAVKKLDTEDHACFIKAMGGTQHIGPGSVADFQQIIDMKRELVSAR

SEQ ID NO: 2193 - DNA, 1107 bp, Klebsiella pneumoniae
atggccgcacgtttatcgcgcattattcccgtttcattgacgctgctggcggccatggcgctgagcgcctgtaccagccagcaggctccggcgctgaaagagggcgagaagcctgttgacgtggcgtcggtggtgcggcagaaaatgccggccagcgtcaaggatcgggaggcctgggcgcaagccatcgccaccgcgtttgacagccagaagctggcgccgacggaagaaaacgtctgctcggtgctggcggtcgcgcagcaagagtctaactatcagtccgatccggtggtgccggggctgaataaaatcgcctggcaggaaattgaccgccgggcggaaaaaatgcacattccgccgtttctggtccataccgcgctgaagatcacctcgccaaacggtaaaagctatagcgaccgtctggacaatgtgaagacggaaaagcagttgagcgccatttttgatgactttatcgggatggtgccgatggggcagaagctgttcggttcccttaacccggtgcacaccggggggccgatgcaggtcagcattgcttttgccgagcagcacacctccggctacccgtggaaaatgaacggcacggtgcgccaggaggtcttcagtctgcgcggtggcctgtggtttggcacctatcatctgctgaactatccggccagttatagtgcgccattgtaccgctttgccgacttcaacgccggctggtacgccagccgtaacgccgccttccagaacgcggtggtgaaagccagcggggtaaaactggcgctcgacggcgaccttatccgctacgacagcgaggagccgggcagcaccgagctggcggtgcgtcgcctggcgagccagctggggatgagcgacagcgagatccatcgtcagttgaaaaagggcgacagcctggcgtttgagaagaccgatctctatcagcaggttttccgtctcgccgagaaaaagacgggcaaaaccctgccgcgggagatgttgccagggatccagctggagagtccaaaaatcacccgaaatctgacgacggcgtggtttgcgaaacgggttgatgagcggcgggcaaactgtatggcgcggcgttaa

SEQ ID NO: 2194 - protein, 368 aa, Klebsiella pneumoniae
MAARLSRIIPVSLTLLAAMALSACTSQQAPALKEGEKPVDVASVVRQKMPASVKDREAWAQAIATAFDSQKLAPTEENVCSVLAVAQQESNYQSDPVVPGLNKIAWQEIDRRAEKMHIPPFLVHTALKITSPNGKSYSDRLDNVKTEKQLSAIFDDFIGMVPMGQKLFGSLNPVHTGGPMQVSIAFAEQHTSGYPWKMNGTVRQEVFSLRGGLWFGTYHLLNYPASYSAPLYRFADFNAGWYASRNAAFQNAVVKASGVKLALDGDLIRYDSEEPGSTELAVRRLASQLGMSDSEIHRQLKKGDSLAFEKTDLYQQVFRLAEKKTGKTLPREMLPGIQLESPKITRNLTTAWFAKRVDERRANCMARR

SEQ ID NO: 2195 - DNA, 303 bp, Klebsiella pneumoniae
atggctgaattcagtttttcaaaatcgcttttgggaaataaaaaaaggggggcgctgaccggcagccatgtcgcctacgggctgttcgtgttgatctgctgctgggccggcgcgcagatgctcagcatgctgatccacgccccgggggtatttgaacgcctgatgcaagcccaggacgccagccgtccgcaagtcgacatcagcctcgccgtgggtaccctctttggtctgatccctttcctgatcggctgcacgttcatcggggtactggcgcttatcgtgcgctggcgtcagcgccgttaa

SEQ ID NO: 2196 - protein, 100 aa, Klebsiella pneumoniae
MAEFSFSKSLLGNKKRGALTGSHVAYGLFVLICCWAGAQMLSMLIHAPGVFERLMQAQDASRPQVDISLAVGTLFGLIPFLIGCTFIGVLALIVRWRQRR

SEQ ID NO: 2197 - DNA, 204 bp, Klebsiella pneumoniae
atgaagctcactgataaaattcgccgcgattggcactactacgccgtggcgctggggttgatttttattcttaatggcgtggtggggctgctggggtttgaaactcaggggtggcaatcctacgccgtcggtctgatcacctgggtcattagcttctggattgcgggctttgtgatccgccgccgcccggcagaagaggcctga

SEQ ID NO: 2198 - protein, 67 aa, Klebsiella pneumoniae
MKLTDKIRRDWHYYAVALGLIFILNGVVGLLGFETQGWQSYAVGLITWVISFWIAGFVIRRRPAEEA

SEQ ID NO: 2199 - DNA, 1098 bp, Klebsiella pneumoniae
atggcaaagatgagggttgggatcgtttttggcggcaagtcggcggagcatgaagtgtcgctgcagtcagcgaagaatatcgtggaagcgattgataaatcgcgcttcgatgtggttctgttgggtattgataaacaggggctgtggcatatcaacgacgccggcaactacctgctcaacgcacaggatcctgcccgcattgccctgcgcccttccacggtgactctggcgcagatcccgggccgcgaagcgcagcagctgattaacgccgaaagcggccaaccgctggcggccatcgatgtgattttcccgatcgtccacggcacgctgggtgaagatggctccctgcaggggatgctgcgcatggcgaatctgccgttcgtcggctccgatgtgctgggctctgcggcctgtatggacaaagacgtgaccaaacgtctgctgcgcgacgccgggctcgccgtcgccccgtttatcacactcacccgcgccaaccgcgcgcagttcagctttgccgatgtcgaagcgaagcttggcctgccgctgttcgttaagccggctaatcagggctcgtcggttggcgtcagcaaagttaaaaacgaagagcagtaccatcaggcggtggccctggccttcgaatttgaccataaagtggtggtggagcaaggcattaaagggcgggaaattgagtgtgcggtgctgggtaacgaccacccgcaggccagcacctgcggtgaaatcgtcctcaacagcgagttttacgcctacgacaccaagtatatcgacgatcagggcgcacaggtggtagtcccggccgctatcgcccctgagatcaacgacaaaattcgcgctatcgcggtgcaggcctaccagaccctgggctgcagcggcatggctcgtgtcgacgtgttcctcaccgccgacaacgaggtggtgatcaacgagatcaacaccctgccgggctttaccaacatcagcatgtatccgaagctgtggcaggccagcggtctcgactacaccagcctgatcacccgcctgattgagctggcgttggagcgccatgccgcggaccgggcgctgaaaacctccatgaactaa

SEQ ID NO: 2200 - protein, 365 aa, Klebsiella pneumoniae
MAKMRVGIVFGGKSAEHEVSLQSAKNIVEAIDKSRFDVVLLGIDKQGLWHINDAGNYLLNAQDPARIALRPSTVTLAQIPGREAQQLINAESGQPLAAIDVIFPIVHGTLGEDGSLQGMLRMANLPFVGSDVLGSAACMDKDVTKRLLRDAGLAVAPFITLTRANRAQFSFADVEAKLGLPLFVKPANQGSSVGVSKVKNEEQYHQAVALAFEFDHKVVVEQGIKGREIECAVLGNDHPQASTCGEIVLNSEFYAYDTKYIDDQGAQVVVPAAIAPEINDKIRAIAVQAYQTLGCSGMARVDVFLTADNEVVINEINTLPGFTNISMYPKLWQASGLDYTSLITRLIELALERHAADRALKTSMN

SEQ ID NO: 2201 - DNA, 684 bp, Klebsiella pneumoniae
gtgagaggaaagacgctgctggtgctggccgggctgctcggcgcgggcctgttgggataccgcaatctgccgccgcacctgaatccgctggcgccgctggcgctggacgatcccccgggctggctgacgtcgtttaagctgcgcaggctgacggcagaccagtgcgcctccttgctggcggaagccaatcgccggcggcttatcgccagccggccggtggccgacagcgagggaagctgccctctgcgtaacgtggtgcgggtggcgaattttggctcggtgcagctgagcagtagttttctcgccagctgcccgctggcgctgagcagtgcgctgtacatcgagcagcaggcgaagccgctgacccggcagctgatggcgagcgatctgcgtcagatcgatcatctcggcagctttgcctgccgcaatatttaccatcgtcaacaggcgcggcgcagtgaacacgccacggcggacgcgctggacgtcagcggtttccgtctggcggacggtagacgcgttagcgtcctgcagggctggcggagcgagacttcgcgcccctggctggcggcgctgttgagcagcagttgccattacttcggtaacgcgctggggccagagtacaacgcggctcacgccaaccattttcatttcggcatgcgcgggcagggcttctgcttttga

SEQ ID NO: 2202 - protein, 227 aa, Klebsiella pneumoniae
MRGKTLLVLAGLLGAGLLGYRNLPPHLNPLAPLALDDPPGWLTSFKLRRLTADQCASLLAEANRRRLIASRPVADSEGSCPLRNVVRVANFGSVQLSSSFLASCPLALSSALYIEQQAKPLTRQLMASDLRQIDHLGSFACRNIYHRQQARRSEHATADALDVSGFRLADGRRVSVLQGWRSETSRPWLAALLSSSCHYFGNALGPEYNAAHANHFHFGMRGQGFCF

SEQ ID NO: 2203 - DNA, 1200 bp, Klebsiella pneumoniae
atggaatcctggaaggttaatctcatctccgtctggtttggttgcttttttaccggcctggcgatcagtcaaattctcccctttttacccctctacgtctcccagctcggcgtcacctcgcatgaagcgctatcgatgtggtcggggctgaccttcagcgtcacttttcttgtctcggcgatcgtctcgccaatgtggggaagcctggcggaccgtaaaggccgcaagctcatgctgctgcgcgcctcgttggggatggcgattgccattttactgcaggctttcgccaccaacgtctggcagctgtttatcctgcgggcgatcatgggcttaacctccggttatattcccaacgccatggcgctggtggcctcccaggtgccgcgcgagcgcagcggctgggcgctaagcacgctgtcgacggcgcaaattagcggggtgatcggcggtccgctgctgggcggtttcctggcggaccacgtcgggctgcggatggtcttttttattacggcgatcctgctgaccatcagttttctggtgaccctgtttctgattaaagagggcgttcgcccgcaggtcagcaaaagcgagcgtctcaccgggaaacaagtctttgcctctttgccctatccggggctggtgatcagcctgttcttcaccaccctggtgatccaattgtgcaacggctcaatcggcccgattctggcgctgtttattaagtcgatggcgccggacagcaacaatatcgcttttctggccgggatgatcgccgcggtgcccggcgtgtcggcactgatttctgcgccacggttgggtaagcttggcgaccgcatcggcacctcgcggatcctgctggcgacgctctgctgcgcggtggtgatgttcttcgccatgtcctttgtcaccaccccgctgcaattgggtacgctgcgttttctgctcggctttgccgatggcgcgatgctcccggcggtgcagaccttattgctgaagtacagcagcgacagcgtcaccgggcgtatctttggctataaccagtcgtttatgtatctgggcaacgtcgccgggccgctaattggcgcctctgtgtcagccatggccggcttccgctgggtgtttattgccaccgccattatcgttttcattaacctctggcagctggcgtggatgctgcgccaaacccgccgggctaacgcctga

SEQ ID NO: 2204 - protein, 399 aa, Klebsiella pneumoniae
MESWKVNLISVWFGCFFTGLAISQILPFLPLYVSQLGVTSHEALSMWSGLTFSVTFLVSAIVSPMWGSLADRKGRKLMLLRASLGMAIAILLQAFATNVWQLFILRAIMGLTSGYIPNAMALVASQVPRERSGWALSTLSTAQISGVIGGPLLGGFLADHVGLRMVFFITAILLTISFLVTLFLIKEGVRPQVSKSERLTGKQVFASLPYPGLVISLFFTTLVIQLCNGSIGPILALFIKSMAPDSNNIAFLAGMIAAVPGVSALISAPRLGKLGDRIGTSRILLATLCCAVVMFFAMSFVTTPLQLGTLRFLLGFADGAMLPAVQTLLLKYSSDSVTGRIFGYNQSFMYLGNVAGPLIGASVSAMAGFRWVFIATAIIVFINLWQLAWMLRQTRRANA

SEQ ID NO: 2205 - DNA, 273 bp, Acinetobacter pittii
gtgaataaatctcaactgattgacaaaattgctgcgggtgcggacatttctaaagctgcagctggacgtgcgttagatgctttaatcgcttctgttactgaatctctgcaggctggggatgacgttgcgctggtaggttttggtacctttgctgttaaagaacgtgccgcccgtactggtcgcaacccgcaaacaggtaaagaaattactatcgctgccgcaaaagtgccgggcttccgtgctggtaaagcgctgaaagacgcggtgaactga

SEQ ID NO: 2206 - protein, 90 aa, Acinetobacter pittii
MNKSQLIDKIAAGADISKAAAGRALDALIASVTESLQAGDDVALVGFGTFAVKERAARTGRNPQTGKEITIAAAKVPGFRAGKALKDAVN

SEQ ID NO: 2207 - DNA, 258 bp, Enterobacter cloacae
atgaccacagtggttttgaatgtaaaaattgacgcagagctaaaagaaaagttgcgtcattatgcggaagttaataacgagaacctgggaacggcaacggaaaagctgctgcagctggcttttcagctggaggagtcagcaggtgaggcgggggtgacggaagaggacattgacagccagcataccgaagaggaagcgacgccacttacccctaaagaaatcaaagcattaagaaaacttctgaagaagaaaaaatga

SEQ ID NO: 2208 - protein, 85 aa, Enterobacter cloacae
MTTVVLNVKIDAELKEKLRHYAEVNNENLGTATEKLLQLAFQLEESAGEAGVTEEDIDSQHTEEEATPLTPKEIKALRKLLKKKK

SEQ ID NO: 2209 - DNA, 1428 bp, Klebsiella pneumoniae
atgtcagcccgacgctttggaacccaatcgctggtacgcctgctcggcaactggcaggagaccagctcacgcacgccgctatggcgccagctggcggaagcgctccgcctgctgatccttgatggtcgcctgacgctgcaaacgcgcctgcccggcgagcgcgagctggcggcggccctgaacgtcagccggaccaccatcgccagcgccctcggccagttgcgggaggagggctttctctacagccgccaggggagcgggtcacgcattgttttgccggaacgccccgccgatcttcctctgcctgccggcatctcatctacgcttaatctatctaccgccgccctcagcgccgggccggaggtccatcaggccttccagcacgctatgaccctgctgccgccctatctcgcacagactggctatgaccagcaggggctgccggtgctgcgggaggcgattgcccggcgctacagcgaacgcggtctgccgacgcggcccgatgaggtgatggtggtcaacggcgccctcagcgccttcgcgctgatcctgcgcctgttcaccgggccgggcgatcgggtggttattgacgcccccacctatccgatggccatcagcgccattcagggcgcctcctgccgccccgtcggggttgcgcttccgcagcagggatgggactgcgatggactggcggcgactattgcgcagactgcgccgcggctggcgtggctgatgccggattttcacaaccccaccggacgctgtatggatgcccccacccgccagcgggttgcggacatcgccgccaggacgcgaacaacgctggtaatcgacgagaccatggccgacctttggtataacgcgccgccgcccccgccgctggccagcttcaatcccgatgccgcggtgctcaccattggttcggccgggaaaagcttctgggggggactacgtatcggctggatccgcgccagcgcgcggaccatcgcctcgcttattcaggcccgcgattcgctggatttgggtacgccgctgctggagcaactggcctgcagctggctactggaaaatgccgccacactgctgccgccgcggcggaatatgctcaaggcgcgccgggacatgtgcgaaacgctgatggcggaatattttccccgctggcggttttcgccaccggaaggtgggctctctttttgggtggaacttcctgacatgctggccaccctgttctctgcgcgtgcggaaagccaggggatccatatcggcaccggtacgcggtttgggctggaaggggcgttcgatcgctatttacgtctgccgtttacgctgccggatgaagcattgcgccgggccttctccacgctacaaccgctgtggcaaagccttgctgaacagaaggaaaatacacgtttgcgaaaaataatataa

SEQ ID NO: 2210 - protein, 475 aa, Klebsiella pneumoniae
MSARRFGTQSLVRLLGNWQETSSRTPLWRQLAEALRLLILDGRLTLQTRLPGERELAAALNVSRTTIASALGQLREEGFLYSRQGSGSRIVLPERPADLPLPAGISSTLNLSTAALSAGPEVHQAFQHAMTLLPPYLAQTGYDQQGLPVLREAIARRYSERGLPTRPDEVMVVNGALSAFALILRLFTGPGDRVVIDAPTYPMAISAIQGASCRPVGVALPQQGWDCDGLAATIAQTAPRLAWLMPDFHNPTGRCMDAPTRQRVADIAARTRTTLVIDETMADLWYNAPPPPPLASFNPDAAVLTIGSAGKSFWGGLRIGWIRASARTIASLIQARDSLDLGTPLLEQLACSWLLENAATLLPPRRNMLKARRDMCETLMAEYFPRWRFSPPEGGLSFWVELPDMLATLFSARAESQGIHIGTGTRFGLEGAFDRYLRLPFTLPDEALRRAFSTLQPLWQSLAEQKENTRLRKII

SEQ ID NO: 2211 - DNA, 882 bp, Klebsiella quasipneumoniae
atgaacgatttcacttcccttctgcagcagggcaatgcctggctgtttatacccagcgcaatactgctcggcgcgctgcacggcctcgaaccgggccattcaaaaacgatgatggccgcctttatcgtggcggtacggggaacgttaaaacaggcggtactgctggggctggcggccacggtttcccatacggcggtggtctggctgatcgccatggccggcctgtggtttggccgcggctggaacgcccaaacctctgaaccctggtttcagctggtctcagggattgtcgttgtgctgattgcctgctggatgctctggcgcacctggcgcgaatcgcagcctcacacgcaccatgagcaccaccatgaacatgagcaccaccatgaacatgatcaccaccatgaccatgatcaccgccatgaccatgatcaccgccatgaccatgatcaccgccatgaccatcaccatgcgtcctcatccgccgcgccgctggtggcggaggagtggcaggacgcgcatcagcgggctcatgctcaggagatcaaccggcgctttgatggccgccaggtgacgaccgggcagatcgtgctgtttggcctgaccggggggctgatcccctgcccggcgtccattaccgtgctgcttatctgtttacagctgaagaaattctcgctgggcgccacgctggtgctgggctttagcgttggtctggcgctgacgctggtggcttccggggccatcgccgccctgagccttaaacatgccacccgccgctggccgtggcttaacgacctctcgcgcaaggcgccctggttctcaggcttactgattattgtggtggggatctacatgatgcttcatggcctgagcggcctgtaa

SEQ ID NO: 2212 - protein, 293 aa, Klebsiella quasipneumoniae
MNDFTSLLQQGNAWLFIPSAILLGALHGLEPGHSKTMMAAFIVAVRGTLKQAVLLGLAATVSHTAVVWLIAMAGLWFGRGWNAQTSEPWFQLVSGIVVVLIACWMLWRTWRESQPHTHHEHHHEHEHHHEHDHHHDHDHRHDHDHRHDHDHRHDHHHASSSAAPLVAEEWQDAHQRAHAQEINRRFDGRQVTTGQIVLFGLTGGLIPCPASITVLLICLQLKKFSLGATLVLGFSVGLALTLVASGAIAALSLKHATRRWPWLNDLSRKAPWFSGLLIIVVGIYMMLHGLSGL

SEQ ID NO: 2213 - DNA, 273 bp, Klebsiella pneumoniae
atgtcacatacagttcgacacaaaaagatgttactgacccggctgaagaaaattcaggggcagagtaccgcgttagagaaaatgcttaatcgcgagcatgagtgcgctgaaatattacagcagctggcggcgatccgcggcgcggtcaacggcatgatgctgcaggttattcaggggcatcttaccgaccatgtggtgaaagagcctgacgagacgcagcgcgaagcggatctggagacggtgatgcaggtgattaaatcctatctgaagtag

SEQ ID NO: 2214 - protein, 90 aa, Klebsiella pneumoniae
MSHTVRHKKMLLTRLKKIQGQSTALEKMLNREHECAEILQQLAAIRGAVNGMMLQVIQGHLTDHVVKEPDETQREADLETVMQVIKSYLK

SEQ ID NO: 2215 - DNA, 1110 bp, Klebsiella pneumoniae
atgtccaatatacgactgaggaatgtcaccaaaaggttcggcagcacggtgacgctgcaccaggtcaatctcgatattgaagatggcgagtttgccgtcttcgtcggcccttccggttgtggaaaatcgacgctactgcgcatgattgccgggctggaagaggtcagcgaaggagaagtactgatcggcgatgaggtgatgaatgatgtcgtgcccgcccgccgcggcgtggcgatggtcttccagtcctatgcgctctatccgcacatgacggtggcagagaacatgggctacgggctgaaggtgaataaagtgccgaaaacggagatccgtcgccaggtggaaatggtggctaaaacgctgcagctctcgcacctgctggatcgtaaaccgaagcagctctctggcggccagcggcagcgcgtggccattggccgggcgatcgtgcgtaatccccgggtatttatgttcgatgagccgctctctaaccttgatgcggagctgcgcgtcgatatgcgcctgcatattgcccgtctgcaccaggagctgaagaccactatggtgtatgtcacgcacgatcaggtggaggcgatgacgctggccgataaaatcgtggtcatgaactacgggaaagtcgaacaaatgggttcgccgatggcgctgtactacaatccggtcaacaaattcgtcgccggctttatcggctcgccgaagatgaactttctgccggctatcgtcagcgactggcagccggaacgcttaacggtcaccctcgcgcaggaccatcagctggccctgaatatcgccacccagccgctgaagcccggcgctgcggtgacgctggggatccggccggagcacctcaccccggaaatcaccaccggtaccgtggtggagtttcaatgtgaagtggtggagcgtctgggcaacaatacctatctgttcggccagtgctacggccacgacaacgtcaaggttctgctgcccggcgacgtccatttccgcccctggcagaaaattaatctggctttcgatgagcgcttctgcatggtgtttgatgagaacgacctgcgcatcagcgctgatatcccggcgccggatgcacactag

SEQ ID NO: 2216 - protein, 369 aa, Klebsiella pneumoniae
MSNIRLRNVTKRFGSTVTLHQVNLDIEDGEFAVFVGPSGCGKSTLLRMIAGLEEVSEGEVLIGDEVMNDVVPARRGVAMVFQSYALYPHMTVAENMGYGLKVNKVPKTEIRRQVEMVAKTLQLSHLLDRKPKQLSGGQRQRVAIGRAIVRNPRVFMFDEPLSNLDAELRVDMRLHIARLHQELKTTMVYVTHDQVEAMTLADKIVVMNYGKVEQMGSPMALYYNPVNKFVAGFIGSPKMNFLPAIVSDWQPERLTVTLAQDHQLALNIATQPLKPGAAVTLGIRPEHLTPEITTGTVVEFQCEVVERLGNNTYLFGQCYGHDNVKVLLPGDVHFRPWQKINLAFDERFCMVFDENDLRISADIPAPDAH

SEQ ID NO: 2217 - DNA, 1233 bp, Klebsiella pneumoniae
atgaaaaagaacacgcttgctgcactgatccttaccaccctggcggcgggacaactcgccagcctgcaggcgcatgccgccgggcagctcaacgtctgggaggacattaaaaaatccgctggcatcaaaaccgcggttagcgattttgaaaagcagtacaacgtgaaggtcaatctccaggagatgccctacgcccagcaactggaaaaactgcgcctcgacggcccggcgggcattgggccggacgtgctggtgatcccgaatgaccagctcggcggcgccgtggttcagggactactctcgccgctcagcgtcgatcaggcgaaacaggatgcctttacgccagcctccatcaatgccttccgcatggacaacgcgctgtatgggatcccgaaggcggtggaaaccctggtgcttatctacaacaaggacctgatcgacaagccgctggacagcctgcaggcctggctggactactcgaaaacccagcgcgagcagaacaaatacggcctgctcgccaagtttgaccagatctattacagctggggggcgattggcccgatgggcggctatatctttgctaaaaacgacagcggcggctttaacccgcagcaggtgggtctcaatacccccggcgccgtcgaagccgtcaccttcctgaaaaaattctatgccgagaaggtctttccggcggggatcctcggcgataacgggctgaatgccatcgattccctgtttaccgagaaaaaagcggcggcggtgatcaacggcccctgggctttccagccgtatgaagccgctggcattaactatggcgtggcgcccctgccgaccctgccggacggcaagccgatgagctccttcctcggcgtcaaaggctatgtagtatcgacctggagtaaagacaaagcgctggcgcaacagtttatcgagttcatcaaccagccgcagtatgtgaaagcccgctatgtcgccactggcgaaattccgccgctgaaggcgatgattgacgatccggtgattaaaaacgaccaaaaggccagcgccgtcgccatccagtcggcgcgagcggtggcgatgccgggcattcccgagatgggggaagtgtgggggccggccaacgccgcgcttgaactgagcctcaccggtaagcaggcgccgcaggccgcgctcgataacgcggtgaaacagatcacgatgcagatcgaagcgatgcaggccagcaatcagtaa

SEQ ID NO: 2218 - protein, 410 aa, Klebsiella pneumoniae
MKKNTLAALILTTLAAGQLASLQAHAAGQLNVWEDIKKSAGIKTAVSDFEKQYNVKVNLQEMPYAQQLEKLRLDGPAGIGPDVLVIPNDQLGGAVVQGLLSPLSVDQAKQDAFTPASINAFRMDNALYGIPKAVETLVLIYNKDLIDKPLDSLQAWLDYSKTQREQNKYGLLAKFDQIYYSWGAIGPMGGYIFAKNDSGGFNPQQVGLNTPGAVEAVTFLKKFYAEKVFPAGILGDNGLNAIDSLFTEKKAAAVINGPWAFQPYEAAGINYGVAPLPTLPDGKPMSSFLGVKGYVVSTWSKDKALAQQFIEFINQPQYVKARYVATGEIPPLKAMIDDPVIKNDQKASAVAIQSARAVAMPGIPEMGEVWGPANAALELSLTGKQAPQAALDNAVKQITMQIEAMQASNQ

SEQ ID NO: 2219 - DNA, 1308 bp, Klebsiella pneumoniae
gtgagcatccattccagcgaaaattttagcgacgcacgcgggcccgggcgccatgcatggtgcggcctgctgctggcaatcgtgccgggtttcggtcagttttatcatcgccagtggctgaaagggctggtcttcctggtgctgctgagcagctttatggggattttttatgatttcctgcgtgaggggttgtgggggttatataccctgggtgaagaggtaccgcgggataactctatcttcctgttagccgaggggattatcagcgtgctgatcgtcgctttcggcgtgctgatctattttctctcgctgcgggatgcgtggctcaacggcaaaaaacgcgatgaggggatcgccctcaacagcgtgcgtaagcagtaccagatgctgctgagcgacggctttccgtacctgatgatcaccccgggctttattctgctggtgtttgtggtgatctttccgattctgttcggtttcgccatcgccttcaccaactacaacctgtaccacaccccgccggcgaagctggtggactgggtggggctgaaaaactttattaatattttcaccctctccatctggcgctccactttcctggatgtgctgcagtggaccgtggtgtggacgctgctggcgaccaccctgcagtgtacggtgggcgtgttgttggcgattctggtgaaccaaaaagatctgcgctttaagccgctgatccgcaccatctttattttgccgtgggcggtgccggggtttgtcaccattctcgtttttgccggtatgttcaacgactccttcggggtcatcaacaacgcgatcctgtccttttttggcatcagtccgaaggcatggctcaccgatccgttctggaccaaaacggcgctgatcatgatgcagacctggcttggcttcccgtttgtctttgccatgaccaccggcgtgttgcaggcgatcccggacgatctgtatgaagcggcgacgatggacggcgccagcgcctttacccgtctgcgcaccatcaccctgccgctggtgctgtatgcgatcgcgccgatcatcatcacccagtacaccttcaactttaataacttcaatatcatttacctgttcaacaacggcggccctgcggtggcaggctctaacgccggcgggacggatattctggtgtcgtggatctataagctgacgatgtcttcgtcgcagtacgccatcgcggcgaccatcacgatcctgctgtcgatctttgtcgtcggcctggcgctgtggcagttccgcgccaccaaatccttcaaaaatgacgacatggcgtaa

SEQ ID NO: 2220 - protein, 435 aa, Klebsiella pneumoniae
MSIHSSENFSDARGPGRHAWCGLLLAIVPGFGQFYHRQWLKGLVFLVLLSSFMGIFYDFLREGLWGLYTLGEEVPRDNSIFLLAEGIISVLIVAFGVLIYFLSLRDAWLNGKKRDEGIALNSVRKQYQMLLSDGFPYLMITPGFILLVFVVIFPILFGFAIAFTNYNLYHTPPAKLVDWVGLKNFINIFTLSIWRSTFLDVLQWTVVWTLLATTLQCTVGVLLAILVNQKDLRFKPLIRTIFILPWAVPGFVTILVFAGMFNDSFGVINNAILSFFGISPKAWLTDPFWTKTALIMMQTWLGFPFVFAMTTGVLQAIPDDLYEAATMDGASAFTRLRTITLPLVLYAIAPIIITQYTFNFNNFNIIYLFNNGGPAVAGSNAGGTDILVSWIYKLTMSSSQYAIAATITILLSIFVVGLALWQFRATKSFKNDDMA

SEQ ID NO: 2221 - DNA, 141 bp, Citrobacter rodentium
atgcaggtcgtcaactcattacgtagcgctaaacagcgccacccggattgccagctggttaaacgcaaagggcggctgtacgttatctgtaagagcaacccccgcttcaaagcggtgcaggggcgcaaaaaacgccgttaa

SEQ ID NO: 2222 - protein, 46 aa, Citrobacter rodentium
MQVVNSLRSAKQRHPDCQLVKRKGRLYVICKSNPRFKAVQGRKKRR

SEQ ID NO: 2223 - DNA, 1677 bp, Klebsiella oxytoca
atgcaccacgcaacaccgcttatcaccaccattgtcggcggcctcgtgctcgcctttattctcggcatgattgccaataagctacgtatttctcctctggtgggatatctcttagcgggcgtgctggccggacctttcacccctggctttgttgctgacaccaaactggctccggaactggcggaacttggcgtcattctgctgatgttcggcgtcgggctgcatttctcacttaaagacctgatggcggtaaaatcgatcgccatccccggggctatcgcccagatagccgtggcgacgctgctgggtatggcgctctccgccgccctcggctggtcgctgatgaccggcatcgtctttggcctgtgcctctccactgccagtaccgtagtgctgctgcgcgcgctggaggaacgacaactgattgacagccagcgcgggcaaatcgccatcggctggctgattgtggaagacctggtgatggtcctgacgctggtcctgctgccggcgattgccggtatggcggagaaaggcaacgtcggcttcgcgtccctggccctcgacctcgggatcaccattggcaaagtggtggcctttatcgccattatgatgctggtcggccgccggctggtgccgtggatcatgtcgcgcagcgccgccaccggctcacgcgagctgttcactctgtcggtgctggccctggcgctgggcatcgccttcggcgccgtggagctgtttgatgtctcttttgccctcggcgccttctttgccggcatggtgcttaacgaatccgagctcagccaccgcgccgcccatgacaccctgccgctgcgcgacgccttcgcggtgctgttcttcgtctccgtcggcatgctgtttgacccgatggtgctggtccaacagccgctggcggtgctggcgacgctggcgattattatctttggtaaatccgcagccgcctttttccttgtgcggatgtttggtcactcgccgcgcaccgcgctgaccatcgccgccagcctggcgcagattggcgagtttgcctttattctcgccggcctgggaatggcgcttaacctgctgccgcaggccggacaaaatctggtgctggccggggcgatcatctcaattatgctcaacccggtgctgtttaccctgctggaaaaatatctcgataaaaccgaaaccctcgacgagcagacgctggaagaggtcctggaagacgagaagcaggtgccggtcgatatctgcaaccacgcgctgttggtcggcttcggccgcgtcggcagcctgctgggcgagaagctgatggcccaggggatcccgctggtggtggttgaaacctcgcgcacccgcgtggatgagctacgcgagcgcgggatcagcgcggtgctcggcaatgccgccaatgaagagatcatggagctggcgcatctcgattgcgcccgctggctgctgctgacaatccctaacggctacgaggccggagagattgtcgcttccgcacgggaaaaatgtccgaatatcgagattatcgcccgcgcccattatgatgacgaagtggactacattatcgatcgcggagccaatcaggtggtgatgggcgaacgggaaattgcccgcgccatgctgcggcttctggaaacgccaccggccggcgaagtggtcaccggctga

SEQ ID NO: 2224 - protein, 558 aa, Klebsiella oxytoca
MHHATPLITTIVGGLVLAFILGMIANKLRISPLVGYLLAGVLAGPFTPGFVADTKLAPELAELGVILLMFGVGLHFSLKDLMAVKSIAIPGAIAQIAVATLLGMALSAALGWSLMTGIVFGLCLSTASTVVLLRALEERQLIDSQRGQIAIGWLIVEDLVMVLTLVLLPAIAGMAEKGNVGFASLALDLGITIGKVVAFIAIMMLVGRRLVPWIMSRSAATGSRELFTLSVLALALGIAFGAVELFDVSFALGAFFAGMVLNESELSHRAAHDTLPLRDAFAVLFFVSVGMLFDPMVLVQQPLAVLATLAIIIFGKSAAAFFLVRMFGHSPRTALTIAASLAQIGEFAFILAGLGMALNLLPQAGQNLVLAGAIISIMLNPVLFTLLEKYLDKTETLDEQTLEEVLEDEKQVPVDICNHALLVGFGRVGSLLGEKLMAQGIPLVVVETSRTRVDELRERGISAVLGNAANEEIMELAHLDCARWLLLTIPNGYEAGEIVASAREKCPNIEIIARAHYDDEVDYIIDRGANQVVMGEREIARAMLRLLETPPAGEVVTG

SEQ ID NO: 2225 - DNA, 1221 bp, Enterobacter cloacae
atgacaaccaaccaatccgctcaacccttgtccggccccgctgcgccgccgcaaaaagcacgcacctcgtttggcatcttaggcgcgatcagcctgtcccatttgcttaacgatatgatccagtcgcttattctcgctatctacccgctgctgcaggcggagttctcccttaccttcgtgcagatcggcatgatcaccctgaccttccagctcacctcatcgctattccagccggtgattggctacatcaccgataaacgctcgatgccgtggtcgctgccggtgggcatgtgcttcaccctctgcggtttgattctcctcgcgctggccggtagcttcggcatggtgctgctggccgccgcgctggtaggtaccggctcctcggttttccatccggaatcatcccgcgtggcgcggatggcctccggcggccgtcacggcctggcccagtcgctgttccaggtgggcggcaatttcggcagctcgcttggcccattgctggcggcggtgatcatcgccccgtacggcaaaggcaacgtcgcctggtttgtgctggccgctctgctggctattgtcgtgctgtcgcaaatcagccgctggtatgccgcgcagcatcgaatgaataagggcaaaccgaaaccggccatcgttaatccgctgccgcgcaagaaggttattctggcggtaggcattctgctgatgctgattttctcgaaatatttctatatggcgagcattagcagctattacaccttttatctgatgcataaattcggcttaacggtgcaaaacgctcagcttcatctgtttgccttcctgttcgcagtggctgccgggacggtaattggcgggcctgttggcgataaaattgggcgtaaatatgtgatttggggctctatcctcggcgtagcgcctttcacccttgttttaccctacgccagccttgaatggacggggattttaacggtgatcattggttttatcctcgcctcggccttttccgctattctggtctatgcgcaggaactgctgccgggacgcatcggcatggtttctggcctgtttttcggcttcgcctttggcatgggcggccttggcgccgcggtgttaggcctgctggcggaccataccagcatcgatctggtttataaaatctgcgccttcctgccgctgctgggattcctgacgatattccttcctgataaccggcaaaaagcctga

SEQ ID NO: 2226 - protein, 406 aa, Enterobacter cloacae
MTTNQSAQPLSGPAAPPQKARTSFGILGAISLSHLLNDMIQSLILAIYPLLQAEFSLTFVQIGMITLTFQLTSSLFQPVIGYITDKRSMPWSLPVGMCFTLCGLILLALAGSFGMVLLAAALVGTGSSVFHPESSRVARMASGGRHGLAQSLFQVGGNFGSSLGPLLAAVIIAPYGKGNVAWFVLAALLAIVVLSQISRWYAAQHRMNKGKPKPAIVNPLPRKKVILAVGILLMLIFSKYFYMASISSYYTFYLMHKFGLTVQNAQLHLFAFLFAVAAGTVIGGPVGDKIGRKYVIWGSILGVAPFTLVLPYASLEWTGILTVIIGFILASAFSAILVYAQELLPGRIGMVSGLFFGFAFGMGGLGAAVLGLLADHTSIDLVYKICAFLPLLGFLTIFLPDNRQKA

SEQ ID NO: 2227 - DNA, 1653 bp, Escherichia coli
atgcattatttcaaacacagcgtagcgctggcgctattcgccgctttatcgctgggcagcctgtcggcacaggcctatgagcaggataaaacctataaaattaccatcctgcacaccaacgatcaccacggccatttctggcgcaatgactacggcgaatatggcctggcggcgcagaaaacgctggtcgatggcatccgtaaagaggtggcggcggaagggggaagcgtcctgctgttatccggcggcgatattaataccggcgtaccggagtctgatttacaggatgcagagcccgattttcgcggcatgaacctgatcggctacgacgcgatggcggtgggaaaccatgaattcgataatccgctgagcgtactgcgccagcaggaaaagtgggctaagttcccgttcctgtcggccaatatttatcagaaaagcaccggcgaacggctgttcaaaccctgggcgttgtttaagcgcggtgggctgaaaatcgcggtgattggcttaaccaccgacgatacggccaagattggcaatccggaatatttcaccgatattgaattccgcaaaccggcggaagaggcgaagctggttatccaggagctgcagcagaatgaaaagccggacgtgatcctggccaccacccatatgggccattacgacaatggcaaccacggctctaacgcgccgggcgatgttgaaatggcgcggagtttacctgcgggatcgctggcgatgatcgtcggcggtcactcgcaggatccggtatgcatggcggcggaaaataaaaagcaggtcgattatgtgccaggcaccccgtgcgctccggatcgtcagaacggcatctggatcgtccaggcgcatgagtggggcaaatacgtcggccgcgccgattttgagttccgcaacggcgagatgaagctggtgcactatcagctgatcccggtcaacctgaagaaaaaagtgacttacgataacggccaaagcgagcgggtgctgtatacgccgcagatcgccgagaacccgcagatgatgtcgctgctgacgccgttccagaacaaaggcaaggcgcagctgcaggtcaaaatcggcagcgtgaatggtcatctggagggcgaccgcagtaaagtgcgctttgtgcagaccaatatgggccacctgctgctggcggcgcaaatggcgcgcagcaacgcggatttcgcggtgatgagcggcggcgggatccgcgactccattgaggcgggggatatcacctacaaagatgtgatgaaggtccagccgttcggcaatgtgctgacctatgtcgatatgaacggcaaggaggtagtggattacctgaccgccgtcgcgcagatgaagccggattccggcgcttatccgcagtttgccaacgtcagtttcgtggccaaagacggtaagctgaacgatctgaaaatcaaaggcgaaccggtggatccggcgaagacctatcggatggcgacgctgagctttaacgccaccggcggcgatggctatccgaacatcgccgataaacccgggtatgtgaataccggctttatcgatgccgaagtgctgaaagagtatatcgagaagaactcgccgctggatgccgccgcctatgagccgaaaggcgaggtgagctggcagtaa

SEQ ID NO: 2228 - protein, 550 aa, Escherichia coli
MHYFKHSVALALFAALSLGSLSAQAYEQDKTYKITILHTNDHHGHFWRNDYGEYGLAAQKTLVDGIRKEVAAEGGSVLLLSGGDINTGVPESDLQDAEPDFRGMNLIGYDAMAVGNHEFDNPLSVLRQQEKWAKFPFLSANIYQKSTGERLFKPWALFKRGGLKIAVIGLTTDDTAKIGNPEYFTDIEFRKPAEEAKLVIQELQQNEKPDVILATTHMGHYDNGNHGSNAPGDVEMARSLPAGSLAMIVGGHSQDPVCMAAENKKQVDYVPGTPCAPDRQNGIWIVQAHEWGKYVGRADFEFRNGEMKLVHYQLIPVNLKKKVTYDNGQSERVLYTPQIAENPQMMSLLTPFQNKGKAQLQVKIGSVNGHLEGDRSKVRFVQTNMGHLLLAAQMARSNADFAVMSGGGIRDSIEAGDITYKDVMKVQPFGNVLTYVDMNGKEVVDYLTAVAQMKPDSGAYPQFANVSFVAKDGKLNDLKIKGEPVDPAKTYRMATLSFNATGGDGYPNIADKPGYVNTGFIDAEVLKEYIEKNSPLDAAAYEPKGEVSWQ

SEQ ID NO: 2229 - DNA, 480 bp, Kluyvera intermedia
atgactcccgccgttaaattactcgaaaaaaacaaaatttcctttcagatccacagttacgatcacgatcccaatgagaccaacttcggagatgaagtggtgcgcaagctcggcctcaatgccgaccaggtttacaagaccttgctggtcgccgtgaacggcgatatgaagcatctggcggtggccgtcactccggtcgccgggcagctggatttgaagaaagtggcgaaagcgctgggcgctaagaaagtcgacatggccgacccgatggtggcgcagcgtatcaccggctatctggtgggcggcatcagtccgctggggcagaagaagcgcctgccgacggtgattgacgccccggcgcaggaatttgccaccatctatatttccggcggcaaacgcgggctggatattgagctggcggccagcgatctggcgcagcttctcgatgcgaagttcgccgatatcgcccgccgcgattga

SEQ ID NO: 2230 - protein, 159 aa, Kluyvera intermedia
MTPAVKLLEKNKISFQIHSYDHDPNETNFGDEVVRKLGLNADQVYKTLLVAVNGDMKHLAVAVTPVAGQLDLKKVAKALGAKKVDMADPMVAQRITGYLVGGISPLGQKKRLPTVIDAPAQEFATIYISGGKRGLDIELAASDLAQLLDAKFADIARRD

SEQ ID NO: 2231 - DNA, 795 bp, Enterobacter cloacae
atgggcctgttaaaccggataaaaatgctgtggcgagccgccgtcggctcgtcttattcctggcctgcgatggatatcgtcctgcccggcgaacgctatttgcacctcgtcggcagtatccatatgggcacccgcgacatggcgccgccgccggcaaagcttctgaaaaaaatacgccaggccgatgcgttaatcgtcgaggccgatatcagcggcaatgaaaccccgtttagcaatctccccacttacccaccgctggcggaacgcctgagcgatgcgcagctgagcgagctagaggcgcgagccggcgagctgggcctgtcggtcgggctgttcgacagccagccgctgtggcaggtggcgatggtcctgcaggccacccaggcgcagaagctggggctgcgaccggattacggcatcgattatcagttgctgatggccgcccgcgagagcaacatagcggtgatggagctggaaggcgccgacagccaaatcgcgctgctgcgcgatctgcccgacggggggatggcgctgctggaggatacgctgacccactggcgcaccaacgcccgtttactgcaggtcatgatcggctggtggctggagcaaccgccgtcgcgcggcgcggtatcgctgccgacgacctttagccagtctttatatgatgtgctgatgcaccagcgcaacctcgcctggcgcgagacgctgctggccttgccgccggggcgctacgtggttgccgtcggcgcgctgcacctgtatggcgaagggaatctgccggatatgctgacataa

SEQ ID NO: 2232 - protein, 264 aa, Enterobacter cloacae
MGLLNRIKMLWRAAVGSSYSWPAMDIVLPGERYLHLVGSIHMGTRDMAPPPAKLLKKIRQADALIVEADISGNETPFSNLPTYPPLAERLSDAQLSELEARAGELGLSVGLFDSQPLWQVAMVLQATQAQKLGLRPDYGIDYQLLMAARESNIAVMELEGADSQIALLRDLPDGGMALLEDTLTHWRTNARLLQVMIGWWLEQPPSRGAVSLPTTFSQSLYDVLMHQRNLAWRETLLALPPGRYVVAVGALHLYGEGNLPDMLT

SEQ ID NO: 2233 - DNA, 966 bp, Enterobacter cloacae
atgtctgattatcaaatgtttgaggcggtcgttcgcgatgttgaacagatcacccctcttgtgaagcgttttacgctggtgtcgccgaccggcgccccgctgccggcattcagcggcggcagccatattatcgtccagatgcaggatggcgagcagcgctacagtaacgcctattcgctaatgagctcgccgctggataccaccagctggcagattgcggtgcgtcttgagtcgccttccaaaggcggctcgcgttttatgcaccagcgggtgcgcccgggcgataccctgacggtgtccacgcccaacaatctgttcgccatcgaaccacaggcgcgaaaacatctgctgatcgccggcggcatcggcattacgccattcttatcgcatattccggaactggaacagcggcaggccgactggcagctgcattactgttttcacgacgccgacagtaatgctttcgccgatgcgctcagcgcagcgccgtggcgcgatcgggtcaatgttcatgtatcagcgctcggcagccgtctcgacctaccgcgcctgttcgccgacctcgagccaggaacccacgtgtatacctgcggcccagcggcgcttaacgaggcggtgaaagccgccgccgaacgccatcaggtgcccgccagccagctgcactttgagcagtttatccttgaggataaaagcggagaggcatttaccctggtgctggcgcgttccggacgcgaatttaccgtgccgcaggatatgaccattttgcaggtgatcgagaataacaaagcggcgaaggtcgaatgcctgtgccgagaaggggtgtgcggcacctgcgaaacgatgattctggagggggaagccgaccaccgcgatcagtattacagcgaggaagagaaagccagccagcagagtatgctgatctgctgctcgcgcgccaaaggcggccggttagtgctggatttgtaa

SEQ ID NO: 2234 - protein, 321 aa, Enterobacter cloacae
MSDYQMFEAVVRDVEQITPLVKRFTLVSPTGAPLPAFSGGSHIIVQMQDGEQRYSNAYSLMSSPLDTTSWQIAVRLESPSKGGSRFMHQRVRPGDTLTVSTPNNLFAIEPQARKHLLIAGGIGITPFLSHIPELEQRQADWQLHYCFHDADSNAFADALSAAPWRDRVNVHVSALGSRLDLPRLFADLEPGTHVYTCGPAALNEAVKAAAERHQVPASQLHFEQFILEDKSGEAFTLVLARSGREFTVPQDMTILQVIENNKAAKVECLCREGVCGTCETMILEGEADHRDQYYSEEEKASQQSMLICCSRAKGGRLVLDL

SEQ ID NO: 2235 - DNA, 1125 bp, Citrobacter koseri
atgagcaatttgagccctgacttcaccctgccgattaacttttgcgctaatccgcaggatgcctggaccattccggcccgtttttataccgacagccaggcgtttgagcacgagaaagagcgcatcttcgccaatagctggatttgcgtcgcccacggcagcgaggtcgcccggccgaacgattacattacccgggagatcatcggcgaaaatatcgttatagtccgcggccgcgacaacattctgcgcgccttctataacgtctgcccacaccgcggccaccagctactgagcggcgagggcaaagccaaaaacgtgattacctgcccctatcacgcctgggccttcaagctggacggcaatctcgcccacgcccgcaactgcgaaaacgtggcgaatttcgatagcgaaaaggcaacgctagtgccggttcgcctggaagagtatgccggctttgtgtttatcaatatgaatccggaagcggagagtgtggaaacgcagctaccggggctgcaggacaaagtgctggaagcctgtccggacgtgcatgatctgaaactggcggcgcgctttaccaccctcaccccggcgaactggaaaaatatcgtcgataactatctggaatgttaccactgcggtccggcgcacccgggcttctcggattccgtccaggttgaccgctactggcacaccatgcacggcaaatggacgctgcagtatggcttcgccaaaccgtccgagcagtcgtttaaattcgaagagggtaccgacgccgcgtttcacggtttctggctgtggccgtgcaccatgttcaacgtcacgccgatcaagggcatgatgaccgttatctatgaattcccggtggatgaagagaccactctgcagaattacgacatctatttcaccaacgaagagctgactgacgatcagaaagcgctgattgagtggtatcgcgacgtgttccgcccggaagatttacgcctggtggaaagcgtgcagaaggggctgaagtcccgcggctatcgcggccaggggcgcattatggcggataacagcggcagcggtatctccgagcacgggatcgcgcatttccacaatctggtcgcccaggtgttccagccgtaa

SEQ ID NO: 2236 - protein, 374 aa, Citrobacter koseri
MSNLSPDFTLPINFCANPQDAWTIPARFYTDSQAFEHEKERIFANSWICVAHGSEVARPNDYITREIIGENIVIVRGRDNILRAFYNVCPHRGHQLLSGEGKAKNVITCPYHAWAFKLDGNLAHARNCENVANFDSEKATLVPVRLEEYAGFVFINMNPEAESVETQLPGLQDKVLEACPDVHDLKLAARFTTLTPANWKNIVDNYLECYHCGPAHPGFSDSVQVDRYWHTMHGKWTLQYGFAKPSEQSFKFEEGTDAAFHGFWLWPCTMFNVTPIKGMMTVIYEFPVDEETTLQNYDIYFTNEELTDDQKALIEWYRDVFRPEDLRLVESVQKGLKSRGYRGQGRIMADNSGSGISEHGIAHFHNLVAQVFQP

SEQ ID NO: 2237 - DNA, 1608 bp, Enterobacter cloacae
atgttgagcaacgtaaagaaaaaagatgtgccgctgattgccatcagcctggcggccattgttttcatcgccgctacattaagtctcttcccccagcaaaccgcgcaggcggctgattcgatttttaacggcgtgacccgcctgctgggttccacggtacaggtactggtgctgctggcgctgggactggtgttgtatctggccaccagcaaatacggcaatatccgtctcggcgaaggtaaagtcgaatacagtaccctctcatggctgtttatgtttatctgcgccggtctcggctcctccacgctgtactggggcgttgccgaatgggcttattactaccagaccccgggccttaacattgccccgcaatcgccgaaagcgctggaatacagcatcccttactctttcttccactggggcgtaagcgcctgggcaacctataccctcgcctcgctgatcatggcctatcacttccacgtgcggaaaaataaaggcctcagcctctccgggatcgtttcggcgatcaccggcgttaatccgcaaggtttctggggccgtctggtcgatctgatgttcctgatcgctaccgtcggcgcgttaaccatttcgctggtagtcaccgccgccaccttcacccgcggcctgtcagcgctgaccggactgccggataacttcaccatgcaggcatttgtgatcctgctctccggcggtattttctgcatgagttcgtggattggcatcaacaacggcctgcagcgcctgagcaaaatggtcggctggggggcgtttctgctgccgttggtggtattactggttggcccgaccgaattcatcaccaataacatcattaacgccgtcggcctgacgacccaaaacttcctgcagatgagcctgtttaccgacccgctcggcgacggcgcctttacccgcaactggaccgtcttctactggctgtggtggatctcctacaccccaggcgtggcgatgttcgtcacccgcgtctcccgcgggcgcaaaatcaaagaggtgatctggggactgctcctcggtagcaccgccggctgctggtttttcttcggggtgatggaaagctacgccatgcaccagttcgttaacggcgtgattaacgtaccacaggtgatgcagactctcggcggcgaaaccgccgtccagcaggtcctgatgtcgctgccggcaggtaagctgttcctcgccgcctatctgttcgtgatgattgttttcctcgcctcgcacatggatgcggtggcctacaccatggcggcgaccagtacccgcaacctgcgcgaaggcgacgatccggatcgcggcatgcgcctgttctggtgcgtggtgatcaccctcatcccgctgtcgattctgtttaccggcgcttcgcttgagaccatgaaaactaccgtggtgctgaccgccctaccgttcctggccattttactgattaaaaccggcggcttcgtgcgctggttaaaacaggactacgcccacgttccggtccatcagatagaaacccatacccccgagcccattattaaagccgagacgctgccggttggcgcggtactcaaaggcgacggccagtcgctgtaa

SEQ ID NO: 2238 - protein, 535 aa, Enterobacter cloacae
MLSNVKKKDVPLIAISLAAIVFIAATLSLFPQQTAQAADSIFNGVTRLLGSTVQVLVLLALGLVLYLATSKYGNIRLGEGKVEYSTLSWLFMFICAGLGSSTLYWGVAEWAYYYQTPGLNIAPQSPKALEYSIPYSFFHWGVSAWATYTLASLIMAYHFHVRKNKGLSLSGIVSAITGVNPQGFWGRLVDLMFLIATVGALTISLVVTAATFTRGLSALTGLPDNFTMQAFVILLSGGIFCMSSWIGINNGLQRLSKMVGWGAFLLPLVVLLVGPTEFITNNIINAVGLTTQNFLQMSLFTDPLGDGAFTRNWTVFYWLWWISYTPGVAMFVTRVSRGRKIKEVIWGLLLGSTAGCWFFFGVMESYAMHQFVNGVINVPQVMQTLGGETAVQQVLMSLPAGKLFLAAYLFVMIVFLASHMDAVAYTMAATSTRNLREGDDPDRGMRLFWCVVITLIPLSILFTGASLETMKTTVVLTALPFLAILLIKTGGFVRWLKQDYAHVPVHQIETHTPEPIIKAETLPVGAVLKGDGQSL

SEQ ID NO: 2239 - DNA, 678 bp, Citrobacter koseri
atgtctactcccgctaactttaacggtgctcgtccggtgattgatgttaacgataccgcaatgctgttgattgaccatcagagcggtctgttccagaccgtcggcgatatgccgatgccagagctgcgcgctcgcgccgccgcgctggccaagatggcgtcgcttgccgggatcccggtgatcacgaccgcctccgtgccgcaggggccgaacggtccgctgatcccggagattcatgaaaacgcgccgcatgcgaaatacatcgcccgtaaaggtgagattaacgcctgggataacccggaattcgtcgccgcggtgaaagcgaccggccgtaaaacgctgattatcgccgggaccatcaccagcgtctgcatggccttcccggctatcgccgctgtcgccgacggttataaagtgtttgccgtgattgacgcttccggcacctacagcaaaatggcgcaggagatcaccctggctcgcgtggtacaggccggcgtagtgccaatggataccgccgccgtcgcctctgagctgcagcgcacctggaatcgcccggacgccgcagaatgggcggaggtgtacaccaaagtcttcccggcctaccagctgctgatcgaaagctacagcaaagcgcaggacgtcgtgaagaataacgaacagctggattcccagcgctaa

SEQ ID NO: 2240 - protein, 225 aa, Citrobacter koseri
MSTPANFNGARPVIDVNDTAMLLIDHQSGLFQTVGDMPMPELRARAAALAKMASLAGIPVITTASVPQGPNGPLIPEIHENAPHAKYIARKGEINAWDNPEFVAAVKATGRKTLIIAGTITSVCMAFPAIAAVADGYKVFAVIDASGTYSKMAQEITLARVVQAGVVPMDTAAVASELQRTWNRPDAAEWAEVYTKVFPAYQLLIESYSKAQDVVKNNEQLDSQR

SEQ ID NO: 2241 - DNA, 906 bp, Klebsiella pneumoniae
atgcaggatctcaatgacttcgcctggtttgtccaggtggtagaccatggcggtttcgccgcggctgggcgagcgcttgaccagccgaaatccaaactcagccgtcgcattgcgcaactcgaggagcggttgggcgtgcgtttgattcagcgaaccacccgtcagttcgcggtcaccgaggtcgggcagaccttttatcagcattgcaaagcgatgctgattgaggccgaggcggcgcagcaggcggtcgagacgctgcgcgccgagccgcgcggtagcgtcaggatcacctgtccggtcaccttgctgcatgtccatatcggaccgatgctggcgcgatttatggcgcgctatcctggggtaacgctgcatcttgaggcgaccaaccgccgggtggatgtggtcggggagggcgttgatgtggcgatccgcgtccgtccccggcccatcgaggatagcgacctggtgatgcgcgtgctggcggaccgcgggcaccggctggtagccagcccggatctcatttcccggctcggacgtccgcaggcgccgtccgagctgagcgcctggccgggcctcagcctgggtgcgaacaagcatcagcataaatggcagctcaccgggcccgggggagcgagagcggaagtgtatttcacgccgcgaatggtgaccaccgatatgctggcgctgcgcgaggcggcgatggccggcgtaggcgtggtgcagcttcctttattaatggtgcgcgatcagctggcgtcaggtgaattagaggtggttctggacgagtggcagccgcggcgggaagcgatccatgcggtatttgcctcacggcgcgggctgctgccctccgtcagggcgctggtggactacctcagcgaagagtatcagcggatggaggaggattag

SEQ ID NO: 2242 - protein, 301 aa, Klebsiella pneumoniae
MQDLNDFAWFVQVVDHGGFAAAGRALDQPKSKLSRRIAQLEERLGVRLIQRTTRQFAVTEVGQTFYQHCKAMLIEAEAAQQAVETLRAEPRGSVRITCPVTLLHVHIGPMLARFMARYPGVTLHLEATNRRVDVVGEGVDVAIRVRPRPIEDSDLVMRVLADRGHRLVASPDLISRLGRPQAPSELSAWPGLSLGANKHQHKWQLTGPGGARAEVYFTPRMVTTDMLALREAAMAGVGVVQLPLLMVRDQLASGELEVVLDEWQPRREAIHAVFASRRGLLPSVRALVDYLSEEYQRMEED

SEQ ID NO: 2243 - DNA, 939 bp, Enterobacter cloacae
atggagattattttttaccatccgacctttgatacccaatactggatctgtgagctggaaaagcagttacccggcgcgcgggtgcgcgagtggaaagcgggcgataaccggccggcggactatgccctggtctggcatccgccggtagagatgctgcagggccgggcgctgaaggccgtgttcgccctcggggcaggggtggactctattctcagcaagctgcgcgaccatccggatatgctgccgctgtcgattccgctgtttcgtctcgaagataccggtatgggacggcagatgcaggagtatgccgtgagccaggtgctccactggttccgccgctttgatgactatcaggcgctgaagctggcttcccgctggcagccgctgcccgagtaccgcgccgacgaattcaccgtcgggattatgggcgccggcgtgctgggggcgaaggttgcggaaagtctgcaaccctgggggttcccgcttcgcgtctggagccgtagccgcaaatcctggccgcaggtgcagagcttcgccggccaggccgagctgggcgaattcctgcagggcactcgcgtgctgatcaacctgctgccgaataccgccgaaaccgccggcattattaaccagacgctgctggcgcagttgcctgatgagagctatgtcctcaaccttgctcgcggcgtgcatgtcgttgaagaggatctgctggcggcgctgaacagcggtaagctcaaaggggcgatgctcgatgtcttcagtcgcgaaccgctgccgcaggagagcccgctatgggcgcatccgcgggtggccatgaccccccatgtggcggcagtgacccgtccaatggaagctatcacctacattgcggagaccattagccggcttgagcgaggggagccggtaagcggtcaggtcgaccgccagcgcggttattaa

SEQ ID NO: 2244 - protein, 312 aa, Enterobacter cloacae
MEIIFYHPTFDTQYWICELEKQLPGARVREWKAGDNRPADYALVWHPPVEMLQGRALKAVFALGAGVDSILSKLRDHPDMLPLSIPLFRLEDTGMGRQMQEYAVSQVLHWFRRFDDYQALKLASRWQPLPEYRADEFTVGIMGAGVLGAKVAESLQPWGFPLRVWSRSRKSWPQVQSFAGQAELGEFLQGTRVLINLLPNTAETAGIINQTLLAQLPDESYVLNLARGVHVVEEDLLAALNSGKLKGAMLDVFSREPLPQESPLWAHPRVAMTPHVAAVTRPMEAITYIAETISRLERGEPVSGQVDRQRGY

SEQ ID NO: 2245 - DNA, 738 bp, Enterobacter cloacae
atgtatcccgttgacctgcacatgcataccgtcgccagcacccatgcctacagcaccctgcacgattatattgcggaagcaaagcgtaaagggatcaaactcttcgccatcaccgaccacggcccggacatggcggatgctccgcactactggcacttcgttaatatgcgcatctggccccgcctggtagacggggtggggatcctgcgcggtattgagtcgaatattaaaaatattgaaggcgagatcgactgttccggaccgatgttgacttctctcgatctgatcatcgccggatttcatgagccggtgtttccgccgcaggatcgtgacacccatacacaggcgatgatagccgcgatggccagcggtaaagtgcatatgattagccatccgggtaatccgaaattcccggtggatatcccggcgattgccgaagcggcggctcgctaccaggtggcgctggagattaataactcctcgttcgtatcatcgcgcgtgggcagtgaagacaactgccgggccatcgccgccgcagtgcgtgatgccgggggatgggtggcgctgggctcggactctcacaccgcctttacccttggggaatttaccgaatgccgcaagatccttgatgcggtcgatttcccggaggagaggatcctcaacgtttctccgtgtcgcctgcttaacttcctcgagtcgcggggcatgccggcgatcccggaatttgctgacctttaa

SEQ ID NO: 2246 - protein, 245 aa, Enterobacter cloacae
MYPVDLHMHTVASTHAYSTLHDYIAEAKRKGIKLFAITDHGPDMADAPHYWHFVNMRIWPRLVDGVGILRGIESNIKNIEGEIDCSGPMLTSLDLIIAGFHEPVFPPQDRDTHTQAMIAAMASGKVHMISHPGNPKFPVDIPAIAEAAARYQVALEINNSSFVSSRVGSEDNCRAIAAAVRDAGGWVALGSDSHTAFTLGEFTECRKILDAVDFPEERILNVSPCRLLNFLESRGMPAIPEFADL

SEQ ID NO: 2247 - DNA, 552 bp, Enterobacter cloacae
atgaacgagttttcaatcctctgccgcgtgctgggttcactgtattaccgtcaaccgcaggacccgctgctggtgccgctgtttaccctgatccgcgagggcaaactggccgccagctggccgcttgagcaggacgagctgctggcgcgtctgcagaaaagctgtgaaatgcaatccctggcgacggactataatgcgctgttcgtcggtgaagcctgcagcgtcccgccgtaccgtagcgcgtgggtggagggttcctcggaagcggaagtttgggcttttctgagcgaacacggcatcccgacaggggaaggtccggcggatcatctcggctcgctgctgctggccgcctcctggctggaggatcatgccgcagaagaccagagcgagacgctggagctcctgtttgccgactatatcctgccgtggtgcgggacgatgctggggaaagtcgaagcccatgcgcacacgccgttctggcgcaccatggcgccgttgacccgcgacgccatcgccgcgatgtgggacgagcttcaggaagaagatgagtaa

SEQ ID NO: 2248 - protein, 183 aa, Enterobacter cloacae
MNEFSILCRVLGSLYYRQPQDPLLVPLFTLIREGKLAASWPLEQDELLARLQKSCEMQSLATDYNALFVGEACSVPPYRSAWVEGSSEAEVWAFLSEHGIPTGEGPADHLGSLLLAASWLEDHAAEDQSETLELLFADYILPWCGTMLGKVEAHAHTPFWRTMAPLTRDAIAAMWDELQEEDE

SEQ ID NO: 2249 - DNA, 1119 bp, Klebsiella pneumoniae
atgcaatacgatcttatcattattggcagcggctccgtcggcgccgccgctggctattatgcgcgccgtgccggactcaatgttctgatgaccgatgcccatcaacctccccaccaggaaggcagccatcacggcagcagccgtcttatccgtcacgcctatggcgaaggtgagaaatatgttccgctggtgctgcgtgcccagcagctatgggatgaactggcagagatcagtggcgaagccgtgtttgaacgcaccggcgtcattaacctcggccccgccagctccgcttttctcgccaacgtcgccgccagcgcccgtgcgttccagcttgaggtggaagagctggatgcccaggccgtgatgcagcgctggccggagatacgcctccccgatgactatcgggcgattttcgaacccgcttccggcgtactgcgcagcgaactggccgtcgaaacctggatccgtctggcgcgggaagcaggctgcgcgcagctattcaactgtccggtctcggctattcatcaccatgctgacgggatcaccatcgataccctcgacggtgaatatcatggtaaaaaactgctggtcagcgccggcacctgggtcacccgcctgcttccggacctccctatccagccggtacgcaaggtgttcgcctggtaccaggccgatggccgttacagcagcaagaatcacttcccggccttcaccggcgagttgcccaacggcgatcaatattacggtttcccggcggaagataatgaactgaaaattggcaagcataacggcggccagccgatctccaccccgcaggagcgggtagcgtttggcgctgtcgccagcgatggttccgaatccttcccgtttttgcgtaacgtcctgcctggcatcggcggctgcctgcacggcgcctcctgtacctacgacaataccgtcgatgaggactttattatcgatacgttgccaggcaggccagacacgctgctgatcaccgggctgagcggccacggctttaagtttgcgccggtgctgggcgaaattgccagtcagtttgctcagggcgaagcatcgagcttcaatctggcccccttttctctggcgcgctttaacgcgtaa

SEQ ID NO: 2250 - protein, 372 aa, Klebsiella pneumoniae
MQYDLIIIGSGSVGAAAGYYARRAGLNVLMTDAHQPPHQEGSHHGSSRLIRHAYGEGEKYVPLVLRAQQLWDELAEISGEAVFERTGVINLGPASSAFLANVAASARAFQLEVEELDAQAVMQRWPEIRLPDDYRAIFEPASGVLRSELAVETWIRLAREAGCAQLFNCPVSAIHHHADGITIDTLDGEYHGKKLLVSAGTWVTRLLPDLPIQPVRKVFAWYQADGRYSSKNHFPAFTGELPNGDQYYGFPAEDNELKIGKHNGGQPISTPQERVAFGAVASDGSESFPFLRNVLPGIGGCLHGASCTYDNTVDEDFIIDTLPGRPDTLLITGLSGHGFKFAPVLGEIASQFAQGEASSFNLAPFSLARFNA

SEQ ID NO: 2251 - DNA, 1161 bp, Citrobacter koseri
atgaagcttagtgaggactccccgggcaactggggaatcaccgaaccgggcagcgacgataccttgacacgtctaaccctggcgttagatgtcatggggggcgatttcggcccatccgtgacggtgcctgcagcactgcaggcactgaactctaattcgcaactcacacttcttttagtcggcgatcccgacgccatcacgccattactcgccaaagctgatttcgaacaacgttcgcgtctgcagatcattcctgcgcagtcagttattgccagtgatgcgcgacccgcacaggctatccgcagcagtcgcggaagctcaatgcgcgtggcgctggagcttgtgaaagaagggcgggcgcaagcctgcgtcagcgctggcaacaccggcgcgctgatgggtctggcgaaactgctgctcaaaccgatcgaaggtattgagcggccggcgctggtgacggttttaccgcaccagcagaagggcaaaaccgtggtgctggatctcggcgccaacgtcgattgcgacagcacgatgctggtgcagttcgcggtaatgggcgcggtgctggcggaagaagtggtcggcattgccaacccccgcgtcgctttgttgaacatcggcgaagaagagatgaaaggcctcggcagcatccgcgatgctgccgcagtgctcaaaacgctgccttccctcaactacatcggctatcttgaagccaatgaactgttgaccggaaaaaccgatgtgctggtttgtgatggattcacgggcaacgtcacattaaaaaccatggaaggtgttgtcagaatgttcctttcactgctgaaatctcagggagagggcaaaaaacggtcgtggtggctgctgttactaaaacgttggttacaaaaaagcctggcgaggcgattcagtcacctcaaccccgaccagtataatggcgcctgtctgttaggattgcgcggttccgtgatcaagagtcatggtgctgccaatcaacgcgcctttagcgtcgcgatagagcaggcagtgcaggcggtgcagcggcagatccctcagcggatcgccgcgcgcctggaatctttatacccagctggtttcgagctgccggaaagcgacagtgacgtgaacgcccgacagcaaagcgggacgaatggccacgattga

SEQ ID NO: 2252 - protein, 386 aa, Citrobacter koseri
MKLSEDSPGNWGITEPGSDDTLTRLTLALDVMGGDFGPSVTVPAALQALNSNSQLTLLLVGDPDAITPLLAKADFEQRSRLQIIPAQSVIASDARPAQAIRSSRGSSMRVALELVKEGRAQACVSAGNTGALMGLAKLLLKPIEGIERPALVTVLPHQQKGKTVVLDLGANVDCDSTMLVQFAVMGAVLAEEVVGIANPRVALLNIGEEEMKGLGSIRDAAAVLKTLPSLNYIGYLEANELLTGKTDVLVCDGFTGNVTLKTMEGVVRMFLSLLKSQGEGKKRSWWLLLLKRWLQKSLARRFSHLNPDQYNGACLLGLRGSVIKSHGAANQRAFSVAIEQAVQAVQRQIPQRIAARLESLYPAGFELPESDSDVNARQQSGTNGHD

SEQ ID NO: 2253 - DNA, 543 bp, Kluyvera intermedia
atgattatctatttacacggttttgactcgaacagccccggtaaccatgagaaggtgatgcagctgcagtttatcgacccggacgtgcggttgattagctacagcacgcggcatcccaagcacgatatgcagcatttgctgaaagaggtcgataaaatgctgcagctcactgccgatgaccggccgctgatctgcggcgtcggccttggcggctactgggcggagcggattggttttctgtgcgatatccgccaggcggtgttcaatccaaacctgtttccgcatgagaacatggaaggcaaaatcgaccgaccggaagagtatgccgacatcgccaccaagtgcgtgaccaacttccgcgagaagaaccgcgatcgctgcctggtggtgctttcccgccaggacgaggcgttggacagccagcgttccgccgatctcctgcaccactattatgaaattatctgggatgaagagcagacccataagtttaaaaatatctcgccgcatctgcagcggctgaaagcgtttaaaaccctcggctaa

SEQ ID NO: 2254 - protein, 180 aa, Kluyvera intermedia
MIIYLHGFDSNSPGNHEKVMQLQFIDPDVRLISYSTRHPKHDMQHLLKEVDKMLQLTADDRPLICGVGLGGYWAERIGFLCDIRQAVFNPNLFPHENMEGKIDRPEEYADIATKCVTNFREKNRDRCLVVLSRQDEALDSQRSADLLHHYYEIIWDEEQTHKFKNISPHLQRLKAFKTLG

SEQ ID NO: 2255 - DNA, 831 bp, Klebsiella pneumoniae
atgcagtcgcgccgtttacatcgattgagccgttttcgtcgcaataaacgtcggttgcgtgaccgtctgcgtcagcggattttctttagggaggacaggatgaagcctgaagcgatggcaaaaccgagagtggtggtgttaaccggcgcgggcatctcggcagagtcggggatcaaaaccttccgcgcggccgatggcctgtgggaagagcatcgggtggaagatgtggcgacgccggaaggcttcgcccgcgatccggcgctggtgcaggcgttctacaacgcccgtcgtcgtcagctgcagagtccggaaatcgcgccgaacgcggcgcatctggcgctggcgcgtctggaggatctgctgggcgaccattttctgctggtcacccagaatattgataatctgcacgagcgcgccggcaaccgccgggtgatccatatgcacggcgagctgctaaaggtgcgctgttcgtggagcggccaggtgctggagtggaccggcgacgtcaccgccgaggacaagtgccactgctgccagttcccggcggcgctgcgcccgcacgtggtctggtttggcgaaatgccgctggggatggatgagatctacagcgcgctggccgacgcagatatttttatcgccatcggcacctccggccatgtctatccggcggctggctttgtgcacgaggcgcgactgcacggcgcccataccgttgaactgaacctggagcccagccaggtgggcagcgagtttgccgagaagcactacgggctggcaagcgaagtggtacccgcctttatcgataagctgctacaggaaaacgcgctgtaa

SEQ ID NO: 2256 - protein, 276 aa, Klebsiella pneumoniae
MQSRRLHRLSRFRRNKRRLRDRLRQRIFFREDRMKPEAMAKPRVVVLTGAGISAESGIKTFRAADGLWEEHRVEDVATPEGFARDPALVQAFYNARRRQLQSPEIAPNAAHLALARLEDLLGDHFLLVTQNIDNLHERAGNRRVIHMHGELLKVRCSWSGQVLEWTGDVTAEDKCHCCQFPAALRPHVVWFGEMPLGMDEIYSALADADIFIAIGTSGHVYPAAGFVHEARLHGAHTVELNLEPSQVGSEFAEKHYGLASEVVPAFIDKLLQENAL

SEQ ID NO: 2257 - DNA, 459 bp, Enterobacter cloacae
atgtttaaacctcatgtcaccgttgcctgcgtggttcacgcccaggataaatttctcatcgtcgaagaaaccattaacggcaaagcgctgtggaaccagccggcgggccatctcgaggccaatgaaacgctgctgcaggccgccgaacgtgaactgtgggaagagaccggcattcgcgccacgccgcagcacttcatccgcatgcatcagtggctggctcccgataacacgccgtttctgcgcttcctgttcgccatcgaacttagcgatctgtgcgccactgaaccacacgacagcgatatcgatcgctgcctgtggctcagtgctgaggaaattcttaacgcgccgaacctgcgctcgccgctggttgccgaaagcattcgctgctacctgcaggacccgcggcagccgctgtcgctgattggcgcatttaactggccgttcacagggggtgaatga

SEQ ID NO: 2258 - protein, 152 aa, Enterobacter cloacae
MFKPHVTVACVVHAQDKFLIVEETINGKALWNQPAGHLEANETLLQAAERELWEETGIRATPQHFIRMHQWLAPDNTPFLRFLFAIELSDLCATEPHDSDIDRCLWLSAEEILNAPNLRSPLVAESIRCYLQDPRQPLSLIGAFNWPFTGGE

SEQ ID NO: 2259 - DNA, 651 bp, Enterobacter cloacae
atgcggcaattgataaagcctgaaaataccatgcagaaaacttcatttagaaaacatcgcgttgagcgattcagcacacaacaagtcaccagacaacgtaaagaacgccagccaaaaactgtgatcttgttcaataaaccctatgatgtgttgccgcaatttaccgatgaagccgggcgcagcacgctaaaagattttattccggtggcgggcgtctacgccgcaggtcggctcgatcgcgacagcgaaggcctgctggtgctgaccaacgacggcgcgctgcaggcgaagctgacccagccgggtaagcgcaccggcaagatctactatgttcaggtggaaggcgaacccacgcccgaggcgctgaccgccttgcgcgacggcgtcacccttaacgacggccccaccctgcctgccggcgtagaacttgtcgaggaacccgtctggctgtggccgcgcaacccgccgattcgtgagcgcaaatcgattcccacccgctggttgaaaatcacgctctacgagggacgcaaccgccaggtgcgccggatgaccgcccacgtcggcttccccaccctgcggctgatccgctacgccatgggcggctataccctcgacggactggccaacggcgactggcgcaaagccgaataa

SEQ ID NO: 2260 - protein, 216 aa, Enterobacter cloacae
MRQLIKPENTMQKTSFRKHRVERFSTQQVTRQRKERQPKTVILFNKPYDVLPQFTDEAGRSTLKDFIPVAGVYAAGRLDRDSEGLLVLTNDGALQAKLTQPGKRTGKIYYVQVEGEPTPEALTALRDGVTLNDGPTLPAGVELVEEPVWLWPRNPPIRERKSIPTRWLKITLYEGRNRQVRRMTAHVGFPTLRLIRYAMGGYTLDGLANGDWRKAE

SEQ ID NO: 2261 - DNA, 468 bp, Enterobacter cloacae
atgattttacgtgttttggctgtatcgatgattggttttacgctcgcaggctgcgtgagcagcagcggcctgtccggcgacgtttattccgcatctgaagccaaacaggtgcagagcgtgacttacggtaccatcgtgcatacgcgcgccgtacagatccagagcggcgacgatagcaatgccatcggggccattggcggtgcggtactgggcgggttccttggaaacaccatcggcggcggtaccggacgttctctggctacggcggcaggtgcggtcgcgggcggcgtagccggtcagggcgttcagggcgcgatgaataaaacgcagggcgttgaactggaaatccgtaaggacgatggcaataccattatggtagtgcagaaacagggcagcactccgttctccgttggtcagcgcgtggccattgccggcagcggcagccaggtcaccgtctctccgcgataa

SEQ ID NO: 2262 - protein, 155 aa, Enterobacter cloacae
MILRVLAVSMIGFTLAGCVSSSGLSGDVYSASEAKQVQSVTYGTIVHTRAVQIQSGDDSNAIGAIGGAVLGGFLGNTIGGGTGRSLATAAGAVAGGVAGQGVQGAMNKTQGVELEIRKDDGNTIMVVQKQGSTPFSVGQRVAIAGSGSQVTVSPR

SEQ ID NO: 2263 - DNA, 1008 bp, Enterobacter cloacae
atgtcttatcgaatcagtattctggataaaagtccgcttgccgccggggaaaccgccgcgcaggcgctggcgcgtacattaacgctggcgcaacacgccgaagcctggggctaccaccgcttctgggtcgccgaacaccacaataccgatcagctggcgagcccctcgccggagctggttatcgcctggctgctgggccacacccggcggatccgtcttgggtccggcggcgtcatgctccagcactatagcccctataaggtcgcggaaaactttaacctgctggccgccctcgcgccgggccgcatcgatctcggggtcggcaaggcgcctggcggcctgccgctctccacccgcgccctgcagcagggcctgcatcaagaggagaaagggacctttgccgatcagctggcgcagctggataactggctgtcgctgactgagcccgggggagaggagagcctacgcgccacgccgatcccgccgcgccgggcagacggttttctgctcggcgccagcctggagagtgctgaactggccgcccgccttgactggaactttgtctttgccgcccatctcaatggcgacagcgcgctgcgccgtgccgtgttcaaccgctggcgcgagctcagcccgcgtgaggcgatggtcgccgtccaggtggtggttgctgacgatccggccaccgccgccgcgctggcgcagcaggtcgaggtgtggggcgtcgagctggagaacggccagcgggtgaccgtcggcagtgaggcgcaggccgtcgcttttgcccgccaggccggcagccgaccgacgcgcattgcccgccgtgaatcttcgctgatctccggtactcccgaacaggttaaagcccggcttgacgcgctgcaggcggaagaacagttggatgaactcatcattgatacccccattagcgacgggccagcgcgcctgcactccctgcgcctgctggcgcaggctcactacggcaaggaggtgctgaatgtcctttga

SEQ ID NO: 2264 - protein, 335 aa, Enterobacter cloacae
MSYRISILDKSPLAAGETAAQALARTLTLAQHAEAWGYHRFWVAEHHNTDQLASPSPELVIAWLLGHTRRIRLGSGGVMLQHYSPYKVAENFNLLAALAPGRIDLGVGKAPGGLPLSTRALQQGLHQEEKGTFADQLAQLDNWLSLTEPGGEESLRATPIPPRRADGFLLGASLESAELAARLDWNFVFAAHLNGDSALRRAVFNRWRELSPREAMVAVQVVVADDPATAAALAQQVEVWGVELENGQRVTVGSEAQAVAFARQAGSRPTRIARRESSLISGTPEQVKARLDALQAEEQLDELIIDTPISDGPARLHSLRLLAQAHYGKEVLNVL

SEQ ID NO: 2265 - DNA, 1122 bp, Enterobacter cloacae
atgtcctttgaacaacaactgattagctggcggcgcgagctgcaccagaacccggagctctcactgcaggaggtggccaccaccgcgcggatccgcgactggctgcagagcggcgggctgaccctgctgccctacgatctgaaaaccgggctggtcgccgaagtcggcagcggcgacaaggtgattgccctgcgggcggacatcgacgcgttgcccatcgaggaggcgaccggtctgccttaccgctcgcagaatcaaggggtaatgcatgcctgcggccacgatattcacaccagcgtgatgctgggggcggcgctgctgctgaaggtgcgggaagcggaactcccggggcgggtgcggatcctgtttcagccggcggaggaaaattttggcggggcgaaaaccctgatccgcgccggggcgctggaggaggtgtcggcgatcttcggcatgcacaatgagcccggcctgccggtgggcgaatttgccacccgcggcggcgcgttctacgccaacgtcgaccgcttcgtcttcaaagtgaccgggaagggggcgcatgctgcccgcccacatgaaggaagggatgcgatcctgctggccagccagctggtgacggtgctgcagagcgtggccagccgggaggtgaacaccctcgactcggtggtgctcagcgtgacgcggatccagggaggcaatacctggaacgtgctgccggagagcgtcgagctggaggggacgctgcgcactcacagcagtgaagtgcagcagcgggtcaaggcccgggtcagcgagattgccgccggtttcgccagcgcctttggcgcgcagattgacgtcttctggtacgccggcccgacggcgctggtcaacgacgcccgctgggccgacttcgccagcgaggtggcagcccaggccgggtaccgcacccaccatgccgatctgcatctcggcggcgaagattttgcggtctatcttcagcatattcccggggcgttcgtcagcatcggcagcgccagcgaatatggtttgcaccatccggcatttaatccggatgaacggctgattgcgcccgcggcgcactatttcgcccgtctcgcggaagaagcgttacaacacatttaa

SEQ ID NO: 2266 - protein, 373 aa, Enterobacter cloacae
MSFEQQLISWRRELHQNPELSLQEVATTARIRDWLQSGGLTLLPYDLKTGLVAEVGSGDKVIALRADIDALPIEEATGLPYRSQNQGVMHACGHDIHTSVMLGAALLLKVREAELPGRVRILFQPAEENFGGAKTLIRAGALEEVSAIFGMHNEPGLPVGEFATRGGAFYANVDRFVFKVTGKGAHAARPHEGRDAILLASQLVTVLQSVASREVNTLDSVVLSVTRIQGGNTWNVLPESVELEGTLRTHSSEVQQRVKARVSEIAAGFASAFGAQIDVFWYAGPTALVNDARWADFASEVAAQAGYRTHHADLHLGGEDFAVYLQHIPGAFVSIGSASEYGLHHPAFNPDERLIAPAAHYFARLAEEALQHI

SEQ ID NO: 2267 - DNA, 933 bp, Enterobacter cloacae
atgcagaaaacaacactcttgctggccgtcgcgttggcatttagcgcctcatcgtggggtcaggacgtcaagatcaatggcaccggagtgagcctggaggccaacaaaacgccgattcacacagcgaaaaatccgcaggccattgccctgttgccgcaagatctgcatctggcggtgccggggaaattcaccgtcgcggtggcggccctgaactctccgccgctgacggtctttgccgatgacaacaaaaccctgctcggcagcgaggcggatatcgcccggctggtggcggagagcctcgggctggaagtaaacgtggttcccacttcatgggaagactggccgctgggggtcacctccggcaaatatgatgccgcgatcagcaatattaccgtcaccaaagagcggaaagagaagttcgatttcgccacctaccgcaaagactcgctgggcttctacgtcaaaagcaccagcccgctgagcaagattgacaaagcggaagatatcgccgggctaaagattattgtcggctccggcaccaaccaggaggcgatcctgctggcgtggaacgcggagaacgtcaagaaggggctgaagccgtttatcccggtctacaccaaggatgatgccgcccagacgctggccctgcagaccggacgagccgacgccttcttcggccccaacgtgattggcgcgtggaaggcggcgctgaccggcaaaaccaaactggtgggtagcgtcgatggcggctggccgaaagcggcgcacatcgcggtaacgctgaaaaaagacagcgggctggtgaatgccgtccaggcggcgctgaacggggctatcgccagcggggactacgccaaagtgcttaaccgctggggcgaaggggtggaaagcattccgcaatcggaaatcaatccgcccggactgggcgactga

SEQ ID NO: 2268 - protein, 310 aa, Enterobacter cloacae
MQKTTLLLAVALAFSASSWGQDVKINGTGVSLEANKTPIHTAKNPQAIALLPQDLHLAVPGKFTVAVAALNSPPLTVFADDNKTLLGSEADIARLVAESLGLEVNVVPTSWEDWPLGVTSGKYDAAISNITVTKERKEKFDFATYRKDSLGFYVKSTSPLSKIDKAEDIAGLKIIVGSGTNQEAILLAWNAENVKKGLKPFIPVYTKDDAAQTLALQTGRADAFFGPNVIGAWKAALTGKTKLVGSVDGGWPKAAHIAVTLKKDSGLVNAVQAALNGAIASGDYAKVLNRWGEGVESIPQSEINPPGLGD

SEQ ID NO: 2269 - DNA, 510 bp, Enterobacter cloacae
atgagcgaagcattccgcgatatttctccggaggctccggagctgcagccgattattagcgggctgtttgccgaatatgccgcccgctacggcgactatttttcccgcgatgcggaagtggagttaagtgagtggtatgtgccgccgcaggggctgtttattgtccttgagcgtgagggcgaaattatcgccaccggcgcgtataagccgaaggatcgccacaccgcggagatcaaacgtatctggacgcaccgccgtctgcgccagcaggggctggcggcgaaggtggtccaggagctggagcgacgggcggtgctggccgggtacagccatatctacctgaccaccggtttccgtcagccggaggcggtaaagctctatctcagccaggggtatgaggcgcagtttgacctcacgagagacccggaagagtacagtcagccgccgtacgatggccggctgcggttcactaaagcgctggcggtgagcgcctacagccacagcgcctga

SEQ ID NO: 2270 - protein, 169 aa, Enterobacter cloacae
MSEAFRDISPEAPELQPIISGLFAEYAARYGDYFSRDAEVELSEWYVPPQGLFIVLEREGEIIATGAYKPKDRHTAEIKRIWTHRRLRQQGLAAKVVQELERRAVLAGYSHIYLTTGFRQPEAVKLYLSQGYEAQFDLTRDPEEYSQPPYDGRLRFTKALAVSAYSHSA

SEQ ID NO: 2271 - DNA, 927 bp, Enterobacter cloacae
atgcattcatctgaaacgatcaaagtggtgccggcgcgctatccgctgcgagtggtcggggctctggtcgccctgctggtgctggcggtggtgatccagtcggtggcctttaacccgcgctgggagtggggcgtcttcgcccgctggttcttcgacccggtgatcctcgaggggctgggtcaaaccctgctcctgaccctgctcggcacggtgctaagcgtgatcttcggcggcctgctggcgctggcccgtttgtcctcatcgtggctgctcagcagtctcgcctggggctatatctggctgtttcgctcgctgccgctgattgtggtgctgatcattctctataacttttcctatctctacgacaccctgtcgctggggatcccgtttaccggcgtcacctgggccagctatcagaccattaacgtgctggggcaattctccacggcggtggtgggcctgaccctggtgcagagcgcctataccgcggagattattcgcggcggctttctcggcgttgaccacgggcagtatgaagccgccgccgcgctggggctacccgcctggcggcgcacgctgcgcattattctgccgcaggcgctgcgtaccatcctgccatccggcttcaacgagatcatcagtctggccaagggaacggcgatggtgtatgtcctggcgatgccggaactgttctacaccatccagatgatctacaaccgtacccaggaggtgatcccgctgttgatggtcggcgctgcctggtatctggcgatcaccagcgtcctctccgccattcagtatctggtggaacggggcctggcgcgcagcgagcgccgctcggcggtaaacagcgcccgcagcagccgtctgaatcaacccgcacgtcaagcgcagccgcaggaggccgttcatgcccagctctcataa

SEQ ID NO: 2272 - protein, 308 aa, Enterobacter cloacae
MHSSETIKVVPARYPLRVVGALVALLVLAVVIQSVAFNPRWEWGVFARWFFDPVILEGLGQTLLLTLLGTVLSVIFGGLLALARLSSSWLLSSLAWGYIWLFRSLPLIVVLIILYNFSYLYDTLSLGIPFTGVTWASYQTINVLGQFSTAVVGLTLVQSAYTAEIIRGGFLGVDHGQYEAAAALGLPAWRRTLRIILPQALRTILPSGFNEIISLAKGTAMVYVLAMPELFYTIQMIYNRTQEVIPLLMVGAAWYLAITSVLSAIQYLVERGLARSERRSAVNSARSSRLNQPARQAQPQEAVHAQLS

SEQ ID NO: 2273 - DNA, 219 bp, Enterobacter cloacae
atggaacttgattgccctctgtgccacgcgccgttagatgtcaaaggcagtagcgcgcattgcgcccagtgcgaaagggtatttacccttgaggcccgctgcccggaatgccaccagccgctggaggtgctgaaggcgtgcggcgcggtggattacttttgccagcatgggcatggccttatctcgaaaaaacgggtggaatttattccgctggtttag

SEQ ID NO: 2274 - protein, 72 aa, Enterobacter cloacae
MELDCPLCHAPLDVKGSSAHCAQCERVFTLEARCPECHQPLEVLKACGAVDYFCQHGHGLISKKRVEFIPLV

SEQ ID NO: 2275 - DNA, 474 bp, Citrobacter pasteurii
atgagtcaggtgatcctcgatttacagctggcctgcgaagagaccagcggcctgccggacgaagcccttttccaacgctgggtcgacgccgtcattccgccgtttcaggaggagtcagagttaacgattcgtctggtcgacgttgcagaaagccatgagctgaacctgacctatcgcggcaaggataagccgaccaacgtcctctccttcccgtttgaagcgccgccgggaattgaaatgccgctgctcggcgatctgatcatctgccgtcaggtggtagagcaagaagccagcgagcaaggtaagccgctggaggcgcactgggcgcatatggtggtgcacggtagcctgcatctgctgggctacgatcatatcgaagacgacgaagcggaagagatggaaggccttgaaacagagataatgcttgctctgggctatgaggacccgtacatttccgagaagattgcggaatag

SEQ ID NO: 2276 - protein, 157 aa, Citrobacter pasteurii
MSQVILDLQLACEETSGLPDEALFQRWVDAVIPPFQEESELTIRLVDVAESHELNLTYRGKDKPTNVLSFPFEAPPGIEMPLLGDLIICRQVVEQEASEQGKPLEAHWAHMVVHGSLHLLGYDHIEDDEAEEMEGLETEIMLALGYEDPYISEKIAE

SEQ ID NO: 2277 - DNA, 318 bp, Kluyvera intermedia
ttgcagggtaaagcactccaggattttgttatcgacaaaattgatgacctgaaaggtcaggacatcgttgccattgatgtacatggcaaatccagcatcaccgattgcatgattatctgcaccggcacctccacgcgtcatgtgatgtctatcgccgaccacgtggttcaggagtcccgcgccgccggcatgctgccgctgggcgttgaaggggaagccgccgccgactggatcgtcgtcgacctcggcgacgtgatggtccacgtcatgcaggaagagagccgtcgtctgtacgagctggaaaaactctggagttaa

SEQ ID NO: 2278 - protein, 105 aa, Kluyvera intermedia
MQGKALQDFVIDKIDDLKGQDIVAIDVHGKSSITDCMIICTGTSTRHVMSIADHVVQESRAAGMLPLGVEGEAAADWIVVDLGDVMVHVMQEESRRLYELEKLWS

SEQ ID NO: 2279 - DNA, 690 bp, Enterobacter cloacae
atgatccgcgccatcgtgaccgacatagaaggcaccaccagcgatatccgctttgtgcataacgtgctgttcccctacgcccgcgaacgactggccggctttgtgaccgctcagcagcacgctgaaccggtcaaaaccattctcgacaacctgcgccgcgaaacagacgcccccgccgccagcaccgccgaccttatcactaccctcttcacctttatggatgaagaccgtaaatccacggcgctgaaggcgctgcaggggatcatctggcgcgacggctatctcaacggcgactttaccggccatctctacccggacgtactgccggcgctggagcaatggaaagcgcagggtattgatctgtatgtatattcctcaggttccgtggctgcgcagaaattgttatttggctacagcgatgaaggtgatattactcatctgttcacgggctatttcgataccctggtaggcgccaaacgtgaggtgcagtcctaccgtaacattgctgaacacctgggccatgcccctggcaccatcctgttcctgtcggatatccatcaggaacttgatgccgccgaggccgcgggtttgcgcactgtgcagctggttcgcggcgaccgcgacccggcgagccaccatcctcaggttcagcgttttgacgacattcatccggagcagatcccagcatga

SEQ ID NO: 2280 - protein, 229 aa, Enterobacter cloacae
MIRAIVTDIEGTTSDIRFVHNVLFPYARERLAGFVTAQQHAEPVKTILDNLRRETDAPAASTADLITTLFTFMDEDRKSTALKALQGIIWRDGYLNGDFTGHLYPDVLPALEQWKAQGIDLYVYSSGSVAAQKLLFGYSDEGDITHLFTGYFDTLVGAKREVQSYRNIAEHLGHAPGTILFLSDIHQELDAAEAAGLRTVQLVRGDRDPASHHPQVQRFDDIHPEQIPA

SEQ ID NO: 2281 - DNA, 543 bp, Enterobacter cloacae
atgagcgcattaactcttttttccgtgaccgatccgcaaacgccggtctggcacagcaccgacgccaaagcgattcaggatcaacttaacgccaaaggcgtccgcttcgagcgctggcaggccgaccgcgacctcggcgcaaatcccagcccagaaacggtgattgccgcctatcagcatgcgattgataaactggtcgccgaaaagggctaccagagctgggacgtcatcagcctgcgcgccgataacccgcaaaaagaggcgctgcgggaaaagttcctgaacgagcacacccatggcgaagacgaggtgcggttttttgtcgagggcgctggcctgttttgcctgcacattggcgacgaggtgttccaggtgctgtgcgaaaagaacgatctgatttcggttcccgcccacactccgcactggtttgatatgggatcagaaccgaacttcaccgccattcgcatttttgataacccggaaggctggatcgctcagtttaccggtgacgatatcgccagcgcctacccgcggctggcgtaa

SEQ ID NO: 2282 - protein, 180 aa, Enterobacter cloacae
MSALTLFSVTDPQTPVWHSTDAKAIQDQLNAKGVRFERWQADRDLGANPSPETVIAAYQHAIDKLVAEKGYQSWDVISLRADNPQKEALREKFLNEHTHGEDEVRFFVEGAGLFCLHIGDEVFQVLCEKNDLISVPAHTPHWFDMGSEPNFTAIRIFDNPEGWIAQFTGDDIASAYPRLA

SEQ ID NO: 2283 - DNA, 540 bp, Klebsiella pneumoniae
atgacaaaactcaccttacaagagcagatgctcaaagccggcctggtcagcagcaaaaaaatggctaaagtccagaggacggcgaaaaaatcccgtgttcaggcccgtgaggcccgggaagcggtggaagaaaataaaaaagcccagctggagcgtgataaacagcttagcgagcagcaaaagcaggcggtgctggcgaaagagtataaagcccaggtgaagcagctgatcgagatgaaccgcattacggtcgcccggggcgatatcggctttaactttaccgataataatctgatcaaaaaaatcatggtcgacaagcccacccagacccagctgattaacggccgtctggcgattgcccgcctggcggtggataacaagcccgaaggtgaatatgcgattattccggcggtagtggctgagaaaattgcccagcgcgacgccagcagcatcgtgttgcacagcgccctgagtcaggatgagcaggatgaagacgatccgtacgccgactttaaggtgcccgacgatctgatgtggtaa

SEQ ID NO: 2284 - protein, 179 aa, Klebsiella pneumoniae
MTKLTLQEQMLKAGLVSSKKMAKVQRTAKKSRVQAREAREAVEENKKAQLERDKQLSEQQKQAVLAKEYKAQVKQLIEMNRITVARGDIGFNFTDNNLIKKIMVDKPTQTQLINGRLAIARLAVDNKPEGEYAIIPAVVAEKIAQRDASSIVLHSALSQDEQDEDDPYADFKVPDDLMW

SEQ ID NO: 2285 - DNA, 900 bp, Enterobacter cloacae
atgcccgtaaattttgacttcaacgatctctacgcctttcgcgccctgatggaatatggcagttttcggctggcggccgaatccatctgcctgtcgcagtcggcccttagccgacgcatcgaaaagctggagacggcgctgggcaaccggctgttcgatcgcaccacccggcgggtgaccctcacgctgtatggacaaaattttgccgaacgttcggagcagctgctggcccatgtcgagacggtgctggcggatatcagccaggtcagcaaggcgcgcaccgggctggtgacggtggcgacagtgccttccgccgcctactactttatgccggaaataatccgcagctttcaggcgcgttatccccaggtgcgcatccggttgattgacagcagcgtcgggaatgtgatcgaggcggtcagcagcggacaggctgactttggcctctgctttgccaaaaacctgccagccagtatcgaattcacccctcttgccgacgaccgctatgtggccgcctgtcggcacgatcatccgctggcgcgcaagacgcacctaagctggcaggcgtattttgaacaggattatattggcctggatcgggtctccggcaaccggacgctgcttgaccgggagctggcgcatctgacgccggcgcggccaagtatctgcgaaacccgccacgtcaccacgatgctggggatggtggaagcgggcatcggcattgccgccgtgcccgcgatgtcgatgcccgccggggagcattccgttctccgcgctgtgccgctcaccgacccggtggtcacgcgtacggtaggcctgatccgcctcagcggccgtattcagtcctacgtggcggcagagctggagaagctgattattgaacagtatccttctggctga

SEQ ID NO: 2286 - protein, 299 aa, Enterobacter cloacae
MPVNFDFNDLYAFRALMEYGSFRLAAESICLSQSALSRRIEKLETALGNRLFDRTTRRVTLTLYGQNFAERSEQLLAHVETVLADISQVSKARTGLVTVATVPSAAYYFMPEIIRSFQARYPQVRIRLIDSSVGNVIEAVSSGQADFGLCFAKNLPASIEFTPLADDRYVAACRHDHPLARKTHLSWQAYFEQDYIGLDRVSGNRTLLDRELAHLTPARPSICETRHVTTMLGMVEAGIGIAAVPAMSMPAGEHSVLRAVPLTDPVVTRTVGLIRLSGRIQSYVAAELEKLIIEQYPSG

SEQ ID NO: 2287 - DNA, 807 bp, Enterobacter cloacae
atgcgtaaaacgacaggaaccctgctagccacgctgctgctggccgccaccggcggcagcgcgttatccgctgaggtcaccgtgatgatctccggcggcttcaaagcggcgctggaaaagctggccccggcgtgggaaaaacaaaccggcaaccacctcgtggtgatccctggcccgtcgatgggaaaaacgccgcaggcgatccctaaccgtctggcgcgcggcgaacacgcggacgtggtgatcatggtcggggacgcgctgaccagcctcgagaaagcgggccgtacgcaaccggattcgcgccgggagctggccgactcgccgatcggcgtggtggtgaaggcgggggcgccgctgccggctatccacagcgcagaccagctgcgggcgacgctgctggcggcgccatcggtcgcgtactccgacagcgccagcggacgctatgtcagctcgacgctgttccacaccctgggcattgatgatgcgatgcagagtaaagcgcagatggtggagcgcattccggtggcctcggaagtggccaagggacggtatgcgatcggttttcagcaggtgagcgaactgctgccggtgcccggcgtaaccttcgtcggcgaactgccggataacctgcagtacatcacccgctttgccggggcggtgaccatcagcgccgaccacccgcaggaaggcaaggcgctgctgacgtatctggcgtcaccggcggcgcaggagaccatccacgccaccggtatgcgaagcgtagccgccgccgcgccggtcagccagaaggatactgttcaataa

SEQ ID NO: 2288 - protein, 268 aa, Enterobacter cloacae
MRKTTGTLLATLLLAATGGSALSAEVTVMISGGFKAALEKLAPAWEKQTGNHLVVIPGPSMGKTPQAIPNRLARGEHADVVIMVGDALTSLEKAGRTQPDSRRELADSPIGVVVKAGAPLPAIHSADQLRATLLAAPSVAYSDSASGRYVSSTLFHTLGIDDAMQSKAQMVERIPVASEVAKGRYAIGFQQVSELLPVPGVTFVGELPDNLQYITRFAGAVTISADHPQEGKALLTYLASPAAQETIHATGMRSVAAAAPVSQKDTVQ

SEQ ID NO: 2289 - DNA, 1296 bp, Klebsiella oxytoca
atgcattcaacaacctcacagatgagtacccgtgaccggatcggcgccattctgcgcgtcacgtccggtaactttctcgaacagttcgacttttttctgttcgggttttatgccacctacatcgcccataccttttttccggcgagcagtgaattcgcctcgctgatgatgaccttcgcagtctttggcgccggctttttgatgcgccccatcggcgctatcgtacttggcgcctatatcgacaaggtggggcggcgcaaggggctgatcgtcaccctgtcgatcatggccaccggcaccttcctgatcgtgctgatcccctcttatcagaccattggcctgtgggcgccgctgctggtgctgatcggccgtctgctgcagggcttttccgccggcgccgagctgggcggggtgtcggtctatctggccgagatcgccacctcgggccgcaaaggcttttacaccagctggcagtcgggcagtcagcaggttgccatcatggtggcagccgcgatgggctttgccctcaacgcggtactggagccgagcgctatcagcgactggggctggcgtattccgttccttttcggctgcctgattgttccgttcatttttatcctgcgccgtaagctggaggagacccaggagtttactgcccgccgccatcatctggcgatgcgccaggtattcgccaccctgctggcgaactggcaggtggttatcgctgggatgatgatggtggcgatgaccaccaccgcgttctacctgatcaccgtctatgccccgacctttggtaaaaaggtgctgatgctcagcgcctctgacagcctgctggtcacgctgctggtggcgatttccaacttcttctggctgccggtgggcggggcgctgtccgaccgctttggccgccggtcggtgctgatcgccatgaccctgctggcgctggctaccgcctggcctgcgctgaccatgctggcgaacgccccgagctttttgatgatgctgagcgtgctgctgtggctgtcgtttatctacggcatgtacaacggggcgatgatcccggcgctgaccgaaattatgcccgccgaagtgcgcgtggcaggtttctcgctggcctacagcctggcgaccgcggtgtttggcggcttcacgccggtgatttccacagcgctgattgagtataccggtgataaagcgtctcccggctactggatgagctttgccgccatttgcggcctgctggccacttgctacctctatcgccgtagcgccgttgcgctgcagacggcacgttaa

SEQ ID NO: 2290 - protein, 431 aa, Klebsiella oxytoca
MHSTTSQMSTRDRIGAILRVTSGNFLEQFDFFLFGFYATYIAHTFFPASSEFASLMMTFAVFGAGFLMRPIGAIVLGAYIDKVGRRKGLIVTLSIMATGTFLIVLIPSYQTIGLWAPLLVLIGRLLQGFSAGAELGGVSVYLAEIATSGRKGFYTSWQSGSQQVAIMVAAAMGFALNAVLEPSAISDWGWRIPFLFGCLIVPFIFILRRKLEETQEFTARRHHLAMRQVFATLLANWQVVIAGMMMVAMTTTAFYLITVYAPTFGKKVLMLSASDSLLVTLLVAISNFFWLPVGGALSDRFGRRSVLIAMTLLALATAWPALTMLANAPSFLMMLSVLLWLSFIYGMYNGAMIPALTEIMPAEVRVAGFSLAYSLATAVFGGFTPVISTALIEYTGDKASPGYWMSFAAICGLLATCYLYRRSAVALQTAR

SEQ ID NO: 2291 - DNA, 927 bp, Enterobacter cloacae
atgaatattatgcatcctgtcctgcgccggattgacctcaacctgttgccggtctttgacgcggtctatcgctcccgctcggtacgcctggcggcggaagagctggcgatgagcacctcggcgctgagccatgcgctttcccggctgcgcagcgccctcaacgatccgctgttttaccgcgaaggccaccggatgtgtcccagcgtctatgccagccagctggcgccctctatcgcttcggcgctgaagtttctcaaccaggagctgacgccgccggcggcgtttgtgccggccgccagcaccgactgcatgcagattgcgatcaccgatttcaccgcgttctgcgtctttccgacgctgatgcaccacctgcagcgtgaggcgcccgggctgcggtttgagctccgttatctgccccacagcccggcgctgaccgagctgctggcgggcgaggtcgacctggccctcgggttcaatacccctgacgagccagcccatcccgatcttgaggagattaactggctgcgggacgaatatgtggtcatcagccaggccaaccggacggcgctgaccctggacgcctaccttgcggcccgtcatctggtggtgaccccgtggaatgagcggcagggggtgctggactgtgagctggagcgacagggctattcgcggcaggtggcgatgaaaaccccctcgatgctgagcgcgccctttattattgagcagagcgacctgttgatggcgctgccccggcgggcggcggagacgatggcccgcgccgcccggctgaccattttcccgctgccgtttccggttccgccgtttgacgtcaagatttacgcccaccaacgcagcgggaaacgcgaggctacccgctggcttatctccctgttgcagacgctggtgggggagtccaccgcttcctga

SEQ ID NO: 2292 - protein, 308 aa, Enterobacter cloacae
MNIMHPVLRRIDLNLLPVFDAVYRSRSVRLAAEELAMSTSALSHALSRLRSALNDPLFYREGHRMCPSVYASQLAPSIASALKFLNQELTPPAAFVPAASTDCMQIAITDFTAFCVFPTLMHHLQREAPGLRFELRYLPHSPALTELLAGEVDLALGFNTPDEPAHPDLEEINWLRDEYVVISQANRTALTLDAYLAARHLVVTPWNERQGVLDCELERQGYSRQVAMKTPSMLSAPFIIEQSDLLMALPRRAAETMARAARLTIFPLPFPVPPFDVKIYAHQRSGKREATRWLISLLQTLVGESTAS

SEQ ID NO: 2293 - DNA, 477 bp, Enterobacter cloacae
atgagcatcacaatccgccaggccaccccggacgacgccaccgctatctacgatatgatttatgaactcgcggtctacgagaaagcccccgaagaggtagtgacgacgccagaggagatcagagagacgctgtttgccagcggcagcaaaaccgaagcgctgatctgcgaggtggcgggcaaagcggtgggctacgcggtgttcttcaccagctactccacctggcttggacgcaatggtatctatatggaggatctgtacgtcacccccgactatcgcgggatcggcgccggaaaagcgctgctgaaaaccatcgcgcaatatgctgtacaacgtcagtgcgggcgtctggagtggagtgtgctcgactggaaccagccggcgattgatttctatctgagcattggcgcgcagccacaggatgagtgggtgcgttatcgcctcactggcgatgcgctgcgggcctttgcggagtaa

SEQ ID NO: 2294 - protein, 158 aa, Enterobacter cloacae
MSITIRQATPDDATAIYDMIYELAVYEKAPEEVVTTPEEIRETLFASGSKTEALICEVAGKAVGYAVFFTSYSTWLGRNGIYMEDLYVTPDYRGIGAGKALLKTIAQYAVQRQCGRLEWSVLDWNQPAIDFYLSIGAQPQDEWVRYRLTGDALRAFAE

SEQ ID NO: 2295 - DNA, 1644 bp, Escherichia coli
atgtcacaacaaattgaatcagtaaaaatggctctgcaggagctggggattaatgcaagcggcgaattcttttacaaccctgattacgatttgcttattgcacatgaaacctctcctgagctgaccggcgcggcccgcggcgtgatgaccgactctggcgctgtggctgttgataccgggatcttcaccggccgttcgccgcgcgataaatacatcgtccgcgacgaacagactcgcgacaccgtctggtgggcagactccggcctcggccgtaatgacaataagccgttatcgccagacgtgtggcgcagcctgaaaagcctggtcgcgggccagctgagcggcaaaaaactgtacgtcatcgacgcctggtgcggcgccagcccggacacccgtcttggcgtacgcttcgtcaccgaggtggcgtggcaggcccactttgtcaaaaacatgtttatcgtgccaagcgccgacgagctggccagctttacgccagacttcgtggtgctcaacggcgcgggctgcaccaatgccaactggcaggcgcaggggatgaactccgagaactttgtcgcctttaatctcagcgagcgtattcagctcatcggcggtacctggtacggcggcgaaatgaagaaagggctgttctcggtcatgaactacctgctgccgcagaaaggcatcgcgtcgatgcactgctcggccaaccgtggcgaagcaggggacgtggcgctgttcttcggcctctccgggaccgggaaaaccaccctgtcgaccgatccgcatcgtcagctgatcggcgatgatgagcacggttgggacgatgccggcgtgtttaacttcgaaggcggctgctacgccaagaccatcaatctcgatccgcaggcggagccggagatttatggcgccatccgccgcaatgcgctgctggaaaacgtggtggtgcgcgctgacggcagcgtggattatgccgacggcagcaaaaccgaaaacacccgcgtctcctatccgctgtcgcatatcgacaatatcgtcaagccggtgtcccgcgcgggccatccgtcgaaggtgattttccttgccgccgatgcgtttggcgtcctgccgccggtctcccgtctgaccaccgagcagatgcagtaccatttcctgtcgggtttcacctcgaagctggcgggcaccgagcgcggcattacccagccgacgccgaccttctccgcctgctatggcgcggcgttcctgctgcttcacccgacccagtacgccagcgtcctggcggcgaagatggcggaatccggtgccgaagcctggctggtcaacaccggctggaacggcgaaggcaaacgcctgtcgctgcgcgatacccgcagcatcattagcgcgatcctcaacggcactaccggcccgctgcgcgaggagaccatcccggtgttcggtcttgcgatcccgcagagcattccaggggtagacagcgcggtgctggatccgcgtaatggctggagttcagcggataaatggcaggagaaggccgagagcctggctcagctgtttatggataacttcaagcagtacagcgataccgaagcgggcgcgcgtctggcgctggccggtccgcagctgcagaagagcgcggtcgaagcctga

SEQ ID NO: 2296 - protein, 547 aa, Escherichia coli
MSQQIESVKMALQELGINASGEFFYNPDYDLLIAHETSPELTGAARGVMTDSGAVAVDTGIFTGRSPRDKYIVRDEQTRDTVWWADSGLGRNDNKPLSPDVWRSLKSLVAGQLSGKKLYVIDAWCGASPDTRLGVRFVTEVAWQAHFVKNMFIVPSADELASFTPDFVVLNGAGCTNANWQAQGMNSENFVAFNLSERIQLIGGTWYGGEMKKGLFSVMNYLLPQKGIASMHCSANRGEAGDVALFFGLSGTGKTTLSTDPHRQLIGDDEHGWDDAGVFNFEGGCYAKTINLDPQAEPEIYGAIRRNALLENVVVRADGSVDYADGSKTENTRVSYPLSHIDNIVKPVSRAGHPSKVIFLAADAFGVLPPVSRLTTEQMQYHFLSGFTSKLAGTERGITQPTPTFSACYGAAFLLLHPTQYASVLAAKMAESGAEAWLVNTGWNGEGKRLSLRDTRSIISAILNGTTGPLREETIPVFGLAIPQSIPGVDSAVLDPRNGWSSADKWQEKAESLAQLFMDNFKQYSDTEAGARLALAGPQLQKSAVEA

SEQ ID NO: 2297 - DNA, 894 bp, Enterobacter cloacae
gtgttggcaaatctggaagtaaaatggctgtatgatgtgattgcccttgaggagtcgcgcagctttaccctggcggccaaagcccgcaacatctctcagtcttcgttcagtcgacgcatccagtcgctggaggcttccctcggattcagcatcttcgatcgtagcgccaaccctctgcagctgaccaaccgcgggaaaatttttgtcggctatgcgcgaaatatgctcgatgacatggattttcagatcagccgtattaagggtttaaataacactacgcaaaaaataagaatcgacgccgccccttcgctgtcggtgttattactgccggagatcatcgccggttacaccgaccgtaaaaataagacttttcatgttgaatcgattaacgtcaacgacgccgtatttaacctgaaagagggaaaaagcgattttatcctctccttctataatgaagaattaatgaactatccgtttattaatcataaaatttttgattcttacctgcacctggtctccccctgcgacgaacatggccgcccgctgtttcatttacatcgcggcgtgctgccgctgatgaaatacgccaacgacagctatatggggcgccaggtgaaccaggtgatcgaccgcacgccggagatcaccttctctctcacctttgtttcttccatgagcgagctgctcaagcgcatgatcctcaatggcgacggcgtgggctggctgccgcagtactctattcagcgcgagctggacgaaggccggctgacgatcctcgatgagagcctgtcgctgccgatcggcgcctggctctaccgctccggctcgcggcttaaccaggccgccgaacgtttctggcagcacattaaaacccgtaacgaaccgcgggaataa

SEQ ID NO: 2298 - protein, 297 aa, Enterobacter cloacae
MLANLEVKWLYDVIALEESRSFTLAAKARNISQSSFSRRIQSLEASLGFSIFDRSANPLQLTNRGKIFVGYARNMLDDMDFQISRIKGLNNTTQKIRIDAAPSLSVLLLPEIIAGYTDRKNKTFHVESINVNDAVFNLKEGKSDFILSFYNEELMNYPFINHKIFDSYLHLVSPCDEHGRPLFHLHRGVLPLMKYANDSYMGRQVNQVIDRTPEITFSLTFVSSMSELLKRMILNGDGVGWLPQYSIQRELDEGRLTILDESLSLPIGAWLYRSGSRLNQAAERFWQHIKTRNEPRE

SEQ ID NO: 2299 - DNA, 1425 bp, Enterobacter cloacae
atgagtcgtttagtcgtagtctctaaccgtatcgccttaccggacgataaaaaatcgagcgctggcggtctggccgtcggcatcctgggggcactgagagcggcggggggtctgtggtttggctggagcggcgagattggcgatgaccagcaaccgctcaagcaggtctcccgcgggaatatttcctgggcgtcgttcaaccttaatgaacgggaccatgatgaatactacaaccagttctctaacgccgtgctgtggccggctttccactatcgccttgatctggtcagctttcagcgcgaagcctgggagggatatctgcgggttaacgccatgctggcggacaagcttctgccgctgattgagccagacgatacgctgtggatccatgattaccatcttctgcccttcgccagcgagctgcgcaagcgcggggtgaacaatcgcatcgggtttttcttacatattccgttcccgacgccggagatttttaacgctctgccgccgcacgctgagctgctggagcaactgtgcgattacgatctgctgggcttccagaccgaaagcgacagaaccgcttttctcgacagcattgctatgcagactcgcctatccgacctcggcgataaacgctatcaggcatggggtaaggcgttcagtaccgaggtttatccgatagggatcgatccggacgaaattacgcgcaacgctaaaggtccgctgccgccgaagctggcccagctgaagaacgagctgaaaaatgtgaagaatatcttctccgtggagcgtcttgactattcgaaagggttgccggagcgattcctcgcctacgagacgctgctcgagaagtaccctcagcaccacggcaaaatccgttatacccagatcgcgccgacctcccgcggcgatgtgcaggcctatcaggatatccgccaccagctggaaaccgcagccggacgcatcaacggacagtttggtcagcttggctggacaccgctctactatctgaatcagcattttgatcgtaagctgctgatgaaggtcttccgctactctgacgtcgggctggtgacgccgctacgcgatggtatgaatctggtggcgaaggagtacgtcgcggcgcaggatccggataaccctggcgtactggtcctgtcgcagtttgccggggcggcgcaggagctgaccagcgccctgatcgtcaatccttacgatcgcgacgaggttgccgccgcgctggatcgcgcgctcagcatgccgctggcggaacgtatcgcccgtcattcagcgatgctggacgtgatcagagaaaatgatattcataactggcaggcgcgctttgtcgatgatctgcagcatatttcaccgcgcagcgaggagagccgtctgcgggggaagatagccaccttccctaaactggcctag

SEQ ID NO: 2300 - protein, 474 aa, Enterobacter cloacae
MSRLVVVSNRIALPDDKKSSAGGLAVGILGALRAAGGLWFGWSGEIGDDQQPLKQVSRGNISWASFNLNERDHDEYYNQFSNAVLWPAFHYRLDLVSFQREAWEGYLRVNAMLADKLLPLIEPDDTLWIHDYHLLPFASELRKRGVNNRIGFFLHIPFPTPEIFNALPPHAELLEQLCDYDLLGFQTESDRTAFLDSIAMQTRLSDLGDKRYQAWGKAFSTEVYPIGIDPDEITRNAKGPLPPKLAQLKNELKNVKNIFSVERLDYSKGLPERFLAYETLLEKYPQHHGKIRYTQIAPTSRGDVQAYQDIRHQLETAAGRINGQFGQLGWTPLYYLNQHFDRKLLMKVFRYSDVGLVTPLRDGMNLVAKEYVAAQDPDNPGVLVLSQFAGAAQELTSALIVNPYDRDEVAAALDRALSMPLAERIARHSAMLDVIRENDIHNWQARFVDDLQHISPRSEESRLRGKIATFPKLA

SEQ ID NO: 2301 - DNA, 510 bp, Enterobacter cloacae
atggcagttccaggaatggcacaaaagctaaacacccaaatgaatcttgagtttcacgcctctaacgtttacctgaacttaagcgagtggtgcgcccggcatcgcttcgacggcgccgcgacgtttctgcgcacccgcgcgcaaagcagcatcaccctcaccatgcgcgtatttgactacctgaaaaaagccggcagctggccgatcgtcaatcccgaccacgcctgtaaccctgagtgcacctcgctggaagatctgtttacccaaaccctgagcgattaccaacagcgcagtcgtctgctgagcggtctcgctcaggaagccaaagcgcaaagcgatgacagcacctggcggtttctcacgctgttggcggaagagcagcagcaggatggcctgctattgcaaagcgtgcttgaggaaattcgtaatgccgataaagccggtctcgggatggagcagaccgatcggcgtctgatggctatcgttggagaagcgcagaaagcgcattaa

SEQ ID NO: 2302 - protein, 169 aa, Enterobacter cloacae
MAVPGMAQKLNTQMNLEFHASNVYLNLSEWCARHRFDGAATFLRTRAQSSITLTMRVFDYLKKAGSWPIVNPDHACNPECTSLEDLFTQTLSDYQQRSRLLSGLAQEAKAQSDDSTWRFLTLLAEEQQQDGLLLQSVLEEIRNADKAGLGMEQTDRRLMAIVGEAQKAH

SEQ ID NO: 2303 - DNA, 1563 bp, Enterobacter cloacae
atggctagatacacggcttcagcctctgaagggctgcagggaagaccgatcttgttacgccatcagttagcctacggcggcggaaatctgttagggagcggcgcactggcgataagcggcgcatggctactctatttttatacgaccttttgcggcctgacgctgatcgaggcctcatttatcttctccgtcgccagcatcattgacgctatcagcaacccgctgatgggctatctgacggataattttggcaaaacgcgtttgggcaagcgcttcggccgccggcgtttctttctgctaatcggtattccgctgatgatgttctacccgctgctgtgggtggaaggcctgagtttctggtactaccttagcacctatgtggtgtttgagatcatctacacctctatcatggtgccttatgaaacgctggcgacagagatgaccgatgatttctcactgcgttcaaaactgaccggctataaagctatctttggtaagctggccaacttcctcgcggcgtttattcccggccagttcattctgctgtatggcaaagattctgccacccctttcttcctcaccggtctgacctatggcgcgatcctgatcgtcgctatttcctgcctgtggttgtgcagctgggagcgtgagcgcggggaagaggtggaaaccagcgcgaaaaaaggactgctgagcaccctgctgtcgctggcgaaagatatgcgttcgactttttatctacgcgtattccgcaagcatcttggtatgtacctgtgcggctttggcgcggaatggctgtttgcctccatcttcacctatttcgtgatcttcgttctacaacacgatccagcgatggtggccgggctgaacagcctgaactcgattctgcagctgatctctacggcgctgtttatcggcctgtgcgtgaaaaagggcttcagcaaaccctatatcctggcgctggggatcgtcattttcgcggttctgctgtatacctcgctgtggtttttccatctaccgtccggcctggcgacagtgctgatgttcggcattaccgtgctgttcggcctgggtaccggcggggtttactatataccctggaccgtttacaccttcctggccgatgtcgatgagatctacaccggacgccggcgggaagggatctatgccggcgccatgaccttctcaggaaaaattctgcgctcgattgtggtgttctcgatgggggcgatcctgagcttctacggtttccagtcaaaagcgcacagccaaccggaaagcgcggtgaccgctatcgcagtggtattctgcgtcggggtgatcgcattagccctggccgccatcgtcttcagcaagcagatgaagctggaccggaaggcccatctggtggtgctgcaggaagtcgcgcggataaaagcgggcggcaaaattagcgatattgcgccggacgtgcgggttatcgtggaggatctggtcggccatcgctacgaagagtgctggggcaacagcaaattgttcaaagatgctgcccctgcgcctgcgcagaccgtcgtttcccattaa

SEQ ID NO: 2304 - protein, 520 aa, Enterobacter cloacae
MARYTASASEGLQGRPILLRHQLAYGGGNLLGSGALAISGAWLLYFYTTFCGLTLIEASFIFSVASIIDAISNPLMGYLTDNFGKTRLGKRFGRRRFFLLIGIPLMMFYPLLWVEGLSFWYYLSTYVVFEIIYTSIMVPYETLATEMTDDFSLRSKLTGYKAIFGKLANFLAAFIPGQFILLYGKDSATPFFLTGLTYGAILIVAISCLWLCSWERERGEEVETSAKKGLLSTLLSLAKDMRSTFYLRVFRKHLGMYLCGFGAEWLFASIFTYFVIFVLQHDPAMVAGLNSLNSILQLISTALFIGLCVKKGFSKPYILALGIVIFAVLLYTSLWFFHLPSGLATVLMFGITVLFGLGTGGVYYIPWTVYTFLADVDEIYTGRRREGIYAGAMTFSGKILRSIVVFSMGAILSFYGFQSKAHSQPESAVTAIAVVFCVGVIALALAAIVFSKQMKLDRKAHLVVLQEVARIKAGGKISDIAPDVRVIVEDLVGHRYEECWGNSKLFKDAAPAPAQTVVSH

SEQ ID NO: 2305 - DNA, 252 bp, Enterobacter cloacae
atgtctcaacatcttaccgaacacgacgagctggtttccgatgtggttgcctgccagctggttatcaaacagatcctcgatgtcattgacgtcattgcgccggtggaagtgcgtgaaaaaatgaccactcagctgaaagctatcgacttcgccagccatccggcctctgccgatccggtgacccttcgcgcggtgcaaaaagcgatcgcgttgattgagctgaagtttactccacaggaagaaacgcattaa

SEQ ID NO: 2306 - protein, 83 aa, Enterobacter cloacae
MSQHLTEHDELVSDVVACQLVIKQILDVIDVIAPVEVREKMTTQLKAIDFASHPASADPVTLRAVQKAIALIELKFTPQEETH

SEQ ID NO: 2307 - DNA, 657 bp, Klebsiella pneumoniae
ttgatcaacgttcttcttgttgatgaccacgaactggtgcgcgcagggatacgacgcattctggaagatataaaagggattaaagtcgctggcgaagcctgctgcggcgaggacgccgtcaagtggtgccgggctaattccgcagatgtcgtcctgatggacatgaacatgcctgggatcggtggccttgaagcgacgcgcaaaatcgcgcgctccgtggcgggcaccaaagtgatcatgttgaccgtgcataccgagaatcctttacctgccaaggtcatgcaggcgggcgcggcgggctatctcagtaaaggcgccgcgccgcaggaagtggtgaatgccatccgctgcgtcgcgtccgggcagcgctatattgcctccgatattgcccagcaaatggcgttaagtcagattgaacccgaaaagacagaatcgccgtttgccagtttgtctgaacgcgaattgcagattatgctgatgatcaccaaaggtcagaaggtgaatgagatctcagagcagctaaatctgagtcctaaaacggttaacagctaccgctatcggatgttcagtaaattaaacattcatggcgatgtcgagctgacccacctggcaattcgccatggcctgtgtaatgcggagtcgttagcaagccagtga

SEQ ID NO: 2308 - protein, 218 aa, Klebsiella pneumoniae
MINVLLVDDHELVRAGIRRILEDIKGIKVAGEACCGEDAVKWCRANSADVVLMDMNMPGIGGLEATRKIARSVAGTKVIMLTVHTENPLPAKVMQAGAAGYLSKGAAPQEVVNAIRCVASGQRYIASDIAQQMALSQIEPEKTESPFASLSERELQIMLMITKGQKVNEISEQLNLSPKTVNSYRYRMFSKLNIHGDVELTHLAIRHGLCNAESLASQ

SEQ ID NO: 2309 - DNA, 798 bp, Enterobacter cloacae
atgtttaaatggccctggaaagcagatgatgagtccggcaacgcagagatgccctgggagcaagcgcttgccattccggttttagcccatctttcgtccactgagcagcacaagctcacgcagatggctgcccgttttttacagcaaaagcggctggtggcattgcaggggctggagctgaccccgctgcatcaggcgcgcattgctatgctcttttgtctgccggtgcttgagctgggcattgagtggctggatggcttccatgaagtgctgatctaccctgcccctttcatcgtcgatgatgaatgggaggatgatattggtctggtccacaaccagcgggtggtacagtcgggacaaagctggcaacagggtcctgtagtgctgaactggctggatattcaagactcttttgatgcgtcaggctttaaccttgtggtgcatgaagtggcgcataagcttgatacgcggaatggcgaccgggccagcggcgtgccgcttatcccgttgcgtgaagttgccggctgggagcatgatctccacgccgcgatgaacaacattcaggatgagatcgatctggtcggcgaaagcgccgccagtattgacgcctatgccgccaccgatcccgcagaatgctttgctgtcctctcggaatattttttcagtgcgcctgaattgttcgcgcctcgcttcccggccctgtggcagcgtttttgccacttttaccgccaggatccgctggcgcgtagacgtgagaatggcctgcaggacgaaggcgatcggcgcattgttcactaa

SEQ ID NO: 2310 - protein, 265 aa, Enterobacter cloacae
MFKWPWKADDESGNAEMPWEQALAIPVLAHLSSTEQHKLTQMAARFLQQKRLVALQGLELTPLHQARIAMLFCLPVLELGIEWLDGFHEVLIYPAPFIVDDEWEDDIGLVHNQRVVQSGQSWQQGPVVLNWLDIQDSFDASGFNLVVHEVAHKLDTRNGDRASGVPLIPLREVAGWEHDLHAAMNNIQDEIDLVGESAASIDAYAATDPAECFAVLSEYFFSAPELFAPRFPALWQRFCHFYRQDPLARRRENGLQDEGDRRIVH

SEQ ID NO: 2311 - DNA, 933 bp, Enterobacter cloacae
atggatgtcataagcatcattatggcggcgggcaagtcgtccgttgacgtcgcgctgtatacgctgttgccgatcatggtgatcatgctgatcatcatgaaataccttgaggtccgcggtatcctcgatgtgattgttcgctgggtggccccgctgctgaagcccttcggcttaaccgggatgagcgccttcgccctgatccagattaactttgtcagctttgccgccccgctcgccacgctgtcgattatggataaacgcggcgtctcggaccgacaaatggccgccacgctggccatggtgttcgccatggggcaaggcaacgtcttctatcctcttaccccttttggtctgcactggctggcctcgatcgttatctcggtggtcggcggcctgtgcgcggccgccgtcgcctggcacgtcaccggacggcgcttatcggtcgccgagaacccccgcgcggaagcgctgccgaacgccgagcagaacagccagggaattctggccgtgattaatagcgccggctccgacgccatccgcctggcgctcggcgcggtgccaatgctgatcctgtcgttaaccatcgtcgggctgctgcagggcgccggggctatcgacctgctgcagcagctgctgaagccgcttctcggctggctgcacatcccccagaactttgtgctgccggcgctggtgaagtgcgttgccgggggcaccgcctactttggcgtcatttccgagctgatccagcagggcaaagtcaccgtggaccaggtcaacgcctcggcaggtctactgatccagacctttgatcttcccggtatcggcatttttcttggcatcagctcacggtttgtccgcctgttccgcttcgtggctcccgcggcgatcgtcggtatcctgctgcgtaccgttctgcacctgatcctgttttaa

SEQ ID NO: 2312 - protein, 310 aa, Enterobacter cloacae
MDVISIIMAAGKSSVDVALYTLLPIMVIMLIIMKYLEVRGILDVIVRWVAPLLKPFGLTGMSAFALIQINFVSFAAPLATLSIMDKRGVSDRQMAATLAMVFAMGQGNVFYPLTPFGLHWLASIVISVVGGLCAAAVAWHVTGRRLSVAENPRAEALPNAEQNSQGILAVINSAGSDAIRLALGAVPMLILSLTIVGLLQGAGAIDLLQQLLKPLLGWLHIPQNFVLPALVKCVAGGTAYFGVISELIQQGKVTVDQVNASAGLLIQTFDLPGIGIFLGISSRFVRLFRFVAPAAIVGILLRTVLHLILF

SEQ ID NO: 2313 - DNA, 300 bp, Enterobacter cloacae
atggaacagattacattgtcatttcctgccagccgcgccctgagcggccgagcgctggcaggagtcgtgggttcaggcgatatggaagtactttataccgccgcacagagcgccacgctcaacgtacagatcatcacctcagtggataacagccaggcgcgctggcaggcgctgttcgacaggttgaacctgatcaacggcctgcccgccgggcagttgattatccacgacttcggcgccacgccgggcgtcgcccgtattcgtattgaacaggtttttgaggaggccgctcatgcgtaa

SEQ ID NO: 2314 - protein, 99 aa, Enterobacter cloacae
MEQITLSFPASRALSGRALAGVVGSGDMEVLYTAAQSATLNVQIITSVDNSQARWQALFDRLNLINGLPAGQLIIHDFGATPGVARIRIEQVFEEAAHA

SEQ ID NO: 2315 - DNA, 834 bp, Enterobacter cloacae
atgcgtaacgatcgcagctttatcgaactgcgcgctcgcgaacgcgcccacgccctgctggacgacggcagctgccgcgaactgctggatccgtttgacggtattatgtcgccgtggctcggcgcccagggcatcgtcccgcaatccgatgacggtatggtggtcgccaaaggcacgatcaacggccagcctgcggtggtgattgccatcgagggcaccttccagggcggcagtatgggcgaagtgtccggcgccaaaatggccgccgcgctggagctggcggcggaagataaccgcaacggtatcccgacgcaggcggtgctgtgcctcgaaaccggcggcgtacgtctgcaggaggccaacctcggtctggccgccatcgccgatattcacgccgcgattgtcgacctgcgccgctacaccccagtggtcggcatcatcgccggcaccgtcggctgctttggcggtatgtctatcgccgccgcgctgtgcagttaccttatcgtcactcgtgaagcccgtctcggtctcaacggcccgcaggttatcgagcaggaagccggcattgaagagtacgactcccgcaaccggccgtttatctggagcatgaccggcggcgaaattcgcgccgccagcggactggtcgacgcgctggttaacgatggcgttaacgccgttaaaaccgcaatgaatgaggcgatcgccaaaggcgtaccggtacagcaccgcagcgacaactatgacgattatctgcgtcgcttgagccagttcgacacccgccagcaggcggataccgcgcagattaaacagctttttgcccgggaggataaataa

SEQ ID NO: 2316 - protein, 277 aa, Enterobacter cloacae
MRNDRSFIELRARERAHALLDDGSCRELLDPFDGIMSPWLGAQGIVPQSDDGMVVAKGTINGQPAVVIAIEGTFQGGSMGEVSGAKMAAALELAAEDNRNGIPTQAVLCLETGGVRLQEANLGLAAIADIHAAIVDLRRYTPVVGIIAGTVGCFGGMSIAAALCSYLIVTREARLGLNGPQVIEQEAGIEEYDSRNRPFIWSMTGGEIRAASGLVDALVNDGVNAVKTAMNEAIAKGVPVQHRSDNYDDYLRRLSQFDTRQQADTAQIKQLFAREDK

SEQ ID NO: 2317 - DNA, 801 bp, Enterobacter cloacae
atgagtcagttcccaaaccgcgccgcgctgtggctgaacaaactggcgcccgacgtgccgctgatgagcggcctgtgcccttccgtccaggtggcagacggccagattaatggcgaaaacgtgcgttttatcgccgtggtcccggatgctaacaaccactacccgcgcgccgccggcggcgaagtcggcctgctggaaggctggacgctggcgaaagtggttaatgaaaccatcgccgccgacgccgaccagccagtcaaacggccgatcgtcgccgtgatcgatgtgccaagccaggcctatggccgccgcgaagaagctttcggcattcaccaggcgctggccggggcggctggcgcttatgccaaagcccgtttggccggccacccggtaattggcctgatcgtcggcaaagcgatgtccggggcgtttctggcccacggctaccaggccaaccgcctgatcgcctttaacgatagcggcgtgctggtccacgcgatggggaaagaatcggcggcgcgcattacgctgcgtaccgtagaggcgctggagaaactggcggctaccattccgccaatggcctacgacgtcagcaactatgcgacgctcggcctgctctccgccctgctggatattaataatccggatgcccctgacgatcacgatctgtcgttggtcagcaacacgctgcgcgacgccatcgctgatgcgcgcaccgatgcctcactgaagtgccgcctgggcgcggaaaaccgccgcagctcgcaactggttcgcgatcgcatgcgcgccagctggtaa

SEQ ID NO: 2318 - protein, 266 aa, Enterobacter cloacae
MSQFPNRAALWLNKLAPDVPLMSGLCPSVQVADGQINGENVRFIAVVPDANNHYPRAAGGEVGLLEGWTLAKVVNETIAADADQPVKRPIVAVIDVPSQAYGRREEAFGIHQALAGAAGAYAKARLAGHPVIGLIVGKAMSGAFLAHGYQANRLIAFNDSGVLVHAMGKESAARITLRTVEALEKLAATIPPMAYDVSNYATLGLLSALLDINNPDAPDDHDLSLVSNTLRDAIADARTDASLKCRLGAENRRSSQLVRDRMRASW

SEQ ID NO: 2319 - DNA, 999 bp, Klebsiella pneumoniae
atgagtaaacttgggattaatggatttggtcgtatcggacgtctggtgttacgtcgtttattagaagtcgacagcagcctggaagtggtggctatcaacgacctcacttcgccaaaggtgctggcctacctgttgaagcatgattcaaactacggccccttcccgtggagcgtcgactttaccgaagatgcgctgatcgtcaacggcaaaaccattacggtgtatgccgaaaaagaggcgcagcatattccatggcaggcggcaggcgccgaggtgattgtggagtgtaccgggttctacacctcggccgagaaatcgcaagcccatctccaggccggcgcgcgcaaagtgctgatttccgcccccgccggcgagatgaaaaccatcgtctacaacgtcaacgatgacaccctgaccccggatgacaccatcatctccgtggcctcctgcaccaccaactgcctggcgccgatggccaaagttctgcaggatgccttcggcatcaccgtaggcaccatgaccaccatccacgcctataccggcacccagtcgctggtggacgggccgcgcggaaaagatctgcgcgcctccagggcggcggcggaaaacgttatcccgcacactaccggcgcggcaaaagccattggcctggtgatccctgccctgagcggtaagctgaaaggccatgcccagcgcgtaccgaccaaaaccggctcagtgacggagctggtatcggtgctggagaaaaaggtgactgcggatgaggtcaatcaggcgatgaggcaggcggctgagggcaatgaatcctttggttacaccgaagaggagatcgtctcttccgatatcatcggcagccatttcggttcgatctacgatgctacccagctggagattgtggaggccggcggcgtacagctggtgaaaaccgtcgcctggtacgataacgaatacggctttgtcacccaactgatccgcgtgctggagaaatttgcccgctaa

SEQ ID NO: 2320 - protein, 332 aa, Klebsiella pneumoniae
MSKLGINGFGRIGRLVLRRLLEVDSSLEVVAINDLTSPKVLAYLLKHDSNYGPFPWSVDFTEDALIVNGKTITVYAEKEAQHIPWQAAGAEVIVECTGFYTSAEKSQAHLQAGARKVLISAPAGEMKTIVYNVNDDTLTPDDTIISVASCTTNCLAPMAKVLQDAFGITVGTMTTIHAYTGTQSLVDGPRGKDLRASRAAAENVIPHTTGAAKAIGLVIPALSGKLKGHAQRVPTKTGSVTELVSVLEKKVTADEVNQAMRQAAEGNESFGYTEEEIVSSDIIGSHFGSIYDATQLEIVEAGGVQLVKTVAWYDNEYGFVTQLIRVLEKFAR

SEQ ID NO: 2321 - DNA, 1440 bp, Klebsiella pneumoniae
atgacagcacccgttcaacacccgatgtatattgatggccagttcgtttccggtcgcggcgacggctggatcgacgtgcttaacccggcgaccgaagcgctgctgtcgcggatcccggacgggactgccgaagaggcgcggctggcgattgacgccgccgagcgcgcccagcccggctgggaagcgctgccggccattgagcgtgcgggctggctgcgcaaaattgccgccggtatccgccagcgtgccgacgagatcgccgggctgattgtcgctgaaggcggcaagatccagcagctggcggcggtggaggttgcgttcaccgcggactatctcgactatatggcagaatgggcgcgccgttacgaaggtgagatcgtgcagagcgatcgcccgggggagaatatccttgtctttaaacgcgcgctgggggtgaccaccgggatcctgccgtggaacttcccgttctttcttatcgcccgcaagctggcgccggctctcatcactggaaataccattgtcattaagcccagcgaatttacgcccaataatgccatcgcctttgccgagattgtccatcaggttgggttgccgaaaggggtctttaaccttgtgcttggccgcggagaaaccgttggccaggagctggccggcaatccgaaggtggcgatggtcagcatgaccggcagcgtggcggcgggagaaaaaattatggccgctgcggcgaaaaatatcaccaaagtgtgcctcgagctcggcggcaaagcgcctgccattgtgatggacgatgcggatctggagctggcggtgaaagcggtggtggactcgcgggtgattaacaccgggcaggtgtgtaactgcgtcgagcgggtctatgttcagcagggcatttacgaccgcttcgtcaaccgcctcggcgaggcgatgaaggccgtgcagtttggcgacccggcgacgcgggatgacatcgcgatggggccgctgatcaacgcggcggcgcgggaccaggtggcgggcaaagtggcgaaggcggtggcgcagggggcgcgggtggcgctgggcggtcagccgctggagggcaaaggctatttttatccgccgaccctgctgctggatgtacgtcaggagatggacattatccatgaggaaaccttcggtccggtgctgccggtggtggccttttcgaccctcgatgaggcgctggcgatggccaatgacagcgattatggcctgacctcctcaatctatacccgcgatctgaacgtggcgatgaaagcgattaagggactgaagtttggcgaaacctacatcaaccgtgagaactttgaggcgatgcaggggttccacgccggctggcgtaagtcggggatcggcggggcagatggccgccacggcctgaatgagtacctgcagacccaggtggtctatctgcaggcctga

SEQ ID NO: 2322 - protein, 479 aa, Klebsiella pneumoniae
MTAPVQHPMYIDGQFVSGRGDGWIDVLNPATEALLSRIPDGTAEEARLAIDAAERAQPGWEALPAIERAGWLRKIAAGIRQRADEIAGLIVAEGGKIQQLAAVEVAFTADYLDYMAEWARRYEGEIVQSDRPGENILVFKRALGVTTGILPWNFPFFLIARKLAPALITGNTIVIKPSEFTPNNAIAFAEIVHQVGLPKGVFNLVLGRGETVGQELAGNPKVAMVSMTGSVAAGEKIMAAAAKNITKVCLELGGKAPAIVMDDADLELAVKAVVDSRVINTGQVCNCVERVYVQQGIYDRFVNRLGEAMKAVQFGDPATRDDIAMGPLINAAARDQVAGKVAKAVAQGARVALGGQPLEGKGYFYPPTLLLDVRQEMDIIHEETFGPVLPVVAFSTLDEALAMANDSDYGLTSSIYTRDLNVAMKAIKGLKFGETYINRENFEAMQGFHAGWRKSGIGGADGRHGLNEYLQTQVVYLQA

SEQ ID NO: 2323 - DNA, 1431 bp, Klebsiella pneumoniae
atgactgaacatcaacatcaggcgtcacctgccgccggaggtgaaggcgcgtcacagcttaagcgcgggctcagcgcccgccatatccagatgattgccctcgggggcgccatcggcaccgggctgtttatgggggcggggcgcaacatcgccgtcgccggcacctcgatcctggttatctatgtgctggtcgggttctttacctatatggtgatgcgggcgatgggcgagctgctgctcacccgccatgactaccgctcgtttgccgactttgtcggcgagtatctcgggccgcaggccagcttttacctcggctggacctactggctaagctgggtggtgacctgtatcgccgacgtagtggtctgcgggagctatatgcagtactggttcccggaactgtcggcgtggatgccggccctcagcatgctggcgattctgttcctgcttaacctgctgtcggtgaaaatgttcggcgaggcggagttctggttcgccctgatcaaggtgatcaccattatcgccctgatcggcaccggcggctggatgattgccaccggctggacctccccggacggcgtgacggcctccctcagccatctcaccgacccgacggcctttatgccccacggcatcaccggctttttcgccggcttccagatagcgatcttctcctttaccggcattgagctgctgggcaccatgacggcggagacccgcgatccgcagcgcattttgcccaaggcgatcaatgctctgccgctgcggattatcatcttctatctgctgtcgatggtggtgatcatcgctgtcgcctcgtggccgggggtgtcggcggagaccagccccttcgtgacgctgttcgccaaggccgggctgcctgccgccgcggcggtgattaactttgtggcgctgacctcggcgatgtcctcggccaacagcggggtcttctccagcacccgcatgctgtacggcctgtcggtggagaagcatgcgcactggcagtttcgtatcctgtcgcgcagtacccgcattccggtgcgcagcctgctgttctcctgcttctgcatgctgatcggcacgctgttgctgtttctggtgccgaacgtgatgaccctgttcaccatcgtctcgaccctggcggcgattatggtggtgttcagctgggggatgatcctcgtggcctatctggtttaccgccgtcagcgtccggacctgcacgccgggtcgatctttaagatgcccgccggggtggtgatgagctgggtgagcctgctgttcttcgcgttcgctatcttcatcatgatctttgacccggacacgctgctggcgctgttggcttctccgctgtggtttatcgcgctgtggggcttctggaagctgaagcagcggcgcgaggggcagcttcagctggacaaccagagcgcctga

SEQ ID NO: 2324 - protein, 476 aa, Klebsiella pneumoniae
MTEHQHQASPAAGGEGASQLKRGLSARHIQMIALGGAIGTGLFMGAGRNIAVAGTSILVIYVLVGFFTYMVMRAMGELLLTRHDYRSFADFVGEYLGPQASFYLGWTYWLSWVVTCIADVVVCGSYMQYWFPELSAWMPALSMLAILFLLNLLSVKMFGEAEFWFALIKVITIIALIGTGGWMIATGWTSPDGVTASLSHLTDPTAFMPHGITGFFAGFQIAIFSFTGIELLGTMTAETRDPQRILPKAINALPLRIIIFYLLSMVVIIAVASWPGVSAETSPFVTLFAKAGLPAAAAVINFVALTSAMSSANSGVFSSTRMLYGLSVEKHAHWQFRILSRSTRIPVRSLLFSCFCMLIGTLLLFLVPNVMTLFTIVSTLAAIMVVFSWGMILVAYLVYRRQRPDLHAGSIFKMPAGVVMSWVSLLFFAFAIFIMIFDPDTLLALLASPLWFIALWGFWKLKQRREGQLQLDNQSA

SEQ ID NO: 2325 - DNA, 996 bp, Klebsiella pneumoniae
atggagcacctggttaacgatttactgcactgccgcctgcaggcgtggacctttccggcgggcatcgaggcccgctggctgggcgagggcattttacagctgctgccgacggcgccgtggcgccaggcgacgatcctctccgccggcgtgcatggcaatgagaccgcgccgattgaactgctgctgcagctaacccacgatctgagccaggggcggcagccgctcacgcaggcgctgctgatcgtctttggtaatctgccggcgatccgcgccgcgcgccgctatctgcataacgacctgaatcgcctgttcggcggccgccatctggcggtcaccccgggaaatgagtcgcggcgggcttttgcgctggagcaggcggtgcaggctttttatcgcgccgccgatacggcggggccggtcaaccgtggtcatctcgatatgcacaccgccattcgcggatcgctgtatcgccagtttgcgctgctcccggcccacgccggggatttttcgcccgatttctatcagctgctgcaggccagcgggatggacgccgtcgtgcgccataccgaagcgggcggcaccttcacccatttcacctgcgaaaagttcgccgcgcaaagcgccaccctggagctggggaaagtgatgccgttcggcgccaacgatctcagcctgttcgccgccgccgacgcggcgatccgggcctggatcgctgacgcgccgctgccgccgcgcgacaaagcgccggtggactacttcctggtcgaggagagcatcatcaagcgcgagggggaatttacgcttaatctcgcggcagacgttgaaaacttcaccgcgctcccggcagggtatgagatcgcccgccaggcagagaaacgttgggtggtgcaggcccgggccccctatatcctctttcccaacgccggggtcgccaccggccagcgcgccgggctgttgctccgcgccgctgcccttcgtctcccgcaaccagcctga

SEQ ID NO: 2326 - protein, 331 aa, Klebsiella pneumoniae
MEHLVNDLLHCRLQAWTFPAGIEARWLGEGILQLLPTAPWRQATILSAGVHGNETAPIELLLQLTHDLSQGRQPLTQALLIVFGNLPAIRAARRYLHNDLNRLFGGRHLAVTPGNESRRAFALEQAVQAFYRAADTAGPVNRGHLDMHTAIRGSLYRQFALLPAHAGDFSPDFYQLLQASGMDAVVRHTEAGGTFTHFTCEKFAAQSATLELGKVMPFGANDLSLFAAADAAIRAWIADAPLPPRDKAPVDYFLVEESIIKREGEFTLNLAADVENFTALPAGYEIARQAEKRWVVQARAPYILFPNAGVATGQRAGLLLRAAALRLPQPA

SEQ ID NO: 2327 - DNA, 1341 bp, Klebsiella pneumoniae
atgtctggttttgaagcaaactttgatggcctggtcggcccgacgcaccactacgccggactctccgtcggcaatgaagcctcgcaaaataaccgcgatggtctctctaaccctaaacaggcggcgctgcaggggctgtataaaatgaaagccctggccgatcgcggcttcgtgcagggcattctgccgccgcagccgcggccgaatctgcgtctgctgcgtgaagtgggtttccagggcagcgatgagcaggttatccggcaggcggcccacgcggcgccgcagctgctctccgccttcagctccgcctcgtcgatgtggaccgccaacgcggcgaccgtctcaccgtcggcggacagcgccgatggcaaagtccatttcaccgtcgccaacctgaacaataagctgcaccgtatgcatgaggcgcccaccacctcggcgatccttggcgccacgttcgccgatccgcgctactttgcccaccatgcggcgctgccgcagcatggcgacctcggcgatgaaggggcggccaaccataaccgcttctgccgggaatatgaccggcagggggtgcagtttttcgtctatggtcgacgcgccagcggcggtatcgccccggtgaagtatccggcgcggcagaccctcgaggccagcgaagcggtggcccgcctgcatcagctggatccgcgctacacggtgtttgcccagcaggcgccgcaggctatcgatcgcggcgtgtttcataacgacgtcattgcagtcagcaatcgccatgtgctgtttcaccatcagcaggcgtttgtcgatcaggcggcggtgctgaccacgctgcgggctaaaagcgacagtctggatatcccgttcaccagcgtggaagtgccggacgagcgggtttcgctcgacgacgccgtagcctcttacctgttcaacagccagctgctgagcaaaccagacggcaagatgctgatcgtggtgccggaggagtgccgccagcgggaaaacgtctggcgctatctcagcgatctcgccgccgatagcgcatcgccgatcgatgaagtggcggtctttgacctgcgggaaagcatgcgcaacggcggcggcccggcctgtctgcggctgcgggtggtgctcaacgaggcggagcgccaggcggtcaacgcccatagcctgatgaacgacgaacgttatcagcagctgacggcatgggtggaaaaacactatcgcgaccggctgcatgcccgcgatctggcggacccgcagctgctgcgcgaggtttatcaggcgctggatgagctgacgcagatcctgcgcctgggcgcggtctatgattttcagcgttaa

SEQ ID NO: 2328 - protein, 446 aa, Klebsiella pneumoniae
MSGFEANFDGLVGPTHHYAGLSVGNEASQNNRDGLSNPKQAALQGLYKMKALADRGFVQGILPPQPRPNLRLLREVGFQGSDEQVIRQAAHAAPQLLSAFSSASSMWTANAATVSPSADSADGKVHFTVANLNNKLHRMHEAPTTSAILGATFADPRYFAHHAALPQHGDLGDEGAANHNRFCREYDRQGVQFFVYGRRASGGIAPVKYPARQTLEASEAVARLHQLDPRYTVFAQQAPQAIDRGVFHNDVIAVSNRHVLFHHQQAFVDQAAVLTTLRAKSDSLDIPFTSVEVPDERVSLDDAVASYLFNSQLLSKPDGKMLIVVPEECRQRENVWRYLSDLAADSASPIDEVAVFDLRESMRNGGGPACLRLRVVLNEAERQAVNAHSLMNDERYQQLTAWVEKHYRDRLHARDLADPQLLREVYQALDELTQILRLGAVYDFQR

SEQ ID NO: 2329 - DNA, 1467 bp, Klebsiella pneumoniae
atggcggtaaaagcacagtttatagccgggcagtggctgccaggcagcggcgcaacgatgagcaaactggccccggaggatcagtcgctgctgtggcaggcggccagcgcgggggctgacgacgtccaggcggcctgcgccgcggcgcgcgcggcgttttatccctggtcgcaccggccgctggccgagcgtattgacgtcgtacagcgttttgctgcgctgctggagacgcataaagaggcgctggcgaccctgatttcccgcgagaccagcaagccgctgtgggagacccgcaccgaagtgcaggcgatgatcggcaaggccgcgatctccatcgaagcctatcaccagcggacgggctttcatgagtcgacgctgccggacggtaaagcgctgctgcgccacaaaccgcacggcgtgatggcggtctttggcccctacaacttcccgggccacctgcccaacggacatatcattccggcgctgatcgccgggaacaccattgtgtttaaacccagcgagctgacgccggctaccgctgaaatgaccgtccagctgtggcagcaggcgggcatccccgacggggcgatcaacctgctgcagggcggaaaagccaccggccaggcgctgctggaaaatcgtgatatcgacggcgtgctgttcaccggcagcgcggcggccggtttccacttccatcgctacttcggcggccagccggagaagatgctggccctcgagatgggcggcaacaacgcactgatcgtcgccgacgcggccgatatcgatgcggcgctgcatgtgattatccagtcggcgtttatctctgccgggcagcgctgcacctgcgcgcgccggctgatcgtgccgcgcggcgagcagggggatgcgctgctgcagcggctggtagaggccagcgcgcagatccgcgccggcaagtgggatgatcagccggcgccgtttatgggcggggtgatctctctcgacgctgcgcagaacatgctggcggcgcagcaaaaactggaggggctcggcggcaaggtgctgctgcgcatgcgccagcctgacccgcgctccacggtgctgaccccggggatcgtcgacgtcaccggtattgaggtgccggatgaagagtactttggcccgctgctgacgattatccgttacgacggcttcccggaggcgattcgcctcgccaatcagacccgctatggcctggccgtcgggctgatctccagcgatgcggcgcagtttgatcagctggcggacgaggcgcgagccgggatcgtcaactggaacaagccgctgaccggcgcatcgagtaaagcgccgtttggcggggtgggcgcctccggcaaccatcgcgcggcagcgtggtatgccgccgattactgtgcctggccgatggcctctctggtcagcgatacgctgacgcttccggcgacggtatcgccgggcctgccattctga

SEQ ID NO: 2330 - protein, 488 aa, Klebsiella pneumoniae
MAVKAQFIAGQWLPGSGATMSKLAPEDQSLLWQAASAGADDVQAACAAARAAFYPWSHRPLAERIDVVQRFAALLETHKEALATLISRETSKPLWETRTEVQAMIGKAAISIEAYHQRTGFHESTLPDGKALLRHKPHGVMAVFGPYNFPGHLPNGHIIPALIAGNTIVFKPSELTPATAEMTVQLWQQAGIPDGAINLLQGGKATGQALLENRDIDGVLFTGSAAAGFHFHRYFGGQPEKMLALEMGGNNALIVADAADIDAALHVIIQSAFISAGQRCTCARRLIVPRGEQGDALLQRLVEASAQIRAGKWDDQPAPFMGGVISLDAAQNMLAAQQKLEGLGGKVLLRMRQPDPRSTVLTPGIVDVTGIEVPDEEYFGPLLTIIRYDGFPEAIRLANQTRYGLAVGLISSDAAQFDQLADEARAGIVNWNKPLTGASSKAPFGGVGASGNHRAAAWYAADYCAWPMASLVSDTLTLPATVSPGLPF

SEQ ID NO: 2331 - DNA, 1653 bp, Klebsiella pneumoniae
atgccccgtcgccaggataacccctacgccccgcatgactgggcgccgcatgaaaaaccggctctgctcggttcgccgtcgacgccgctgcacagtccggcgaaacgccttgcctacggcgtggtcggtctgctggtatgtctcaccggcgcgctgggcaacgcagtggtcaccgccaacctgcagctgctgcagggtaccttcgccgcctggtcgacagaaatcgcctggctgccggcggtatacgtgatgaccaacgtctccatcaacctgctgctggtgaaattccgccagcagtttggcctgcgcgctttcaccgaaggctttctggtgctctatgtgctggtcacctttttccacctcttcgtcaacgatctcagctcagcgatgatggttcgcgccgcccatggcatggtggccgcggcgctcagctcgctggggatctactaccaggtacaggcctggcctgctcggcatcgcctgaaagggctgactatcggcatcaccggctcgtcgctagccattcccctggcgcgcctcttttccaccgaactgctgcagaccgatgaatggcgcggtctctacttctttgagctgggcctggcgctggtgtcgctggcctgcgtcatcgcgctaaaactgccgccaagcgatcgtaaaaaagtgttcgaaaaaaaggatttcattaccttctttctgctggcgcccggcatggcgctggtgtgcgccgtgctgtcgctggggcggctcgagtggtggtttgaagcgccgtggatcggctgggcgctggcggcggcggtaatactgatcgtcgctgcgattaccttcgagcataaccgcagcaaccccctgctcaataccaaatggctctccagcggcagcatcgtgcgtctgggcctgattatgctgttgatccgcatcgtgctggcggagcagaacaccggggtcatcggctggctgcagtacgttggcctgcaaaacgaacagatgactaacctcgcgtggtcgattttcgccggtattctgtgcgggatcattgccagctgtctgacgctcaacccgcagaagctctactggccgaccgccaccgcgctggcgctgatcatgatagcctcgctgctcgacagccagtccaacgccctcacccgtccggaacaattaatgttcagccagtttttactcggcttcggcagcgccttctttctggccccggcgatgctcgccgggattggcggcgtgtttgccgacccgcgcaacctggtcagcttctcggtgctgttcggcatgagccagaacattggcgggctgctcggctcggcgatcctcggcaccttccagacctggcgtgagaaattccactccagccagctggcggaccagataaccaccctgaacccgctgatcgtcgagcggctgcagcagtacagccagatgtatcagagccagattggcgacagtacgctgctcaacgttcaggccaccaccctgctgcaaaacgccgcgacgctgcaggccaatattctcgcctggaatgatacctatctgctgacggcggcgatctccgccgggacactagtgtgggttttctggcgcttaattcgcttacgactgactgcccgtatcgcgttgcaacgcgctaccggcagcaaataa

SEQ ID NO: 2332 - protein, 550 aa, Klebsiella pneumoniae
MPRRQDNPYAPHDWAPHEKPALLGSPSTPLHSPAKRLAYGVVGLLVCLTGALGNAVVTANLQLLQGTFAAWSTEIAWLPAVYVMTNVSINLLLVKFRQQFGLRAFTEGFLVLYVLVTFFHLFVNDLSSAMMVRAAHGMVAAALSSLGIYYQVQAWPARHRLKGLTIGITGSSLAIPLARLFSTELLQTDEWRGLYFFELGLALVSLACVIALKLPPSDRKKVFEKKDFITFFLLAPGMALVCAVLSLGRLEWWFEAPWIGWALAAAVILIVAAITFEHNRSNPLLNTKWLSSGSIVRLGLIMLLIRIVLAEQNTGVIGWLQYVGLQNEQMTNLAWSIFAGILCGIIASCLTLNPQKLYWPTATALALIMIASLLDSQSNALTRPEQLMFSQFLLGFGSAFFLAPAMLAGIGGVFADPRNLVSFSVLFGMSQNIGGLLGSAILGTFQTWREKFHSSQLADQITTLNPLIVERLQQYSQMYQSQIGDSTLLNVQATTLLQNAATLQANILAWNDTYLLTAAISAGTLVWVFWRLIRLRLTARIALQRATGSK

SEQ ID NO: 2333 - DNA, 3903 bp, Klebsiella pneumoniae
atgacagaacaacaaaaaatcaccttcccccagctttatcaacagctcgacggcctgatgctgcgcgacaaaacgcgctttgcccgccgtctgcacggcgtgaagaaggttaaaaatcctgaatcgcaacaggccattctgcaggagatggcgctggagataagccaggcagccggtaaagtcctgctgcgcgaagcggcgcgtccggccatcacctatccggaaaacctgccggttagccagaaaaaacaagagattctcgaggcggtgcgcgaccaccaggtggtgatcgtcgccggggagaccggttcgggtaaaaccacccagttgcccaaaatctgcatggagctggggcgcgggctgaaaggactcatcggccatacccagccgcgtcgcctggcggcgcggaccgtcgccaatcgtattgccgaagagctgcagagcgagccgggcggctgcatcggctataaagtccgcttcagcgaccacgtcagcgaaaacaccatggttaagctgatgaccgacggtatcctgctggcggagatccagcaggatcgtctgttgatgcagtacgacaccatcattatcgatgaggcgcacgagcgcagcctgaatattgactttctgctcggctatctgaaagagctcctgccgcgccgcccggacctgaaaatcatcattacctcggcgaccatcgacccggaacgtttctcaaagcatttcaataatgcgccgattatcgaagtctccgggcggacttacccggtggaagtgcgctatcggccgatagtggaagaggcggacgataccgagcgcgatcagttacaggcgatctttgatgcggttgacgaactggggcgcgaagggcccggcgatattctgatctttatgagcggtgagcgggaaattcgcgataccgccgatgcgctgaataagctggatctgcgccataccgaagtgctgccgctgtacgcccgcctgtccaacagcgagcagaaccgcgtcttccagccgcacagcgggcggcgcatcgtgctggcgaccaacgtggcggaaacctcgctgaccgtgccgggcattaagtacgttatcgatcccggtactgcgcgtatcagccgttacagctaccgcaccaaggtgcagcgcctgccgatcgagccggtttcccaggcgtccgccaaccagcgtaagggccgctgcggccgcgtttcggaagggatctgtattcgtctttattcagaagacgatttcctgtcgcgcccggaatttaccgacccggagattctgcgcaccaacctggcgtcggtcatcctgcagatgaccgccctgggcttaggcgatatcgccgccttcccgtttgtcgaagcgccggataagcgcaatatccaggacggcgtacgcctgctggaagagctgggtgccatcaccaccgatgagcaggccaccgcctataagctgacgccgatgggccgccagctcagccagctgccggtggacccgcgtctggcgcggatggtgctggaggcgcagaagcacggctgcgtgcgggaagcgatgatcatcacctccgcgctgtcgatccaggacccgcgcgagcggccgatggacaaacagcaggcctctgacgaaaaacatcgccgcttccacgataaagagtccgatttcctcgccttcgtcaatctgtggaactacctcggcgagcagcagaaggcgctgtcgtcgaatcagttccgccgccagtgccgggtcgattttcttaactatctgcgcgtgcgcgagtggcaggacatctacacccagctgcgccaggtggtgaaagagcttggcctgccgatcaacagtgagccggcggaatatcgcgagatccatactgcgctgctgaccggtctgctgtcgcacatcggcatgaaggatgccgataagcaggagtttaccggcgcgcgcaacgcccgcttctctattttcccgggttccggcctgtttaaaaagccgccgaagtggacgatggtggccgagctggtcgagaccagccgcctgtggggccgcatcgccgcgcgcattgagccggagtgggtggagccggtagcgcagcacctgatcaagcgctcatacagtgagccgcactgggagcggtcgcagggcgcggtaatggcgacggaaaaggttaccgtttacggcctgccgatcgtcgccgcgcgtaaggtcaactacagccagattgatccggcgctgtgtcgtgagctatttatccgccacgcgctggtagagggcgactggcagacgcggcacgccttcttccgcgataacctgaagctgcgcgcggaaatcgaagagctggagcataagtcgcgccgccgcgacatcctggtggatgacgagacgctgttcgagttctacgaccagcgcatcagccacgacgtcatctccgcccgccacttcgatagctggtggaagcgggccagccgtgaaacgccagacttgctcaattttgaaaagagcatgctgattaaagagggggcggagcaggtcagtaaactggactacccgaatttctggcatcagggcaacctcaagctgcggcttagctaccagtttgaacctggcgccgacgccgatggcgtgacggtgcatattccgctgccgctgctcaaccagatagaggaagccgggtttgaatggcagatccctggcctgcgtcgcgagctgattatcgcgctgataaaatcgctgccgaagccggtacggcgcaatttcgtcccggctcccaactatgcggaagcgtttcttggccgggcggcgccgcttgagctgccgctgctcgattcgctggagcgcgagctgcgtaagatgaccggcgtgaccatcgaccgcgaagcctggcagtgggatcaggtgcccgatcacctgaaaatcaccttccgggtggtggatgataaaaacaagaagctgcaggaagggcgctcgctgcaggcgttgaaagacgccctgaagggcaaagtgcaggagacgctgtcggcggtcgctgatgacggtattgagcagagcgggctgcatatctggagctttggcaccctggcggaaagttacgaacagaagcgcggtaactataaggtgaaagcctggccggcgctggtggacgagcgcgacagcgtggccatcaaactgtttgataatccacaggaacagcagcaggccatgtggcgcggtctgcgtcgcctgctgctgctcaacatcccgtcgccgattaagtatctgcacgagaaactaccgaataaagccaagcttgggctctactttaacccgtacggcaaagtgctggatctgattgacgattgcatctcctgcggcgttgataagcttattgacgaggcgggcggtccggtgtggacggaagagggctttagtcagctgcacgataaagtgcgagccgagctcaacgacacggtggtggagatcgctaaacaggtcgagcagatcctcaccgcggtgttcaatatcaacaaacggctgaaaggccgggtggatatgaccatggcgctggggctgtcggatatcaaagcgcagatggcgggtctggtgtatcgcggctttgtcaccggcaacggtttccgccgtcttggcgatacgctgcgctatctgcaggcgattgaaaagcgtctggagaagatggctatcgatccgcaccgcgatcgggcgcagatgcttaaggtggagagcgtgcagcaggcgtggcagcagtggctgaataagctaccgccgaaccgccgtgaggacgacgatgtccgggagatccgctggatgatcgaggagctgcgggtcagcttcttcgcccagcagctgggcaccccgtatcctatctcggacaagcgagtgttgcaggcgatggagcaaattaccccatag

SEQ ID NO: 2334 - protein, 1300 aa, Klebsiella pneumoniae
MTEQQKITFPQLYQQLDGLMLRDKTRFARRLHGVKKVKNPESQQAILQEMALEISQAAGKVLLREAARPAITYPENLPVSQKKQEILEAVRDHQVVIVAGETGSGKTTQLPKICMELGRGLKGLIGHTQPRRLAARTVANRIAEELQSEPGGCIGYKVRFSDHVSENTMVKLMTDGILLAEIQQDRLLMQYDTIIIDEAHERSLNIDFLLGYLKELLPRRPDLKIIITSATIDPERFSKHFNNAPIIEVSGRTYPVEVRYRPIVEEADDTERDQLQAIFDAVDELGREGPGDILIFMSGEREIRDTADALNKLDLRHTEVLPLYARLSNSEQNRVFQPHSGRRIVLATNVAETSLTVPGIKYVIDPGTARISRYSYRTKVQRLPIEPVSQASANQRKGRCGRVSEGICIRLYSEDDFLSRPEFTDPEILRTNLASVILQMTALGLGDIAAFPFVEAPDKRNIQDGVRLLEELGAITTDEQATAYKLTPMGRQLSQLPVDPRLARMVLEAQKHGCVREAMIITSALSIQDPRERPMDKQQASDEKHRRFHDKESDFLAFVNLWNYLGEQQKALSSNQFRRQCRVDFLNYLRVREWQDIYTQLRQVVKELGLPINSEPAEYREIHTALLTGLLSHIGMKDADKQEFTGARNARFSIFPGSGLFKKPPKWTMVAELVETSRLWGRIAARIEPEWVEPVAQHLIKRSYSEPHWERSQGAVMATEKVTVYGLPIVAARKVNYSQIDPALCRELFIRHALVEGDWQTRHAFFRDNLKLRAEIEELEHKSRRRDILVDDETLFEFYDQRISHDVISARHFDSWWKRASRETPDLLNFEKSMLIKEGAEQVSKLDYPNFWHQGNLKLRLSYQFEPGADADGVTVHIPLPLLNQIEEAGFEWQIPGLRRELIIALIKSLPKPVRRNFVPAPNYAEAFLGRAAPLELPLLDSLERELRKMTGVTIDREAWQWDQVPDHLKITFRVVDDKNKKLQEGRSLQALKDALKGKVQETLSAVADDGIEQSGLHIWSFGTLAESYEQKRGNYKVKAWPALVDERDSVAIKLFDNPQEQQQAMWRGLRRLLLLNIPSPIKYLHEKLPNKAKLGLYFNPYGKVLDLIDDCISCGVDKLIDEAGGPVWTEEGFSQLHDKVRAELNDTVVEIAKQVEQILTAVFNINKRLKGRVDMTMALGLSDIKAQMAGLVYRGFVTGNGFRRLGDTLRYLQAIEKRLEKMAIDPHRDRAQMLKVESVQQAWQQWLNKLPPNRREDDDVREIRWMIEELRVSFFAQQLGTPYPISDKRVLQAMEQITP

SEQ ID NO: 2335 - DNA, 213 bp, Klebsiella pneumoniae
atgcaccaccatccggtaaaatcttcccgaattatctccgtcgcctacgatgacgcctccgccacactggaaatctatttctatcaccagccgccattacaatataccggggtcccaccgcgtatttttcatgattttttacaggtggtgtcaaaaggccggtattatgacggggtgatcaaaggaaaatttcccgaacgcaagctacgttaa

SEQ ID NO: 2336 - protein, 70 aa, Klebsiella pneumoniae
MHHHPVKSSRIISVAYDDASATLEIYFYHQPPLQYTGVPPRIFHDFLQVVSKGRYYDGVIKGKFPERKLR

SEQ ID NO: 2337 - DNA, 1434 bp, Acinetobacter pittii
atgaaaaaattaacccttccgaaagattttttatggggcggcgcggtcgccgcgcatcaggttgaaggcggctgggatcagggcggcaaaggccccagcatctgcgatgtgttgaccggcggggcgcacggcgtgccgcgcgaaatcacccaccaggtcgaagcgggaaaatactacccgaaccacgaagccgtcgacttctacggtcgctacaaagaagacatcaaactgttcgccgagatgggcttcaaatgcttccgcacctctatcgcctggacccgcatcttcccgcagggtgacgaaacccagccgaatgaagagggactgaagttctacgacgacatgttcgacgagctgctgaaatacaacatcgagccggtgatcactctctcccacttcgagatgcccctgcacctggtgcagcagtatggcggctggaccaaccgcaaagtggtcgatttctttgtgcgctttgccgaagtggtcttcgagcgctataagcacaaagtgaaatactggatgacctttaacgagatcaacaaccagcgcaactggcgcgcgccgctgttcggctactgctgctccggggtggtctataccgagcatgacaatccggaagagaccatgtaccaggtgctgcaccaccagttcgtggccagcgcgctggcggtgaaagcggcgcggcgcatcaacccggacatgcaggtcggctgcatgctggcgatggtcgccctctacccttactcctgcaaaccggaagatgtcatgttcgcccaggagtcgatgcgcgagcgctacgtctttaccgacgtccagctgcgcggttactacccgagctatgtgttgaatgaatgggaacgccgcggcttcaacatcaggatggaagacggcgacgcgcagatcctgcgcgaaggtacctgcgcctatctcggcttcagctactacatgaccaacgcggtgaaagccgagggcggcactggcgacgccatttccggtttcgaaggcagcgtgccgaacccgcacgtcaaagcttccgactggggctggcagattgacccggtcggcctgcgctattctctgtgtgaactgtatgagcgttatcagaagccgctgtttatcgtggaaaacggctttggcgcctacgacaaagtagaagccgacggcagcatcaacgatgactaccgcatcgactacctgcgcgcccacatcgaagagatgatcaaagcggtcacttatgacggcgtcgatctgctgggctataccccatggggctgcatcgactgcgtctccttcaccaccgggcagtacagcaaacgctacggcttcatctacgtcaacaaacacgacgatggcaccggcgatatgtcccgctcgcgcaagaagagctttaactggtacaaagaggtcatcgccagcaacggtgagaacctgtaa

SEQ ID NO: 2338 - protein, 477 aa, Acinetobacter pittii
MKKLTLPKDFLWGGAVAAHQVEGGWDQGGKGPSICDVLTGGAHGVPREITHQVEAGKYYPNHEAVDFYGRYKEDIKLFAEMGFKCFRTSIAWTRIFPQGDETQPNEEGLKFYDDMFDELLKYNIEPVITLSHFEMPLHLVQQYGGWTNRKVVDFFVRFAEVVFERYKHKVKYWMTFNEINNQRNWRAPLFGYCCSGVVYTEHDNPEETMYQVLHHQFVASALAVKAARRINPDMQVGCMLAMVALYPYSCKPEDVMFAQESMRERYVFTDVQLRGYYPSYVLNEWERRGFNIRMEDGDAQILREGTCAYLGFSYYMTNAVKAEGGTGDAISGFEGSVPNPHVKASDWGWQIDPVGLRYSLCELYERYQKPLFIVENGFGAYDKVEADGSINDDYRIDYLRAHIEEMIKAVTYDGVDLLGYTPWGCIDCVSFTTGQYSKRYGFIYVNKHDDGTGDMSRSRKKSFNWYKEVIASNGENL

SEQ ID NO: 2339 - DNA, 489 bp, Salmonella enterica
atgattggacaccaggtcgatgccgtctgcccggataaagccgctggcgactatgtcatgaccgcaatccatgactttgacggcgcccagacttatagcgaaaagccgggccatcgcttcacgctgaacgctgacttcgccgcagtaaaggccgagaactacgatgcgctagtgatccccggcggccgggcgccggagtatctgcgcctgaacgaggaggttattaaactggtacaggccttcgacgccgcgcgtaaacctatcgccgccgtctgccatggcccacagctgctggccgccgccggtattctgcagggacggacctgcagcgcctatcccgcctgcgctccggaagtgcgcctgagcggtgggcactatgcggatataggtatcgaccaggcgcatgtggacggtaacctggttaccgcccccgcctggccggctcatccacagtggctggcgaaattcgccgccctgctggcggaataa

SEQ ID NO: 2340 - protein, 162 aa, Salmonella enterica
MIGHQVDAVCPDKAAGDYVMTAIHDFDGAQTYSEKPGHRFTLNADFAAVKAENYDALVIPGGRAPEYLRLNEEVIKLVQAFDAARKPIAAVCHGPQLLAAAGILQGRTCSAYPACAPEVRLSGGHYADIGIDQAHVDGNLVTAPAWPAHPQWLAKFAALLAE

SEQ ID NO: 2341 - DNA, 321 bp, Klebsiella pneumoniae
atggaaaagaaacacatttatctcttctgctcggcaggcatgtccacgtcactgctggtctccaaaatgcgggcgcaggcggaaaaatatgaagtcccggtcattattgaagcctatcccgaaaccctcgcgggcgaaaaagggccggaagccgacgtagtattattagggccacaaattgcgtatatgttaccggaaattcagcgcctgctgccgaataaaccggttgaagttatcgactcccttctctatggcaaagttgatggtttaggggtattgaaagccgccgtcgcggctattaagaaagctgcagcacaataa

SEQ ID NO: 2342 - protein, 106 aa, Klebsiella pneumoniae
MEKKHIYLFCSAGMSTSLLVSKMRAQAEKYEVPVIIEAYPETLAGEKGPEADVVLLGPQIAYMLPEIQRLLPNKPVEVIDSLLYGKVDGLGVLKAAVAAIKKAAAQ

SEQ ID NO: 2343 - DNA, 624 bp, Salmonella enterica
gtgcttgatagccacctgcatccgcgccttaaacccctgctaaacgctgtcgccggcgcccttgaccgccccggcatctcaccggacgggctgacgctggtcggttttgccatcggcgtgctggctctgccctttctggcgctggggtggtatggcgcggcgctggcggccattctccttaaccgcctgctggatggcctggacggcgctctggcgcggcggcgcgggctcacggatgcgggcggctttctcgatattgcgctggattttctcttttacgccctggtgccgttcggctttattctggcggatccgctgaacaatgccctggcgggcggctggctgctgtttgcctttatcggcaccggcagcagctttctcgcttttgccgccctggcggccaggcaccagatcgccaatcccggctacgcccataaatcgctgtactatctcgggggactgacggaggggacggagaccatcctgttgtttgtcctcggctgcctgtttccggcgcatttcgcctggctggcgtggctgtttggcgcgctgtgctggctgacgacggcgacgcgcatctgcagtggctaccagaccttaaagcgggtaacgaccacagcgtaa

SEQ ID NO: 2344 - protein, 207 aa, Salmonella enterica
MLDSHLHPRLKPLLNAVAGALDRPGISPDGLTLVGFAIGVLALPFLALGWYGAALAAILLNRLLDGLDGALARRRGLTDAGGFLDIALDFLFYALVPFGFILADPLNNALAGGWLLFAFIGTGSSFLAFAALAARHQIANPGYAHKSLYYLGGLTEGTETILLFVLGCLFPAHFAWLAWLFGALCWLTTATRICSGYQTLKRVTTTA

SEQ ID NO: 2345 - DNA, 411 bp, Enterobacter cloacae
atgctaaaaatgattgatgttgtcgccgccattattgaacaggatggccagattctgctggcgcagcgtccgccccacgccgaccagccggggatgtgggagttcgccggcggcaaagtggagccgggtgaaagccagccgcaggcgctggtccgcgaactgcaggaggagatgggcatcatcgcccgcccggcttgctatatcgctagccatcagcgggaggtctccggccgccggatccatcttcacgcctggtgggtgccgcactttcagggcacgccgctggcccactatcacactcagctgcgctggtgccttcccacagaagcgctggccctcgatctcgccccggccgatattcctctgctgcacgcctttatcgcccagcgccccaccctttccgtccgctga

SEQ ID NO: 2346 - protein, 136 aa, Enterobacter cloacae
MLKMIDVVAAIIEQDGQILLAQRPPHADQPGMWEFAGGKVEPGESQPQALVRELQEEMGIIARPACYIASHQREVSGRRIHLHAWWVPHFQGTPLAHYHTQLRWCLPTEALALDLAPADIPLLHAFIAQRPTLSVR

SEQ ID NO: 2347 - DNA, 378 bp, Enterobacter cloacae
atgaatccttatctgcaggaagtcctcgatgcccatgtccttatcgaacgctggttaagccatggcgaaggaagcgctgaggcgctgatgaagcgttttgccgccgattttaccatgatccccttgagcggtgagaagatggactacccaacggtgagccgttttttccaccacgccggcggcagccgtccggggttagatatcgtagtggatcagatggaaatcatcagcgagtggcacgacggcgccgcagtgctatatcgtgaaagccaaacgctggcggatagcagtcagaacgttcgctggtcgacggcgatttttcaacaagcggaagggaaaattgtctggcgccatctgcaggaaacccgcctcggctag

SEQ ID NO: 2348 - protein, 125 aa, Enterobacter cloacae
MNPYLQEVLDAHVLIERWLSHGEGSAEALMKRFAADFTMIPLSGEKMDYPTVSRFFHHAGGSRPGLDIVVDQMEIISEWHDGAAVLYRESQTLADSSQNVRWSTAIFQQAEGKIVWRHLQETRLG

SEQ ID NO: 2349 - DNA, 261 bp, Klebsiella michiganensis
gtgcacccgataattaaggtcatgctggtgggcggtaaggcggacgggctgttggtcagcgtcgccgatgacgcgaccgaggtctcggtgacgcctgcgcagtacggtgcgctatccgggcaaccgttgagctaccgaattgttagccaaaccattgacgatgaacgctatttttttggcgttttcagcgacgcccatcaggatagcgataagctgacgcgggtcgccctgacccgtggaatgaaaaaaaagttctgttaa

SEQ ID NO: 2350 - protein, 86 aa, Klebsiella michiganensis
MHPIIKVMLVGGKADGLLVSVADDATEVSVTPAQYGALSGQPLSYRIVSQTIDDERYFFGVFSDAHQDSDKLTRVALTRGMKKKFC

SEQ ID NO: 2351 - DNA, 1089 bp, Enterobacter cloacae
atgattcagtacattcgtattcaaaattttcgctcagtgaaggatatcgcgctggagctcgggccgctgaacattgtcttcggccctaacggctgcggtaaatccaatatttataacgccatccacctgctgaccgctgccgctgagggcaggctttcggggtttatcagcgaagagggcggtctggagaatatgatgtggtccggggagcgttcgcccctcgatcgtcacccccgccggctgcaaatcgcctgccggaccgacagcttcgattatgagctgcagataggcttccctgaaaaattgccctatccgacgcaattcatgctcgatcctatcgttaaagaagagaatatctggctggccggctactcccgccggccttcctcccgcgtactgcagcgcaagaatcaggcggcgtttctcgtcgatgtcaccggggagaaaagtactttcaccgagagtatttatgaaaatgagtcggtgttcggtcagcttggcgagccgcaccgtttccccgaagtatcgcgagtgcgggagaccttgcgccgttggcggttttatcatgaattcgcgattggccgtcattcgccgctgcgtcagccggccgtgggttaccgttcgccagtcctcgacagcgatggccagaatctcgccgccgcctttcagaccattgtcgagatcggcgcggaggagattttgcatgaaatccttgccgacgcctttcccggctgccagttttattgtgaaaacgagcactcgcgtttcgctctgaaaatgcgtcgcgaagggatccgccgcccgctgctggcggcggagatgtccgacggtacgctgcgctttttgtgcctcgccgtcgcgctgctcagtccacgcccgccggcgtttctggcgatcaatgaaccggagaacagcctgcatcgcgacatgttgcccgcgctggcccggctgattatcgaggcctcgcgctacagccagatctggctgaccagccactcggcggagctggcggagcttatcgccgccggggcgccttgtcagcgctatgcgctggagaatcgcggcggggagacgcggattgtcgagtga

SEQ ID NO: 2352 - protein, 362 aa, Enterobacter cloacae
MIQYIRIQNFRSVKDIALELGPLNIVFGPNGCGKSNIYNAIHLLTAAAEGRLSGFISEEGGLENMMWSGERSPLDRHPRRLQIACRTDSFDYELQIGFPEKLPYPTQFMLDPIVKEENIWLAGYSRRPSSRVLQRKNQAAFLVDVTGEKSTFTESIYENESVFGQLGEPHRFPEVSRVRETLRRWRFYHEFAIGRHSPLRQPAVGYRSPVLDSDGQNLAAAFQTIVEIGAEEILHEILADAFPGCQFYCENEHSRFALKMRREGIRRPLLAAEMSDGTLRFLCLAVALLSPRPPAFLAINEPENSLHRDMLPALARLIIEASRYSQIWLTSHSAELAELIAAGAPCQRYALENRGGETRIVE

SEQ ID NO: 2353 - DNA, 1266 bp, Enterobacter cloacae
atgaaattctcagaactggcgccacgagaacggcataatttcgtctatttcctgctgttctttttcttttactatttcattatgtcggcctacttcccgttttttccggtgtggctggcggacgttaaccatttaactaaaacggaaaccgggatcgttttctcgtctatctcgttattcgccattatttttcagccggtgttcggcctgatgtcggataagctcggcctgcgcaaacatctgctgtggaccattacggtattgttaattctgttcgcgccattctttattttcgttttctctccgctgctgcagatgaatattatcgctggttcgctggtaggcgggatctacctggggattgttttctccagcggctccggggcggtggaagcttatatcgaacgcgtcagccgggccaaccgctttgaatatggcaaagtgcgggtcgcaggctgcgtcggctgggcgctatgcgcctcgataaccggcgtgctgttcagcatcgatcccaatatcaccttctggatcgcctccggctttgcgctggtgctcggtctgctgctctggctgtcgcggccggaaagcagcaacagcgcccaggttatcgaggcgctgggcgccaatcgccaggccttttcgctgcgtacggcggcagagctgctgcgtatgccgcgcttctggggctttatcgtctatgtggtgggtgtcgccagcgtctacgacgtgtttgaccagcagttcgccaactttttcaaaagctttttcgccagtccgcagcgcggtaccgaagtgtttggcttcgtcaccaccggcggcgagttgctcaacgcgctgatcatgttctgcgcgccggccatcgttaaccgcatcggcgccaaaaacgccctgctgaccgcggggatgatcatgtcggtgcgtattctcgggtcgtccttcgcctcatcggcagtcgaggtggtgatcctcaagatgctgcatatgtttgagatccccttcctgctggtgggaacttttaaatatatctcttccgcctttaacccgcgcctctcggccaccctgttcctgatcggttttaatctgtcaaaacagttgtccggggtggtgctttccgcctgggtgggccggatgtacgacaccgtcggcttccatcaggcctatctgatcctcggctgcataaccctgagcttcaccctgctctcgttcgtcaccctacgcggcggcaaccgtctgctgccgaccgcagagacgcagagccccgcctga

SEQ ID NO: 2354 - protein, 421 aa, Enterobacter cloacae
MKFSELAPRERHNFVYFLLFFFFYYFIMSAYFPFFPVWLADVNHLTKTETGIVFSSISLFAIIFQPVFGLMSDKLGLRKHLLWTITVLLILFAPFFIFVFSPLLQMNIIAGSLVGGIYLGIVFSSGSGAVEAYIERVSRANRFEYGKVRVAGCVGWALCASITGVLFSIDPNITFWIASGFALVLGLLLWLSRPESSNSAQVIEALGANRQAFSLRTAAELLRMPRFWGFIVYVVGVASVYDVFDQQFANFFKSFFASPQRGTEVFGFVTTGGELLNALIMFCAPAIVNRIGAKNALLTAGMIMSVRILGSSFASSAVEVVILKMLHMFEIPFLLVGTFKYISSAFNPRLSATLFLIGFNLSKQLSGVVLSAWVGRMYDTVGFHQAYLILGCITLSFTLLSFVTLRGGNRLLPTAETQSPA

SEQ ID NO: 2355 - DNA, 3108 bp, Enterobacter cloacae
atgcaaattagcgataccggccgcagccacactcctgactttcacgccgtcctcgcccgtgaagactggcagaaccagaccattacccaccttaaccgcctgccagcgcatcccgttttcgccagctggcgcgatgagcttgccgcccgcgataacctaccttcatcccgccgccgtcaactggacggcgagtggcagttctcttacgcccgcagcccgtttgccgtcgatgcgcagtggttgacgcaggatctaccggactgccgcggcacgcctgtgccttccaactggcagatggagggctatgacgcgccgatctacaccaacgtccgctatcccatcgacaccaccccaccgcgggtgccggaggataacccgaccggctgctactccctgcactttacggttgaggacacatggcgcgagaacgggcaaacgcagattattttcgatggcgtcaactcggcgtttcatctgtggtgcaatggcgtgtgggtcggctattcgcaggacagtcgcctgccggcggcgttcgatctcagcccctttctgcgtccgggcgacaaccgcctgtgcgtgatggtcatgcgctggagcgccggcagctggctggaagaccaggatatgtggcggatgagcggtattttccgctcggtatggctgctgaataagccgcagcaacggctatgcgacgtgcagttgacgccagcccttgacgccctctatcgcgacggcactctgcaggtccaggcgaccgtcgaagcgactgaggcggcgcttgccgggcttagcgtcggggttagcctgtggcgcggcgaggagcagatcgccgccgggcggcagccgttaggtaccccgacggtggatgagcgcggccactacgcggaacgggtcgatttctccctggcggtggcgacgccggcgcactggagcgcggaaaccccgaactgttatcgcgccgtggtcaccctgtggcgcggcgacgaactgctggaggccgaagcgtgggacatcggttttcgccgcatcgagattgccgatggcctgctgcgtctcaacggtaaaccgctgctgatccgcggcgttaaccgccatgagcatcatcatttgcgcgggcaggtggtcaccgaggcggatatggtgcaggacattctgttgatgaagcagaacaactttaacgccgtgcgctgctcgcactatcccaacgcgccgcgctggtatgaactctgcaaccgctacggtctgtacgtggtcgatgaagccaatattgaaacccacgggatggtgccgatgaatcggctgtccgacgatccggcgtggctaccagccttcagcgcccgcgtcacccggatggtacagagcaaccgcaaccatccgtgcattatcatctggtcgctgggcaacgagtccggcggcggcggcaaccacgaagcgctgtaccactggctgaaacgcaacgatccgagccgtccggtgcagtacgagggcggcggcgcggataccaccgccaccgatattatctgtccgatgtacgcccgcgtcgaacgcgaccagccgatcccggcggtacccaaatgggggatcaaaaaatggatcagcctgcccggtgagcagaggccgctgatcctttgcgagtacgcccacgcgatgggcaacagcctcggcaacttcgccgattactggcaggcctttcgcgagtatccccggctgcagggcgggtttatctgggactgggccgaccaggcgatccgcaaaacctttgccgacggcagcgtcggctgggcctatggcggcgactttggtgataagcctaacgatcgccagttctgtatgaacggtctggtgtttcccgatcgcacgccgcatccgtcgctggtggaggcgaagcacgcccagcagtattttcagttcacgctgctgtcgacctcgccgctgcgggtgcgcatcatcagcgaatacctgttccgcccaaccgataacgaagtgctgcgctggcaggtgcaggcggccggtgaacccctgtatcacggcgacctgaccctggcgctgccccctgagggcagcgacgagataacgctgctcgatagcctgatcctgcctgaaggcgcccgcgcggtgtggctgacgctggaggtgacccagccccaggcgaccgcctggtcagaagcggagcaccgcgtcgcctggcaacagtttcccctgcccgccccgctggcgctgccggcgcccaccgtgtctgccggcgctccggatcttatcgtcagcgatgaggtctggcagatccgcgccggttcgcaatgctggaccatcgatcgccggacgggtctgctgagccgctggtcggttggcggtcaggagcagctgttgacccccctgcgtgaccagtttattcgcgcgccgctcgacaacgacatcggggtcagcgaagtagagcgtatcgaccccaacgcctgggtggagcgctggaaaagcgccggcctgtacgatcttgaggcgcactgcgtccagtgcgatgcgcagcgcctggcaaatgaaaccctcgtcgactgccgctggcactacctgcgcggcgaagaggtagtgattgtcagccactggcgcatgcacttcactgctgacggaaccctgcggttggcagtggacggcgaacaggcggaaaccctgccgccgctgccgcgggtcgggctgcacttccaggtggcggatcagcaggcgccggtgagctggctgggtctggggccgcatgagaactaccccgaccggcggagcagcgcctgcttcgcccgctgggagcagccgctggcggcgatgaccaccccctacatcttcccgacggaaaacggcctgcgctgtgatacccaggcgctggactgggggcgctggcacatcagcggtcatttccacttctccgttcagccatggagcacccgtcagctgatggagaccgaccactggcacaagatgcaggccgaagacggcgtgtggatcaccctcgacggcctgcatatgggggtgggaggcgatgactcctggacccccagcgtgctgccgcagtggctcctgagccaaacgcgctggcagtacgaggtctcattgcgttgcttttaa

SEQ ID NO: 2356 - protein, 1035 aa, Enterobacter cloacae
MQISDTGRSHTPDFHAVLAREDWQNQTITHLNRLPAHPVFASWRDELAARDNLPSSRRRQLDGEWQFSYARSPFAVDAQWLTQDLPDCRGTPVPSNWQMEGYDAPIYTNVRYPIDTTPPRVPEDNPTGCYSLHFTVEDTWRENGQTQIIFDGVNSAFHLWCNGVWVGYSQDSRLPAAFDLSPFLRPGDNRLCVMVMRWSAGSWLEDQDMWRMSGIFRSVWLLNKPQQRLCDVQLTPALDALYRDGTLQVQATVEATEAALAGLSVGVSLWRGEEQIAAGRQPLGTPTVDERGHYAERVDFSLAVATPAHWSAETPNCYRAVVTLWRGDELLEAEAWDIGFRRIEIADGLLRLNGKPLLIRGVNRHEHHHLRGQVVTEADMVQDILLMKQNNFNAVRCSHYPNAPRWYELCNRYGLYVVDEANIETHGMVPMNRLSDDPAWLPAFSARVTRMVQSNRNHPCIIIWSLGNESGGGGNHEALYHWLKRNDPSRPVQYEGGGADTTATDIICPMYARVERDQPIPAVPKWGIKKWISLPGEQRPLILCEYAHAMGNSLGNFADYWQAFREYPRLQGGFIWDWADQAIRKTFADGSVGWAYGGDFGDKPNDRQFCMNGLVFPDRTPHPSLVEAKHAQQYFQFTLLSTSPLRVRIISEYLFRPTDNEVLRWQVQAAGEPLYHGDLTLALPPEGSDEITLLDSLILPEGARAVWLTLEVTQPQATAWSEAEHRVAWQQFPLPAPLALPAPTVSAGAPDLIVSDEVWQIRAGSQCWTIDRRTGLLSRWSVGGQEQLLTPLRDQFIRAPLDNDIGVSEVERIDPNAWVERWKSAGLYDLEAHCVQCDAQRLANETLVDCRWHYLRGEEVVIVSHWRMHFTADGTLRLAVDGEQAETLPPLPRVGLHFQVADQQAPVSWLGLGPHENYPDRRSSACFARWEQPLAAMTTPYIFPTENGLRCDTQALDWGRWHISGHFHFSVQPWSTRQLMETDHWHKMQAEDGVWITLDGLHMGVGGDDSWTPSVLPQWLLSQTRWQYEVSLRCF

SEQ ID NO: 2357 - DNA, 1065 bp, Enterobacter cloacae
atgccgcgtcgtaccgcaaccctggaggatgtcgcccgcgccgcgggcgtgtcccagcagacggtctcccgggtgctgaaccgtcctgaggtggtgtcagcccgcacccgcgagcaggtgatccgcgcgatgcaggcgctgcactatgtgcctaaccgctcggcgcagctgcttgccggcaaagcggcgccctccatcgggctgattaccgcctcgctgacgctgcacgccccctcgcagatcgccgccgcgataaagagccatgccagcctgcatcagctggaagtggcgatagcgatgccggcgcaggccgattttgtcgcgctgcaggcccggctggacgagctgcgcgcccagcatattcgcggggtgatcgtcagtctgccgctggagagcgccactgccgagcggctggtgcaagacaatccggatatggcctgcctgtttctcgatgtctccccggaggccgatgtctgctgcgtgcgcttcgaccaccgcgatggctgcggggcctgcgtgcgccacctgtgggagctggggcatcgcgaatttggtctgctggcgggaccggaaagttcggtttccgcccgtctgcgtctcgccagctggcgcgaggcgttgcactgtctgaatattgcccgctctactacggtgtttggcgactggagcgccgccagcggttggcagaaaactttcgagctcctccacctgcagccgcggatcagcgccatagtggtggcaaacgatcagatggcgctcggcgtgctcagcgcgctggcccagctcaatcgcagcggcagccaggcggtatcggtgaccggctacgatgacaccgccgacagcctttacttccagccgccgctcaccacggtggcgcaggacttcgatctgttgggcaaaagggcggtggagcggctgattgccctgatggcggccccgcagctgcggatccgcgagctgctgccgacccggctcatcgtgcgccagtcggcctggcctgtcgccgccgcggaggaccggcagcagaccctggcgcagctgaaagcgctggtggagaagctttag

SEQ ID NO: 2358 - protein, 354 aa, Enterobacter cloacae
MPRRTATLEDVARAAGVSQQTVSRVLNRPEVVSARTREQVIRAMQALHYVPNRSAQLLAGKAAPSIGLITASLTLHAPSQIAAAIKSHASLHQLEVAIAMPAQADFVALQARLDELRAQHIRGVIVSLPLESATAERLVQDNPDMACLFLDVSPEADVCCVRFDHRDGCGACVRHLWELGHREFGLLAGPESSVSARLRLASWREALHCLNIARSTTVFGDWSAASGWQKTFELLHLQPRISAIVVANDQMALGVLSALAQLNRSGSQAVSVTGYDDTADSLYFQPPLTTVAQDFDLLGKRAVERLIALMAAPQLRIRELLPTRLIVRQSAWPVAAAEDRQQTLAQLKALVEKL

SEQ ID NO: 2359 - DNA, 1098 bp, Klebsiella oxytoca
atgacagaaaacgctaacattctgacaaccccttctgtgacaccgtcacgtcatcaggtgatcgccctcgcctacgatggcctgtgcacctttgagtttggcgtagccgtggagatcttcggcctgccgcgcccggaaatgggcgacaactggtaccagttcgccgtcgccgccgtcgatgaagggccgctgtgcgctaccggcggcatccgcctgatgaccgacggcggtcctgaacttctcgcccaggcggatacgatcgtggtccccggctggcgcggcgtcgacgccccggtccccgaggcgctgtgcgccgcgctggcttccgcccacgcccgcggatgtcggattatttctatctgttccggggtgttcgttctcgccgccgccgggctgctcaatggccgccaggcgacaacccactggcgctacaccgcggcgctgcagtcccgttttccgcagatccaggtggtggaggacgtcctttacgtgggcgatgctttgctgatgacttccgccggcagcgcggcggggatcgacctttgtctgcatctggtgcgtgaagatttcggcagcgaagccgccaacgtcgtcgcccgccgcctggtcgtctctccccatcgcgacggcggtcaggcgcagcaggtcctgcgcccggtagcccgcagccgggagagcctgcgcctcggtcagctgtttgactatctgcaccagcatcttgccgccagccataccgtcgcttccctcgcccagcgcgccggcatggggacgcgcacctttttgcgccgctttgaggaggccaccggtaaaacgcccgcccgctggctgctggaggaacgactgctgcgcgcccgccagcacctgacggagagcacgatgggcatcgatcagatcgctgagcgctgcgggtttgccagcgccggcaccctgcgccaccattttcgccagcacttcgcgctcagcccgctgcagtaccgtaaacagtttacgccttctccgattgcaaaatcgtcgcagccacggacaatagacggccacagtaaaccggtcgccaggagggtcgatgatgaagaaagagtgtcgggtagtgatctataa

SEQ ID NO: 2360 - protein, 365 aa, Klebsiella oxytoca
MTENANILTTPSVTPSRHQVIALAYDGLCTFEFGVAVEIFGLPRPEMGDNWYQFAVAAVDEGPLCATGGIRLMTDGGPELLAQADTIVVPGWRGVDAPVPEALCAALASAHARGCRIISICSGVFVLAAAGLLNGRQATTHWRYTAALQSRFPQIQVVEDVLYVGDALLMTSAGSAAGIDLCLHLVREDFGSEAANVVARRLVVSPHRDGGQAQQVLRPVARSRESLRLGQLFDYLHQHLAASHTVASLAQRAGMGTRTFLRRFEEATGKTPARWLLEERLLRARQHLTESTMGIDQIAERCGFASAGTLRHHFRQHFALSPLQYRKQFTPSPIAKSSQPRTIDGHSKPVARRVDDEERVSGSDL

SEQ ID NO: 2361 - DNA, 399 bp, Enterobacter cloacae
atgagtgtagtaacccaatttccccctgccacctccgctgaggctatccgctggttcagccataagctgcatcttgagaccgactgcgccgatgtgcacagcgcccagcgtgccggcgaggtcgacttcgtcctgctgcacgtggtcggcagcgaggaagctttcgccagacgtcacctgccaggcgcgcagcatctcccgcacagccagatcaccgccgagcgaatggcggcctggccggcggagaccctctttgtggtctactgcgccgggccgcactgcaacggtgctgacgttgccgcgctgaagctggccgagctggggcggccggtgaaaatgatgctcggcggactcaccggctgggaagatgagggctatgcgtttgtttccggtaaatga

SEQ ID NO: 2362 - protein, 132 aa, Enterobacter cloacae
MSVVTQFPPATSAEAIRWFSHKLHLETDCADVHSAQRAGEVDFVLLHVVGSEEAFARRHLPGAQHLPHSQITAERMAAWPAETLFVVYCAGPHCNGADVAALKLAELGRPVKMMLGGLTGWEDEGYAFVSGK

SEQ ID NO: 2363 - DNA, 1104 bp, Enterobacter cloacae
atgcaacgtcaacaggccccgttccgcgcagacatcgtcggcagttttttgcgcccggacagcattaaacaggcgcgtcagcagctggctgaggggattatcgacgccgctcagctacgcgagattgagaataacgcgatccgtcatctggttcagcagcaatgcgactgcggcctgcatgtggtcaccgacggtgagtttcgtcgcgcatggtggcatttcgatttcttcgatggcctgcagggcgttgaacgttacgatgccgagcaggggatccagttcaacggcgtgcagaccaaagcgcacggcgttcgcgtcaccggcaagctggcatttggcgaccacccgatgctggaggatttccgctatctgaaaagcatcagcggcgacgcgcagccgaagatgaccattcccagcccgagcgtgctgcacttccgcggcgggcggaaagatatcgatgccacggtctacccggatcttagcgactacttcgacgatttggccaccacctggcgcgacgccatccgcgcgttttatgacgccggctgccgctatctgcagctggacgataccgtgtgggcctatctgtgctccgatgcccagcgccagcaggtacgcgagcgcggcgaggatccggatgcgctggcgcgcatttatgcccgggtgctgaaccaggcgctggaaggtaagccggccgatctgacggtgggcctgcacgtctgtcggggtaacttccgttcaacctggatctcggaaggcggttacgagccggtggccgaggtgctgtttggcggcgtcaatgtcgatgctttcttcctggagtacgacaacgaccgctccggggatttcgcgccgctgcgctttattcgtcccggccatcagcaggtggtcctcgggctgatcaccaccaaaaacggcgagctggagaatccgcagggggtaaaagcgcgactcgccgaggccgcgcagtacgtgccgctcgagcagatctgcctcagcccgcagtgcggtttcgcctccactgaagaggggaatgccctcagcgaagaccagcaatggcaaaaggtccgtctggtgacctccatcgccgccgacgtctggtaa

SEQ ID NO: 2364 - protein, 367 aa, Enterobacter cloacae
MQRQQAPFRADIVGSFLRPDSIKQARQQLAEGIIDAAQLREIENNAIRHLVQQQCDCGLHVVTDGEFRRAWWHFDFFDGLQGVERYDAEQGIQFNGVQTKAHGVRVTGKLAFGDHPMLEDFRYLKSISGDAQPKMTIPSPSVLHFRGGRKDIDATVYPDLSDYFDDLATTWRDAIRAFYDAGCRYLQLDDTVWAYLCSDAQRQQVRERGEDPDALARIYARVLNQALEGKPADLTVGLHVCRGNFRSTWISEGGYEPVAEVLFGGVNVDAFFLEYDNDRSGDFAPLRFIRPGHQQVVLGLITTKNGELENPQGVKARLAEAAQYVPLEQICLSPQCGFASTEEGNALSEDQQWQKVRLVTSIAADVW

SEQ ID NO: 2365 - DNA, 1272 bp, Klebsiella oxytoca
atgcaacgtagaacgttattaaaagcttttgcactctccgcctctgttatggctataggtctctcctttcaggcctatgccgccgacaccatcaaagtcgggatcatgcattcgctctccgggacgatggcgatttccgaaacgccgctgaaagacgtcgcgctgatggccatcgacgacatcaacgccaaaggcggggtgctgggcaagaaactggagccggtggtggtcgacccggcctccaactggccgctgtttgccgagaaggcgcgccagctgctggcccaggataaagtggcggtggtgtttggctgctggacgtcggtctcgcgtaaatcggtcctgccggtgtttgaggaactgaacggcctgctgttctacccggtgcagtacgaaggggaagagatgtcccccaacgtcttctataccggcgcggcgcctaaccagcaggctatcccggcggtggaatacctgctgagcgaggacggcggcggcgctaaacgtttctttctgctggggacggactacgtctatccgcgcaccaccaacaagatcctccgcgccttcctgcatgccaaagggatccaggacaaagatatcgaggaggtctacaccccgttcggctacagcgattaccagaccatcgtcgccaatatcaaaaaattcgccgccggtggcaaaacggcagtggtctccaccatcaatggcgattccaacgtaccgttctacaaagagctggctaaccagggtctgaaagcgaccgatgtaccggtggtggccttctcggtgggggaagaggagctgcgcggcatcgataccaaaccgctggtcggcaacctcgcggcatggaactactttgaatccgtcgataatccgaccaacaaagcctttgtcgccgattatcgcgcgtatgccaaagcgcacaagctgccgaatgccgatacggtggtaaccaacgatccgatggaagcgacctgggtgggtctgcatatgtgggcgcaggcggtgaccaaagcgggcaccaccgatgtcgataaagtgcgcgaggcgatggccgggcagaccttcaacgcgccgtccggttttaccctgaccatggatgccactaaccatcatctgcataagccggtgatgatcggtgaaattgaaggcaacggccagttcaacgtggtctggcagaccgataaacccgttcgcgcgcagccgtggagtccgtggatccccggtaacgataagaaacctgaccatccggtgaaaaccgtcagccagtaa

SEQ ID NO: 2366 - protein, 423 aa, Klebsiella oxytoca
MQRRTLLKAFALSASVMAIGLSFQAYAADTIKVGIMHSLSGTMAISETPLKDVALMAIDDINAKGGVLGKKLEPVVVDPASNWPLFAEKARQLLAQDKVAVVFGCWTSVSRKSVLPVFEELNGLLFYPVQYEGEEMSPNVFYTGAAPNQQAIPAVEYLLSEDGGGAKRFFLLGTDYVYPRTTNKILRAFLHAKGIQDKDIEEVYTPFGYSDYQTIVANIKKFAAGGKTAVVSTINGDSNVPFYKELANQGLKATDVPVVAFSVGEEELRGIDTKPLVGNLAAWNYFESVDNPTNKAFVADYRAYAKAHKLPNADTVVTNDPMEATWVGLHMWAQAVTKAGTTDVDKVREAMAGQTFNAPSGFTLTMDATNHHLHKPVMIGEIEGNGQFNVVWQTDKPVRAQPWSPWIPGNDKKPDHPVKTVSQ

SEQ ID NO: 2367 - DNA, 1575 bp, Enterobacter cloacae
atgaacgcattgcgtctcatgaatgtgttggcgctactgctgatcctgctgccatggcgggcgcaggccgcggaggcggacgacttcgttgccgccagtcgcagccagcaggcgcagctgttgagccagtgggcggcagcgccgcaggcggatcgtctgccgctgctgcgggcgttgaccaccgagagcctggtgatggacgacggaaaacatgctttccgcacccgacagggcggattacagccattgggcgctgtcgccgcaccgcagggcgaaacccgaccggtccgtctgaccaacaggctgcgcaatctggctgccggcgcgctggccagccaccttattttaagtgacaacgtcacagagcgagcttccgccgcacgaacgctacagcgggaagcgaccccggccatggccgcgctgctgcaacagcggctgcaggcggaaaccgatgatactgtgcggggtctgctggaggtggcgctggcgcgcctgcagctcgctcagcctgaggccagcgcgcggctggccgccgtgacgctgctcggccattccgcggacccggaaacccaggcgctgctgatcccctttaccgatgcccagcatgagccggatgcggcggtgcgcgaggcggccagcgatagcctgcaaaagatcaaacatcgtctgctgctcggcgatctgctgggccaggcctttatgggactgtcgctgggatcggtgctgttgctggccgcgctggggctggcgatcacctatggcctgctgggggtgattaacatggcccacggcgagatgttaatgatcggcgcctacagctgctggctggtacagcaggcgctggcgcagctcgcgccgcaatggctggccttttatccgctggtcgcgctgccggtggcgtttctggtgaccgccgggatcggcatggcgctggagcgcaccattattcgtcatctgtatggtcggccgctggaaacgctgctcgccacctgggggatcagcctgatgcttatccagctggtgaggatgctgtttggcgcgcagaacgtggaggtggcaaacccggcctggctctccggcggcgtgcaggtcctgccgaacctgatcctgccgtggaaccgactggcggtgctggcgttcgtcctgctggtgctgtcctttacctggctcatcctgaaccgcacccgtctggggatgaacgtccgcgccgtgacgcagaaccgggcgatggccgcctgctgcggcgtgcctaccgggcgggtggatatgctggcctttggcctcggctccggtattgccgggctgggcggcgtggcgctgtcgcagcttggcaacgtcgggcctgaactgggtcagggatacatcatcgactcgtttctggtggtggtgctgggcggcgtcggccagctggccggcagcgtggcggcggcctttgggctgggcattttcaacaaaattctcgaaccgcaaatgggcgcggtgctgggcaaaatcctgatcctggtgatgattattctgtttattcagaaacgcccgcagggtctgttcgcgctgaaagggagggttattgactaa

SEQ ID NO: 2368 - protein, 524 aa, Enterobacter cloacae
MNALRLMNVLALLLILLPWRAQAAEADDFVAASRSQQAQLLSQWAAAPQADRLPLLRALTTESLVMDDGKHAFRTRQGGLQPLGAVAAPQGETRPVRLTNRLRNLAAGALASHLILSDNVTERASAARTLQREATPAMAALLQQRLQAETDDTVRGLLEVALARLQLAQPEASARLAAVTLLGHSADPETQALLIPFTDAQHEPDAAVREAASDSLQKIKHRLLLGDLLGQAFMGLSLGSVLLLAALGLAITYGLLGVINMAHGEMLMIGAYSCWLVQQALAQLAPQWLAFYPLVALPVAFLVTAGIGMALERTIIRHLYGRPLETLLATWGISLMLIQLVRMLFGAQNVEVANPAWLSGGVQVLPNLILPWNRLAVLAFVLLVLSFTWLILNRTRLGMNVRAVTQNRAMAACCGVPTGRVDMLAFGLGSGIAGLGGVALSQLGNVGPELGQGYIIDSFLVVVLGGVGQLAGSVAAAFGLGIFNKILEPQMGAVLGKILILVMIILFIQKRPQGLFALKGRVID

SEQ ID NO: 2369 - DNA, 1074 bp, Escherichia coli
atgagccaaccaatcaccttaacgctggcgcagcgcgcgccgcggcctctgcgctggctggggatcctgctggtgctggggctgctgtgtatgccattcctggcgctgctgccggcctcccatccgctggcggtgccgagctggctgctgacgctgagcggcaaaatcctctgctacgccattgtggcggtggcgctggatctggtctggggctatgcgggcatgctgtcgctggggcacgggatcttctttgccctcggcgggtacgccatggggatgtacctgatgcgccaggcggcgggcgacggtctgccggcgtttatgtcttttctctcctggagcgagctgccctggttctggtggggcacgcagcatttcgcctgggcgatggcgctggtggtgctggttcccggtctgctggccctggttttcggctggtttgcctttcgctcgaagatcaaaggggtctatttctcgatcatgacccaggccctgacctatgccggtatgctgctgttctttcgcaacgagaccgggtttggcggcaacaacggcttcaccggttttactacgctgctgggttttccggtcaccgccaccggcacccgcgccagcctgtttatggccacggttttgctgctgttgctgacgctgtggctgggcgcggcgctggcgcagagtaagtttggccggatcctcaccgcggtgcgtgacgccgaaaaccggctgatgttctgcgggtacgacccgcgcggcttcaagctgctggtgtggacgctgtcggcggtgctctgcggtctggcgggggcgttatatgtcccgcaggtggggatcatcaaccccagcgaaatgtcgccgaccaactccatcgaggccgccatctgggtggcgctcggcgggcgcggcaccctgattggcccggtgcttggcgccgggttggtcaacggtgcgaaaagcattttcaccgtggcgatgccagagtactggcagctgtttctcggcctcatcttcatcattgtgaccctgtttttaccccgcggggtgatgggcctgctgcgtcgaggagaccgctaa

SEQ ID NO: 2370 - protein, 357 aa, Escherichia coli
MSQPITLTLAQRAPRPLRWLGILLVLGLLCMPFLALLPASHPLAVPSWLLTLSGKILCYAIVAVALDLVWGYAGMLSLGHGIFFALGGYAMGMYLMRQAAGDGLPAFMSFLSWSELPWFWWGTQHFAWAMALVVLVPGLLALVFGWFAFRSKIKGVYFSIMTQALTYAGMLLFFRNETGFGGNNGFTGFTTLLGFPVTATGTRASLFMATVLLLLLTLWLGAALAQSKFGRILTAVRDAENRLMFCGYDPRGFKLLVWTLSAVLCGLAGALYVPQVGIINPSEMSPTNSIEAAIWVALGGRGTLIGPVLGAGLVNGAKSIFTVAMPEYWQLFLGLIFIIVTLFLPRGVMGLLRRGDR

SEQ ID NO: 2371 - DNA, 798 bp, Citrobacter amalonaticus
atgcaaccggatgaaggactatttacccgccagctgcccggcgatcgctttcgcgaacaaaccgatccggtgctgcagctggagaacatcaacgtcagctttgacggtttccgggcgctgacggatctgtcgctggcgataggcgtcggcgaactgcgctgtgtgatcggccccaacggggcgggcaagaccaccctgatggacgtgatcaccggcaagacccggccgcaaagcggcaaagcgctctatgaccagtcggtggatctgaccactcttgacccggtggccatcgcccgccagggcatcgggcgcaagtttcagaagccgacggtcttcgaagcgctgacggtggcggaaaatctcgccctggcgatgaagggggataaatcggtgtgggccagcctgcgcgcccggctgagcagcgaacaggacgatcggctgaatgaggtgctgcgcctgttgcgtcttgacggcgagcgctaccgccaggccggtctgctgtcccatggtcagaaacagtttcttgagatcggcatgctgctggtgcaggagccgcatctgctgctgcttgatgagccggcggccggcatgaccgatgcggaaacggagtatacggcggagctgtttcgcacgctggccggacagcactccctgatggtggtggagcacgacatgggatttgtcgagaccatcgccgaccgggtgacggtcctgcatcagggccaggtgctggcggagggatcgctgcgggaggtgcaggccaatgagcaggtcattgaagtttatctgggacgttaa

SEQ ID NO: 2372 - protein, 265 aa, Citrobacter amalonaticus
MQPDEGLFTRQLPGDRFREQTDPVLQLENINVSFDGFRALTDLSLAIGVGELRCVIGPNGAGKTTLMDVITGKTRPQSGKALYDQSVDLTTLDPVAIARQGIGRKFQKPTVFEALTVAENLALAMKGDKSVWASLRARLSSEQDDRLNEVLRLLRLDGERYRQAGLLSHGQKQFLEIGMLLVQEPHLLLLDEPAAGMTDAETEYTAELFRTLAGQHSLMVVEHDMGFVETIADRVTVLHQGQVLAEGSLREVQANEQVIEVYLGR

SEQ ID NO: 2373 - DNA, 699 bp, Enterobacter cloacae
atgttacaggtgagtcagctacatcaatactacggcggcagccatattttacgcggggtggatttttccgcccgccagggcgaagtcacctgcctgctggggcgcaatggcgtcggtaagaccacactgctgaaatgcctgatggggctgatcccggcgcgcagcggtgaggtacgctggcaggatcagaacatcacccatcgcaaaccgcaccagcgggtgcaggccggggtcgcctacgtcccccaggggcgcgagatatttccgcgcctgacggtggaagaaaacctgctgatggggctgtcgcgctttcccgcccgcgaagcgcagcaggtgccggaggagatctaccagcttttcccggtgctcaggaccatgaagcagcggcgaggcggtgacttatccggcggccagcagcagcagctggcgatcggccgcgcgctggccagccgcccacagctgctgatccttgatgaacccaccgaggggatccagccctcggtcatcaaagagattggcgaggtgatccgccagctggcgagccgcggagacatggcgatcctgctggtggagcagttctatgactttgccgccggactggcggaccactacctggtgatgtcgcgcggcgccatcgtccagcaaggcaagggtgatgatatggagagcgacggcgtgcgcgcgatggtgaccatctga

SEQ ID NO: 2374 - protein, 232 aa, Enterobacter cloacae
MLQVSQLHQYYGGSHILRGVDFSARQGEVTCLLGRNGVGKTTLLKCLMGLIPARSGEVRWQDQNITHRKPHQRVQAGVAYVPQGREIFPRLTVEENLLMGLSRFPAREAQQVPEEIYQLFPVLRTMKQRRGGDLSGGQQQQLAIGRALASRPQLLILDEPTEGIQPSVIKEIGEVIRQLASRGDMAILLVEQFYDFAAGLADHYLVMSRGAIVQQGKGDDMESDGVRAMVTI

SEQ ID NO: 2375 - DNA, 483 bp, Enterobacter cloacae
atgaacagcaacaatcaggtcaaacaattacggctgcagcgcgcctggtcccaggagcagctggccgaaatggcgggtctcagcgtccgcacgatccagcgcattgagaatggcgaacgcccggggctggagaccctcagcgccctcgccgcggtctttgaagtgacggtggccgagatcggcggcgaagcccggcgggaagacgcgccgggccaggaagcctcactggatctgcgcatagaggaagccaaagcgcgggtgcatcaggagagccgctttttccgttcgctgtcggtggcgctggtggtttgcgtgctgctggcggtgcttaaccgcttcactaatccacagtactactggtccggctgggtcgccctgatctggggcgccctgctggtggtgagaggattacgcctgttcgtgttcggcgaatggattaaaaactggcgccaggcgcgcctgcagcggctgctgcgcaaatag

SEQ ID NO: 2376 - protein, 160 aa, Enterobacter cloacae
MNSNNQVKQLRLQRAWSQEQLAEMAGLSVRTIQRIENGERPGLETLSALAAVFEVTVAEIGGEARREDAPGQEASLDLRIEEAKARVHQESRFFRSLSVALVVCVLLAVLNRFTNPQYYWSGWVALIWGALLVVRGLRLFVFGEWIKNWRQARLQRLLRK

SEQ ID NO: 2377 - DNA, 945 bp, Enterobacter cloacae
atgcacaccaaagcccgtaaagtgatgattattggcgccggcaatgtcggcgcgtcggcggcctacgccctgctcaaccagagcatttgcgaggagctgatcctcgtcgaccttaaccaacagcgcgctgaggcccacgctcaggacctgagcgacgccgcggcctacctgccggggatgatgaccatctccacccgcgaggccagcgactgcgccgatgtcgatatcgcggtgatcaccgtctccggcggcgcgctgcgccccggccagagccggctggatgaactgacctccaccgcgaagattgtgaagagcattgtgccgacgatgatggccaacggatttaacggcatctttctggtggccaccaacccctgcgacatcatcacctggcaggtatggcagctttccggcctgccgcgcagccaggtgctgggcaccggcgtctggctggataccacccgcctgcgtcgcctgctggcgcaggaactggagattggcgcccagagcatcgacgcctttatcctcggcgagcatggcgatacccagtttccggtgtggtcgcactcctcggtatatggcacgccaatcgccgacctctaccagcagcgcaccggcctgccgctcgatcgcgaggcgatggctgacaaagtgcgcaagctgggatttgagatctacgcgggtaaaggctgcaccgaatatggcgtggcagggaccatcgccgagatctgccgcaatatcttcaccggcagccaccgcgcgctggcggtctcctgcattcttgacggcgagtacggggtcagcggcgcggcggctggggtgccggcggtgctggcccagggtggcgtgaagcagatcattgaactgcagctggccggcgaagagcaggcgaagttcagccagtcgatcgcggtgatcaaggccaatatcgcccgtctgccctga

SEQ ID NO: 2378 - protein, 314 aa, Enterobacter cloacae
MHTKARKVMIIGAGNVGASAAYALLNQSICEELILVDLNQQRAEAHAQDLSDAAAYLPGMMTISTREASDCADVDIAVITVSGGALRPGQSRLDELTSTAKIVKSIVPTMMANGFNGIFLVATNPCDIITWQVWQLSGLPRSQVLGTGVWLDTTRLRRLLAQELEIGAQSIDAFILGEHGDTQFPVWSHSSVYGTPIADLYQQRTGLPLDREAMADKVRKLGFEIYAGKGCTEYGVAGTIAEICRNIFTGSHRALAVSCILDGEYGVSGAAAGVPAVLAQGGVKQIIELQLAGEEQAKFSQSIAVIKANIARLP

SEQ ID NO: 2379 - DNA, 483 bp, Enterobacter cloacae
atgtacaccatcaccgacatcgcccctaccgacgccgaatttatcgccctgattgccgccctcgacgcctggcaggagaccctctacccggcggagagcaaccacctgctggaccttagccagctgccgccgcagacggtcatcgccctggcgatccgcagcccgcagggcgaggccgttggctgcggggctattgttctcagtgaggaaggctttggcgagatgaagcgggtctatatcgatccccagcaccgcggccagcagctgggagaaaagctgctggcggcgctggaagcgaaagcgcgtcagcgcgactgccataccctgcgcctggagaccggtatccatcagcatgcggccatcgccctctacacgcgcaacggctaccagacccgctgcgcgtttgcgccgtatcaacccgatccgctcagcgtgtttatggagaaaccactgtttgccgatcttcgttcagcagcgctataa

SEQ ID NO: 2380 - protein, 160 aa, Enterobacter cloacae
MYTITDIAPTDAEFIALIAALDAWQETLYPAESNHLLDLSQLPPQTVIALAIRSPQGEAVGCGAIVLSEEGFGEMKRVYIDPQHRGQQLGEKLLAALEAKARQRDCHTLRLETGIHQHAAIALYTRNGYQTRCAFAPYQPDPLSVFMEKPLFADLRSAAL

SEQ ID NO: 2381 - DNA, 879 bp, Klebsiella michiganensis
atggacctgactcagctagagatgtttaacgctgtcgccagcaccggcagcattacccaggcggcgcagaaagtgcatcgcgtgccgtccaacctcaccacccgcatccgccagctggaggccgacctcggcgttgagctgtttatccgcgagaaccagcgcctgcgcctgtcgcctgcgggacacagctttttgcgctatagccagcagatcctcgccctggtggacgaggcgcgaatggtggtggcgggcgacgaaccccaggggctgttttctcttggttcactggagagcaccgcggcggtacggatccccagcactctggcccactttaatcagcgctacccgaaaattcatctggcgctctcaaccggcccttccgggacgatgatcgacggcgtactggagggcgccctgagcgccgcgtttgtcgacggcccgctggtgcatccgggcctggaggggctgccggtgttccctgaagagatgatgatcgtcgccccctacggccacgcacccatcacccgcgccagcgaagtgaacggggccaacgtctacgcctttcgcgccaactgttcctatcgccggcattttgagagctggtttcatgccgacagagcgaccccgggcaggatccacgagatggagtcttaccacgggatgctggcctgcgtcatcgccggcgccggcctggcgttgatcccgcgcagcatgctggagagtatgcccggccatcagcaggtttccgcctggccgctggccgaagagtggcgctggctcaccacctggctggtgtggcgccggggcgccaaaacccgccagctggaggcgtttatagcgctgctgaacgaagatcggcaaacagtggtttctccataa

SEQ ID NO: 2382 - protein, 292 aa, Klebsiella michiganensis
MDLTQLEMFNAVASTGSITQAAQKVHRVPSNLTTRIRQLEADLGVELFIRENQRLRLSPAGHSFLRYSQQILALVDEARMVVAGDEPQGLFSLGSLESTAAVRIPSTLAHFNQRYPKIHLALSTGPSGTMIDGVLEGALSAAFVDGPLVHPGLEGLPVFPEEMMIVAPYGHAPITRASEVNGANVYAFRANCSYRRHFESWFHADRATPGRIHEMESYHGMLACVIAGAGLALIPRSMLESMPGHQQVSAWPLAEEWRWLTTWLVWRRGAKTRQLEAFIALLNEDRQTVVSP

SEQ ID NO: 2383 - DNA, 1389 bp, Enterobacter cloacae
atgatgaatttatctgcaacgcacgccgtctccgtcaatccgactaccggtgaggtggtctcctcgctgccgtgggccagcgaacgcgaggtcgacgcggcgatcgcgctcgccgcggcgggctatcgccagtggcgtcagacgccgcttgccgaccgcgccgacgccctgcgccgcatcggggccgcgctgcgcgcccgcggtgaagaggtggcccagatgatcacccttgagatgggcaagccgatcgctcaggcgcgtggcgaggtggcgaaatcggccaacctctgcgactggtacgctgaacacggcccggcgatgctggcgacggaagctaccctggtggaaaataaccaggctgtaattgagtatcgtccactgggcgccatactggcggtgatgccgtggaacttcccggtctggcaggtgatgcgcggcgcggtgccgatcctgctggccggcaacagctatctgctgaagcatgccccgaacgtgatgggcagcgcccgtctgctgggcgaaatttttgccgccgccggcctgccggatggtgtatttggttgggtgaacgccaccaatgacggcgtttcgcagattatcaatgacgaccgcatcgcggcggtgaccgtcaccggcagcgtccgcgccgggaaggcgattggcgcccaggcgggcgcggcgctgaagaaatgcgtgcttgagctggggggatccgatccctttatcgtgctcaacgatgccgatctcgatgaagcggtgaaagccgccgtcaccggccgctatcagaacagcggccaggtgtgtgcggcgtcgaaacgctttattctcgaagccggcattgccgaggccttcacccgcaaatttgtcgacgccgtggcagcgctgaagatgggcgacccgcgcgacgagcaaaactacgtcggaccgatggcgcggttcgatttacgcgatgaactgcaccaacaggtaacggcgacccttgatgaaggagcgactctgctgctgggcgcggaaaaaatcgaaggggcgggcaactactatgcgccaacggtgctgggcaacgtcaccgccgggatgaccggctttcgtcaggagctgtttggtccggtagcaaccctgaccaccgctcgcgacgctgaccatgcactggccctcgccaacgacagcgagtttggcctgtccgccacggtctataccaccgacgaggcgcaggcccagcgctttgcccgcgagctggagtgcggcggcgtcttcctcaatggctactgcgccagcgacgcccgcgtggccttcggcggcgtaaagaagagcggttttggccgggagctgtcgcattttggcctgcacgagttctgtaatgtgcagaccgtctggaaagaccgtcgctaa

SEQ ID NO: 2384 - protein, 462 aa, Enterobacter cloacae
MMNLSATHAVSVNPTTGEVVSSLPWASEREVDAAIALAAAGYRQWRQTPLADRADALRRIGAALRARGEEVAQMITLEMGKPIAQARGEVAKSANLCDWYAEHGPAMLATEATLVENNQAVIEYRPLGAILAVMPWNFPVWQVMRGAVPILLAGNSYLLKHAPNVMGSARLLGEIFAAAGLPDGVFGWVNATNDGVSQIINDDRIAAVTVTGSVRAGKAIGAQAGAALKKCVLELGGSDPFIVLNDADLDEAVKAAVTGRYQNSGQVCAASKRFILEAGIAEAFTRKFVDAVAALKMGDPRDEQNYVGPMARFDLRDELHQQVTATLDEGATLLLGAEKIEGAGNYYAPTVLGNVTAGMTGFRQELFGPVATLTTARDADHALALANDSEFGLSATVYTTDEAQAQRFARELECGGVFLNGYCASDARVAFGGVKKSGFGRELSHFGLHEFCNVQTVWKDRR

SEQ ID NO: 2385 - DNA, 1188 bp, Enterobacter cloacae
atgagcacttccgtcagcactacacaactcaatttgcgcattatttcgatcgttgtttttacctgtatctgctatctctccattggtctgccgctggccgtactgccgggctatattcactatcagctgggctacagcacctttgtggccggaattgtgatcagtctgcagtacatatcgacgctgataagccggccgcacgccgggcgctataccgatatctgggggccgaaaaaagtggtcagccttgggatcgtctgctgcctgctcagtggcgccttcacgctactggcggtagccctgcaggcaacgccgatgctggccattgccgcgctgctggcgggccgggtgtttctcggcgtcggcgagagctttaccgccaccggcgccaccctgtgggggatcaaaaccgtcggcgcgatccacacgtcacgggttatctcctggaacggcgtggcgacctatgtggcgatggcggtcggggcgccgctgggagttaccctcaatcactattttggcatcagcggctttgctacggtggtagtgctggtcgcggccatcggtctgctgttcgctcgtacccgccaggacgtcaaggtgaccgccggcgccagagcgccctttcactcggtggtgcgaaaaatctggccttacggcctggggctggcctttggcaccgtcggtttcggcgttatcgccacctttatcaccctctacttcgccgcgcacagctggcagggcgccgcgtttaccctttcgctgttcagcgtcggctttatctgcgttcgcctggtgctgggaaataccattacccgctttggcggagtcccggtctccctggcctgcttcatcatcgaaagtctcggcctgctgcttatctggctggcgccatcagcatggatggccggcgtcggcgcctttctcaccggttcgggtttctcgctggtctttccggccttaggggttgaggcggtaaagcaggtggaagagcaaaatcagggaaccgccctcggcacctactcggcgtttcttgatctggcgctgggcctgaccgggccgctggccggctgggtcgccgggttctacgatctcgccacgctgtatctgctggcggcgatcgtggtggcgctcgcattcctgctgattttccgcgtacatcggcaacagcggcttgtcgccagagagtag

SEQ ID NO: 2386 - protein, 395 aa, Enterobacter cloacae
MSTSVSTTQLNLRIISIVVFTCICYLSIGLPLAVLPGYIHYQLGYSTFVAGIVISLQYISTLISRPHAGRYTDIWGPKKVVSLGIVCCLLSGAFTLLAVALQATPMLAIAALLAGRVFLGVGESFTATGATLWGIKTVGAIHTSRVISWNGVATYVAMAVGAPLGVTLNHYFGISGFATVVVLVAAIGLLFARTRQDVKVTAGARAPFHSVVRKIWPYGLGLAFGTVGFGVIATFITLYFAAHSWQGAAFTLSLFSVGFICVRLVLGNTITRFGGVPVSLACFIIESLGLLLIWLAPSAWMAGVGAFLTGSGFSLVFPALGVEAVKQVEEQNQGTALGTYSAFLDLALGLTGPLAGWVAGFYDLATLYLLAAIVVALAFLLIFRVHRQQRLVARE

SEQ ID NO: 2387 - DNA, 1158 bp, Enterobacter cloacae
atgaataaccaatcgcgccaggccttatggctggcactggctggatcgatagtactgatgatcggcatgggctacgggcgctttgccttcaccggcgtgctgccgcttatgcttaatgaaggtctgttaaccctgcacgagggcaatctcgccgcgtcggccaattacgctggctatctggtcggtgcgttgctgctggcgcgggtgcagcctggggccgccacccgactgagcattatctccgccgggttgaccatcgccagcctggcgctgctggcctgggtgagctcgccgtggaccattattacgctgcgcgccgtcgccggcgcgctgagcgcgataacgctgattgcaggttcgctgtggctgctggaacatatggggcatcatcacggggcgccgttgctgtatgccggggtggggctggggatatttatctccgcggaggggatcgcccttggacatgccctgagcctcaccagccagcagatctggctgctctgcgcattatgcgccggtctgctgctggcgctggcgatccgttggctactgactccgccggctgcactggtgagggcttcccatgttgagacctccctgcctgcgtccgggagcgatacccgtcgcgcggcgtggcgactcttgatggtttacggtctggcgggcttcggctatatcatcaccgccacttatctgccgttgtttctgtccggttcgctgcagagcgttgacccggtccatctgtgggcgctgtttggtctggcggccgcgccgtcctgcctcatctggcataagctggtgctaaagtggggataccggcaagcgctgacccgcaacctgctcttccaggcgcttggcgtgatccttccagcctgcagcgcttcattgctgttttgcgtgctaagcgcgcttttggtgggttttacctttatgggcaccgtaaccattgcgctaccgaaggcgaaaagtctcagccatcaggtgagcttcaatatgattgccgcgatgactgcactgtacggtgtgggacagattgccgggccgcttatcaccggcgcgctgtatcagatcgcggcttcatttaacccggcgctctatgccgcggcgctggcgctgctgattgccgcagggctggtctttaccgaacgccaggcttag

SEQ ID NO: 2388 - protein, 385 aa, Enterobacter cloacae
MNNQSRQALWLALAGSIVLMIGMGYGRFAFTGVLPLMLNEGLLTLHEGNLAASANYAGYLVGALLLARVQPGAATRLSIISAGLTIASLALLAWVSSPWTIITLRAVAGALSAITLIAGSLWLLEHMGHHHGAPLLYAGVGLGIFISAEGIALGHALSLTSQQIWLLCALCAGLLLALAIRWLLTPPAALVRASHVETSLPASGSDTRRAAWRLLMVYGLAGFGYIITATYLPLFLSGSLQSVDPVHLWALFGLAAAPSCLIWHKLVLKWGYRQALTRNLLFQALGVILPACSASLLFCVLSALLVGFTFMGTVTIALPKAKSLSHQVSFNMIAAMTALYGVGQIAGPLITGALYQIAASFNPALYAAALALLIAAGLVFTERQA

SEQ ID NO: 2389 - DNA, 1323 bp, Enterobacter cloacae
atggcgacgcttaccacctggatgaacaatgtgcgcgtgggaaccttaacccgccaggctaacggggcgcacagttttcgctatgacgaagagtggctgcgcagcccgcgcgccagaccgctctccctctcactgccgctgcagtatggcaatatcactgccgacgcggtgtatcactattttgataacctgctgcccgacagcccgcaggtccgcgaccggatcgtcaggcgctatcaggcgcgctcgaagcagccgttcgatctgctggccgaagtcgggcgggatagcgtaggggcggtgaccctcctgccgccgggggaagaggcgcacctggaaggattacgctggcagacgctggacgaggcgcagctcaccgctttgctgaccgcttaccagtcggatatccccctcgggatgattaccagccaggacgatttccgtatctcggtggccggcgcccaggagaaaacggcgctgctgcggatgggcgagcagtggtgtattccgcagggcgccacgccgaccacgcatatcattaagctgcccatcggcgagatcaagcagcccaatgcgacgctggatctgcgtgaaagcgtggataatgagtatctgtgcctggcgctggccagagaactgggcctggcggtgccggaagcggagatcatcaccaccccgcggatccgcgccctggcggtaacccgcttcgaccggcgctgggcgcaggagggacgggtgctgctgcgtctgccgcaggaggatctgtgtcaggcttttggtcttccttcagcgatgaaatatgagtctgacggcgggccgggtatcgccgcgatcatgacctttctgctgggctcgagtgaagcgctgaaagatcgctatgactttatgaagttcatggtcttccagtggctgacgggggcgacggacggtcacgcaaaaaacttctcaatttacctgttgcccggcggcagctaccgcttaacaccgttctacgacattatttcggcgtttccggtgctgggcggcacgggactgcatctgcgcgatctgaagctgtcgatggggctcaatgccacaaaagggcgtaaaacagagattaacgccatctatccgcgtcattttctggcgacggccaaagcggtgaactttccccgggagcagatgctggcgatcctccaggagtttgccgggcatgtgccgcaggcaatcgaaagcgctcgccggacgctgccggcggacttttccagccacgtctggcaggccattacagagaacatgctgaagctgcacgcccgcctgcagcaagggctgcaggcgctatag

SEQ ID NO: 2390 - protein, 440 aa, Enterobacter cloacae
MATLTTWMNNVRVGTLTRQANGAHSFRYDEEWLRSPRARPLSLSLPLQYGNITADAVYHYFDNLLPDSPQVRDRIVRRYQARSKQPFDLLAEVGRDSVGAVTLLPPGEEAHLEGLRWQTLDEAQLTALLTAYQSDIPLGMITSQDDFRISVAGAQEKTALLRMGEQWCIPQGATPTTHIIKLPIGEIKQPNATLDLRESVDNEYLCLALARELGLAVPEAEIITTPRIRALAVTRFDRRWAQEGRVLLRLPQEDLCQAFGLPSAMKYESDGGPGIAAIMTFLLGSSEALKDRYDFMKFMVFQWLTGATDGHAKNFSIYLLPGGSYRLTPFYDIISAFPVLGGTGLHLRDLKLSMGLNATKGRKTEINAIYPRHFLATAKAVNFPREQMLAILQEFAGHVPQAIESARRTLPADFSSHVWQAITENMLKLHARLQQGLQAL

SEQ ID NO: 2391 - DNA, 1293 bp, Enterobacter cloacae
gtggcgctggcaggcgcggcgctcatcgccgctggcatgctgttcagctgcaccagtaaagcccctaaatcccttgtcacgccgccgaacgctgccgccgtcaaagccgggcaggcgcaccgggagccggtgcgcggcgtgtggctcaccaccgtttcgcgccttgactggccgccggtcgggtcgattatcgccagcacgccggagagccgcatcacgcagcagaagctggcgctgatcgctaaactcgataacctgcagcgcctggggatcaacaccgtctttttccaggtgaaaccggacggtacggcgctctggcggtcggatattctgccgtggtccgatatgctgaccggcaaaatcggcgaataccctggctacgatccgctgcagtttatgctggatgaagcgcacaagcgcggcatgaaggttcacgcgtggtttaacccctatcgcgtctcggtcaacaccaaaccgtcgacgattgccgagctgaacaacaccctcacccaggtaccggccagcgtgttcgtcctgcaccgtaactggatccgcaccgccagcgatcgctttgttctcgacccgggcattcccgaagcgcgtgactggatcaccagcatcgtcgctgaagtggtgcagaactacccgattgacggcgtgcagttcgatgactatttctataccgaaaccgcctcttccccgcttaacgacaacgagactttccgccgttacgggcagggctatgcctcgaagggcgactggcggcggcataacacccagcagctcatagcccaggtttccaccaccatcaaaaagctcaatccgaacgtcgagtttggcgtgagcccggccggggtgtggcgcaaccgctcccacgatccggcggggtccgatacccggggcgcggccgcctatgatgagtcctatgccgatacccgcagctgggtgcagcagggactgctcgactacatcgcgccgcagatctactggccgtttgcccgcgatgccgcgcgctatgatgtgctggccaactggtgggccgaggtggttaaaccgacgcatacccggctgtatatcggcgtggcgctgtacaaggtgggtgaaccgtccaaaaatgagcctgactggacggtggatggcggcgtgccggagctgaaaaagcagctcgatctcaatgagactctgccgcagatccagggcaccatcctgttccgcgaaaacaacctcaatcagccgcaaacccggcaggcggttaactatttgcgcagccgctggggtcagccgcagagctag

SEQ ID NO: 2392 - protein, 430 aa, Enterobacter cloacae
MALAGAALIAAGMLFSCTSKAPKSLVTPPNAAAVKAGQAHREPVRGVWLTTVSRLDWPPVGSIIASTPESRITQQKLALIAKLDNLQRLGINTVFFQVKPDGTALWRSDILPWSDMLTGKIGEYPGYDPLQFMLDEAHKRGMKVHAWFNPYRVSVNTKPSTIAELNNTLTQVPASVFVLHRNWIRTASDRFVLDPGIPEARDWITSIVAEVVQNYPIDGVQFDDYFYTETASSPLNDNETFRRYGQGYASKGDWRRHNTQQLIAQVSTTIKKLNPNVEFGVSPAGVWRNRSHDPAGSDTRGAAAYDESYADTRSWVQQGLLDYIAPQIYWPFARDAARYDVLANWWAEVVKPTHTRLYIGVALYKVGEPSKNEPDWTVDGGVPELKKQLDLNETLPQIQGTILFRENNLNQPQTRQAVNYLRSRWGQPQS

SEQ ID NO: 2393 - DNA, 783 bp, Enterobacter cloacae
atgccatcaataatcattaaaaccgccgacgaactcgcccggcagcgccatgccggccagctgctggcgtcagtgtttgatatgctggatacttttatcgttcccggcgtaacgacgatggcgattaacgatcgagtggaagattttatcgtcaaccagctgcacgcccgcccggccagcaaggggcaatacgattttccctatgtgttgaacacttccattaacgatgtggtgtgccacgggatccccaaagcgaccgaacatctgcgctccgggatgattgttaacgtcgatatcaccctcgagaaagcgggcatgattgccgactccagtaagatgtacctgataggcgatgtctccccgctggcccgccggctggtaaagactacctatgaagcgatgtggaaaggcattgaggtggtgaagcctggcgcgacgctgggcgatattggccacgctattcagcgctgggtggaggaacatggctatagcgtggtcagagaatattgcggtcacggcatcggtcaggaaatgcatgaggaaccgcaggtgctgcattacggccgccccggagaaggcgccgtgctgcaggaaggcatggtgttcaccattgagccgatggtcaaccagggcgacagccgtatcaaaaccaaaaaagatggctggacggtggttacccgcgataaaaaactctccgcgcaatgggagcacaccgtggccgtcaccgccaacggttttgaggtgctgacgttacgcgacgatgaacagtcgcggatccgctga

SEQ ID NO: 2394 - protein, 260 aa, Enterobacter cloacae
MPSIIIKTADELARQRHAGQLLASVFDMLDTFIVPGVTTMAINDRVEDFIVNQLHARPASKGQYDFPYVLNTSINDVVCHGIPKATEHLRSGMIVNVDITLEKAGMIADSSKMYLIGDVSPLARRLVKTTYEAMWKGIEVVKPGATLGDIGHAIQRWVEEHGYSVVREYCGHGIGQEMHEEPQVLHYGRPGEGAVLQEGMVFTIEPMVNQGDSRIKTKKDGWTVVTRDKKLSAQWEHTVAVTANGFEVLTLRDDEQSRIR

SEQ ID NO: 2395 - DNA, 219 bp, Klebsiella pneumoniae
atgggaatcgtcaaaatctccgatctgctgcacgatgatattcgtgatgccagcaaagccatgtcccgctccgtcaatgcccaggcggaatactggatccgtctgggcatgatgagcgaactctaccctgagcttaaccaccagcagatcaaactgctgatgctgaaatccggctctgaccgtctgctggaggtgatcaatgccatcaataatcattaa

SEQ ID NO: 2396 - protein, 72 aa, Klebsiella pneumoniae
MGIVKISDLLHDDIRDASKAMSRSVNAQAEYWIRLGMMSELYPELNHQQIKLLMLKSGSDRLLEVINAINNH

SEQ ID NO: 2397 - DNA, 249 bp, Enterobacter cloacae
atgttgcgtgattatttaaaagtggaaaaagaagaccagcttgttgaacaacagagtcggcatgacaatagccagcattattcttcggtgaccgaatgggttattttaagtaaagatggccagcgcaaaggccgggtatccctgtttgaccgcttcaccacccgccgctcctggagcgacagtttccgcattacgcagttcgataatgcgggtaaagtggtggtggataaactcactgacgcgctgtaa

SEQ ID NO: 2398 - protein, 82 aa, Enterobacter cloacae
MLRDYLKVEKEDQLVEQQSRHDNSQHYSSVTEWVILSKDGQRKGRVSLFDRFTTRRSWSDSFRITQFDNAGKVVVDKLTDAL

SEQ ID NO: 2399 - DNA, 1656 bp, Enterobacter cloacae
atgagtaacgatcacctgacggatattgcctatcgccactttattgaaagcgttaaagattatgccatctatatgctgagcgccgacggcacggtcattagctggaatgagggcgcccgccgggcaaaagggtacctgagcgacgagatcatcggtcgctacttcggtctcttctatagcgaagctgagcaactctccggtgtacccgcaaaaaacctggaaatcgccctgcgtagcgggcagtttgaaggggaaggctggcggtatcgcaaagacgggtcccgattctgggcgcatgtcatgatcgataccatccgcgatgagcagaacaccctgctgggttttgccaaaattacccgcgacattagtgaacagaaggcgattaacgaccgcatcgcctggatggcgcgctacgatgcgttaaccggtttacccaatcgggtggagttttttgaacgggtggagaagctgatcactggaaatgatgcccgccgctttgccattttcacgatcgatttagacaaatttaaagagattaacgatctgcagggccatctgattggtgaccagctgctgcagcgcgtggcgggcgccgtgctcaaaacgctgcagaaggaggagatggtcgcccgcttcggcggcgatgagtttgtggccgttaaacctttttccgatgagggtgaagtggatgcctttgctgcgcgcctgtggcactgcttcagcggtaagcagacgtttgccgcgacggaagtggttctctccgccagcattggcatctcagtctacccggaggacggcacggatattaatacgatactgagcaattccgatctggctatgtatcgggcaaaaagcagcctcgaccataagatttgctggtatgaacgtgaaatggatgacaagacgcggcagcgcaatatgatggccgccgatatccggcgcggtattcacgccggggagttttcgctccactatcaggctatccgcaacatcaaagatcgtagcatcaccggttacgaggcgctgctgcgctggcagcatccgcagctggggacgatcccgccggacgtgtttattcccatcgccgaagagagcggcgctatcgtgcccttaggttactgggtgctcgagcaggtgtgtaacgaatcgctggaaaatggtttgaacagaaaagtttcggtcaatatctctccggtgcagttgcgccatcgtagctttatcgaaaaagtccgcgagatcctgatgcgtaccgcctacccggtcagtctgctggagtttgaggtcaccgaaacggcgtttgtgatcaataaacagctggcgttcagcgttctgcatcatctgcaaaaaatggggatcagtattgcgctggatgactttggcaccggttactcctccctgagcatgctgcgcgattttcatttcgacgtcatcaaactcgaccgcagctttatgacagatgtggagagcaaccctcaggtacgctcattcgtgcgagccattatttcgctgggcaattcgatcaatacgccgcttatcgccgagggggtggaaacggctggacaactgcagatcctcgaagaggagggatgtgacgagatgcagggatttctgttcggcgagccggtcgatatcaaacacctgcccgaccggcgctga

SEQ ID NO: 2400 - protein, 551 aa, Enterobacter cloacae
MSNDHLTDIAYRHFIESVKDYAIYMLSADGTVISWNEGARRAKGYLSDEIIGRYFGLFYSEAEQLSGVPAKNLEIALRSGQFEGEGWRYRKDGSRFWAHVMIDTIRDEQNTLLGFAKITRDISEQKAINDRIAWMARYDALTGLPNRVEFFERVEKLITGNDARRFAIFTIDLDKFKEINDLQGHLIGDQLLQRVAGAVLKTLQKEEMVARFGGDEFVAVKPFSDEGEVDAFAARLWHCFSGKQTFAATEVVLSASIGISVYPEDGTDINTILSNSDLAMYRAKSSLDHKICWYEREMDDKTRQRNMMAADIRRGIHAGEFSLHYQAIRNIKDRSITGYEALLRWQHPQLGTIPPDVFIPIAEESGAIVPLGYWVLEQVCNESLENGLNRKVSVNISPVQLRHRSFIEKVREILMRTAYPVSLLEFEVTETAFVINKQLAFSVLHHLQKMGISIALDDFGTGYSSLSMLRDFHFDVIKLDRSFMTDVESNPQVRSFVRAIISLGNSINTPLIAEGVETAGQLQILEEEGCDEMQGFLFGEPVDIKHLPDRR

SEQ ID NO: 2401 - DNA, 1212 bp, Enterobacter cloacae
atgctaaccaccatcatttatcgcagccatatctgcgacaatgtctcattcaaatcgatcgaggccatggtcgccagggcaaacgaaagaaatgggcaggcggacgtcaccggtattttactttttaacgggacgcatttttttcaactcattgaggggcctgaagaaaaggttcaggatatttatcagcatatctgccgggatcctcgccactataatctggtggagttgctttgcgattatgcgccgtcccgtcgttttggtaaggtcgggatggaactgtttgatttacgcgaacacgatcgcgaggaagttctgcaggcggtgatggaccgggggacgtcaaaatatcagctcacctatgatgaccgggcgctgcaatttttccgtacttttgtcgaagccacagaaaaagcgaactattttgagattccttccgcagatagttgggtttttattcctgataaggagacgttctatcctgataccccgattatcgataatacggaaggttgttcctttgccttccagccgattgtcgaccctttcgcctgcgaaattatttcgtgggaagcgctgttgcgtacaccggacgggcaatcccccggcgcctattttgccgggctgaccggggacgatatttatctcgccgacctgcacagtaaacgggtggcgttgtcgctggcgggaaaattaggtttacgtaataaggcgttaagcattaatttactgccgatgaccatggtcaaagcgccgaatgcggtggctttcctgctcgacgaaattagtcgcaatgaccttattccggagcagattattgtcgagttcactgagcgggaagtgatttcgcggatggacgattttaccgatgcggtgcgcaaactgaagggcgcgggaattaatcttgccatcgatcacttcggcgccgggtttgccgggctatcgctgctggcgcaataccaacccgacagaattaaaatcgaccatgagctgatccgcaatatccaccaggacggaccgcgccagtcgattgtacaggcgattatcaaatgctgtacttctctggagattgcggtctcagccgtcggcgttgagcgtgctgaagagtggatgtggctggaatcagccggtatttcacagtttcagggcaatttgttcgccagcgcgcgcctggggggcctacccgccgtcgcatggccggagaaaaaatga

SEQ ID NO: 2402 - protein, 403 aa, Enterobacter cloacae
MLTTIIYRSHICDNVSFKSIEAMVARANERNGQADVTGILLFNGTHFFQLIEGPEEKVQDIYQHICRDPRHYNLVELLCDYAPSRRFGKVGMELFDLREHDREEVLQAVMDRGTSKYQLTYDDRALQFFRTFVEATEKANYFEIPSADSWVFIPDKETFYPDTPIIDNTEGCSFAFQPIVDPFACEIISWEALLRTPDGQSPGAYFAGLTGDDIYLADLHSKRVALSLAGKLGLRNKALSINLLPMTMVKAPNAVAFLLDEISRNDLIPEQIIVEFTEREVISRMDDFTDAVRKLKGAGINLAIDHFGAGFAGLSLLAQYQPDRIKIDHELIRNIHQDGPRQSIVQAIIKCCTSLEIAVSAVGVERAEEWMWLESAGISQFQGNLFASARLGGLPAVAWPEKK

SEQ ID NO: 2403 - DNA, 408 bp, Enterobacter cloacae
atggccttcgcgccagctcgcgttgcccccgccgtggcgcaacgacttcagatcccggtacaggtacttctctacgtcgggttattcatcttcgcacaatatctggtgaacaggtggcaggtaccgctgccggctaacctggtcggcatggtgatgctcctgctgctgatcgtctgccgggtgataccggtaagctgggtgcgcgccggcgcccgctggctgctggcggagatgctgctgtttttcgtcccggcggtggtcgcggtggtgaactacgcccagctgttgatggtcgatggttggcggatatttctggtgattgccttaagcacgctgatggtgctcggcgccaccgcctgggtcgttgacaaggtctatcgttacgaagtgggcaggttaaaaaaatga

SEQ ID NO: 2404 - protein, 135 aa, Enterobacter cloacae
MAFAPARVAPAVAQRLQIPVQVLLYVGLFIFAQYLVNRWQVPLPANLVGMVMLLLLIVCRVIPVSWVRAGARWLLAEMLLFFVPAVVAVVNYAQLLMVDGWRIFLVIALSTLMVLGATAWVVDKVYRYEVGRLKK

SEQ ID NO: 2405 - DNA, 1098 bp, Enterobacter cloacae
atgaaaaaactgatcttattgctcatattggcactgtgtcccgtctatagctgggcggcctgcacgggaaccaactatggcgatgtctcgatgaccaacctgccggaaaagatcctggtcaatgccgggagctataccgcagggacggtactgtatgactcggggaagattacgcgctcgcaaacggaattgcttaactgtgaggggagcacctacgcggtttttgcctggtcctcgaacaatgccggggcactgataggggataatatctatgccacctcggtgcaggggatcggtatccgcgtcaaggtgtggctcaatatcagcggtgaatatggcgatgacaccgatgatttcagccccgactcgcaggtgcattatattggtgatgtgaattattacctcggaaagccgacaggtcttttcgactctttcgcgtcgactcattataccccggcgtatcagctgcagctggtggccaccggcggcgccatcgccagcaagagtcaattatcgttcagcgacccggtggccacggtatcggccaaggataaaaaggggaccatcgctatttcacaactgcacatcagcggcaccaccagcatccagctaatcccgatggggtgtattgtcggtagcaataatctcagtttttccatgggcagcatcaatgccagtgagtttaataccgcgacgaaggtgggtagcgcgcggcagtctctgagcctctcctgcgagccgggaactaacgtttcgatgcgtgtggcggctgcttctgcaagcggggataaccctgacaatacggtgatggccctcacggcggaacagaatgccgccactggcgtgggagtgcagttaaatttgaatggcaaagcactgccgttaaataccgatatcagcctctatacttcgagccgcgcgacggtgaccaacagcggcgcggataccagctacagctatttcaccaaccccgacagccccggaggcgcagcggccatgcagacgctcgccttatccactaactattacaggacggggagcgcggtgaccgcggggacagccaacgccaccggggtgatcacctttacttataactga

SEQ ID NO: 2406 - protein, 365 aa, Enterobacter cloacae
MKKLILLLILALCPVYSWAACTGTNYGDVSMTNLPEKILVNAGSYTAGTVLYDSGKITRSQTELLNCEGSTYAVFAWSSNNAGALIGDNIYATSVQGIGIRVKVWLNISGEYGDDTDDFSPDSQVHYIGDVNYYLGKPTGLFDSFASTHYTPAYQLQLVATGGAIASKSQLSFSDPVATVSAKDKKGTIAISQLHISGTTSIQLIPMGCIVGSNNLSFSMGSINASEFNTATKVGSARQSLSLSCEPGTNVSMRVAAASASGDNPDNTVMALTAEQNAATGVGVQLNLNGKALPLNTDISLYTSSRATVTNSGADTSYSYFTNPDSPGGAAAMQTLALSTNYYRTGSAVTAGTANATGVITFTYN

SEQ ID NO: 2407 - DNA, 1008 bp, Enterobacter cloacae
atgatctgcaaacgttttgccctggtaggcagtggttttatcggtcaggttcatgccgccagtcttgctcgtcatgaaggaagtgcgttgacgatggtggccgatgccgccccggagcgcgcccaggcgctggccgcccgctatggcgcccgggcggtgaccgtgagcgaggcgatccatagcgacgccatcgacgcggtgctgatcgccagttcaaccccgtcgcatgccgaactgctggaagccgccgccagggcgggcaaggcggtctattgcgaaaaaccgatcgacctcaccctggcgcgcgcccgtgaggtggtggagcgggtgctccccctgaacgtgccggtcactgtcggctttaaccggcgcttcgatagcagccatcagcagctccgccgccagctggagcaagggctgatcggccgggtcgagctggtgcagatggtctgccgcgcctccagcatgccgccgctcgactatctgcgcagctccggcggccagatgcgcgatcaggcgatccacttcttcgatctcctgcgctttctcactggcgatgaagtgcgcaccgtagcagcgatgggcgcggcgctggccctgccggacattgccgaatttggcgatgtcgacacctccatcctgatgatgcagatgcgcggcggcgcgctggcgcagctggacaatacccgccgcaccggccacgggtacgatgaacggatcaccctgctgggcgccgaaggcgcgctggagtccggtagccagtcgccggcgggccctaccctgtggcgcggcaatcagcgcattgagccgggcctgtggccggactggttcagccgggtacagggatcttattaccagcatcttgacgcctttattcgctccctgaatggtgaaaccgtcgccgacctgcccggcctgctggacggcctgcaggcgcaggccattgccgaagcggcagttcagtccctgcagcatggccagtttgtcgccgtcgacgactgtcgctga

SEQ ID NO: 2408 - protein, 335 aa, Enterobacter cloacae
MICKRFALVGSGFIGQVHAASLARHEGSALTMVADAAPERAQALAARYGARAVTVSEAIHSDAIDAVLIASSTPSHAELLEAAARAGKAVYCEKPIDLTLARAREVVERVLPLNVPVTVGFNRRFDSSHQQLRRQLEQGLIGRVELVQMVCRASSMPPLDYLRSSGGQMRDQAIHFFDLLRFLTGDEVRTVAAMGAALALPDIAEFGDVDTSILMMQMRGGALAQLDNTRRTGHGYDERITLLGAEGALESGSQSPAGPTLWRGNQRIEPGLWPDWFSRVQGSYYQHLDAFIRSLNGETVADLPGLLDGLQAQAIAEAAVQSLQHGQFVAVDDCR

SEQ ID NO: 2409 - DNA, 1035 bp, Enterobacter cloacae
atgaagagaggggcgatgaaaaacatttcactggcgatgctggccagacagattggcgtcggcgtggccaccgttgaccgggtgctgaacgagcgcggcggcgtatcgccgcagaccacgcgcaaagtgctgcaggcggcgcgcgaggcggggctgaagcggatcctgccggaggagcaccgctttccctggcagattgaggtctttctcagcagcaatgactcgttcttctttccgcagctggcgcaggattttgccgccgtggcggatagcctcggctatcgccgtctgaccttgcaccgcacctttgtcccggagtcgcagccaacgacgctggcccggcgcattgcgcgcagctgccagcagcgtcaagggatcatcgtcttcggcaatgaccatcccgcggtgcacgacgcgctgcaccgctgccgggaggctggcgtcccggcgatcaccctggcgacggacctgcccggcgccgaccgactctgccacgtggggatcaatcagctacaggctggccgcacggcggggttaatgctggggagaatgacgccgcggcccggcgaggtgctgatggtcagcggccggcaagattacagcgcgcatcgcctgcgcattcaggggttccgcgaggtgctgagccagcgctttccccacctgcagctcagcgacgtgctggcgggcgaggagcggcgggagcagatcacccgcctggtggagcaagccctgtgccgcagccggaatattgttgggatctataacaccgggcttggcaatacccagattgccgaggcgctggcccgccaccgccgcgaaggcgacgtctgctggatcacccatgagcgttacaacaccacccggcagcagctggcgaagggcagcctggcgttaacgctcgatcagaacacccgccagcacgcccagctggcgatcgacctgatgctgcgccatctggagtccggctaccagccgcaaacctatgccgacggtaaagtcgactttatcctctacagcgccgagaacgtggactaa

SEQ ID NO: 2410 - protein, 344 aa, Enterobacter cloacae
MKRGAMKNISLAMLARQIGVGVATVDRVLNERGGVSPQTTRKVLQAAREAGLKRILPEEHRFPWQIEVFLSSNDSFFFPQLAQDFAAVADSLGYRRLTLHRTFVPESQPTTLARRIARSCQQRQGIIVFGNDHPAVHDALHRCREAGVPAITLATDLPGADRLCHVGINQLQAGRTAGLMLGRMTPRPGEVLMVSGRQDYSAHRLRIQGFREVLSQRFPHLQLSDVLAGEERREQITRLVEQALCRSRNIVGIYNTGLGNTQIAEALARHRREGDVCWITHERYNTTRQQLAKGSLALTLDQNTRQHAQLAIDLMLRHLESGYQPQTYADGKVDFILYSAENVD

SEQ ID NO: 2411 - DNA, 924 bp, Enterobacter cloacae
atgaatattaagaaaacgattgttgcctctttgttagcctgcatgctgcctgcggtggttatggcaaaagatgtctccattggcgtctcgatggcgctgtttgacgataacttcctgacgatcctgcgtacctcgatgcaaaaagagatgaaaaaagatggcgttaaatcgcagatcgaggacgcgaaaggggatgtctcccagcagctgcagcaggtacagaactttatcggccagggggtggacgccattatcgtcaacccggtggataccaacgcggtgaaaccgatcatggatcaggccaccaaagccgggatcccgctggtgtttgtgaaccgccgtccgcaggcggagctgaccgacaagatggcctatgtgggatcggactccattctcgccggccgtctgcagatggaagcgctggcgaaagcgatgaacggtaagggcaatgtggcgatcctgctcggcgacctggcgaatgaatccactcgcgaccgcaccaaaggggtggaagaggtggtagcgaaatacccgaacatcaaaatcgtccagaagcagaccgcgaaatttacccgcaatgacgcagtggatgtggtcagcaactggatgaccagcggtgaggatatccaggccatcgcctccaacaacgatgaaatggcgatcggcgccctgcaggcgctgggcaaaaacccgaaccatattctcatcgccggcgtggatggcaccccggatgccctgcagatgctgaagagcggcaagatgatcgccaccatcttccaggatgcgaaaggccagggtgaaggcgcagtagacgcggccatcaagctggcgaacggcgagaaagtggaaaaaatcatcgacgtgccgtatcagctgatcaccaaagagaacatggctgaatttaccaaccgtaatcagaaatag

SEQ ID NO: 2412 - protein, 307 aa, Enterobacter cloacae
MNIKKTIVASLLACMLPAVVMAKDVSIGVSMALFDDNFLTILRTSMQKEMKKDGVKSQIEDAKGDVSQQLQQVQNFIGQGVDAIIVNPVDTNAVKPIMDQATKAGIPLVFVNRRPQAELTDKMAYVGSDSILAGRLQMEALAKAMNGKGNVAILLGDLANESTRDRTKGVEEVVAKYPNIKIVQKQTAKFTRNDAVDVVSNWMTSGEDIQAIASNNDEMAIGALQALGKNPNHILIAGVDGTPDALQMLKSGKMIATIFQDAKGQGEGAVDAAIKLANGEKVEKIIDVPYQLITKENMAEFTNRNQK

SEQ ID NO: 2413 - DNA, 1485 bp, Enterobacter cloacae
atgaacgcttttgcccttgaagccgaaggtatcagtaagttcttccccggcgtgaaggcgctcgataatgtctcattgcgcgtgcgtccgggaacggtgcatgccctgatgggcgagaacggcgccggtaaatccacgctgatgaaatgcctgatcggtatctatcgccccgataaagggtcgattcgcgtgaaaggggagccggtggagtttaccgacaccatggatgcgctgcgctcggggatctcgatgatccaccaggagctcaatctggtgccgcatatgacggtggcggagaatatctggctggggcgcgagccgatgaaatacggctttgtcgaccacggccagctgacccgccagacccaggcgctgctggataagctcaatatccgcttaaccgctgaccggctggtgggcgacctgagcatcgccgcccagcagatggtggagattgccaaagcggtttcatggaacgcggatatcgtgatcatggatgagcccacctcggcgctgaccgaaggcgaggtggctcacctgttcaccatcatccgcgacctgcgcgcccagggtaaagcgatcatctatatcagccacaaaatggatgagatctttgccatcaccgatgagatcagcgtctttcgcgacggcacctgggtagggagcaaaaacaccaccgaatttacccggcagtcgctgatcacccagatggtgggccgcgaattaacccagctgtttccgaaatttaataacaccatcggcgaagaggtgctgacggtgcgcaacctgacgcgtcagggcgtgttccatgacgtcagctttagcgtacgccgtggcgaaatcctgggcgtggccgggctggtgggcgccgggcgcagcgaggtgatggaaagcctgttcggtatggagcgcttcgacagcggcgaagtgctgatcgacggggcgccggtgaccatcgattccccctccgtggcgattgaaaaggggatggcattattaaccgaagaccggaaaaagtcgggcctgtttctggtgctgtcggtgctggaaaatatgagtatcgtcaaaatgccggaatatatcggcaagagcggttttgtccagcacgtgaaaatggccgaagactgcatggagcaaatacgccggctcaatattaaaacgccgacgatggatcaaattattaataacctcagcggggggaatcagcaaaaagtcctgattgcgcgctggctgttagcgcaaccgaaaatcttaattctcgatgagccgacccgcggtatcgacgtcggggcgaaggcggagatttatcatcttatcagtgaactggcgaatcggggggtggcggtgattatggtctcctctgaactgccggaaatccttggcatgagcgatcgggtcatggtgatgcatgaaggtcgtatcaccggcatcctggaaaaagacgaagccgaccaggaaaccattttgtcgttggcatcccattga

SEQ ID NO: 2414 - protein, 494 aa, Enterobacter cloacae
MNAFALEAEGISKFFPGVKALDNVSLRVRPGTVHALMGENGAGKSTLMKCLIGIYRPDKGSIRVKGEPVEFTDTMDALRSGISMIHQELNLVPHMTVAENIWLGREPMKYGFVDHGQLTRQTQALLDKLNIRLTADRLVGDLSIAAQQMVEIAKAVSWNADIVIMDEPTSALTEGEVAHLFTIIRDLRAQGKAIIYISHKMDEIFAITDEISVFRDGTWVGSKNTTEFTRQSLITQMVGRELTQLFPKFNNTIGEEVLTVRNLTRQGVFHDVSFSVRRGEILGVAGLVGAGRSEVMESLFGMERFDSGEVLIDGAPVTIDSPSVAIEKGMALLTEDRKKSGLFLVLSVLENMSIVKMPEYIGKSGFVQHVKMAEDCMEQIRRLNIKTPTMDQIINNLSGGNQQKVLIARWLLAQPKILILDEPTRGIDVGAKAEIYHLISELANRGVAVIMVSSELPEILGMSDRVMVMHEGRITGILEKDEADQETILSLASH

SEQ ID NO: 2415 - DNA, 1032 bp, Enterobacter cloacae
atgagtaatatgaaattaacggcggctccggccagcgagggttcctccttcttcgctaatttgcggcataaaatgccgaaagataccggcatctttgtggtgatgctggtgattgccctgacctttgaaatcgccggctggtatgttcgcgaccagtcgttcctgctcaataccaaccggctggtgctgattgtgctgcaggtggcgattatcggcatcatcgccgtgggcgtcacccaggtgatcatcaccaccgggattgacctctcctccggctcggttattgcccttgcggcggtggtggcggccagcctggcgcaaacctccgatagcctgtcgccaatgttcccggcgctggtcaacctgccggcggtgatccccatttgcgcggggatcggcgtcggcctgctgtgcggcctgaccaacggtttcctggtgacgcggaccggtatcccgccgtttatcgccaccctcgggatgatggtttcggcgcgcggtctggcgcagtattacactcagggcaacccgatcagcttcctctccgacagctttacggcgataggccagggtgcgatgccggtgattatcttcttcgtgatcgccgccgtgtttcacattgcgctgaagcatacccggtatggcaaatatgtgtatgccatcggcggcaacatgacctcggccaaagtgtccggcatcaatgtgaataaatatctggtgatcgtctacaccatcgccggggcgctctccgggctggcgggggtggtgctggcggcgcgcgtcagcagcggccagtcgagcatggggatgtcctacgagctggacgctattgccgccgcggtgatcggcggcagcagcttaatgggcggagtggggcgcattaccggcaccctgattggcgcgatgatccttggcctgatcaaaagcggttttacctttgtcggcgtcgatgcctatgtgcaggatattattaaaggcatcattatcgttgcggcggtaaccatcgatatgcgtcgcaaccggaaaaaacactaa

SEQ ID NO: 2416 - protein, 343 aa, Enterobacter cloacae
MSNMKLTAAPASEGSSFFANLRHKMPKDTGIFVVMLVIALTFEIAGWYVRDQSFLLNTNRLVLIVLQVAIIGIIAVGVTQVIITTGIDLSSGSVIALAAVVAASLAQTSDSLSPMFPALVNLPAVIPICAGIGVGLLCGLTNGFLVTRTGIPPFIATLGMMVSARGLAQYYTQGNPISFLSDSFTAIGQGAMPVIIFFVIAAVFHIALKHTRYGKYVYAIGGNMTSAKVSGINVNKYLVIVYTIAGALSGLAGVVLAARVSSGQSSMGMSYELDAIAAAVIGGSSLMGGVGRITGTLIGAMILGLIKSGFTFVGVDAYVQDIIKGIIIVAAVTIDMRRNRKKH

SEQ ID NO: 2417 - DNA, 798 bp, Enterobacter cloacae
atgagcgaccagacattatccgggctgtcgctgtctcacttcagcgccggctaccccagacgcaaggtgatcgagaacctgacggttccccatctgccgcgagggaaaatcaccgcgctgctggggccaaacggcagcggtaaatcaacgttaatgcgggcgatggcgggtctgggcccctgccgcggcgagctgctgctggagggggaaaatctgctgacgcagccgttctcacgtcgcgcagagcaggtggtctatcttccgcagacgctgcccgccggcgtgcatctgcatgtgctggagtcgattatcgttgcccagcgcgccgccggaggacgccacagtccgcagcgccaggaggaagtgatggcgctgctgcgacagctggggattgcccatctggcgatgagctacctcgatcagctctccggcgggcaaaagcagctggtgggtctcgcccagtcgctgatccgccagccgcgcctgctgctgctcgacgaaccgctcagcgcccttgacctcaactaccagtttcacgtgatggatctggtgcgccgggagacccggcggcgcaacatcgtgaccctggtggtggtgcacgacatcaatattgccctgcgtcacgccgaccacgtgctgatgctcaaggcgggccagctgctcggcgacggcaccccggccgcggtcatcacccccgagactctggcggccgtctatggggtgcgcgggcgtattgaaccctgttcgcagggggtgcggcaggtgattattgacggcctggtggacagcgaggcctga

SEQ ID NO: 2418 - protein, 265 aa, Enterobacter cloacae
MSDQTLSGLSLSHFSAGYPRRKVIENLTVPHLPRGKITALLGPNGSGKSTLMRAMAGLGPCRGELLLEGENLLTQPFSRRAEQVVYLPQTLPAGVHLHVLESIIVAQRAAGGRHSPQRQEEVMALLRQLGIAHLAMSYLDQLSGGQKQLVGLAQSLIRQPRLLLLDEPLSALDLNYQFHVMDLVRRETRRRNIVTLVVVHDINIALRHADHVLMLKAGQLLGDGTPAAVITPETLAAVYGVRGRIEPCSQGVRQVIIDGLVDSEA

SEQ ID NO: 2419 - DNA, 1083 bp, Enterobacter cloacae
atgcgtttaacctccgactccgtgctcgacgggctgcccgccgggacctctggcatgatgaatgattatcgccgtatcgtgcgtcgccgtctgctgctgatcctcctgctggcgctgttgattgtcgcgtcgctgctgctcgattttatgctcggcccctccggtctgccgctgcagagcctgtggcagacgttaaccgatccggccagcgccgatccgggcacgcgcgccatcgtctgggatatccgcctgccctatgcggtgatggcgattatcgtcggtctggcgctgggactggccggcgccgaaatgcagaccatcctcaataacccgctggccagcccgtttaccctcggcgtctcctcggctgcggcgtttggcgccgcgctggcgattgtgctcggtattggcctgcccggtattcccggccagtggtttatctcggccaacgcctttatcttcgccctgctggcggccctgctgctggacggcatcacccgctggacccaggtggccacctccggcgtcattctgttcggcatcgcgctggtctttacctttaacgctctggtctcgatgctgcagttcatcgccaacgaagacacgctgcaggggctggtgttctggaccatgggcagcatcgatcgcgcctcctggagcaaagtcgccatcctgctggtcgccctggcgctggtgatgcccctgtcgctgcgcagcgcgtggaagctgaccgccctgcggttgggcgaggaccgggccatcagctttggcattaacgttcgccgtctgcgcctgaccacgctgctgcggatcagcattctgtcagcgctttcggtggcctttgtcgggccaatcggctttatcggcctggtggcgccgcatattgcgcggatgctcttcggcgaagaccatcgcttttacctgcccgccagcgcgctgatcggcgccctggtgctctccctggcctccatcgcctcgaaaaacctgatcccgggggccattattccggtggggatcgtcacttccctggtcggggtcccgttctttttgagcatcattttacgtcatcgggggcaggtatga

SEQ ID NO: 2420 - protein, 360 aa, Enterobacter cloacae
MRLTSDSVLDGLPAGTSGMMNDYRRIVRRRLLLILLLALLIVASLLLDFMLGPSGLPLQSLWQTLTDPASADPGTRAIVWDIRLPYAVMAIIVGLALGLAGAEMQTILNNPLASPFTLGVSSAAAFGAALAIVLGIGLPGIPGQWFISANAFIFALLAALLLDGITRWTQVATSGVILFGIALVFTFNALVSMLQFIANEDTLQGLVFWTMGSIDRASWSKVAILLVALALVMPLSLRSAWKLTALRLGEDRAISFGINVRRLRLTTLLRISILSALSVAFVGPIGFIGLVAPHIARMLFGEDHRFYLPASALIGALVLSLASIASKNLIPGAIIPVGIVTSLVGVPFFLSIILRHRGQV

SEQ ID NO: 2421 - DNA, 1119 bp, Enterobacter cloacae
atggcaagaaaatcagtaagatcgctgttacttactgcgctgctcgcgacgcccctcctcagctatgcaacccaatatcccctgacggtcacggaccttgacggccggcaggtcaccctcgccaaagagccgcagcgtattattttgcaggatggtcgcgacattatgaccctcgccctgctggaccgggacaatccgtttaaacggctggtggcatggaataatctggcgaaaaagcaggatgttgccacctggcagatgctgaaaacgacgtggccccagtcggccacgatccttgacatgggcttcagcgataaagggaacgtcgatcttgaaagcgtcatcgcccgtcagccggatctgatgatcgcccagctgcgcgccaggccagcgctgatggagagcggcgtcatcgacaagctcagcgccctgcacgttccggtgctgtttgtcgactatgagatcgccccggcgaaagataccgcccccagcatcgacctgctgggcaaagtccttaaccgcgagagccaggccaaagcctttaccgattactatcgtcagcagctgcagtcgattcgccagaagaccgcgaccatcacgccgaaggccaacgtcttcgtggaagcgctggccggcaacagcgacgcctgctgctttacccacggccacagcggctggggcgggctggtggaggcggtcggggcgaacaatatcggttcgcagctgctgccgggcgcctccgggttcgtttcgctggagaaaatcatcagcatgaagcccgacgcctggatcatgaccggctcgaagcgcggcaacagccaggtgttgcccctgggttatgcggttaagccagaggcggtgaaggcccaggcgcagacgctgctggcgcggcctggggtcagccagatcccggcggtacaggaaaagcgggcctatggcgtttatcaccacttctataaccacccgtggaatattgtcggcatggaatacctggcgaaagatatctacccgcaggccttcggcgatctcaacccggatgagacgtaccattatatcgtgcgccatttcaccgacctgccggaccaaccgttcgtcttctcctggcagcagagcgagtaa

SEQ ID NO: 2422 - protein, 372 aa, Enterobacter cloacae
MARKSVRSLLLTALLATPLLSYATQYPLTVTDLDGRQVTLAKEPQRIILQDGRDIMTLALLDRDNPFKRLVAWNNLAKKQDVATWQMLKTTWPQSATILDMGFSDKGNVDLESVIARQPDLMIAQLRARPALMESGVIDKLSALHVPVLFVDYEIAPAKDTAPSIDLLGKVLNRESQAKAFTDYYRQQLQSIRQKTATITPKANVFVEALAGNSDACCFTHGHSGWGGLVEAVGANNIGSQLLPGASGFVSLEKIISMKPDAWIMTGSKRGNSQVLPLGYAVKPEAVKAQAQTLLARPGVSQIPAVQEKRAYGVYHHFYNHPWNIVGMEYLAKDIYPQAFGDLNPDETYHYIVRHFTDLPDQPFVFSWQQSE

SEQ ID NO: 2423 - DNA, 456 bp, Enterobacter cloacae
atgaaaaagatgatttctctggcagtaattttatcctgtgtgctgagcgtcccggcctttgccgatggcccgaacgacggccatcgtccggggcaacccacggtgtggcagaacggtccggaccatgacgggcatgcaccgcagggcggacctgacgcgcatcatcagggcgaccatgaccagcgtggcccggatcgcgacggccatgacaaacgcgatctggcacgtcatgagcaggaccatttcgcctggcgcgggaacgatttccgcaaaggccacccggctccggcgccgttccgtggcgatgaatatcgcgtccgcgactggagcgaccgcggcctgccgcccccgccggaaggccatcactggtcctatatcgacggtaactatgtgctgatcgccgcggcgaccgggatcatcacctcgattctggtgagcggcgccctcggccactaa

SEQ ID NO: 2424 - protein, 151 aa, Enterobacter cloacae
MKKMISLAVILSCVLSVPAFADGPNDGHRPGQPTVWQNGPDHDGHAPQGGPDAHHQGDHDQRGPDRDGHDKRDLARHEQDHFAWRGNDFRKGHPAPAPFRGDEYRVRDWSDRGLPPPPEGHHWSYIDGNYVLIAAATGIITSILVSGALGH

SEQ ID NO: 2425 - DNA, 234 bp, Enterobacter cloacae
atgaaaaacaatcgttataccatcgcagccctggcgctgtgcgtgctttcttttggcgcatcagccgccacgcccgttccgccatcgggtcatcaggatcatacccaggtaggtatcgccaaagcctctgacgttgaggctggttcgaatattgcgcccggcgcccctaccaccggaaaatccatgaacgacgcctttaatgtgcatacgctggtggccggcgagtggtcttaa

SEQ ID NO: 2426 - protein, 77 aa, Enterobacter cloacae
MKNNRYTIAALALCVLSFGASAATPVPPSGHQDHTQVGIAKASDVEAGSNIAPGAPTTGKSMNDAFNVHTLVAGEWS

SEQ ID NO: 2427 - DNA, 894 bp, Enterobacter cloacae
atgcgcattgacgatatcgacgctttgctggccacggtgcagttttcctccctcaatcaggccgcggaatatctggggatcacccagtcggccatcacccggcgcctgcagcgtctggaacaggagctgaacgtcacgctgttagagcgccagacccgcccgctgaccctgaccgccgccggacaccgggtgtacgagcagtgtctgagcattaagcgtgagacgaaaaaactctacagcctgttggatccgcaaggcgagccgcgcggcgcgctgcgtctcggcgtgccgcagagtctcagcgagattgccctgccggcggcgctgtcggcgctgagccagcagtttcccggactgtcgccgcagatcacctgcggctggagcggacagctgcagcgccggctggaaaacggcgagctggacggcatgctggcgatggggcccgcccagcaaagcttcgccgagggctacagcgggcgcctgctgtgtcccctggaggtggtgccgatcgtcggccggcgtttgaatttgcgcgcgtcatccctgcgggagtgcgccgaacggggctggatccttaaccccgacggctgtggcctgcgcgccgggctcattcgcgagctgcagagccagggattgcggttgacgctcaacgtcgagagcgcgggcgcgcagctgcagatagcgctggtggcgcaggggctggggctgggtctggtgccgagggcggcgctggccagcagcccgtggcgggatgaggtcgcggtcctcagcctcagcgattttcagcctgcggtctcactgtggctgatccacgcccagtatctggcgaacctgcagccgccgctgacctttttcgccagcaaagtggtgcagcagttgaccgtatccgactga

SEQ ID NO: 2428 - protein, 297 aa, Enterobacter cloacae
MRIDDIDALLATVQFSSLNQAAEYLGITQSAITRRLQRLEQELNVTLLERQTRPLTLTAAGHRVYEQCLSIKRETKKLYSLLDPQGEPRGALRLGVPQSLSEIALPAALSALSQQFPGLSPQITCGWSGQLQRRLENGELDGMLAMGPAQQSFAEGYSGRLLCPLEVVPIVGRRLNLRASSLRECAERGWILNPDGCGLRAGLIRELQSQGLRLTLNVESAGAQLQIALVAQGLGLGLVPRAALASSPWRDEVAVLSLSDFQPAVSLWLIHAQYLANLQPPLTFFASKVVQQLTVSD

SEQ ID NO: 2429 - DNA, 1293 bp, Klebsiella michiganensis
atggatatttcagttaccgctgtaaaaaccgggcgccgccgttatctgacgctcatcatgatctttattaccgtggttatttgttatgttgaccgcgccaacctcgccgtcgcctcggcgcatattcaggaggagtttggtattagcaaagcggaaatgggctacgtattttccgcctttgcctggctgtataccctctgccagatccctggcggttggttccttgaccgcgtgggatcccggcttacctactttatcgctatatttggctggtcggtggcgacgttgctacaaggcttcgccaccggtttaatgtcgctcattggcctgcgcgctatcaccgggatcttcgaagcgccagccttcccgaccaacaaccgcatggtgaccagctggttcccggagcacgagcgcgcttccgccgtcgggttttatacctcggggcaatttgttggcctggctttcctcacgccgctgctgatttggatccaggagctattgagctggcactgggtgtttatcgttaccggcggtatcggcattatctggtcgctgatctggttcaaggtttatcaaccgccgcgcctgactaaaagcatcagtaaagccgaactcgactatatccgcgacggcggcggcctggtggatggcgatgcgccgctgaagaaagaggcgcgtcaaccgttatcgaaagcggactggaagctggtttttcaccgcaagctggttggcgtttaccttggacagttcgcggtaacctcgacgctgtggttcttcctgacctggtttccgaactacttaacccaggaaaaaggcatcaccgcgctgaaggccggctttatgaccacggtgcccttcctcgccgcgttttttggcgtcctgctgtctggttggctggcggataagctggtgaaaaaaggctactcgctgggcgtggcgcgcaaaacgccgatcatctgtggactgttgatctccacctgcatcatgggggcaaactacaccaacgaccccatctggatcatggcgctgatggcgctggcgttcttcggtaacggttttgcgtctatcacctggtcgctggtctcctccctggcgccgatgcgcctgatcggcctgaccggcggggtgtttaactttgttggcggcctgggcggcatcaccgtcccgctggtgattggctatctggcgcaggattacggctttggcccggcgctggtttatatctccgtggtggcgttgataggcgcgctgtcttatatcctgctggtcggcgatgtgaaacgtgtaggctaa

SEQ ID NO: 2430 - protein, 430 aa, Klebsiella michiganensis
MDISVTAVKTGRRRYLTLIMIFITVVICYVDRANLAVASAHIQEEFGISKAEMGYVFSAFAWLYTLCQIPGGWFLDRVGSRLTYFIAIFGWSVATLLQGFATGLMSLIGLRAITGIFEAPAFPTNNRMVTSWFPEHERASAVGFYTSGQFVGLAFLTPLLIWIQELLSWHWVFIVTGGIGIIWSLIWFKVYQPPRLTKSISKAELDYIRDGGGLVDGDAPLKKEARQPLSKADWKLVFHRKLVGVYLGQFAVTSTLWFFLTWFPNYLTQEKGITALKAGFMTTVPFLAAFFGVLLSGWLADKLVKKGYSLGVARKTPIICGLLISTCIMGANYTNDPIWIMALMALAFFGNGFASITWSLVSSLAPMRLIGLTGGVFNFVGGLGGITVPLVIGYLAQDYGFGPALVYISVVALIGALSYILLVGDVKRVG

SEQ ID NO: 2431 - DNA, 1149 bp, Pantoea vagans
atgaaaataaccaatatcaccacgtaccgtttacctccgcgttggatgttcctgaagattgaaaccgatgaaggcatcgtcggctggggcgaaccggtgattgaagggcgcgcccgtacggtggaggcagccgttcatgaatttggcgattacctgattggtcaggatccggcgcggattaatgacctgtggcaggtaatgtaccgcggcggcttttatcgcggcggcccgattatgatgagcgccatcgccggtattgatcaggcgctatgggatattaaaggtaaggtcctgaatgccccagtgtggcaactgatgggcgggctggtgcgcgacaaaattaaagcctacagctgggtgggcggcgaccgccccgccgaagtgattgacgggattaagaagctgcgcggcattggttttgacacctttaaattaaacggctgcgaagagatgggtatcattgataattcccgcgcggttgatgccgcggtgaataccgtggcgcaaatccgcgaagcgtttggcaatgaaattgagtttggtctcgattttcacggccgcgttagcgcgccgatggctaaggtattaattaaagagctggagccatatcgcccattatttattgaggagccggtattagccgagcaggcggaatattatccgcggctggcggcgcaaacccatattcccattgccgccggcgaacgtatgttttcgcgctttgaatttaaacgggtcctggaagcgggcggggtggctattttacaacccgatctgtcgcacgcaggcggtattaccgaatgctataaaattgccggcatggcggaagcctatgacgttgggctggcgccgcactgcccgctggggccgatcgcgctggcggcttgtctgcacgttgatttcgtttcacataacgcggtcttccaggagcagagcatggggatccactacaacaaaggcgccgaactgcttgattttgtgaaaaacaaagaagatttcaatatggaaggcggcttctttaaacctctgatgaagccggggctgggcgtggaaattgatgaggcccgcgtgattgagttaagtaaaaacgcgccggactggcgaaatccgttgtggcggtatgaggatggatctgtcgccgaatggtaa

SEQ ID NO: 2432 - protein, 382 aa, Pantoea vagans
MKITNITTYRLPPRWMFLKIETDEGIVGWGEPVIEGRARTVEAAVHEFGDYLIGQDPARINDLWQVMYRGGFYRGGPIMMSAIAGIDQALWDIKGKVLNAPVWQLMGGLVRDKIKAYSWVGGDRPAEVIDGIKKLRGIGFDTFKLNGCEEMGIIDNSRAVDAAVNTVAQIREAFGNEIEFGLDFHGRVSAPMAKVLIKELEPYRPLFIEEPVLAEQAEYYPRLAAQTHIPIAAGERMFSRFEFKRVLEAGGVAILQPDLSHAGGITECYKIAGMAEAYDVGLAPHCPLGPIALAACLHVDFVSHNAVFQEQSMGIHYNKGAELLDFVKNKEDFNMEGGFFKPLMKPGLGVEIDEARVIELSKNAPDWRNPLWRYEDGSVAEW

SEQ ID NO: 2433 - DNA, 618 bp, Citrobacter rodentium
atgcagtggcaaactaaccttccacttatcgctatcctgcgcggtattacgccagacgaggcgctggctcacgttggcgccgttatcgacgccggtttcgacgcggtcgaaatcccgctgaactcgccgcagtgggagaaaagtattccgcaggtcgtcgacgcttacggcgagcaggcgcttatcggcgcgggcacggtgctgcaaccggagcaggtcgacaggctggcggccatggactgtcggctgattgtgacgccaaacattcaaccggaagtgatccggcgagcggtgggttacggcatgaccgtgtgtccaggctgcgccaccgccagcgaagcctttagcgcgctcgatgccggcgcgcaggctctgaaaatcttcccgtcatcggcttttggcccggattacatcaaagcgttgaaagccgtgcttccgcccgaggttccggtctttgccgttggcggcgtgacgccggaaaacctggcgcagtggattaatgccggctgtgttggggcaggattgggtagcgatctctatcgtgccggccagccggttgaacgtaccgcgcagcaggcagccgcattcgtaaaagcgtatcgagaggcagtgaaatga

SEQ ID NO: 2434 - protein, 205 aa, Citrobacter rodentium
MQWQTNLPLIAILRGITPDEALAHVGAVIDAGFDAVEIPLNSPQWEKSIPQVVDAYGEQALIGAGTVLQPEQVDRLAAMDCRLIVTPNIQPEVIRRAVGYGMTVCPGCATASEAFSALDAGAQALKIFPSSAFGPDYIKALKAVLPPEVPVFAVGGVTPENLAQWINAGCVGAGLGSDLYRAGQPVERTAQQAAAFVKAYREAVK

SEQ ID NO: 2435 - DNA, 879 bp, Enterobacter cloacae
atgacggctcgctacatcgcaatagattggggatcgacgaatttacgcgcctggctttatcagggcgaagaatgcctggaaagcaggcaatctgaagcaggcgtaacgcgcctgaatggtcgctctcccgctgcggtgttagcggaaatcacccagcactggcgcgatggcgccacaccggtggtgatggcagggatggtcggcagcaacgtgggctggaaaatcgccccttatttgccgcttcctgccgctttctcggatattggccagcagttaactgccgttggcgacaatatctggataattcccggcctttgcgtttcccgtgacgataaccataacgtcatgcgtggggaagaaacgcagctgctgggcgcacgcgccttagccccttcatctgtctacgtgatgccgggaacccactgtaagtgggtactggccgatcgccggcaaattcacgattttcgtactgttttgaccggtgaattgcatcatttgttgcttcagcactcgctggtgggcgccggcttaccgccgcaggaaacgtccgctgccgcattcgcggcaggtctgcagcgcggtatcaacaaccccgccgtcctgccgcagctgtttgaagttcgcgcttcgcacgtgctgggcgcgctgcctcgcgagcaggttagcgaatttctttccggcctgctgattggcgctgaagttgccaccctcagcgacacattcgccggacagcaggcgatcagtctcgtcgctgggtcatcgttaacatcccgctatcagcaggcattcgccgccattggccgcgaagtcagcgcggttgcgggcgatacggcatttcagacaggaataaggagcatcgcttatgcagtggcaaactaa

SEQ ID NO: 2436 - protein, 292 aa, Enterobacter cloacae
MTARYIAIDWGSTNLRAWLYQGEECLESRQSEAGVTRLNGRSPAAVLAEITQHWRDGATPVVMAGMVGSNVGWKIAPYLPLPAAFSDIGQQLTAVGDNIWIIPGLCVSRDDNHNVMRGEETQLLGARALAPSSVYVMPGTHCKWVLADRRQIHDFRTVLTGELHHLLLQHSLVGAGLPPQETSAAAFAAGLQRGINNPAVLPQLFEVRASHVLGALPREQVSEFLSGLLIGAEVATLSDTFAGQQAISLVAGSSLTSRYQQAFAAIGREVSAVAGDTAFQTGIRSIAYAVAN

SEQ ID NO: 2437 - DNA, 411 bp, Enterobacter cloacae
gtgaatatctcgctgactcttcgtgttatcccactcgccgcgctgttagtagccggctgtagcaatacctcttcccgccagccggttaaaccgatcgccacgccgctgacgacacagcagcaggcagagcaggagcgggcagccagcgaacaagcgcgcattgaatcctgtcgccaggcgctggattcgctaaaagaggttaacccacagcaagccactaaactcagcaatgactttaacgctttagtgcgcgcggcgtcacaatataatagcgtgcgcgagaaagtggcagatcctacccggcttggcattgactccatgtatcagtttaaatccatcaaactgtgcgccgatatccagaaaacgctgatcgatagcctggtacagcgtggtgaaagcaaacagccatga

SEQ ID NO: 2438 - protein, 136 aa, Enterobacter cloacae
MNISLTLRVIPLAALLVAGCSNTSSRQPVKPIATPLTTQQQAEQERAASEQARIESCRQALDSLKEVNPQQATKLSNDFNALVRAASQYNSVREKVADPTRLGIDSMYQFKSIKLCADIQKTLIDSLVQRGESKQP

SEQ ID NO: 2439 - DNA, 558 bp, Klebsiella oxytoca
gtgattgttcgtgatgacagtgaaagaggcatcccgccgctggtgacgcatcagccgccgtcctcgatggatgatgcgccggtgatccgcggacggatggtgcagatccccggctggattatcccgctgtacgccggattatttatcgcgctcggctggtttggcggcgagcagtggcgtcacccggcaccgccgcaaacgctgcccttgccggtggcgcatgcggcgcttctgccgttaaccgctgccggagaggccgcgccaaagacgccgccgccggcggcaaaagccagcgcgcccgcggcgccggaagtggacagcgatacgctgccgcctctacgctacagcgcccatgtctatgcctcgctaccggaaaagcgcagcattgtgttaaacggcaaagcgtggacggagggcgattcacccctgcccaatctggtggtggagcagatccagcaggatgtgacgatcttcagcttcaacggcacgacctttaccctcgcggcgctggaggactggccgggcggaaaaattgacgaggagccgaaagaggaataa

SEQ ID NO: 2440 - protein, 185 aa, Klebsiella oxytoca
MIVRDDSERGIPPLVTHQPPSSMDDAPVIRGRMVQIPGWIIPLYAGLFIALGWFGGEQWRHPAPPQTLPLPVAHAALLPLTAAGEAAPKTPPPAAKASAPAAPEVDSDTLPPLRYSAHVYASLPEKRSIVLNGKAWTEGDSPLPNLVVEQIQQDVTIFSFNGTTFTLAALEDWPGGKIDEEPKEE

SEQ ID NO: 2441 - DNA, 2325 bp, Enterobacter cloacae
atgtgtgcagtagcggtgggcatgtgcagctggtatccactggcctcttacgcggcgccggccgcggtggcgaacgctgcccctggcgttcagccgcaggccgcgaccccggctgcgccgatcgtggtgggcgagccgacggcgaccctcgccgaaccgaccgctccggcggcggtggccgagaacgtgccgcagcgggaggtgaagctgagctttgccaccatcgcgccgccgcccggcagcatcgtgctgcgcggctcacggcctgacgcgtcggtcgaattcggcatgcgcagcgatgagctggtcgccaacgcgctgctcaatctggaatacaccccatcgccctcgctgctgcccgtgcagtcgcagttgaaggtctatcttaacgatgagctgatgggcgtcctgcccgtcactaaagagcagctggggaaaaagatccgcgcgcagctgccgattgacccgctgtacatcaccgacttcaaccgcgtacggctggagtttgtcggccactaccgcgacgtctgcgaaaacccggccagcagtacgctgtggctggacgtcggacgcgaaagctatctggatctcacctaccagtcgctgaaggtaaataacgatctgtcacacttcccggtgccgttctacgatccgcgcgataaccgcccgctgaagctgccgatgattttcccgggctcgccagcggtcacccagcagcaggcggcggcgatagtcgcctcctggttcggcagcaaggccggctggcgcggccagcagttcccggtctatttcaatgaactgccggatcgtaacgccattgtcttcgccaccaacgacaagcgtccggacttcctgcgcgatcatccgccggtcaaggcgccgaccatcgaaatgatcgacaacccgaacgatccctacgtcaagctgctggtgattttcggccgcgatgataacgacctgctgctggcggcgaaggggattgctcagggcaatattctgttccgcggcagcagcgtcaccgtggacggcatcaaaaccctgcagccgcgtcagccttacgacgcgccgaactgggtgcgcaccgaccgctcggtcaccttcgctgagctgaaaacctatgagcaacagctgcagtccagcggcctggtgccggatgccatcaccgtggcgcttaacctgccgccggatctctatctgctgcgggccaacggcatcgatatggatctgaaataccgctacaccatgccgccggtgaaggacagctcgcggatggatatcagcctcaacgaccagttcctgcagtcgttcagccttaacagctcccaggacgtgaacaaactgatcctgcgcctgccggtgctgcaggggctgctggacggcaaatcggaggtcaccatccccgcgctgcgtcttggggcggtcaaccagctgcgctttgacttccagtatatgaacccgatgcccggcggctccatcgacaactgtattaccttccagccggtgcagaaccatgtggtgattggcgacgattcgaccatcgacttctcgaagtattatcactttatcgccctgccggacctgcgcgtcttcgccaatgcgggcttcccttacagccgtatggcggacctttccgacacgctggtggtggtgccgaaggcgccgacccagggccaggtggcgacgctgctgcaggcgctggggggcatcggttcgcagaccggtctggcggcgattaatctgcaaatgaccgacgatggcaaccagatcaagaataaagacgcggatctgctgctgatcggcgcgatcccgtcgtcgctcaaggacgacaccaaaatcaacctgctggtcgaggcgaccaaaagctgggtgaaaatgccgatgcgccactatgacctggcgagcatttatcccgacgatgaggcccgcacgcccaatacccgcaccgacattacctcttccgggccgatggcggcggtgattggcttccagtcgccgtataacgatcagcgcagcgtggtggccctgctggccgacagcccgcgcggtaatgaactgctgaccaacgccctcaacgacagcggtaagcgggcagcgatgtttggctcggtggcggtgatccgcgaatccggcgtcaacagtctgcgggtgggggatatttactacgtgggtcatctgccctggttcgagcgcatctggttcgcgctctctaaccacccgatactgctggcgatcttcgctgccatcagcattgtgctgctggcatgggtgctgtggcgcatgctgcgcatcatcagccgccgccgtcttagcctggatgatgagtaa

SEQ ID NO: 2442 - protein, 774 aa, Enterobacter cloacae
MCAVAVGMCSWYPLASYAAPAAVANAAPGVQPQAATPAAPIVVGEPTATLAEPTAPAAVAENVPQREVKLSFATIAPPPGSIVLRGSRPDASVEFGMRSDELVANALLNLEYTPSPSLLPVQSQLKVYLNDELMGVLPVTKEQLGKKIRAQLPIDPLYITDFNRVRLEFVGHYRDVCENPASSTLWLDVGRESYLDLTYQSLKVNNDLSHFPVPFYDPRDNRPLKLPMIFPGSPAVTQQQAAAIVASWFGSKAGWRGQQFPVYFNELPDRNAIVFATNDKRPDFLRDHPPVKAPTIEMIDNPNDPYVKLLVIFGRDDNDLLLAAKGIAQGNILFRGSSVTVDGIKTLQPRQPYDAPNWVRTDRSVTFAELKTYEQQLQSSGLVPDAITVALNLPPDLYLLRANGIDMDLKYRYTMPPVKDSSRMDISLNDQFLQSFSLNSSQDVNKLILRLPVLQGLLDGKSEVTIPALRLGAVNQLRFDFQYMNPMPGGSIDNCITFQPVQNHVVIGDDSTIDFSKYYHFIALPDLRVFANAGFPYSRMADLSDTLVVVPKAPTQGQVATLLQALGGIGSQTGLAAINLQMTDDGNQIKNKDADLLLIGAIPSSLKDDTKINLLVEATKSWVKMPMRHYDLASIYPDDEARTPNTRTDITSSGPMAAVIGFQSPYNDQRSVVALLADSPRGNELLTNALNDSGKRAAMFGSVAVIRESGVNSLRVGDIYYVGHLPWFERIWFALSNHPILLAIFAAISIVLLAWVLWRMLRIISRRRLSLDDE

SEQ ID NO: 2443 - DNA, 363 bp, Enterobacter cloacae
atgtatttaagacccgatgaggtggcgcgtgttcttgaaaaagccggcttcaccatggatgttgtgacgcaaaaagcgtacggctatcgccgcggcgataattatgtttatgtgaaccgcgaagcgcgcatggggcgaacagcgttagttattcatccggcgttaaaagagcgcagcaatatgctggccgaaccggcttcagatatcaaaacctgtgatcattatgaacagtttccgctgtatttagccggggatgcgcaacaacattatggtattccgcatggatttagctcacgcatggcgcttgagcgttttctgaatgggctatttggcgaagcccagccggcaatgtcgacgaattaa

SEQ ID NO: 2444 - protein, 120 aa, Enterobacter cloacae
MYLRPDEVARVLEKAGFTMDVVTQKAYGYRRGDNYVYVNREARMGRTALVIHPALKERSNMLAEPASDIKTCDHYEQFPLYLAGDAQQHYGIPHGFSSRMALERFLNGLFGEAQPAMSTN

SEQ ID NO: 2445 - DNA, 363 bp, Citrobacter pasteurii
atgaaagaagtcgaaaagaatgaaatcaagcgtctgagcgatcgtctcgacgccatccgccaccagcaggccgagctgtcgctggtggaagccgccgataaatatgctgaactggaaaaagaaaaagccactctggaaacggagattgaacgtctgcgttccgtccagagccagaagctgagcaaagaggcgcagaaactgatgagcctgccgttccgccgcgcgattaccaaaaaagagcaggccgatatgggcaagctgaagaaaagcgttcgcggcttggtggttgtccatccgatgaccgccctgggccgggaaatgggtctgaaagagatgaccggtttcgcccgcagcgaattttga

SEQ ID NO: 2446 - protein, 120 aa, Citrobacter pasteurii
MKEVEKNEIKRLSDRLDAIRHQQAELSLVEAADKYAELEKEKATLETEIERLRSVQSQKLSKEAQKLMSLPFRRAITKKEQADMGKLKKSVRGLVVVHPMTALGREMGLKEMTGFARSEF

SEQ ID NO: 2447 - DNA, 225 bp, Enterobacter cloacae
atggcaaagatcggcgacggcgtaccacgtttaatcgacaaagcggttgattttatggcttccagtcaggcgtttatggagtatttgaaaaagtctccgcgtctgcagcatgtaccgcgagacattcctcaggataaggaagcgttgttcctgcagcgtctggaatattatcgtcagctttaccggccgacctgcgaccagacggaaccggaatcagagcgttga

SEQ ID NO: 2448 - protein, 74 aa, Enterobacter cloacae
MAKIGDGVPRLIDKAVDFMASSQAFMEYLKKSPRLQHVPRDIPQDKEALFLQRLEYYRQLYRPTCDQTEPESER

SEQ ID NO: 2449 - DNA, 597 bp, Enterobacter cloacae
atgcacaacctggcgcggccgacgtcgcgcccattacgactcctgtcagatatgcaggcaatgatggaagaaacacaagcatttgaaaaccgtgtgcttgagcgtctgaatgctggcaaaaccgtacgaagcttcctgatcgccaccgtcgagctgttaacggaagcggtcaatattctggtgcttcaggtgttccgtaaagacgactacgcggtgaaatacgccgtcgagcccttgctggagggcagcgggccgctcggcgatctctctgtacgcctgaagctgatttatggccttggggtgataagtcgtgccgaatatgaagacgctgagctgctgatggccctgcgcgaagagcttaaccacgacggcaatgagtacagctttaccgacgacgaaattatcggtccgttcggcgagctgcactgcgtcgccgccctgccgccaacgccgcaatttgatgacagcgatgccgaactgctggcaatgcagaaactgcgttaccagcagatggtgcgctcaacgatggtgctgtccctgactgagctgatttcacgaatcagcttaaaaaaagcctttcagaaatcaacgctctga

SEQ ID NO: 2450 - protein, 198 aa, Enterobacter cloacae
MHNLARPTSRPLRLLSDMQAMMEETQAFENRVLERLNAGKTVRSFLIATVELLTEAVNILVLQVFRKDDYAVKYAVEPLLEGSGPLGDLSVRLKLIYGLGVISRAEYEDAELLMALREELNHDGNEYSFTDDEIIGPFGELHCVAALPPTPQFDDSDAELLAMQKLRYQQMVRSTMVLSLTELISRISLKKAFQKSTL

SEQ ID NO: 2451 - DNA, 1077 bp, Enterobacter cloacae
atggccttactgaaaagcgcccatggcggcaatatccgcgaggccgccgccctgctgggcatagcccccggcgagctgctggattttagcgccaacatcaatccgctggggatgcctgcctcgctcaggcaggcgatcgttgacaacccgggctgcgccgaacgctaccctgacgtcgagtatcaacagctgcatcaggcgctggctgcccaccatcagttgccgacggcgcatatcctcgccggcaacggcgaaactgaatcgatcttcaccctcgtccacggccttaagccgcggcgggcgatgatcgtcattcccggtttcgcggagtaccggcgggcgctgcagacggtggactgcgaggtggtggagtatgccctgcgggagcgcgatggctggcagctgaccgacgcgatcctcgatgccctgactccggcgctggactgcctgtttctctgcaccccgaacaaccccaccggcctgctgccggagcggggcctgctggaagccattgcgcagcgctgccgagcgctgaacatcagcctgatcctcgatgaggccttcctcgactttatccccgaccagccggggtttattcctctgctggcgcagcatccgcacgtctgggttttgcgatcgctgaccaaattttatgccattccggggctgcgtctcggctacctgctgaacgctgatgcccaggcggtggcccgactgcgcgcgcgacaaatgccgtggtccatcaacgcctatgccgccctggccggggaaattattctccaggatcgggcgtatcagcgggccacctggcagtggctgcaggaggagggagcacgtttctatgcgcagctgcaggagatggccgggctgaccgtatggcccgggcgtgctaactacctgttcttgcgctgcgacagacccgattttgacctgcaatatgccctgctgcgccagcatgtgctgatccgcagctgcgccaactacccggggctggatagccgctatttccgcgtggcgatccgcagcgccgaggaaaacgaccagctgctggtggcgttgcgccgggtgctggcctga

SEQ ID NO: 2452 - protein, 358 aa, Enterobacter cloacae
MALLKSAHGGNIREAAALLGIAPGELLDFSANINPLGMPASLRQAIVDNPGCAERYPDVEYQQLHQALAAHHQLPTAHILAGNGETESIFTLVHGLKPRRAMIVIPGFAEYRRALQTVDCEVVEYALRERDGWQLTDAILDALTPALDCLFLCTPNNPTGLLPERGLLEAIAQRCRALNISLILDEAFLDFIPDQPGFIPLLAQHPHVWVLRSLTKFYAIPGLRLGYLLNADAQAVARLRARQMPWSINAYAALAGEIILQDRAYQRATWQWLQEEGARFYAQLQEMAGLTVWPGRANYLFLRCDRPDFDLQYALLRQHVLIRSCANYPGLDSRYFRVAIRSAEENDQLLVALRRVLA

SEQ ID NO: 2453 - DNA, 1323 bp, Citrobacter braakii
atgagttctctgtatcagtccatgattgccgtgatcgagcaatctattactccgctggcaggacgccttgggcagcagaaatacgttatcgctatccgcgatggcttcactgccgccttgccgtttatgatcatcggctctttcatgctggtatttatctttccgccgttttcacccgataccaccaacggctttgcccgcggctggcttgatttctcccagcactaccgcgaacagctgatgctgccgtttaacctcagcatgggcgtgatgaccttctttatctcggtcggcattggcgccagcctcggtcgtcagtttcagctcgatccggtgatgtccggtctgctggcgtttatggctttcctgctggtcgccgcaccctatgccgatggcaaaatttccactcagtatctgtccggtcagggcattttcaccgcgctgatcaccgccatctactccacccgcgtttacgcgtggctgaagcaaaacaacattacgattcgtctgccgaaagaggtccccaccggcgtcgcccgttcgtttgaaatcctgatcccggtgctggtggttattgcgactctgcatccgctgaatctgtttatcgaagcgcagaccgggatgatcctgccgcaggcgatcatgcatctgctggagccgctggtttccgcctccgactcgctgccggcgattttgctctctgttctgatgtgccagattttctggttcgccggtatccacggctcgctgattgttaccggcattatgaacccgttctggatggccaacctgtcggcaaaccaggcggcgctggcggctggcacggtactgccgcacgtctacctgcaaggcttctgggatcactatctgctgattggcggcgtcggttctaccctgccgctggccttcctgctgctgcgtagccgggccacccatctgcgcaccatcggcaagatgggcatcgtgccgagcttctttaatatcaacgagccgattctgttcggggcgccgatcatcatgaacccgatgatgtttatccccttcgtctgcgtaccgatggtcaacgcggtgctggcttacggcgcgacgcgtcttggctggctgagccaggtggtgtcgctgacgccgtggactacgccggccccaattggcgcgtcgtgggcggctaactggaccctgagcccggtggtgatgtgtctcatctgcatggtgatgtcggcggtcatttatctgccgttcctgcgcgcttatgaacgttccttaatgaaaaccgaagttgagaaagccaaaaatagcgttccggtagcagaaaccgttagctaa

SEQ ID NO: 2454 - protein, 440 aa, Citrobacter braakii
MSSLYQSMIAVIEQSITPLAGRLGQQKYVIAIRDGFTAALPFMIIGSFMLVFIFPPFSPDTTNGFARGWLDFSQHYREQLMLPFNLSMGVMTFFISVGIGASLGRQFQLDPVMSGLLAFMAFLLVAAPYADGKISTQYLSGQGIFTALITAIYSTRVYAWLKQNNITIRLPKEVPTGVARSFEILIPVLVVIATLHPLNLFIEAQTGMILPQAIMHLLEPLVSASDSLPAILLSVLMCQIFWFAGIHGSLIVTGIMNPFWMANLSANQAALAAGTVLPHVYLQGFWDHYLLIGGVGSTLPLAFLLLRSRATHLRTIGKMGIVPSFFNINEPILFGAPIIMNPMMFIPFVCVPMVNAVLAYGATRLGWLSQVVSLTPWTTPAPIGASWAANWTLSPVVMCLICMVMSAVIYLPFLRAYERSLMKTEVEKAKNSVPVAETVS

SEQ ID NO: 2455 - DNA, 618 bp, Escherichia coli
atgctgcttcatgttctgtatttaatcggtatcaccgcggaagccatgaccggcgcactggctgccgggcgccggcggatggatacgtttggcgtcattattatcgccacagcgaccgcgctgggcgggggttccgttcgcgatatcctgctggggcactatcctcttggttgggtgaagcatcccgaatatgtcatcattgtcgccgtcgccgccgttctcacgaccattgccgctccggtgatgccgcaccttcgtcggctgtttctggtgctggacgcgctggggctaatcgtgttttccatcatcggcgcgcagatcgccctggacatgggcgaaggcccggttatcgcctctattgccgccgtgatcaccggtgtcttcggcggcgtactgcgcgatatgttctgcaaacgcattccgctggtcttccagaaagagctgtatgccgggatctcctttgccgcagccgtactctatattgctctgcaacattacgtcagcagccacgatgtggtggtgctggctacactgctgttcggctttaccgcccgcatgctggcgctacgctggaaactggggctaccggtcttccactacacccatgacgcccactaa

SEQ ID NO: 2456 - protein, 205 aa, Escherichia coli
MLLHVLYLIGITAEAMTGALAAGRRRMDTFGVIIIATATALGGGSVRDILLGHYPLGWVKHPEYVIIVAVAAVLTTIAAPVMPHLRRLFLVLDALGLIVFSIIGAQIALDMGEGPVIASIAAVITGVFGGVLRDMFCKRIPLVFQKELYAGISFAAAVLYIALQHYVSSHDVVVLATLLFGFTARMLALRWKLGLPVFHYTHDAH

SEQ ID NO: 2457 - DNA, 1251 bp, Enterobacter cloacae
atgagcgtcgccgccgggaataaaaatcatctgatccgcctgatagccgtggtattaaccgggattctggccggtctgtccggcatggttttggcactaattttacacgcgattcagcacctggcttttggttacagttacgggcagatcgtcggttcggtgtcatttttacagggcgtcacggagtcgtcctggccacgccgcatcgtggcaatcgtggccggcggcgccgtcgccggatttggctggtggctgcttggtcgctatgggcagaggcgggtttccattgcggcggcggtggccaacccctgcgtacccatgcccgcgggcaccacgacgatccacgcgctgctgcagatcgtcacagtagcgctgggctccccgcttggccgcgaagtggcgccctgggaaatgggcgcgctgggggcggggatggtggcgcgtaagctgcgcctgctggaagatgaaacccgcacgctgattgcctgtggggcgggcgcgggtctggcggcggtctataacgtcccgctggccggggcgttgttcagccttgaggtcatgctgctgtcgtttagctgggaaaaaacgctggcggcgatgatgacctcggcgattgccgcctggacggccaccctggggttaggggatgaatcgcaataccattttgtttccagcgcacttccgcacacctttctctggtgggcgattctggcgggcccgattcttggcaccggcgcctggctctttcgcaaagcgaccagcgcggcgcgttcacgcgcgcgaagtaactggcagatgccggtgttctgtctgctggggttttctcttcttgccatcctgagtctttatttccccgagcttccgggcaatggcaagggtccaatgcagctggcgctcagcgatgggctgcctctctccatggtcgctgtcctgttagtattgaagatggtggtgattctggcggtgctgcgcggcggcgcggagggtggattgttaaccccagggctggcggtgggcggattggtcagcctgctgctctgcgcgctctggcagctcggcttccctggcggtgataaaagcagcttcgctgtggtgggggcggccgcgtttctcgccgcctccatgcagatgccgttgaccgcagtggcgctggtgatggagtttacccacatggatcacagctatctggctccggcgctgctgtgcgcggcaggggcgtttttaacctgccgggtgctggataaaaaatag

SEQ ID NO: 2458 - protein, 416 aa, Enterobacter cloacae
MSVAAGNKNHLIRLIAVVLTGILAGLSGMVLALILHAIQHLAFGYSYGQIVGSVSFLQGVTESSWPRRIVAIVAGGAVAGFGWWLLGRYGQRRVSIAAAVANPCVPMPAGTTTIHALLQIVTVALGSPLGREVAPWEMGALGAGMVARKLRLLEDETRTLIACGAGAGLAAVYNVPLAGALFSLEVMLLSFSWEKTLAAMMTSAIAAWTATLGLGDESQYHFVSSALPHTFLWWAILAGPILGTGAWLFRKATSAARSRARSNWQMPVFCLLGFSLLAILSLYFPELPGNGKGPMQLALSDGLPLSMVAVLLVLKMVVILAVLRGGAEGGLLTPGLAVGGLVSLLLCALWQLGFPGGDKSSFAVVGAAAFLAASMQMPLTAVALVMEFTHMDHSYLAPALLCAAGAFLTCRVLDKK

SEQ ID NO: 2459 - DNA, 747 bp, Enterobacter cloacae
atggactttaatgcacttcaccagcaaaaccaacctttgttgcttgccaatgtctgggatgccagcagcgctcaggctgctcagcaggctggttatcaggcgctgggatcctccagcgctgctatcgccgcaatgttagggtatgaagatggcgaagagatgagttttgacgagctgttttatgtcgtctcacgcatcaaaaccgttagcgaactgccgttaagcgtcgatttagaggcgggctacggcgcgacaaccagccacatcattgacaatatccggcgtctagcgcatctcggcgtgagtggaataaatctcgaggatagtcatgtggtggatggtacgcgtcgtcttgacgatgcggagcgctttgccgtcaaactgcaggaaataacccgcgcctgtcccggtctgtttgttaatgtccgcaccgatacctttcttctcaacgtacaagatgcgctggttcaaacgctctatcgcggtcaactctacgccaaacacggcgcatgcggtttttttgtgccttgcgtcacccgcgcggaggatattaccgccatcgttcaccacgtgcctttacccttaaacgtaatgtgtatgcctgagctggctgacttcagcaccttatcgacactgggcgtaaaacgaatttcgatgggcaattttatttatgctgcgacgcaggccagactgaaagacttattatgtcaggtgcaaacccaacactctttctcaggtgttttttga

SEQ ID NO: 2460 - protein, 248 aa, Enterobacter cloacae
MDFNALHQQNQPLLLANVWDASSAQAAQQAGYQALGSSSAAIAAMLGYEDGEEMSFDELFYVVSRIKTVSELPLSVDLEAGYGATTSHIIDNIRRLAHLGVSGINLEDSHVVDGTRRLDDAERFAVKLQEITRACPGLFVNVRTDTFLLNVQDALVQTLYRGQLYAKHGACGFFVPCVTRAEDITAIVHHVPLPLNVMCMPELADFSTLSTLGVKRISMGNFIYAATQARLKDLLCQVQTQHSFSGVF

SEQ ID NO: 2461 - DNA, 225 bp, Enterobacter cloacae
atgaatcacgggcaactatcaatgaaaaacgtttttcctacgcttgccgttttgtttgcgatcttcagcctgaccggctgcggtctgaaagggcctctctatttcccaccggcggacaaaaccgcgccgccgccgaccaaaccggttaaccctggcattcagagcgcaacgccggatcgtaacgatcgtggcgataccggtggtccgagccaggtcaattactaa

SEQ ID NO: 2462 - protein, 74 aa, Enterobacter cloacae
MNHGQLSMKNVFPTLAVLFAIFSLTGCGLKGPLYFPPADKTAPPPTKPVNPGIQSATPDRNDRGDTGGPSQVNY

SEQ ID NO: 2463 - DNA, 2439 bp, Citrobacter rodentium
atgaaaattaaagcccctgatgctttactggctgctgaggtaagccgccgtggtctgatgaaaaccacggcaataggcggcctggcgctggccagcaacgcactaacgttaccttttacccgactgtcgcatgctgccgatacgccggcgcccgccagtgagaaggtggtctggagcgcctgcaccgtcaactgcggtagccgttgcccgctgcgcatgcacgtggtggatggcgcgattaaatacgtcgaaaccgataataccggtgatgataactatgacggtttgcaccaggtccgcgcctgcctgcgtgggcgttcaatgcgccgccgggtctataatccggaccgtctgaagtacccgatgaagcgcgttggtaaacgcggtgagggcaagttcgagcaaatcagctgggaagaggcgttggataccatcgccagcaatatgcagcggctgattaaagagtacggcaacgaatccatctatctgaactacggcaccggcacgctcggcgggacgctgacccgctcctggccgccggggaaaacgctgattgcccgtctgatgaactgctgcggtggctatctcaaccattatggcgactattcatcagcgcagattgctgccggtctgaattacacctacggcggctgggcggacggcaacagcccatcggatattgaaaacagtcagctggtggtgctgttcggcaataaccccggcgaaacgcggatgagcggcggcggggtgacgtactaccttgaacaggcgcggcagaaatccaatgcccggatgataatcatcgatccgcgctataccgacaccggcgccgggcgtgaagatgaatggatcccgattcgtcctgggaccgatgcggcactggtttcgggcctcgcgtgggtgatgatcaccgagaatctggtcgaccagcctttcctcgataaatactgcgtgggatacgacgagaaaacgctgcccgccggtgcgccagccaatggtcattacaaagcttacattcttggccagggcattgacggtatcgccaaaacgccggagtgggcctcgacaattaccggtattccgcgcgaacgcattgttaaactggcgcgcgaaattgccaccgccaaaccggcctatattagccagggctggggtccgcagcgtcacgccaacggagagatcgccacccgcgccatctcaatgctcgccattctgacgggtaacgtcgggatcaacggcggcaatagcggggcgcgcgagggctcgtatagtctgccttttgagcgtatgccgacgctggagaatccggttgagaccagtatctcgatgtttatgtggaccgatgcgattgagcgcggcccggaaatgaccgctctgcgcgacggcgtacgcggtaaagataagctcgacgtgccgatcaaaatgatctggaactatgcgggcaactgtctgattaaccagcattctgagatcaaccggacccacgaaatcctgcaggacgacaagaaatgcgagatgattgtggtcattgactgccatatgacctcctcggcgaaatacgctgatattctgctgccggactgtaccgcctccgagcagatggatttcgcgctggatgcctcctgcggcaacatgtcctacgttatctttgccgatcaggccatcaagccgcgctttgaatgcaaaaccatctatgagatgaccagcgaactggcaaagcgtctgggcgtcgaagagcagtttaccgagggccgtacccaggaaggctggatgcgctatctgtatgagcagtcgcgcaaagcgattcccgacctgccggatttcgacaccttccgtcagcagggcatctataagcagcgcgatccgcaaggtcatcatgtggcctacaaagccttccgtgaggatccgcaggctaatccgctgacaacgccttcgggcaagatcgaaatttactcgcaggatctggcgaaaatcgcggccacctgggagttgccggaaggggatgttatcgatccgctgccgatctacaccccgggtttcgaaaactacaacgatccgctgacagcgaaatacccgctacagctcaccggcttccactataaatctcgcgtccactcgacctacggcaacgtcgatgtgctgaaggccgcctgtcggcaggagatgtggattaacccgatcgacgcccgcaagcgcggcattgccaacggcgatcgtattcgcatcttcaacgatcggggtgaagtgcatatcgaagcgaaggtgacgccgcgcatgatgccgggcgtcgtcgcgctgggggaaggggcctggtacaacccggacgcctcgcgtgtggatcaggcgggcagcatcaacgtgctgaccacccagcgtccgtcgccgctggcgaagggaaacccgtcgcataccaaccttgttcaggttgagaagctgtaa

SEQ ID NO: 2464 - protein, 812 aa, Citrobacter rodentium
MKIKAPDALLAAEVSRRGLMKTTAIGGLALASNALTLPFTRLSHAADTPAPASEKVVWSACTVNCGSRCPLRMHVVDGAIKYVETDNTGDDNYDGLHQVRACLRGRSMRRRVYNPDRLKYPMKRVGKRGEGKFEQISWEEALDTIASNMQRLIKEYGNESIYLNYGTGTLGGTLTRSWPPGKTLIARLMNCCGGYLNHYGDYSSAQIAAGLNYTYGGWADGNSPSDIENSQLVVLFGNNPGETRMSGGGVTYYLEQARQKSNARMIIIDPRYTDTGAGREDEWIPIRPGTDAALVSGLAWVMITENLVDQPFLDKYCVGYDEKTLPAGAPANGHYKAYILGQGIDGIAKTPEWASTITGIPRERIVKLAREIATAKPAYISQGWGPQRHANGEIATRAISMLAILTGNVGINGGNSGAREGSYSLPFERMPTLENPVETSISMFMWTDAIERGPEMTALRDGVRGKDKLDVPIKMIWNYAGNCLINQHSEINRTHEILQDDKKCEMIVVIDCHMTSSAKYADILLPDCTASEQMDFALDASCGNMSYVIFADQAIKPRFECKTIYEMTSELAKRLGVEEQFTEGRTQEGWMRYLYEQSRKAIPDLPDFDTFRQQGIYKQRDPQGHHVAYKAFREDPQANPLTTPSGKIEIYSQDLAKIAATWELPEGDVIDPLPIYTPGFENYNDPLTAKYPLQLTGFHYKSRVHSTYGNVDVLKAACRQEMWINPIDARKRGIANGDRIRIFNDRGEVHIEAKVTPRMMPGVVALGEGAWYNPDASRVDQAGSINVLTTQRPSPLAKGNPSHTNLVQVEKL

SEQ ID NO: 2465 - DNA, 954 bp, Enterobacter cloacae
atgcgttggttcgtctcattgctgctgttgctgacgggggccgtcagcgccgccgccccacaaactcaaactttcaccgatgatttaggccgcaccgtcaccgtcccgctgcatccgcagcgcattgtttcgatgcacgatctcgatattaccattccgctgattgagctcggggcgccgccgatcgccagccacggccggacgcgcccggacggcagccactacctgcgatccagcgcccagctcaccggcgtcgatttcgacaacagcgatatccgctttattggcaccgccgatatcgatctggaagcggtagccgccgccaggccggatctgattatcaccgagcccagccgccacgtgtcagtggagcaactggagaagattgccccgacggtgagcatcgaccatctgcagggcagcgccccggagatttaccgcaagctggcgcagctgaccggcacccagccgcggctggcgatcctcgagcgccgctatcaggagcaaatcaagcagctgaaagcgatggtcaacccaccgcagtacagcgtctcagtgatccaggcgaacaacggcaaggtcacggtgcatcattcgtatcatgcgctgggccgggtgctgcgcgacgccgggttccgctttccgccgctgattgagcggatccccgatggtcagcgcattgacgtcagcgcggaacagctgccggagctggacgctgattttgtcttcgccacctggcggtcggataccggcggtaagccgcaggatgagctgcaggcgatggaaggcgtgatgcccggctggtgcgactttatgcgcgcctgccgcaccgggcactatattttgctgccgcgggaagaggtgatctctaactcctacgccgcgctgtccctgatggtggcccaggtgcagtcgcatattgccggcaggccgatcccggcggaggccaaatga

SEQ ID NO: 2466 - protein, 317 aa, Enterobacter cloacae
MRWFVSLLLLLTGAVSAAAPQTQTFTDDLGRTVTVPLHPQRIVSMHDLDITIPLIELGAPPIASHGRTRPDGSHYLRSSAQLTGVDFDNSDIRFIGTADIDLEAVAAARPDLIITEPSRHVSVEQLEKIAPTVSIDHLQGSAPEIYRKLAQLTGTQPRLAILERRYQEQIKQLKAMVNPPQYSVSVIQANNGKVTVHHSYHALGRVLRDAGFRFPPLIERIPDGQRIDVSAEQLPELDADFVFATWRSDTGGKPQDELQAMEGVMPGWCDFMRACRTGHYILLPREEVISNSYAALSLMVAQVQSHIAGRPIPAEAK

SEQ ID NO: 2467 - DNA, 1014 bp, Enterobacter cloacae
atgagcgtggccatcctgctttccgcgcggcgtcgcccccgcccccggctggcgctgcttctgctaacgctgctgcttatcgccgcctcgctggtgcatcttggcttaggcgcccgctggatcgccccgcagacggtgctgcgagcgctgctggagtacgatccgcgcaactttgagcagcggattatcatcgatctgcgtctggtgcggctggcggcggcgctgctgaccggcgcggcgctcggcgtcgccgggctgctgctgcagacggtgatccgtaacccgcttggcgagccgcatattctcggcctcaacgccggcgcctcgctggcggtggtggcgacctcggcgctgggcctgtctctcggcgctttccccgtcgggcgcccgctgaccgccgcctgcggcgcggggctgctgttcggtggcgtgatggcgctggcctctgccgggcgcggcggggcgacgccgctgcgcatcacgttgtgcggagtggcgctgtcagggtttgcgtcggcggtgacggcggcgatattaattctcgatgaacagacgctgctggcgatgcgcacctggctggccggcgacctggccggactgaactggagcacgctgcagacggcgctgatcggccttggcgtcgcgctgctcattgccccacgcctcaacgtgctggcgctgggggataaggtggcgctgggccttggcgttaatctcgtccagacgcggctgctgggcctgctggcgattgcgctgctctgcggcgcggcggtggcggtggccgggccgatcggcttcgtcgggctggtggtgccgcacgtggtgcgccgtctggtgacggaagatatccgcctggcgctgcccctggccgcgccggtgggagcgctggcgctggtgctggcggatatcgccgcccggacactggtcgcgccgcaggagctggcgaccggggcgatgaccgccctggtgggcgcgccgttgtttatctttatcgccgcgaggttttttaaatga

SEQ ID NO: 2468 - protein, 337 aa, Enterobacter cloacae
MSVAILLSARRRPRPRLALLLLTLLLIAASLVHLGLGARWIAPQTVLRALLEYDPRNFEQRIIIDLRLVRLAAALLTGAALGVAGLLLQTVIRNPLGEPHILGLNAGASLAVVATSALGLSLGAFPVGRPLTAACGAGLLFGGVMALASAGRGGATPLRITLCGVALSGFASAVTAAILILDEQTLLAMRTWLAGDLAGLNWSTLQTALIGLGVALLIAPRLNVLALGDKVALGLGVNLVQTRLLGLLAIALLCGAAVAVAGPIGFVGLVVPHVVRRLVTEDIRLALPLAAPVGALALVLADIAARTLVAPQELATGAMTALVGAPLFIFIAARFFK

SEQ ID NO: 2469 - DNA, 822 bp, Escherichia coli
atgccacagcgggtgaaacctgcagagcaggggatcgtactggatgccctgtcggccggctacggccagaccctgatcgttgacgatatcaacctgaccattcccaccggcaaaatgacggtgctggccggggcgaacggatccggcaaatccacgctgctctcgaccatcgccagaatgctgaaaccgctcggcggctgtgtgcgtctggacgggcaagccattcaccagatgccgacgaaagccgtctcgcgccagctgggcatcctcccgcaatcgccgttgaccccggaaggattgaccgttttcgagctggtctcgcgcgggcgctacccgtggcaggggctgatgcgccagtggtccgaggccgatgagctggcggtagaggaggcactgcgcttaaccggtaccgccgaattcgcccatctgccggtggacagcctctccggcggccagcgtcagcgctgctggatcgccatggcgctggcccagcaaacggccaccattctgctcgatgagccgaccacctggctcgatctgcgctatcaggtcgatatccttgagctgctccagaccctcacccgcgaacatggccgcacggtggtgacggtgctccatgaccttaactttgcggtgaactacgccgatctgctggtattccttaaacaggggcgcatcgccggcacgattagcgacaacgacgtctgtagccctgagctgattaaacgcgtgtttgacgttgacgtgcagatgtcgattaacccgcaaaccggcaaacccttctttatgccgtttcgcgcccgccaggcagcggcacaatga

SEQ ID NO: 2470 - protein, 273 aa, Escherichia coli
MPQRVKPAEQGIVLDALSAGYGQTLIVDDINLTIPTGKMTVLAGANGSGKSTLLSTIARMLKPLGGCVRLDGQAIHQMPTKAVSRQLGILPQSPLTPEGLTVFELVSRGRYPWQGLMRQWSEADELAVEEALRLTGTAEFAHLPVDSLSGGQRQRCWIAMALAQQTATILLDEPTTWLDLRYQVDILELLQTLTREHGRTVVTVLHDLNFAVNYADLLVFLKQGRIAGTISDNDVCSPELIKRVFDVDVQMSINPQTGKPFFMPFRARQAAAQ

SEQ ID NO: 2471 - DNA, 204 bp, Enterobacter cloacae
atgaccgctagccccatggatcgccagctatatagaaggagaatcaccggcctggagagaaacataaaaattcgcgagcgttgcgcaaacgttttcgttacaatgccgcgctatgacacggatgcccggttgggtgcgttaggtgagtttttaggcaaaagctcacctaacgctctctgtaatgttcaaatcctggggatttaa

SEQ ID NO: 2472 - protein, 67 aa, Enterobacter cloacae
MTASPMDRQLYRRRITGLERNIKIRERCANVFVTMPRYDTDARLGALGEFLGKSSPNALCNVQILGI

SEQ ID NO: 2473 - DNA, 510 bp, Enterobacter cloacae
atgacagtattacaccgtcttttattgactgtattttttctcatcgcggtatctcctgtttttgctgccggaccttcagaacatgttcgcgctattgtttccgggatcgtgacctacacccgttggccgtcattaacaggagcgccaaagctgtgcatttttgcctcatcacgcttcacccatagcctggctcatgaagatccggatgcattaccctatcaaccggtgatagtacgtaatcgtgaagaagcgttaaaaacgacctgcgatggtttttattttggcagcgaatcgccgactgaacagtcagaactcactcgccgctatggcccgaggccgctgttactcatcgcagaacaaaatacggattgttcaattggtagcgcgttttgcctgatcatcaatgacgaccgggtccgcttctccgttaatctggacgttctgacgcacagcggggttcgggttaacccggacgttctgatgcttgcccggaagaaaccacatgaataa

SEQ ID NO: 2474 - protein, 169 aa, Enterobacter cloacae
MTVLHRLLLTVFFLIAVSPVFAAGPSEHVRAIVSGIVTYTRWPSLTGAPKLCIFASSRFTHSLAHEDPDALPYQPVIVRNREEALKTTCDGFYFGSESPTEQSELTRRYGPRPLLLIAEQNTDCSIGSAFCLIINDDRVRFSVNLDVLTHSGVRVNPDVLMLARKKPHE

SEQ ID NO: 2475 - DNA, 405 bp, Klebsiella pneumoniae
atgaattacatcgtggctcagttgttaggggccggcgctgctgcactgtgcctgaaggctgtctttggccactccctgctggccggggtgacccgggtccatatgggggtatcactgtacaatgcctttttcatcgaaggtgtcatgacttttattctgattatgagcatcctaacgaccagaaaccccgcgattatcagcattgctgtttttcttgatgcttttattggcgggccgctgacgggggcaagcatgaacccggcccgtagcttcgggccggcattggccatgggatactgggataatcagtggctgtactgggccgctccgctgtctggcgggcttgcagctgttgcgtgctgccagctgtttatgccgcaactgaagtcaccctcaccggaataa

SEQ ID NO: 2476 - protein, 134 aa, Klebsiella pneumoniae
MNYIVAQLLGAGAAALCLKAVFGHSLLAGVTRVHMGVSLYNAFFIEGVMTFILIMSILTTRNPAIISIAVFLDAFIGGPLTGASMNPARSFGPALAMGYWDNQWLYWAAPLSGGLAAVACCQLFMPQLKSPSPE

SEQ ID NO: 2477 - DNA, 600 bp, Enterobacter cloacae
atgttgactgaacagctggactgggaaaaaacggacggtatgatgccggccatcgtgcagcacgccgtatccggcgaagtgctgatgctcggctacatgaacaaggaggcgctggagaaaaccgaagccaccggcaaggtcaccttttactcgcgcaccaagcagcggctgtggaccaagggtgaaacctcgggccatgtcctcaacgtggtgagcatcacgccggactgtgacaacgatacgctgctggtgctggtaaacccgatcgggccgacctgccacaaaggcaccaccagctgcttcggcgaaaccggccaccagtggctgttcctctatcagctggagcagctgctggccgagcgtaaacacgccgacccggagagctcctatacggcgaagctgtacgccagcggcaccaagcgtattgcgcagaaagtgggggaagaaggcgtggagaccgcgctggccgccaccgtgaacgaccgcttcgagctgaagaatgaggcgtcggacctgatgtatcacctgctggtgctgctgcaggaccaggggctggatctcggggaagtgattgataatttaagagcacggcataggtaa

SEQ ID NO: 2478 - protein, 199 aa, Enterobacter cloacae
MLTEQLDWEKTDGMMPAIVQHAVSGEVLMLGYMNKEALEKTEATGKVTFYSRTKQRLWTKGETSGHVLNVVSITPDCDNDTLLVLVNPIGPTCHKGTTSCFGETGHQWLFLYQLEQLLAERKHADPESSYTAKLYASGTKRIAQKVGEEGVETALAATVNDRFELKNEASDLMYHLLVLLQDQGLDLGEVIDNLRARHR

SEQ ID NO: 2479 - DNA, 777 bp, Citrobacter freundii
atgctggcaaaacggataatcccctgcctcgacgtccgcgacggccaggtagtgaaaggcgtgcagttccgtaatcacgagatcattggcgacatcgtcccgctggccaagcgctatgccgacgaaggggccgacgaactggtgttctatgatatcaccgcctccagcgacggtcgggtggtcgacaagagctgggtgtcgcgggtagcggaagtgattgatattcctttctgcgtggcgggcgggatcaagtcgctggaagacgcggcgcagatcctctccttcggcgccgataagatctcgattaactcccctgctctcgccgacccgacgctgatcacccgccttgccgaccgctttggcgtgcagtgtatcgtggtggggattgatacctggtttgatgcagagaccggcaagtatcacgtcaaccagtataccggcgacgagagccgcacccgggtgacgcagtgggaaaccctcgactgggtggaggaagtgcagaagcgcggcgcaggcgagatcgttctcaatatgatgaaccaggacggggtacgcaacggctacgacctgaagcagctggcgaaggttcgcgcggtgtgccacgtcccgctgatcgcctccggcggcgcgggcactatggaacacttcctcgaagccttccgcgacgccgacgttgacggcgcgctggcggcctcggtattccacaaacagattattaatattggcgaactgaaagcgtacctggcggcacagggcgtggagataagggtatgttga

SEQ ID NO: 2480 - protein, 258 aa, Citrobacter freundii
MLAKRIIPCLDVRDGQVVKGVQFRNHEIIGDIVPLAKRYADEGADELVFYDITASSDGRVVDKSWVSRVAEVIDIPFCVAGGIKSLEDAAQILSFGADKISINSPALADPTLITRLADRFGVQCIVVGIDTWFDAETGKYHVNQYTGDESRTRVTQWETLDWVEEVQKRGAGEIVLNMMNQDGVRNGYDLKQLAKVRAVCHVPLIASGGAGTMEHFLEAFRDADVDGALAASVFHKQIINIGELKAYLAAQGVEIRVC

SEQ ID NO: 2481 - DNA, 738 bp, Enterobacter hormaechei
atgattattcctgctttagatttaatcgacggcaccgtcgttcgtctccatcagggcgattacggccagcagcgcgactatggcagcgatccgctgccgcgcctgcagtcctatgccgctcagggagcggaagtcctgcacctggtcgacctgaccggggcgaaggatccggcgaagcgccaaatcccgctgctgaaatcgctggtcgccggggttgacgtcccggtgcaggtcggcggcggcgtgcggaccgaagcggatgtcgcggccctgcttgaggccggcgtcgcccgcgtggtggtcggctccaccgcggtgaaatccccggaggaagtgaaaggctggttcaaacgctttggcccagagcggctggtgctcgccctcgacgtgcgtatcgacgccgacggcaataagcaggtggcggtcagcggctggcaggaaaactccggcgtgacgctagaggagctggtggaaagttatctgccggtcggcctgcagcacgtgctgtgcaccgatatctcccgcgacggcacgctggcaggctctaacgtctcgctgtacgaggaagtctgcgctcgctacccgcaggtggcgtttcagtcatccggcggcatcggcgatctcaaagatattgccgcgctgcgcggcaccggggtgcgcggcgtgattgtcggtcgcgcgctgctggaaggtaaattcaacgtaacggaggccattcaatgctggcaaaacggataa

SEQ ID NO: 2482 - protein, 245 aa, Enterobacter hormaechei
MIIPALDLIDGTVVRLHQGDYGQQRDYGSDPLPRLQSYAAQGAEVLHLVDLTGAKDPAKRQIPLLKSLVAGVDVPVQVGGGVRTEADVAALLEAGVARVVVGSTAVKSPEEVKGWFKRFGPERLVLALDVRIDADGNKQVAVSGWQENSGVTLEELVESYLPVGLQHVLCTDISRDGTLAGSNVSLYEEVCARYPQVAFQSSGGIGDLKDIAALRGTGVRGVIVGRALLEGKFNVTEAIQCWQNG

SEQ ID NO: 2483 - DNA, 591 bp, Salmonella enterica
atgaatgtggtgatccttgataccggctgcgccaacctcaattcggtgaaatcggcgattggccgccacggctatgagccggtggtcagccgcgatccggaagtggtattgcgtgccgataaactgtttcttcccggcgtcggcaccgcccaggcggcgatggatcagctgcgcgaccgggagctgatcgacctgatcaaagcctgtacccagccggtgctggggatttgcctgggcatgcagctgctcggcaagcgcagcgaggagaacaacggcgtcgatctgctgggcattatcgaagaagaggtgccgaagatgaccgaccacggtctgccattgccgcacatgggctggaaccgggtgtatgccaaagctggcgatcggctgttccgcggcattgaagaaggcgcgtatttctacttcgtgcacagctacgccatgccggtcaacccgtacaccatcgcccagtgcaattacggggaggcgttcaccgccgcggtgcagaaagataacttctttggcgtgcagtttcacccggagcgctccgggagcgccggagcgcagctgctgaaaaacttcctggagatgtga

SEQ ID NO: 2484 - protein, 196 aa, Salmonella enterica
MNVVILDTGCANLNSVKSAIGRHGYEPVVSRDPEVVLRADKLFLPGVGTAQAAMDQLRDRELIDLIKACTQPVLGICLGMQLLGKRSEENNGVDLLGIIEEEVPKMTDHGLPLPHMGWNRVYAKAGDRLFRGIEEGAYFYFVHSYAMPVNPYTIAQCNYGEAFTAAVQKDNFFGVQFHPERSGSAGAQLLKNFLEM

SEQ ID NO: 2485 - DNA, 2325 bp, Enterobacter roggenkampii
atgacgccgttacgcgtttttcgtaaaacaacacctttggttaacgccattcgcctgagcctgctgccgctggccggtctctcgttttccgcttttgctgcacaggttgatatcgcaccgggatcgctcgacaaagcgctcaatcagtatgccgcacacagcggaattaccctctcggttgacgccagcctgacgcgcggcaagcagagcaacggcctgcacggagattacgacgtcgagagcggcctgcaacagctgctggacggcagcggactgcaggtaaaaccgctgggaaataacagctggacgctggagcccgcgcccgcgccaaaagaagatgccctgaccgtggtcggcgactggctgggcgatgcgcgtgaaaacgacgtatttgaacatgctggcgcgcgtgacgtgatccgccgtgaggatttcgccaaaaccggcgcaaccaccatgcgtgaggtgcttaaccgcatccctggcgtcagcgcgccggaaaacaacggcaccggcagccacgacctggcgatgaactttggcatccggggcctgaacccacgcctcgccagccgctcgaccgtcctgatggacggcatccccgtcccctttgccccttacggtcagccgcagctttcactggctcccgtttcgctcggcaacatggatgccattgacgtggtgcgcggtggtggtgcggtgcgttacggaccgcagagcgtgggcggcgtggtgaactttgttacccgcgccattccgcaggactttggtatcgaggcgggggtggaaggtcagctcagcccaacctcttcacaaaacaacccgaaagagacgcacaacctgatggtgggcggcacagcggacaacggttttggcaccgcgctgctctactccggcacgcgcggcagtgactggcgcgagcacagcgccacccgcatcgacgacctgatgctgaaaagcaaatatgcgccgaataaggtgcacaccttcaacagcctgctgcaatattacgatggtgaagccgacatgcccggcggcctgtcccgcgcggattacgacgccgatcgctggcaatccacccgcccgtatgaccgcttctggggccgtcgcaagctggcgagcctgggctaccagttccagccggacagccagcataaattcaacattctggggttctacacccaaaccctgcgcagcggctacctggagcaaggcaaacgcatcaccctctcgccgcgtaactactgggtgcgcggtattgagccacgctacagccagagctttatgatcggcccttacgcgcacgaagtgggcgtgggctatcgctatgtgaatgaatcaacgcatgaaatgcgttactacaccgccaccagcagcgggcagttgccgtccggctcaagcccttacgaccgcgaaacgcgttccggcaccgaggcgcacgcctggtatctggatgacaaaatcgacatcggcaactggaccatcacgccgggtatgcgtttcgaacatatcgagtcataccagaacaacgccatcaaaggcacgcacgaagaggtgagctataacgcaccgcttccggcgttgaacgtgctctatcacctgactgatagctggaatctttatgcaaacactgaaggctcgttcggcaccgtacagtacagccagattggcaaggctgtgcaaagcggcaatgtggaaccggaaaaagcgcgaacctgggaactcggtacccgctacgacgacggcgcgctgacggcggaaatggggctgttcctaattaactttaacaatcagtacgactccaaccagaccaacgacaccgtcactgcacgtggcaaaacgcgccataccgggctggaaacgcaggcacgttacgacctgggtacgctaacgccaacgcttgataacgtttccgtctacgccagctatgcgtatgtgaacgcggaaatccgcgagaaaggcgacacctatggcaatcaggtgccattctccccgaaacataaaggcacgctgggcgtggactacaagccgggcaactggacgttcaatctgaacagcgatttccagtccagccagtttgcggataacgccaatacggtgaaagagagcgccgacggcagtaccggccgcattcccggcttcatgctctggggcgcacgcgtggcgtatgactttggcccgcagatggcagatctgaacctggcgttcggtgtgaaaaacatcttcgaccaggactacttcatccgctcttatgacgacaacaacaaaggcatctacgcaggccagccgcgcacgctgtatatgcaggggtcgttgaagttctga

SEQ ID NO: 2486 - protein, 774 aa, Enterobacter roggenkampii
MTPLRVFRKTTPLVNAIRLSLLPLAGLSFSAFAAQVDIAPGSLDKALNQYAAHSGITLSVDASLTRGKQSNGLHGDYDVESGLQQLLDGSGLQVKPLGNNSWTLEPAPAPKEDALTVVGDWLGDARENDVFEHAGARDVIRREDFAKTGATTMREVLNRIPGVSAPENNGTGSHDLAMNFGIRGLNPRLASRSTVLMDGIPVPFAPYGQPQLSLAPVSLGNMDAIDVVRGGGAVRYGPQSVGGVVNFVTRAIPQDFGIEAGVEGQLSPTSSQNNPKETHNLMVGGTADNGFGTALLYSGTRGSDWREHSATRIDDLMLKSKYAPNKVHTFNSLLQYYDGEADMPGGLSRADYDADRWQSTRPYDRFWGRRKLASLGYQFQPDSQHKFNILGFYTQTLRSGYLEQGKRITLSPRNYWVRGIEPRYSQSFMIGPYAHEVGVGYRYVNESTHEMRYYTATSSGQLPSGSSPYDRETRSGTEAHAWYLDDKIDIGNWTITPGMRFEHIESYQNNAIKGTHEEVSYNAPLPALNVLYHLTDSWNLYANTEGSFGTVQYSQIGKAVQSGNVEPEKARTWELGTRYDDGALTAEMGLFLINFNNQYDSNQTNDTVTARGKTRHTGLETQARYDLGTLTPTLDNVSVYASYAYVNAEIREKGDTYGNQVPFSPKHKGTLGVDYKPGNWTFNLNSDFQSSQFADNANTVKESADGSTGRIPGFMLWGARVAYDFGPQMADLNLAFGVKNIFDQDYFIRSYDDNNKGIYAGQPRTLYMQGSLKF

SEQ ID NO: 2487 - DNA, 522 bp, Enterobacter roggenkampii
atgtctgaccgtgccactaccacagcttccttaacgttcgagtcgctttatggcacccatcacggctggttgaaaagttggctgacgcgcaaactccagtctgcctttgatgcagatgacattgcccaggacacttttttgcgggtaatgagcagcgaaacgctctcgacgatccgcgatcctcgctctttcctgtgcactatcgccaaacgcgtgatggtggacctgtttcgccgaaacgcgctggaaaaagcgtatctggagatgctggcgcttatgccggagggggtagcgccttcacctgaggaacgcgaaagccagctcgagaccctacaactcgtcgacagcatgctggacgggctaaacggaaaaacacgtgaagcgtttctgctttcgcaactggatggcctgacatacagcgagattgcgcacaaactcggtgtttccgtcagctccgtgaaaaaatacgtggcgaaagccgtcgagcactgcctgctgtttcgtctggagcatgggttatga

SEQ ID NO: 2488 - protein, 173 aa, Enterobacter roggenkampii
MSDRATTTASLTFESLYGTHHGWLKSWLTRKLQSAFDADDIAQDTFLRVMSSETLSTIRDPRSFLCTIAKRVMVDLFRRNALEKAYLEMLALMPEGVAPSPEERESQLETLQLVDSMLDGLNGKTREAFLLSQLDGLTYSEIAHKLGVSVSSVKKYVAKAVEHCLLFRLEHGL

SEQ ID NO: 2489 - DNA, 1734 bp, Klebsiella michiganensis
atgtcagcagtcctatttccggcgccgctgctctcggtcgagcgcctgtcgatccagtttggtacacagcgggtggtggatgacgtcagctttgcgctctggccgggaaaaactctgtgcattgccggcgagtcgggcagcggtaaatcgctgacttcgctggcgatcatgggtttgcttccggaggaggcacagattccaggcggcgcgattatttttgataaccaggatttgctcagcctgccggagcggcaaatgcagttgctgcgcggcaagtcggttgccatgatttttcaggaaccgatgacctcgctcaatccgctgatgacggtgggccagcagctggaagagacgctgcaacgccacgaagtgctgggccgccgtgaacggcgcagccgggtcagcacgatgctggacgcggtcaaaatcagtcatgtggagaagcgcctgcaacagtatccgcacgagctttccggcggtatgcgccagcgggtgatgatcgccatggcaatgctgtgccagccacaggtgctgattgccgatgagccgaccacggccctcgacgtcactattcaggcgcagatcctcgagttgatgcgcgaactgcagcaggcgttttccaccagcctgctgttgatcacccacgatatgggagtggtggcagaaatggccgatgatgtgctggtcatgagtcacggcaaaatcatggagcaggctccggcaaaaacgctgtttacctcgccgcaggcggcttatacccgccagctgttgcaggcggtaccggtgctgggccaggcgcccgcgctggcgccggtcgaggcgacgcgaccgttgctcagcgtccgcgacctcagcgtgcgctttccggtgcgcggcgacggcctgcgcgtgcgtcgcgaagtccatgccgtcgatggcgtcagcttcgatcttttccccggcgagacgttgggcatcgtcggtgaaagcggctgcggtaaatcgacgacggcaaaagcgctgatgaatatggtgccatttagcggcagcgcgcagcttaacggacaggagctgcacggcctgaaggacgaggcgttaagagcggtacgccgcgatttgcagatggtgtttcaggatccctgggcggcgctcaatccgcgcaaaactattttcgacctggttggggagccgctgctgattcatgagcagatgcccgcagtacagcgcacggagcgggtggcgcagctattgcagcaggtcggcctgccagcggaagcgatgcggcgttatccgcaccagttttccggcggccagcgccagcgcatttgcattgcccgcgcgctggcgctgaacccgaaagtgatcatcgccgatgaatcggtttccgcgctggatgtttcagtacaggcgcaggtgctgacgctgctggaagatttgcgtcagcgctatcggctcagctatctgtttatttcccatgatatggcggtggtggagcgcatctgccaccgggtagcggtgatgtttggcggccagctcgtggagatcggcccacgagatcgagtgttgcaccatccgcagcatccttatactcagcacttgctcagcgccgttcctatacctgacgttcagcaaagacggcaaccccgagccaccagcgcaatgccgataagaccagaaccgatcaaacccatcggctatcagagagtaccgcagcgctttaccgattttggcgacgggcacctcgtcgcatgctga

SEQ ID NO: 2490 - protein, 577 aa, Klebsiella michiganensis
MSAVLFPAPLLSVERLSIQFGTQRVVDDVSFALWPGKTLCIAGESGSGKSLTSLAIMGLLPEEAQIPGGAIIFDNQDLLSLPERQMQLLRGKSVAMIFQEPMTSLNPLMTVGQQLEETLQRHEVLGRRERRSRVSTMLDAVKISHVEKRLQQYPHELSGGMRQRVMIAMAMLCQPQVLIADEPTTALDVTIQAQILELMRELQQAFSTSLLLITHDMGVVAEMADDVLVMSHGKIMEQAPAKTLFTSPQAAYTRQLLQAVPVLGQAPALAPVEATRPLLSVRDLSVRFPVRGDGLRVRREVHAVDGVSFDLFPGETLGIVGESGCGKSTTAKALMNMVPFSGSAQLNGQELHGLKDEALRAVRRDLQMVFQDPWAALNPRKTIFDLVGEPLLIHEQMPAVQRTERVAQLLQQVGLPAEAMRRYPHQFSGGQRQRICIARALALNPKVIIADESVSALDVSVQAQVLTLLEDLRQRYRLSYLFISHDMAVVERICHRVAVMFGGQLVEIGPRDRVLHHPQHPYTQHLLSAVPIPDVQQRRQPRATSAMPIRPEPIKPIGYQRVPQRFTDFGDGHLVAC

SEQ ID NO: 2491 - DNA, 936 bp, Klebsiella pneumoniae
atgtcaacacacgaaatcacatttcgccatgtggacgaaaaaaagaaatccttaatcatgcagaatcgcggagggcaatcggttatagctcggatactgaaagcctatggtttttcttcccgacaagcattctgtaatcacctaggtatatcgcaaagtacaatggcgaacaggtatgcccgtgacactttccctgctgattgggtcgttatctgtagcatggagactggagtgccggtcgagtggttggcatttggcactgatacagagaagggaagaattacaaataatgcagaaaaaagtcacaacaattgtgacagcaagcatcaacatctcaatagagaacaagacatccaaaatgagaacttttttactattaaccaaggcggaaaagcagcaatagagcgaatcgttttggcttatggatttaagacaagacaagctttagctgatcatattggtgtatcaaaaagtacattagccaatcgttacatgagagatacctttcctgctgactggattattcaatgctcactggaaactggtgcttcattaacatggctaaccactggtaacggggcaatgtttgaaaagcctcgaatcaatactatcactatcccatatcataaaataattgatggatctcttgctcaagaaaccgttttgacttttgactctaagttgttagaaggaacctttctgcaacctttagcagtattcattgatgaggaaatatatattgtagaatcaaaatttaatgaagttactgatggcaagtggcttgtgaatattgaagggaaaataagcatcaaagatttgactcgcatacccgttggtatggttaaagttgtaggcactaacgcaagttttgaatgcttacttactgacattatcgttttggcaaaatgtaaaagagtttttactaaaaatgtataa

SEQ ID NO: 2492 - protein, 311 aa, Klebsiella pneumoniae
MSTHEITFRHVDEKKKSLIMQNRGGQSVIARILKAYGFSSRQAFCNHLGISQSTMANRYARDTFPADWVVICSMETGVPVEWLAFGTDTEKGRITNNAEKSHNNCDSKHQHLNREQDIQNENFFTINQGGKAAIERIVLAYGFKTRQALADHIGVSKSTLANRYMRDTFPADWIIQCSLETGASLTWLTTGNGAMFEKPRINTITIPYHKIIDGSLAQETVLTFDSKLLEGTFLQPLAVFIDEEIYIVESKFNEVTDGKWLVNIEGKISIKDLTRIPVGMVKVVGTNASFECLLTDIIVLAKCKRVFTKNV

SEQ ID NO: 2493 - DNA, 960 bp, Citrobacter portucalensis
atgaacacgcaacctgtcattgggatcagcggatgtttaaccggctcagccgtgcgattcgacggcgggcataagcgtatgggctttgtgatggatgagctcgcgcagtgggtggcgtttaaacccgtctgcccggagatggcgatcggcctgcccgttccccgcccggcgctccgcctggtgcagaccccggtcggggagatccgcatgcgcttcagccacgccccgcacgaggatgtgacggagaagatggctgatttcgccagcgcccacctcgcaaccctgggcgagctgtcgggctttatcgtctgcgccaaatcgccgagctgcggaatggagcgcgtgcggttgtacgatgaaaaaggcaatcgcgggcgtaaggaaggcgtggggctgtttaccggtgccctgatggcgcgctacccgtggctgccggtggaagaggatggccggctgcacgatccgctgctgcgggagaattttgtcgagcgcgttttcgccctgcatgaactcaacgccctgcgcgcccgcggcctgacgcgccacagcctgctggcctttcacagccgctacaagctgcagctgctggctcaccaccaggcaggctaccgggagatcggcccgttcgtcgcctcgctgcatgaatgggaggatctggaggcgttcttcgaggtttaccgcgagaagctgatggcgatcctcaagcagcccgcctcgcggaaaaaccacaccaacgtgctgatgcatattcagggttatttccgcgaccagctaaacagccgccagcgcggcgagctgcgggaggtgatcctcaactatcgcgccgggctgctgccgatcctcgccccgctgacgctgcttaagcactatctggccgagtatccggatcgctacctgcaggcgcagaactattttgacccctacccgcaggatctggccctgcgcctgacggtgaactga

SEQ ID NO: 2494 - protein, 319 aa, Citrobacter portucalensis
MNTQPVIGISGCLTGSAVRFDGGHKRMGFVMDELAQWVAFKPVCPEMAIGLPVPRPALRLVQTPVGEIRMRFSHAPHEDVTEKMADFASAHLATLGELSGFIVCAKSPSCGMERVRLYDEKGNRGRKEGVGLFTGALMARYPWLPVEEDGRLHDPLLRENFVERVFALHELNALRARGLTRHSLLAFHSRYKLQLLAHHQAGYREIGPFVASLHEWEDLEAFFEVYREKLMAILKQPASRKNHTNVLMHIQGYFRDQLNSRQRGELREVILNYRAGLLPILAPLTLLKHYLAEYPDRYLQAQNYFDPYPQDLALRLTVN

SEQ ID NO: 2495 - DNA, 2124 bp, Enterobacter cloacae
atgactaatgaactatttgaaaagatcatcgcgaaagttaacttttctctcctaaagaaaacgccagttatattgcaatcggaagccgctgagtgcggcattgcctgtctggccatggtttgtggtcattacggcttggatattgacctgtttaatttccggcagcgttttggtagtccttcacagggcgtgacactgatgtccttaagcaaaacagcggagcatgctgggttaaaaagccgtgcgctgtcgttagacttggatgaaatacgccagctcaagttgccctgtgtactccactggggcatgaaccactatgtggtgctgactaaagttcgcaaatccagctttatcgtacacgatccagcgctgggtaagcgtattatcggcatccaggagatgtccaattattttactggcgttgccttagagctttggcccgatcagaacttccagcaggaaaaggctaagtcccgccttcgtctgctggatctaatgcgcaatatagtaggcttaaaatcagcgctgctgaaaatttttgccttctccgtggtcgtggaagccatcggcttactactcccgataggtactcaactggttaccgaccatgtgattatggcgcacgaccaaagcctgctatcagttatatgcattggcctggtcttttttacactatttcgcaccttcatcagtatgctccgcgcctggacgtccttaacgctgaataccctgacaagtatccagtggaaaaccacgcttttcgatcatctggccagtctgccactatccttttttgaaaagcgtcatttaggagatatccagtcgcgtttttcctctttggataccattcgctcgacgtttactaacagtatcgtcagcggcattattgactcaatcatgaccatcggtctgctgatcatgctaactttgtatggtggctggctaacttgggtcgtagttggctttactttatgctacgcaattatgcgttttgcaacttatcgattctatcgtcgtgtagcagaagagcaggtaatcaaaggtgctcgctccagttcgcattttatggagtcattgtacggtatctcgaccatcaaggcattaaacttgaaagaacgtcggtcccagcattggcttaatataaatatcgaagcctgcaacgctggaatcaaacaaactcgtttcgatatgctatttagtgggatcaataccttcattactgctatcgatcaggtcgccgtgctctggcttggcgcgattatggttattgataataatatgacccttggtatgtttatggcgtttaacgcctatcgtggtcaattttcacaacgcgcttctagtttggtcgatctttgtatgcaactgcgaatgctctccctacataacgaacgtctgtcagagatcgttttcagcgaaccggaacaggagcttcccacaagagaggttttttctgcagactcgggtgccaaactggaagtcaaaaatttgtgctatcaatatgatccgttttctcagccgatcttttctaatttaaatataaccgtagaacccggtgagtccgtagcacttgtcggcccttcaggcgtcggtaaaactacgttattaaaagtgatgtgcggtctgttgtcgcccaccagcggtgatgtgttagccgataatctcgatatcaccaaaattggtctcaataattatcgtcttggtatcgcctgcgtactgcaagaggaccgccttttctctgggtcgcttatcgataatatcagcggcttcgaagataacgccgatattgattttgtgatggaatgcgccaaacgctgcaatattcacgatgagatcatcaagatgccgatgggctatgaaaccatagtcggcgagctaggactgggaatttcaggtgggcaaaagcagcgtattctgatcgctcgcgctctttatcgtagaccaagtattctttttatggatgaggcaaccagccatctcgacttaaaaaatgagtcggtgataaatcagtctatttcagcattaagcatcaccaggattattgtcgctcaccggccatcgacgattgcctctgccgatcgcgttatcgacctgtcgcagacaaagaccctctcgccagcttaa

SEQ ID NO: 2496 - protein, 707 aa, Enterobacter cloacae
MTNELFEKIIAKVNFSLLKKTPVILQSEAAECGIACLAMVCGHYGLDIDLFNFRQRFGSPSQGVTLMSLSKTAEHAGLKSRALSLDLDEIRQLKLPCVLHWGMNHYVVLTKVRKSSFIVHDPALGKRIIGIQEMSNYFTGVALELWPDQNFQQEKAKSRLRLLDLMRNIVGLKSALLKIFAFSVVVEAIGLLLPIGTQLVTDHVIMAHDQSLLSVICIGLVFFTLFRTFISMLRAWTSLTLNTLTSIQWKTTLFDHLASLPLSFFEKRHLGDIQSRFSSLDTIRSTFTNSIVSGIIDSIMTIGLLIMLTLYGGWLTWVVVGFTLCYAIMRFATYRFYRRVAEEQVIKGARSSSHFMESLYGISTIKALNLKERRSQHWLNINIEACNAGIKQTRFDMLFSGINTFITAIDQVAVLWLGAIMVIDNNMTLGMFMAFNAYRGQFSQRASSLVDLCMQLRMLSLHNERLSEIVFSEPEQELPTREVFSADSGAKLEVKNLCYQYDPFSQPIFSNLNITVEPGESVALVGPSGVGKTTLLKVMCGLLSPTSGDVLADNLDITKIGLNNYRLGIACVLQEDRLFSGSLIDNISGFEDNADIDFVMECAKRCNIHDEIIKMPMGYETIVGELGLGISGGQKQRILIARALYRRPSILFMDEATSHLDLKNESVINQSISALSITRIIVAHRPSTIASADRVIDLSQTKTLSPA

SEQ ID NO: 2497 - DNA, 786 bp, Enterobacter cloacae
gtgaatcacggcgacgtgctggttatcgggggcaccagcgatgcgcgggcgatctgccagcagctggacgccgccgacgtacgctacaccctgtcggtggcgacccctaccggcgagcggctggccggcgatatccgcgggcagatacgctgcgggcgtatggagtggcagcagatggcggagtggctcagagcgcagcgcacccgctgggtgatcgatgcctctcacccctacgccgaggtggtcagccagaatattgtgcgcgcctgcgccagcgtcggggttctgctcagccgctatcaaaggccggagcagctgagcgatctgcgccatccgctacttcacgtggtcggcgatctgaacgaggcctgcgcggtggctcgtcgcctcggcgagcggatcctgctgaccaccggcagcaaagatctggcggcctggcgggcgggactggcggagaaaacgctgctcgcccgggtgctgccggtgccggaggtggttcagcactgtagcgatctggggtttggcgtcggggagatcttcgccctctgcgggccgttcagcgccgaatttaacgccgccttttatcgccagtgccgggccgatgttgtggtgacgaaagcctcgggggctgaaggaggctatcaggaaaaagtacaaccctgtcttgatgcggggatcccctgcatcgtcattacccgtccggcgccgctggtgacgggcgatgaactactgcaaagccaggccgatttcactgcgcggctgacgcgctggctgtcggcgacttga

SEQ ID NO: 2498 - protein, 261 aa, Enterobacter cloacae
MNHGDVLVIGGTSDARAICQQLDAADVRYTLSVATPTGERLAGDIRGQIRCGRMEWQQMAEWLRAQRTRWVIDASHPYAEVVSQNIVRACASVGVLLSRYQRPEQLSDLRHPLLHVVGDLNEACAVARRLGERILLTTGSKDLAAWRAGLAEKTLLARVLPVPEVVQHCSDLGFGVGEIFALCGPFSAEFNAAFYRQCRADVVVTKASGAEGGYQEKVQPCLDAGIPCIVITRPAPLVTGDELLQSQADFTARLTRWLSAT

SEQ ID NO: 2499 - DNA, 282 bp, Citrobacter braakii
atggcaaaaagcgcagcggccctgcatatcctggtcaaagaagagaaactggcgctggagatcctcgccaaactggagcggggcgtcagcttcgatcatctggcgaaacgctattctaaatgtccgtctggccgcaacggcggcgacttaggcgagtttcagcaaggcgcgatggtcggtccgtttgatcaagccgtcttcagctgtccgctgctcaaaccctatggcccggtgaaaaccaaattcggctaccacatcatcaaggtgctgtatcgccgctag

SEQ ID NO: 2500 - protein, 93 aa, Citrobacter braakii
MAKSAAALHILVKEEKLALEILAKLERGVSFDHLAKRYSKCPSGRNGGDLGEFQQGAMVGPFDQAVFSCPLLKPYGPVKTKFGYHIIKVLYRR

SEQ ID NO: 2501 - DNA, 873 bp, Citrobacter koseri
atgagaaagacctggcttccctggctgatcctgtcgccttccctgctgtttttactgctgtttacctggttcccgctggggcgttcggtgtatgacagcctgtttgatacccgcatggccagcgacggcgcgcagtacgtcgggctggataacttctcccgcctgtttgccgacggcgttttctggcagtcgctggtcaataatctgctctatatcctgctgacggtagtgcccggggtgaccctcgccctgctgctggcggtggcgctgagcgagaaccatcgcgtcaaccgctggctgcgcaccgcctttttcttcccgatgattatcccgatggtcagcgccgccgcgctgtggctgtttatctttatgcccggcctcggcctgctcgaccactatctggcgaagctgttcgggccgatgaacaacaactggctgggacgcagcaacagcgcgctgctggccctggcgctgatcggcgtgtggaagttcgccggctactacatgctgtttttcctcgccgggctgcagagcattccggcctcgacgcgggaagcggcgctgatggagggggctacccgcacgcaggtcttttttaaggtcacgctaccgctgctgcgcccgaccctgagctttgtgatcaccaccgcgctgatctactccatcacccagatagaccacgtggcggtgatgacccgcggcgggccggacaacgccaccaccgtgctgctctattacatccagaatctcgcctgggatacccacgacctcggtaaagcctccgccgccaccttcctcaccctggccgggctgttcgccttctcgctgattaacctgaaactgctggagaaaggagcccactatgagcgctga

SEQ ID NO: 2502 - protein, 290 aa, Citrobacter koseri
MRKTWLPWLILSPSLLFLLLFTWFPLGRSVYDSLFDTRMASDGAQYVGLDNFSRLFADGVFWQSLVNNLLYILLTVVPGVTLALLLAVALSENHRVNRWLRTAFFFPMIIPMVSAAALWLFIFMPGLGLLDHYLAKLFGPMNNNWLGRSNSALLALALIGVWKFAGYYMLFFLAGLQSIPASTREAALMEGATRTQVFFKVTLPLLRPTLSFVITTALIYSITQIDHVAVMTRGGPDNATTVLLYYIQNLAWDTHDLGKASAATFLTLAGLFAFSLINLKLLEKGAHYER

SEQ ID NO: 2503 - DNA, 1503 bp, Enterobacter cloacae
atgcatcaacaactcaagaagatgagcctgatcgggctgattctgatgatcttcacctcggtgtttggctttgccaacagcccatcggcgttttatctgatgggctatagcgcgatgccgttttaccttttttccgccctctttttctttatcccgttcgcgctgatgatggcggagatgggctcagcttatcgtcgcgaagagggcgggatctattcctggatgaaccacagcgtcgggccgcgctttgccttcattggtacctttatgtggtttgcctcgtacgtagtgtggatggtgagtaccgccgctaagatctgggtcccgctatctacttttttgtttggcgcggacaaaacccagacctgggcgctgggtagcctgacgccgacgcagacggtcggtattctggcggcctgctggatggtcgtggtgacctttattgccgtcaaagggatcaataaaatcgctaaaattaccgccgtcggcggtatcgcggtgatggggcttaacctggtgctgctgctggtgagcggggcgatccttctgcttaacggcggtcatttcgcccagccgttaaacttcaccctttcgcctaatcccgggtatcagtcgggcatggcgatgctgtcgtttgtggtatttgccatctttgcctatggcggaattgaggcggttggtggcttagtggataagaccgataagccggaaaagaactttgccaaaggtattatcatcgcggcgatcgttatctcgatcggttactcgctggcgattgtgctgtggggcgtgagcgccaactggcagcaggtgcttggcgcgcgttcgaccaacctcggcaacatcacctatgtgctgatgaccagcctcggggcgacgctgggccaggccctgcacctgacccctgcggcgtcagccctgaccggggtctggttcgcccgtattaccggcctgtcgatgtttctcgcttacaccggcgcgttcttcaccctcagctattctcctctgaaagcgattatccagggcacgccaaaagcgctctggccgtcggtgatgacccgccttaacgtcaacggaatgcccgccgcggcgatgtggctgcagtgtctgctggtcggggtgtttatcgtactggtatcgttcggtggggatagcgcttccgcgttttataacaagctgacgctgatgaccaatgtctctatgaccttgccttatctgttcctgaccatcgccttcccgttcttcaaggcgaaaacccatcttgaccggccgttcgtgatcttcaaaaaccgtccgtcgacgctgctggcgaccggcgtggtgctgctggtggtgaccttcgccaatatcttcaccattatccaacccgtcatcgacagcggggactggaacagcaccctgtggatggtgggtggaccgatcttcttctcactgctggcgctggggatctacgaaagctaccgtcggcgcatggcgtccggcgcgctggtgatggagagttaa

SEQ ID NO: 2504 - protein, 500 aa, Enterobacter cloacae
MHQQLKKMSLIGLILMIFTSVFGFANSPSAFYLMGYSAMPFYLFSALFFFIPFALMMAEMGSAYRREEGGIYSWMNHSVGPRFAFIGTFMWFASYVVWMVSTAAKIWVPLSTFLFGADKTQTWALGSLTPTQTVGILAACWMVVVTFIAVKGINKIAKITAVGGIAVMGLNLVLLLVSGAILLLNGGHFAQPLNFTLSPNPGYQSGMAMLSFVVFAIFAYGGIEAVGGLVDKTDKPEKNFAKGIIIAAIVISIGYSLAIVLWGVSANWQQVLGARSTNLGNITYVLMTSLGATLGQALHLTPAASALTGVWFARITGLSMFLAYTGAFFTLSYSPLKAIIQGTPKALWPSVMTRLNVNGMPAAAMWLQCLLVGVFIVLVSFGGDSASAFYNKLTLMTNVSMTLPYLFLTIAFPFFKAKTHLDRPFVIFKNRPSTLLATGVVLLVVTFANIFTIIQPVIDSGDWNSTLWMVGGPIFFSLLALGIYESYRRRMASGALVMES

SEQ ID NO: 2505 - DNA, 327 bp, Enterobacter cloacae
atgctcaaaacaacgctgctgttctttgctaccgctctgtgtgaaatcgtcggctgttatctaccgtggctatggctcaagcgcggggcaacgccgctgctgctgatccccaccgccctggcgctggcgctattcgtctggctcctgacgctccatccggccgccagcgggcgggtatatgccgcctacggtggggtgtacgtttgtaccgcattgctctggctgcgggtcgttgatggggtcaaattaacccattatgactgggcgggcgcggccatcgccctgtgcggcatgctaatcatcgtggcggggtggggacgggcctaa

SEQ ID NO: 2506 - protein, 108 aa, Enterobacter cloacae
MLKTTLLFFATALCEIVGCYLPWLWLKRGATPLLLIPTALALALFVWLLTLHPAASGRVYAAYGGVYVCTALLWLRVVDGVKLTHYDWAGAAIALCGMLIIVAGWGRA

SEQ ID NO: 2507 - DNA, 342 bp, Enterobacter cloacae
atgaacatgacactgaacaaacgctggtgcctgaccgccattctggcgttaagcgctgtggtctacacctccagctcctatgccgccaccgaccggctggtgattgaatctggcgacagcgcgcagagccgtcagcaggcgtcgatggaaaaagagcaatggaacgacacccgcagcctgcgccagaaggtgaacaaacgggcggaaaaagagtgggataaagccgatgtcgctttcgacgcgcaggataactgccagaagagcgccaacgtcaatgcctattgggagccaaacaccctgcgctgtcttgaccgtcgcaccggccgcgcgatcaatccctga

SEQ ID NO: 2508 - protein, 113 aa, Enterobacter cloacae
MNMTLNKRWCLTAILALSAVVYTSSSYAATDRLVIESGDSAQSRQQASMEKEQWNDTRSLRQKVNKRAEKEWDKADVAFDAQDNCQKSANVNAYWEPNTLRCLDRRTGRAINP

SEQ ID NO: 2509 - DNA, 948 bp, Enterobacter cloacae
atgacaaaccataaagaagagaacaggttattatcattatattctatggggatccttgatacaaaatatgaagaacgatttgacagattgacgaggattgccaccaaactctttgatgtaccaatagcacttgtttcattaattgatagagacaggcaatggtttaagtcatgttatgggctgaagataaaagagacagatagaagtgattcattttgtacaatagcagtagatcttagtgaaccattaatagtgcccgatgcaagccttgatccaagattcaaagaaaataaattagttaaaaatgatccttatatccggttttatgcagggcatcccgtaagactgccagatggtgagatagctggaacaatatgtattattgatacagaaccaagagtattaaccagagatgacttcttattgcttaaagatttagcagaaatcgtagaggatgagtttagaataataaacgaagcaactactgatcctttgacaggtatatgtaaccggcgttctttcgccctaatgacggatgaatcgttaagaaaagccaaaaaaaagaaaaaaacattctgtgttctgatcatagatctcgataattttaaaccaatcaatgataacttcggtcattcagaaggtaatgaagtactttgcaattttgcagatatgctggaagatcttagtagttcaaaaagcgttgttgcaagattaggaggtgatgaatttggtgttctattacccgagtcaacctataaagaagcagaagaattccttcataaattgagggccgggattaccagctacaatcttaattctcaaaaaaaatacaacatagatttttctgcagggattattgaatatgatgagaaaattcatactgaatgctctgctatcatgcaggatgcagacgaaagaatgtatgaaattaaaaagggaaaacgatag

SEQ ID NO: 2510 - protein, 315 aa, Enterobacter cloacae
MTNHKEENRLLSLYSMGILDTKYEERFDRLTRIATKLFDVPIALVSLIDRDRQWFKSCYGLKIKETDRSDSFCTIAVDLSEPLIVPDASLDPRFKENKLVKNDPYIRFYAGHPVRLPDGEIAGTICIIDTEPRVLTRDDFLLLKDLAEIVEDEFRIINEATTDPLTGICNRRSFALMTDESLRKAKKKKKTFCVLIIDLDNFKPINDNFGHSEGNEVLCNFADMLEDLSSSKSVVARLGGDEFGVLLPESTYKEAEEFLHKLRAGITSYNLNSQKKYNIDFSAGIIEYDEKIHTECSAIMQDADERMYEIKKGKR

SEQ ID NO: 2511 - DNA, 828 bp, Klebsiella pneumoniae
atgatgccccatccaatacaggacgccgtgctgcgggtcgaccggttgagcgtcgtctatccaggcggcgtgacagccctacgcgatacctcgattgcatttcggcgtggtgagttcaccgtgctgcttggtctctcgggcgcaggcaagtcgaccttgctccgtagtctcaatcgactcgtcacgcccactggcggcagtgtcaccagcgaactcggtgagctcggcagcggctcggccttgcgtcagcatcgtcggcgtaccgccatgatctttcagcaccaccagctaatcgaacgtcaaagcgcactggctaatgtgcttaccggtcggctggcctttcacaacacgctccgctcgctgtttcctctgccgcgtgccgatcaggagattgcgctcagttgcctcgctcgggtcggtctggcagacaaggcgctaagccgggtggacaaactgtccggtggccagcagcagcgggtaggcatcgcgcgtgcgctagcgcaacagccggcgatcattctggccgatgagccggtagccagtctcgacccggccacttcggtccgtgttctcggattgctgcgcgacatctgcaaggaagacggcatcaccgccatcgtttcgctgcatcaactcgaatatgcccgccgcttcgccgatcgcgtcgtcgggctggccgattctcagatcgttttcgatgccgcgccctcggaactcaccgatgcgcagcttgagcgcatctatgcaggccgctctacgactcagccagcgaatactccggctgaaccacctgtcatgctcgaaccttcactggagatgtcccgatga

SEQ ID NO: 2512 - protein, 275 aa, Klebsiella pneumoniae
MMPHPIQDAVLRVDRLSVVYPGGVTALRDTSIAFRRGEFTVLLGLSGAGKSTLLRSLNRLVTPTGGSVTSELGELGSGSALRQHRRRTAMIFQHHQLIERQSALANVLTGRLAFHNTLRSLFPLPRADQEIALSCLARVGLADKALSRVDKLSGGQQQRVGIARALAQQPAIILADEPVASLDPATSVRVLGLLRDICKEDGITAIVSLHQLEYARRFADRVVGLADSQIVFDAAPSELTDAQLERIYAGRSTTQPANTPAEPPVMLEPSLEMSR

SEQ ID NO: 2513 - DNA, 864 bp, Klebsiella pneumoniae
atgaaacgcttatccgcgctcttattgacttgcttgctgtccgctgtttcaagtttgtccgccctagcggccgatgccgatccggatgtgctaaaggttgccctgctgccggacgaaaacgcctccgagctgatcaagcgtaaccagccgctgaaggattatctggaagagcatctggacaagaaggtgcagctgatcgtaaccaccgactattcctcgatgattgaggcgatgcgctttggccgtatcgacctggcgtatttcggtccgctgtcctacgtcatggccaaaagcaaaagcgacatcgagcccttcgctgtcacggtcatcgacggcaagccgacctatcgctcggtgattatcgccaatgtggcgtcaggcgtgaatgagtatgccgaccttaagggcaagaagatggcctatggtgaccgggcatcgacgtccagccatttgattcccaaaaccgtgcttcttgagacggccggtttgacgggtgggcgggactacgaagaatattttgtgggcacgcatgacgccgttgccgtcaacgtggcgaacggcaacgccgatgcgggtgggctgtcggaggtaattttcaatcacgtagtcgaacgtggcctaatcgatccgagcaaggtgaaagtacttggttacagcggcgaatacccccagtacccctgggcgatgcgctcgaacctgagccccgagctgaaaaccaaggtgcgggatgtattcgtcggtatcgacgatcccgaagtgctgcgcaacttcaaggccgaggccttcgcgccaatcaccgacgccgactacgatgtgatccgcaaaatgggatcgctgctcggcctcgacttcgccacgatgtga

SEQ ID NO: 2514 - protein, 287 aa, Klebsiella pneumoniae
MKRLSALLLTCLLSAVSSLSALAADADPDVLKVALLPDENASELIKRNQPLKDYLEEHLDKKVQLIVTTDYSSMIEAMRFGRIDLAYFGPLSYVMAKSKSDIEPFAVTVIDGKPTYRSVIIANVASGVNEYADLKGKKMAYGDRASTSSHLIPKTVLLETAGLTGGRDYEEYFVGTHDAVAVNVANGNADAGGLSEVIFNHVVERGLIDPSKVKVLGYSGEYPQYPWAMRSNLSPELKTKVRDVFVGIDDPEVLRNFKAEAFAPITDADYDVIRKMGSLLGLDFATM

SEQ ID NO: 2515 - DNA, 828 bp, Klebsiella pneumoniae
atgtctactcattacgacgtgcaggcgctgcctgcagagcaacgcgagcacatccttcgaggcttcggcctcggttggtggcgccagctggggcaggtggcgattgtattcggagtggtgctgttggcctgctggtacgtggggctgctcgatgccaccacgctgctgaacgggctgccctccatcgcgaccctggcaggcgaggccatgccgccagacttttcgggctatcgaagctggattcgccccttgatcgacaccttggcgatgagcatcgccggtacggccatcgcagtggtgttctcgctggtggtggccttcgttgcagcgcgcaatacggcgccgcacccccttgtgttcggtgttgcccgggtgctgctcaatgccctgcggtcggtgccggagctgatcatgggcatcatcttcgttgcagccgtagggttcggcgccttgccgggcgtgcttgccctgggtctgcattcggtcggcatggtcagcaagttcttcgccgaggccatcgagcacgtcgacgaagcgccggtggaagccgctcgggcggcgggggctacgccgatgcaagtgctgctgcacgcggttttgccacaggtgacgccgcagttcgccgacgtggcgatctaccgctgggaatacaactttcgcgcctccaccgtgatgggcatggttggcgccggcggtatcggcttcgaactcatgggctcgctgcgcatcatgcagtaccaggaggttgcagcaatcctgctggtcatcctggccatggtcacgctagtagacgccttcagtggcgtgctgcgcaaacgtttcaaatag

SEQ ID NO: 2516 - protein, 275 aa, Klebsiella pneumoniae
MSTHYDVQALPAEQREHILRGFGLGWWRQLGQVAIVFGVVLLACWYVGLLDATTLLNGLPSIATLAGEAMPPDFSGYRSWIRPLIDTLAMSIAGTAIAVVFSLVVAFVAARNTAPHPLVFGVARVLLNALRSVPELIMGIIFVAAVGFGALPGVLALGLHSVGMVSKFFAEAIEHVDEAPVEAARAAGATPMQVLLHAVLPQVTPQFADVAIYRWEYNFRASTVMGMVGAGGIGFELMGSLRIMQYQEVAAILLVILAMVTLVDAFSGVLRKRFK

SEQ ID NO: 2517 - DNA, 1011 bp, Klebsiella pneumoniae
atgctgccgaaactcgttataactcaccgagtacacgatgagatcctgcaactgctggcgccacattgcgagctggtgaccaaccagaccgacagcacgctgacgcgcgaggaaattctgcgccgctgtcgcgatgctcaggcgatgatggcgttcatgcccgatcgggtcgatgcagactttcttcaagcctgccctgagctgcgtgtagtcggctgcgcgctcaagggcttcgacaatttcgatgtggacgcctgtactgcccgcggggtctggctgaccttcgtgcctgatctgttgacggtcccgactgccgagctggcgatcggactggcggtggggctggggcggcatctgcgggcagcagatgcgttcgtccgctctggcgagttccagggctggcaaccacagttctacggcacggggctggataacgctacggtcggcatccttggcatgggcgccatcggactggccatggctgagcgcttgcagggatggggcgcgaccctgcagtaccacgaggcgaaggctctggatacacaaaccgagcaacggctcggcctgcgccaggtggcgtgcagcgaactcttcgccagctcggacttcatcctgctggcgcttcccttgaatgccgatacccagcatctggtcaacgccgagctgcttgccctcgtacggccgggcgctctgcttgtaaacccctgtcgtggttcggtagtggatgaagccgccgtgctcgcggcgcttgagcgaggccagctcggcgggtatgcggcggatgtattcgaaatggaagactgggctcgcgcggaccggccgcggctgatcgatcctgcgctgctcgcgcatccgaatacgctgttcactccgcacatagggtcggcagtgcgcgcggtgcgcctggagattgaacgttgtgcagcgcagaacatcatccaggtattggcaggtgcgcgcccaatcaacgctgcgaaccgtctgcccaaggccgagcctgccgcatgttga

SEQ ID NO: 2518 - protein, 336 aa, Klebsiella pneumoniae
MLPKLVITHRVHDEILQLLAPHCELVTNQTDSTLTREEILRRCRDAQAMMAFMPDRVDADFLQACPELRVVGCALKGFDNFDVDACTARGVWLTFVPDLLTVPTAELAIGLAVGLGRHLRAADAFVRSGEFQGWQPQFYGTGLDNATVGILGMGAIGLAMAERLQGWGATLQYHEAKALDTQTEQRLGLRQVACSELFASSDFILLALPLNADTQHLVNAELLALVRPGALLVNPCRGSVVDEAAVLAALERGQLGGYAADVFEMEDWARADRPRLIDPALLAHPNTLFTPHIGSAVRAVRLEIERCAAQNIIQVLAGARPINAANRLPKAEPAAC

SEQ ID NO: 2519 - DNA, 870 bp, Klebsiella pneumoniae
atgttgaatccggtctggctgaagagcctggtagcgatcgttcaaacaggcagttttcagagcgcggcgagggcgttggggctggcccagccgacggtgtcgcagcacttgcagaagcttgaagagcaggtcggcgtaacgctggtgcagcgcagtcgtagcggctgccagcctaccacacgggcgctggccttcatgccgcatgcgaccgccttgctcgacatgcacgcccgggcgctagaagccctgcatggcaatcgtgagcgcgtcggggccagcaccaacatcggcacctaccttctccagccattcgtgcgcaactatctgacgaccgcaaatgagaggggcgaggtggatctgcgcatcgccgccaacccggatgtggccgaccagctactggcgggccagctcgacgccgcgatcatggaatggtggctacctcaccccgacttcgaacaccgcctctggcgggtcgagccgctggtgcttatcgtcagccccgaccatgcgctggctgaagcagggtgcatagaacgtgatcgtctggtggacctgccgatgctgggaggtgaaccgggtagcggtaccggacggcttctgaccgaatactttggcgaactgggcgtgcctcgcagcggtatgcagctaggcagcaccgaggcagtcaaacaagcagtgagggcgggactcggcgtgtcgttggtgatggcttccgcagtacaagacgaagttcgcagtggcgcgctggtagctcttcccatcccggggcttgaaaagcgtctccaactgatctggcgcaaacctcccggaaatctgcacccgccgggatttgtgcggcacttattggaggaggcagatctagctggataa

SEQ ID NO: 2520 - protein, 289 aa, Klebsiella pneumoniae
MLNPVWLKSLVAIVQTGSFQSAARALGLAQPTVSQHLQKLEEQVGVTLVQRSRSGCQPTTRALAFMPHATALLDMHARALEALHGNRERVGASTNIGTYLLQPFVRNYLTTANERGEVDLRIAANPDVADQLLAGQLDAAIMEWWLPHPDFEHRLWRVEPLVLIVSPDHALAEAGCIERDRLVDLPMLGGEPGSGTGRLLTEYFGELGVPRSGMQLGSTEAVKQAVRAGLGVSLVMASAVQDEVRSGALVALPIPGLEKRLQLIWRKPPGNLHPPGFVRHLLEEADLAG

SEQ ID NO: 2521 - DNA, 531 bp, Klebsiella pneumoniae
atggcgctgtacatggtatttattgaagacgcggaggaccggaacggcgagcgctgcatcatgccgaccagcgagcatctggaagatatggtggtgctcgcctggcagaccggggcgtatgttttctgttttgtcgaccgggcccagcatctggcgatgatgaaatccatcgggatgtatgacgagcggctcaacagcgacgaaaaagccacgtactttttcactggtaaaaatccgcaatgggaacggaacaaacccacaggaatgaagctgtgtgattacctctatcgcaaggtggagcggttcgccatcgagaacggtgtgcaggtggttgatgccgggaagtgctcaccggagcagattaacgcgatgattgacgtggtgagtgagcggcacggggaaagcgcggtgaacgagaagctgaaagcggagctgatgcgggaatataacagccgctattttaacgtgccggtacctgaactgccggaggacaaacctgcccgccggtggtggccgttcggcaaaaaataa

SEQ ID NO: 2522 - protein, 176 aa, Klebsiella pneumoniae
MALYMVFIEDAEDRNGERCIMPTSEHLEDMVVLAWQTGAYVFCFVDRAQHLAMMKSIGMYDERLNSDEKATYFFTGKNPQWERNKPTGMKLCDYLYRKVERFAIENGVQVVDAGKCSPEQINAMIDVVSERHGESAVNEKLKAELMREYNSRYFNVPVPELPEDKPARRWWPFGKK

SEQ ID NO: 2523 - DNA, 180 bp, Klebsiella pneumoniae
atgacaaaacaggaaaaaacagccctcaatatggctaaatttattaaggagcagtcgctgctattgctcgataaactgaatgagctggatatggataccccggccgacatgtgcgagcggctacacgaggatgcggaaacactctggcaggtgatgcgggataagctcggggaggaataa

SEQ ID NO: 2524 - protein, 59 aa, Klebsiella pneumoniae
MTKQEKTALNMAKFIKEQSLLLLDKLNELDMDTPADMCERLHEDAETLWQVMRDKLGEE

SEQ ID NO: 2525 - DNA, 300 bp, Klebsiella pneumoniae
atgccgtatgacgtggaatggaagcagggagccatcgaggatgtaacgacgctgtttgactatatcgcggaaaattcatccctgtgggatgcgcagaacgttaccgaccgggttctcgctgcggcggacaaactggccgacttcccgcgactctatgaagtggactcacgctatggcgaggacgttcgccggatcagtctgatgggacagcatgtcctctatgatgttgatgaccagaccagaaaagtccgggttctggccgtggtcggccagcgccagaatccccatattgttctctaa

SEQ ID NO: 2526 - protein, 99 aa, Klebsiella pneumoniae
MPYDVEWKQGAIEDVTTLFDYIAENSSLWDAQNVTDRVLAAADKLADFPRLYEVDSRYGEDVRRISLMGQHVLYDVDDQTRKVRVLAVVGQRQNPHIVL

SEQ ID NO: 2527 - DNA, 264 bp, Klebsiella pneumoniae
atgagcaacactacacactacgaaaacgccaactttcttcgggaactggctgaaagcctgccccgcatactgccggaaggtggcccggacaaagctgcgctgttgcagcgactggctaacgaagaactggcccaggcagagtatgaagatcaggttcgcgccaaagtgaccgccgcccgtgctgacacgcgtccgggtatgaccacggaacaactccgccagcgcctgcatggccgttatcaggaactgcgcgatgccgtatga

SEQ ID NO: 2528 - protein, 87 aa, Klebsiella pneumoniae
MSNTTHYENANFLRELAESLPRILPEGGPDKAALLQRLANEELAQAEYEDQVRAKVTAARADTRPGMTTEQLRQRLHGRYQELRDAV

SEQ ID NO: 2529 - DNA, 1686 bp, Klebsiella pneumoniae
atgagtggcggagacggacgaggtccgggtaattcaggtctgggacacaatggtggtcaggccagtgggaatgtgaacggtacatcaggtaaaggtggcccttcatcaggtggtggtacggatccaaacagcgggccgggctggggtacgacgcatacacctaacggggatattcataactataacccgggggagtttggtaacggcgggagtaaacccggtggtaatggcggtaacagcggcaatcatagcgggagctctggtggcggacagtcttcggccaccgcgatggccttcggtctgcctgccttggccactccgggggctgaaggactggctttatccgtttccggcgatgcgttgtcggccgctgttgctgatgtgctggctgccctgaaaggtccgtttaagtttggtctgtgggggattgcgatttacggagtgctgccttctgagatagcaaaagatgatccgaaaatgatgtcaaaaatcgtgacgtcattgccggcagacacggtaacggagacgccggtcagctccctgccgctggaccaggcgacggtcagcgtcactaaacgtgtggcggatattgtgaaggacgagcggcagcatattgcggttgtcaccggccggccaatgagtgttcctgtggtggatgcgaaaccgacaaaacgtccgggggtattcagtgtgtcgattccgggtctcccgtctctgcaggtgagcgtacctaaaggtgttccggccgcgaaagccccgccaaaaggcattattgctgaaaaaggtgattcacgtccggctggttttacggccggtggtaactcccgtgaagccgttattcgtttcccgaaagagagcggacagaaaccggtctatgtgtcggtgacggatgttcttactccggcacaggtaaaacagcgtctggaggaagaaaagcgtcgccagcaggcatgggacgctgctcacccggaagaggggctgaaaagagagtatgataaagcgaaagctgagctggatgctgaagataaaaatattgcgaccttaaacagtcgcattgcatcgacagagaaggcgatccccggtgcaagggctgctgttcaggaagccgataaaaaggtaaaagaggcagaggcaaataaagatgattttgtgacttataacccgcctcatgaatatggctccgggtggcaggatcaggttcgctatcttgataaggatattcagaatcagaatgagaaattaaaagctgcccagacatctttaaacgaaatgaatgaatccttatccagggataaggctgcgctttccggggcgatggagagccggaaacaaaaggagaaaaaagcgaaggatgcagaaaataaattaaatgaggaaaagaaaaaacctcgtaagggaactaaagattacggccatgattattttcctgatcccaagactgaagatattaaggggttgggagagttgaaagagggtaaacctaaaacccctaaacaaggtggtggtggtaagcgggcccgatggtatggtgataaaaagcgtaaaatttatgaatgggattcccagcacggtgagcttgaagggtaccgcgccagtgatggcgaacacctcggggcattcgatccaaaaacgggtaagcaggttaaagggccggatccaaaacgaaacattaaaaaatatctttaa

SEQ ID NO: 2530 - protein, 561 aa, Klebsiella pneumoniae
MSGGDGRGPGNSGLGHNGGQASGNVNGTSGKGGPSSGGGTDPNSGPGWGTTHTPNGDIHNYNPGEFGNGGSKPGGNGGNSGNHSGSSGGGQSSATAMAFGLPALATPGAEGLALSVSGDALSAAVADVLAALKGPFKFGLWGIAIYGVLPSEIAKDDPKMMSKIVTSLPADTVTETPVSSLPLDQATVSVTKRVADIVKDERQHIAVVTGRPMSVPVVDAKPTKRPGVFSVSIPGLPSLQVSVPKGVPAAKAPPKGIIAEKGDSRPAGFTAGGNSREAVIRFPKESGQKPVYVSVTDVLTPAQVKQRLEEEKRRQQAWDAAHPEEGLKREYDKAKAELDAEDKNIATLNSRIASTEKAIPGARAAVQEADKKVKEAEANKDDFVTYNPPHEYGSGWQDQVRYLDKDIQNQNEKLKAAQTSLNEMNESLSRDKAALSGAMESRKQKEKKAKDAENKLNEEKKKPRKGTKDYGHDYFPDPKTEDIKGLGELKEGKPKTPKQGGGGKRARWYGDKKRKIYEWDSQHGELEGYRASDGEHLGAFDPKTGKQVKGPDPKRNIKKYL

SEQ ID NO: 2531 - DNA, 258 bp, Klebsiella pneumoniae
atggggcttaaattacatattcattggtttgataagaaaaccgaagagtttaaaggtggtgaatactcaaaagacttcggtgatgatggttctgtcattgaaagtctggggatgcctttaaaggataatattaataatggttggtttgatgttgaaaaatcatgggtttcgatattacagccacactttaaaaatgtaatcgatattagtaaatttgattactttgtatcctttgtttaccgggatggtaactggtaa

SEQ ID NO: 2532 - protein, 85 aa, Klebsiella pneumoniae
MGLKLHIHWFDKKTEEFKGGEYSKDFGDDGSVIESLGMPLKDNINNGWFDVEKSWVSILQPHFKNVIDISKFDYFVSFVYRDGNW

SEQ ID NO: 2533 - DNA, 621 bp, Klebsiella pneumoniae
atggcgctggagctgtacaacgtcagccacgcgaaacgacaggcgcggaacgcggagaaaacccggctgaccctgcgctggttgcgggaagagctgtgttccacggcggagctggttgcgcggcggctggggattgcggcggtgcagccggtctaccgcttcctcgacagcctggtggcgaaagggctgctggtccggaccaaatatccggtggacggccgtcaggtcagcgtgtgggggctgacgccgcatggcgtggcgttctcgttcgacgaggacgaaccgctggcggatgttattccgtttcagccgtcaagggtgtcggcagcacatctgccgcaccggctggccgtgcaatccctgcgccttgatatggaagccagaggggccaccggctggcgcattctgcaccgtctgagtcttaaaggcatgaaagtgccggacgccctggcggagctggacggtaaaacggtggcgtttgaggtggagcgcaccgtcaagagccgtcgccggtatcaggaagtggtgtccgggtatctgttcaaccgcaaagctaacggcatcgatgaaatctggtacatctgcccggaccgggcgacgcaggtcagggtgcacgtatag

SEQ ID NO: 2534 - protein, 206 aa, Klebsiella pneumoniae
MALELYNVSHAKRQARNAEKTRLTLRWLREELCSTAELVARRLGIAAVQPVYRFLDSLVAKGLLVRTKYPVDGRQVSVWGLTPHGVAFSFDEDEPLADVIPFQPSRVSAAHLPHRLAVQSLRLDMEARGATGWRILHRLSLKGMKVPDALAELDGKTVAFEVERTVKSRRRYQEVVSGYLFNRKANGIDEIWYICPDRATQVRVHV

SEQ ID NO: 2535 - DNA, 129 bp, Klebsiella pneumoniae
atggaaaaacgccacctgcgtggccttgccgttttgcctcacatgttagtcccctgcttattcacggaatctgtgggtaactttgcatgtgtccgcagcgcccgccgcagtctcacggccggagcgtag

SEQ ID NO: 2536 - protein, 42 aa, Klebsiella pneumoniae
MEKRHLRGLAVLPHMLVPCLFTESVGNFACVRSARRSLTAGA

SEQ ID NO: 2537 - DNA, 168 bp, Klebsiella pneumoniae
gtggcgcagaccctgggggttgaggcgttccatattgggccgaccatctcccctggcgtgccctgggtgcgtgacacccgccagccgctctccctggcgctgaagtcaggtaacttcggcgatatccagttctttgcccgtgcccagcaggagtttcgtcatgactga

SEQ ID NO: 2538 - protein, 55 aa, Klebsiella pneumoniae
MAQTLGVEAFHIGPTISPGVPWVRDTRQPLSLALKSGNFGDIQFFARAQQEFRHD

SEQ ID NO: 2539 - DNA, 621 bp, Acinetobacter baumannii
atgactgagcaacaactgcgagaggaaatggtgcagattggcgcctcgttatttagccgcggctatgccaccggctccgctggcaatctgtcgctgctgctgccggacggcaacctgctggcgacgccgaccggcgcctgcctcggcgaactgcaggctcagcggttgtcggtggtgacgctgcaaggggaatggatctccggcgacaaaccgtcgaaagaggtcacttttcaccgggcggtctatttgcacaacccggcctgcaaggcgatcgtccacttgcacagccactatctgaccgcgctctcctgcctgcaggggctcgatccgcacaactgtatccgcccctttaccccctatgtggtgatgcgcgtcggcgacgtcccggtggttccctactaccggccgggcgatgaccgtattgcccaggcgctggccgggctggcgccccgctataacgcctttttactggccaaccacggaccggtggttactggctcatcgctgcgcgaagccaccaacaataccgaggaactggaagagaccgcacggctgatatttaccctcggcaaccgcgagatccgctacctgaccgctgacgaagtaaaagaactgagataa

SEQ ID NO: 2540 - protein, 206 aa, Acinetobacter baumannii
MTEQQLREEMVQIGASLFSRGYATGSAGNLSLLLPDGNLLATPTGACLGELQAQRLSVVTLQGEWISGDKPSKEVTFHRAVYLHNPACKAIVHLHSHYLTALSCLQGLDPHNCIRPFTPYVVMRVGDVPVVPYYRPGDDRIAQALAGLAPRYNAFLLANHGPVVTGSSLREATNNTEELEETARLIFTLGNREIRYLTADEVKELR

SEQ ID NO: 2541 - DNA, 783 bp, Acinetobacter baumannii
atgccaaaattcgctgcaaatttatccatgctgtttaccgaactgccgttcctggaacgctttgccgccgctgcccgggcgggatttgaagccgttgagtttctgtttccctatgagtatgccgccggggaaatcagacagcgcctgcaggagaaccagctgcagctggtgctgttcaataccccacccggcgacgtcaacgccggagaatgggggctcgccgccatccccgggagaagcgcggaggcccgacgcgatattgagctggcgctggagtatgcctgccagctcggttgcccgcaggtgcatatcatggccggcgtggtgccgccgggagcggatcgcgcagcctgcgaggccgtgcttatcggtaatctgcgctacgccgcggagtgctttgcccgccacgacaagcggatactcatcgaagcactgaatccgcagaccaaaccgggctatctctaccacagtcaatatcagacgctggcgatggtgaaacgggtcgacaggccgaacctggcggtgcagttagatctgtttcacgcgcagaaggtggacggcaatttaagccatcttattaccgaatatgccggccagtatcgccatattcagattgcctccctgcccgaccgtcatgaaccggatgagggcgaaataaactatccgtggctctatgcgctactggataaaaccggttatgacggctggatcggctgcgaatatatcccccggacagacacgctttccgggctggggtggttctcgccctaccggaaaaaataa

SEQ ID NO: 2542 - protein, 260 aa, Acinetobacter baumannii
MPKFAANLSMLFTELPFLERFAAAARAGFEAVEFLFPYEYAAGEIRQRLQENQLQLVLFNTPPGDVNAGEWGLAAIPGRSAEARRDIELALEYACQLGCPQVHIMAGVVPPGADRAACEAVLIGNLRYAAECFARHDKRILIEALNPQTKPGYLYHSQYQTLAMVKRVDRPNLAVQLDLFHAQKVDGNLSHLITEYAGQYRHIQIASLPDRHEPDEGEINYPWLYALLDKTGYDGWIGCEYIPRTDTLSGLGWFSPYRKK

SEQ ID NO: 2543 - DNA, 762 bp, Acinetobacter baumannii
gtgattccaatagaacgacatcagcgtattttagccctggtggagcagcgtggggcggtaagcattaacgagctgacggagatcctcggcgtgtcccatatgaccatccgtcgggacgtcagtaaactggaggagcaggggctgctggtcagcgtctcgggcggcgtacgcgccgtcagccggctggccgcggaacccagtcatctggtgaaaagcacgctgcagagtgaggagaaacaggcgatcggcgcgctggcggcgagtcatatcgctaaaaacagttgcatctatctggatgccgggactaccaccctggcgctggcgcgggcgatcctcgaccggaacgatctccaggtggtcaccaatgattttgagataacccagctgctgatcgatgccagccagtgcggcgtgatccacaccggcggcactctgtgccgggagaaccgctcctgcgtgggcgaatcggcggcgcgtacgttacgccacctggctatcgatacggcctttatctccgccagcggctgggacagtcgcgggatattcacccctgatgagaacaaggttaccgtcaaggagaccgtcagccaggtcagcgcgagaagcatcctgctgtgcgacagttcgaaatacaatcaggtggccacgtttatggcgttacctttgacccggttcaccaccatcattaccgaccggcatctttccgatgccgccgccagtcatatcgcccggcccgcctgcgaggtgctgcgggccggataa

SEQ ID NO: 2544 - protein, 253 aa, Acinetobacter baumannii
MIPIERHQRILALVEQRGAVSINELTEILGVSHMTIRRDVSKLEEQGLLVSVSGGVRAVSRLAAEPSHLVKSTLQSEEKQAIGALAASHIAKNSCIYLDAGTTTLALARAILDRNDLQVVTNDFEITQLLIDASQCGVIHTGGTLCRENRSCVGESAARTLRHLAIDTAFISASGWDSRGIFTPDENKVTVKETVSQVSARSILLCDSSKYNQVATFMALPLTRFTTIITDRHLSDAAASHIARPACEVLRAG

SEQ ID NO: 2545 - DNA, 837 bp, Enterobacter cloacae
atgttattagtaacagtgtcactactttccggtttaatgatttatattatcattatgaacagagcagaactcaatagttcactatctgcaaggtttgtaaaggctttgaaaaatgaagccctgtcgctggtctatcaacctatttacagaattgaagacggacagatctgcggatttgaggccttgctcagatggaaagatgaaagactcgggaatattagccctgaagtatttataccgctttctgaaagggaagggttgcaggaggatgtgactttattcgtcattaaccatgctatccgagaatttatccatactgctattcagaatgaaatatttttgagcgtaaacattaatccaagcgatcttgattcagaaaaattcagggataaactactaggattaatttctgaatataacatcccatataaaacaatccttcttgaaattacggagcgtcaaggaggggattttaaaggtatgaaaattcacattgataaatataaaaatcatggtgtcaggtttgccatcgatgactttgggacaggatattctaatcttaatctggtaactgcgcttgatgtagatgaaataaaaatagacaaatcgctaactagtgctattggtactgaatctttacgatatgatcttcttcccggactgcatgagatgttccgctccattgcagataagattgtgtttgagggtgtagagactcaggagcaggtgaactatctgaagacgttctggccacagagttatgctcagggctggtattactccagagcgcttccgctggaagaagcgagaaaacttaccatccgggaattgaactga

SEQ ID NO: 2546 - protein, 278 aa, Enterobacter cloacae
MLLVTVSLLSGLMIYIIIMNRAELNSSLSARFVKALKNEALSLVYQPIYRIEDGQICGFEALLRWKDERLGNISPEVFIPLSEREGLQEDVTLFVINHAIREFIHTAIQNEIFLSVNINPSDLDSEKFRDKLLGLISEYNIPYKTILLEITERQGGDFKGMKIHIDKYKNHGVRFAIDDFGTGYSNLNLVTALDVDEIKIDKSLTSAIGTESLRYDLLPGLHEMFRSIADKIVFEGVETQEQVNYLKTFWPQSYAQGWYYSRALPLEEARKLTIRELN

SEQ ID NO: 2547 - DNA, 777 bp, Klebsiella pneumoniae
gtgatcgccgaagtatcgactcaactatcagaggtagttggcgtcatcgagcgccatctcgaaccgacgttgctggccgtacatttgtacggctccgcagtggatggcggcctgaagccacacagtgatattgatttgctggttacggtgaccgtaaggcttgatgaaacaacgcggcgagctttgatcaacgaccttttggaaacttcggcttcccctggagagagcgagattctccgcgctgtagaagtcaccattgttgtgcacgacgacatcattccgtggcgttatccagctaagcgcgaactgcaatttggagaatggcagcgcaatgacattcttgcaggtatcttcgagccagccacgatcgacattgatctggctatcttgctgacaaaagcaagagaacatagcgttgccttggtaggtccagcggcggaggaactctttgatccggttcctgaacaggatctatttgaggcgctaaatgaaaccttaacgctatggaactcgccgcccgactgggctggcgatgagcgaaatgtagtgcttacgttgtcccgcatttggtacagcgcagtaaccggcaaaatcgcgccgaaggatgtcgctgccgactgggcaatggagcgcctgccggcccagtatcagcccgtcatacttgaagctaggcaggcttatcttggacaagaagatcgcttggcctcgcgcgcagatcagttggaagaatttgttcactacgtgaaaggcgagatcaccaaggtagtcggcaaataa

SEQ ID NO: 2548 - protein, 258 aa, Klebsiella pneumoniae
MIAEVSTQLSEVVGVIERHLEPTLLAVHLYGSAVDGGLKPHSDIDLLVTVTVRLDETTRRALINDLLETSASPGESEILRAVEVTIVVHDDIIPWRYPAKRELQFGEWQRNDILAGIFEPATIDIDLAILLTKAREHSVALVGPAAEELFDPVPEQDLFEALNETLTLWNSPPDWAGDERNVVLTLSRIWYSAVTGKIAPKDVAADWAMERLPAQYQPVILEARQAYLGQEDRLASRADQLEEFVHYVKGEITKVVGK

SEQ ID NO: 2549 - DNA, 606 bp, Klebsiella pneumoniae
atgagtattcaacatttccaaacaaagttaggcatcacaaagtacagcatcgtgaccaacagcaacgattccgtcacactgcgcctcatgactgagcatgaccttgcgatgctctatgagtggctaaatcgatctcatatcgtcgagtggtggggcggagaagaagcacgcccgacacttgctgacgtacaggaacagtacttgccaagcgttttagcgcaagagtccgtcactccatacattgcaatgctgaatggagagccgattgggtatgcccagtcgtacgttgctcttggaagcggggacggatggtgggaagaagaaaccgatccaggagtacgcggaatagaccagttactggcgaatgcatcacaactgggcaaaggcttgggaaccaagctggttcgagctctggttgagttgctgttcaatgatcccgaggtcaccaagatccaaacggacccgtcgccgagcaacttgcgagcgatccgatgctacgagaaagcggggtttgagaggcaaggtaccgtaaccaccccagatggtccagccgtgtacatggttcaaacacgccaggcattcgagcgaacacgcagtgttgcctaa

SEQ ID NO: 2550 - protein, 201 aa, Klebsiella pneumoniae
MSIQHFQTKLGITKYSIVTNSNDSVTLRLMTEHDLAMLYEWLNRSHIVEWWGGEEARPTLADVQEQYLPSVLAQESVTPYIAMLNGEPIGYAQSYVALGSGDGWWEEETDPGVRGIDQLLANASQLGKGLGTKLVRALVELLFNDPEVTKIQTDPSPSNLRAIRCYEKAGFERQGTVTTPDGPAVYMVQTRQAFERTRSVA

SEQ ID NO: 2551 - DNA, 474 bp, Klebsiella pneumoniae
atggcactcaaaaccttgtcagcactcccggtatttgctgattctctttttgccgatcgctttaatcgtattgaccgtcttttcagccagttaacgggcgatacgccggtgggcactttaccggcttatgatttacagaaagtcgacgacagcaatttcctgctcagcgtcagcgtgcctggctggaaagatgatgagctggaaatagaaaccgtaggggggaatctgcatatttccgggaaacgccaggaaaccgattcctcgacagacagcggtgaacgctggatttataaaggtatccgccgcgctaatttccagctcagtttctctcttcctgaacacgcccaaattaatcaggcgcagctggatagcggcatcttaaaaatagccatccaccaggaaatcccggagagcgaaaaaccgcgtaaaattgcgatcgagaatcaggggcgcgtgatagaacataaagtttga

SEQ ID NO: 2552 - protein, 157 aa, Klebsiella pneumoniae
MALKTLSALPVFADSLFADRFNRIDRLFSQLTGDTPVGTLPAYDLQKVDDSNFLLSVSVPGWKDDELEIETVGGNLHISGKRQETDSSTDSGERWIYKGIRRANFQLSFSLPEHAQINQAQLDSGILKIAIHQEIPESEKPRKIAIENQGRVIEHKV

SEQ ID NO: 2553 - DNA, 513 bp, Klebsiella oxytoca
atgactgacgagatcgatagcgacgcaaacaatacgcatgaactaaccgctgaagtggctcgggcgctgatcgcgtgcggtttgcgactgaccacggcggagtcctgcaccggagggaatctggcggcagcgctctgtgcccaggcggataccgcggcattttatgataccggcgtagtgaccttcagcgatgaagccaagcgcaacgtgctgcaggttcgcgcggaaaccctggcggtacacagcgccgtcagcgaagcctgcgttcaggagatgtcctctggtattctggcgctcgccggggccgatatcgccatcgccgtcagcggctacgccggaccggagggcggggaagatggtacccccgccggcacggtatggtttgcctggaattttcgcggccagactgaaaccaaacggatgtgctttgccggcgactgtgagaccgtggtggcgaaagcggtacgatatgccctggcggcgctgagcgaaaagcttgcccactggcagtga

SEQ ID NO: 2554 - protein, 170 aa, Klebsiella oxytoca
MTDEIDSDANNTHELTAEVARALIACGLRLTTAESCTGGNLAAALCAQADTAAFYDTGVVTFSDEAKRNVLQVRAETLAVHSAVSEACVQEMSSGILALAGADIAIAVSGYAGPEGGEDGTPAGTVWFAWNFRGQTETKRMCFAGDCETVVAKAVRYALAALSEKLAHWQ

SEQ ID NO: 2555 - DNA, 1218 bp, Klebsiella oxytoca
atgctaaccaccctgatttaccgcagccaggttcatcctgaccgcccgcccgtcgatctcgacgctttagtccatcgcgccagcagtaaaaatttgccccttggcatcaccggcattctgctgtttaacggcctgcagtttttccaggtcctggaagggactgaggaggcacttgagtcgctgttcagcgaaatccaaagcgacccgcgtcatcgcgacgtagtggagctgatgcgcgattactcagcctaccgacgttttcacggcaccggaatgcgcatactggatctccggctgtttgaaaccgatggcgcgctggaggaaattctgcgctttagcacgtttggggtcaccgaaccggtcaacgaccggatgttccggctgcttagcgccttcattgccgacggcggccgctattgcctgcccgagccgctgcagccctctcgctggatgatgatgcccgcgtcaggtacggccgcaccgcagcacctgcccggtcaaccttgccagtttgctctgcaggctattgtcgagccggctaaaaagcgagtttcttccttcgaggctctgatccgcagcccaaccggcggctctcccgtggaaatgtttgccgccattgcggcggaggatcgctaccgttttgatcttgaaagcaaagcgtatgcattcgctctcgccggccagctgccgctcgggaaacatcagctggcgattaacctgttgcccggatcgctgtatcaccaccctgacgccgtaggctggctgatggacagcctgctggcggccggcctcagaccggatcaggtactgatcgaggtcaccgagacagaggtgatcacctgctttgaccagttccgcaaggtgctcaaagccctgcgcgtcgcgggcatgaagctggccatcgacgactttggcgcaggttattccggcctgtcgttactgacccgttttcagcctgataaaatcaaagtggatgcggaactggtacgcgatatccatattagcggcaccaaacaggcgattgtcgcctcggtcgtccgctgctgcgaggatcttggcattacggtggtggctgaaggtgtcgaaaccctggaggagtggtgctggctgcagtcggtgggcattcgcctgtttcagggctttctcttttcccgaccctgccttaacggcatcggcgagatctgctggccggtagcgcgccaggcaatggacctgtaa

SEQ ID NO: 2556 - protein, 405 aa, Klebsiella oxytoca
MLTTLIYRSQVHPDRPPVDLDALVHRASSKNLPLGITGILLFNGLQFFQVLEGTEEALESLFSEIQSDPRHRDVVELMRDYSAYRRFHGTGMRILDLRLFETDGALEEILRFSTFGVTEPVNDRMFRLLSAFIADGGRYCLPEPLQPSRWMMMPASGTAAPQHLPGQPCQFALQAIVEPAKKRVSSFEALIRSPTGGSPVEMFAAIAAEDRYRFDLESKAYAFALAGQLPLGKHQLAINLLPGSLYHHPDAVGWLMDSLLAAGLRPDQVLIEVTETEVITCFDQFRKVLKALRVAGMKLAIDDFGAGYSGLSLLTRFQPDKIKVDAELVRDIHISGTKQAIVASVVRCCEDLGITVVAEGVETLEEWCWLQSVGIRLFQGFLFSRPCLNGIGEICWPVARQAMDL

SEQ ID NO: 2557 - DNA, 414 bp, Escherichia coli
atgattagcgatgccaataaagcggtgaatgacctggcgagtattgtccctctgctgggtggcagttcgtcccgcaaagattacgaagaggcacgtaaactcgttgaatatcttctggaacatgatccggacagcccgctggttgatatgctgactgcccgcatcgatgcctgggaagataacgcggtggaatttgaagaatttaatacgcgcttcgaagcaggcaaaaacggtgtatcgttgctgcgggttcttatgcagcaatacgggctttctcagtccgatttcgaaaacgagataggtaataaatcgctcgtcagccggatcctcagtggtgaacgcagtctgacctttgatcacatgcgggcgctggcaaatcgatttcaaatcccggtctcgatgtttgttgactga

SEQ ID NO: 2558 - protein, 137 aa, Escherichia coli
MISDANKAVNDLASIVPLLGGSSSRKDYEEARKLVEYLLEHDPDSPLVDMLTARIDAWEDNAVEFEEFNTRFEAGKNGVSLLRVLMQQYGLSQSDFENEIGNKSLVSRILSGERSLTFDHMRALANRFQIPVSMFVD

SEQ ID NO: 2559 - DNA, 186 bp, Klebsiella aerogenes
atgctgaaactcacactgaaacgaggcgacgcgcttcacgtcgtttttccggacggtactaacgggataatcgaagcctgcgcgcgttgcgaactggctatgcattttccgcgcagtgccaaaatcacccgcgaaaatggtgcgttccggaataaaccaaacctgattaagcctaatcagaaataa

SEQ ID NO: 2560 - protein, 61 aa, Klebsiella aerogenes
MLKLTLKRGDALHVVFPDGTNGIIEACARCELAMHFPRSAKITRENGAFRNKPNLIKPNQK

SEQ ID NO: 2561 - DNA, 765 bp, Klebsiella pneumoniae
atgttaatcctcgattgctcctcacgctctcaggcgttgaatacactgtctgccgggtttggatgtccccctgaaaagcttaaaaaggtgcttctgtcgctcgatctggagcatatctacgaaacagatcaaagcattatggtggatgcaaatcagtatctgaaagattatgtcagcgcggaactgggcgaaccaggtcccttctcccgggctttctggtttcatggcacccggacttttgccgggaatactttcccgagggggttacttgcgctgaatcattcgaaatcgcttgcggcaaagatgctggtagacctggccccggatgagttagtccgtaaacgcctgcggcagtgggttgaaacgggagatgttccggatgcgctgtttcagctcagaaccggcgacagcatgcactgggggccttatggccatctggttcgggaattgcattttcatgcccgagaaaacggactacacgattatctccacttgcctgagttggtagaggatgtctgtaacgcctacctgaagcagtatggtcacgatcttacggcctattatcttaaggtgctgcatccctgcattatctggttcgaggcggatatctcttatgaaaaaggagcgattgaaacggccctggcatatgcatatacgtcagtccgggcgcttccgccggactgccatgcaactatcggcatcgactgtaaaggaaaatcggtgtccaggtcgtcgattgctaaaatcgagtttctgccgccctag

SEQ ID NO: 2562 - protein, 254 aa, Klebsiella pneumoniae
MLILDCSSRSQALNTLSAGFGCPPEKLKKVLLSLDLEHIYETDQSIMVDANQYLKDYVSAELGEPGPFSRAFWFHGTRTFAGNTFPRGLLALNHSKSLAAKMLVDLAPDELVRKRLRQWVETGDVPDALFQLRTGDSMHWGPYGHLVRELHFHARENGLHDYLHLPELVEDVCNAYLKQYGHDLTAYYLKVLHPCIIWFEADISYEKGAIETALAYAYTSVRALPPDCHATIGIDCKGKSVSRSSIAKIEFLPP

SEQ ID NO: 2563 - DNA, 1134 bp, Klebsiella pneumoniae
atgcacttttatgtggatgaaaccggtcataccggtccgaatctttttgaccgcacccagccagtactttcttatggcgtcctgtcttcacccgatgacctagacaaggttgcagaaactgaactggccagtttgcgaaaaaaactgggtgtacaacgtcttcatgccgctgaactgggcatgtaccgccttgatgatgtggtcgataccctgcttgttctgcagaagaaacaccggatacggtttgatatctggcaggtggttaaacgggatcacgccattatttcattcttcgatcaggtatttgaccagggactgaatccggttgtgccctggactgcctactggaccccgctgcgctatccgttgttgctgaatctggccattctttttgatgaagagctggctgaaaaggcatggcgtgcccgtcttgaggcacatgatgaacgttcttcctgcttattcaatgaggtgtgtggtgagctgcttcagcgcgttcacattctgagcgatgcccgttcagttgaactcattacagatgccctgtcctgggcgatggtcaacttcgatgagctggggtacaactgcaaaaccaacaaggaaaagctgcagatcatgcccaacatgatcggattccaatccgttctgcacgggatctgcgcccgtctgggggcaccgaaccggaaagccaatatcattgttgaccagcagtcgcagttcaataccactcagcgggagctgaacgagttttactaccagatacgcgaacagccgtgggaacttggcccgggtttacccgtcatggacatgaagaacatgccggcaaaaccgctagtcttccagtcgggtacgaaaagtgcagggctggagctggtcgatatttatctctggatcttcaaacgctacttggaacagaaggaactgaccaaaccccttacccgccttctctacaccaacctcaataccgccagaactgacagtgtttccctgcagtctgtcgccaaacgatttaaggagttttttgaaacactgcctgaacccactgcagaaatgacgcaaaaagggcgcgaatacaaggagcgggaagaagcccgtcgcctgcagcaccgaattcctggcctcagtggctcctga

SEQ ID NO: 2564 - protein, 377 aa, Klebsiella pneumoniae
MHFYVDETGHTGPNLFDRTQPVLSYGVLSSPDDLDKVAETELASLRKKLGVQRLHAAELGMYRLDDVVDTLLVLQKKHRIRFDIWQVVKRDHAIISFFDQVFDQGLNPVVPWTAYWTPLRYPLLLNLAILFDEELAEKAWRARLEAHDERSSCLFNEVCGELLQRVHILSDARSVELITDALSWAMVNFDELGYNCKTNKEKLQIMPNMIGFQSVLHGICARLGAPNRKANIIVDQQSQFNTTQRELNEFYYQIREQPWELGPGLPVMDMKNMPAKPLVFQSGTKSAGLELVDIYLWIFKRYLEQKELTKPLTRLLYTNLNTARTDSVSLQSVAKRFKEFFETLPEPTAEMTQKGREYKEREEARRLQHRIPGLSGS

SEQ ID NO: 2565 - DNA, 324 bp, Klebsiella pneumoniae
atggcaaaaattagcgaaaggaaatttttttcagttattttttcactaaccggccttaaaggccgccccgcgaacagtaaatacctgcacatcaaccaagacattaaggagaacattatgtctacatttttagctgcagtatttgctgtaatctttaccctaatcggcatcggccacttcatctggacaatcgttgtggcttaccgtgatctaacctggtttttgaccaattttgacgaccttccatatatctggaagcgaaacgggcgatactatcgctgtttcatactccgtcgcatctggaagcatatcttcagtcattga

SEQ ID NO: 2566 - protein, 107 aa, Klebsiella pneumoniae
MAKISERKFFSVIFSLTGLKGRPANSKYLHINQDIKENIMSTFLAAVFAVIFTLIGIGHFIWTIVVAYRDLTWFLTNFDDLPYIWKRNGRYYRCFILRRIWKHIFSH

SEQ ID NO: 2567 - DNA, 1002 bp, Klebsiella pneumoniae
atggccgagccaataaatctgcagacagacgtggtcaggcagcatacggttcctcgttttttactgaagcacttcagtacgccgggaaagggtaagcgcctacgtttatacgcctttgataaggccgccgggcgcgcttatgccaccacgccggatgacgccaccgtccggaatacgttctacaatctcgatgatcaccctcagcggctcagtcttgagccgctgctgggaatttacgaacatgaagcagcgccggtcattgccgaccttctgaggcataaggacattcgccagctaactgcagacgatcgctacaagctagccgtgtttgttgccgtgcagcgtgcacgaaccttcggtgagctggagcgtatttcaggcatgatttcagtgctctttagtaagatggcggcaatgggcgcgactgaggagcaggcaggagaaaccctggggttatcgcccgggggagataacagagatgtttttcttcggcagcttgtccagcagatatcacatattgatcacctgctgaataaggactggtacctgctggaaacaaagccagaacatcccttctacgtgtcagacaatccggtggtactggagaaccgcaacgacttcggtccgtacggcaatattggtctggccgtgctcggaatacaaatctaccttcccctgtcatcgacgctgatgctggccatgtattgcccttccatccgtgaacagaagattcgtgataagcaggatcttcatcatctccttgccagagcgccacacctgatcccgcgtcacatgcgcccgtttgaaatgctcagacatctcagcaggtttacggactatcatctcatgccgcttactgcggatcatgtgacgcattacaacgcactgcaggtggagtatgcggaacagtatgtgttctgtggtgaaaacgatttttctctggttgagagaatgctggcagatgatgaccgttaccggacaggcccgaggtttatgttttag

SEQ ID NO: 2568 - protein, 333 aa, Klebsiella pneumoniae
MAEPINLQTDVVRQHTVPRFLLKHFSTPGKGKRLRLYAFDKAAGRAYATTPDDATVRNTFYNLDDHPQRLSLEPLLGIYEHEAAPVIADLLRHKDIRQLTADDRYKLAVFVAVQRARTFGELERISGMISVLFSKMAAMGATEEQAGETLGLSPGGDNRDVFLRQLVQQISHIDHLLNKDWYLLETKPEHPFYVSDNPVVLENRNDFGPYGNIGLAVLGIQIYLPLSSTLMLAMYCPSIREQKIRDKQDLHHLLARAPHLIPRHMRPFEMLRHLSRFTDYHLMPLTADHVTHYNALQVEYAEQYVFCGENDFSLVERMLADDDRYRTGPRFMF

SEQ ID NO: 2569 - DNA, 345 bp, Klebsiella pneumoniae
atgaaaaatacgtccgacatcgtgggaacatccgtattcccgttccagactgaaatcgcttttattatcgcgattttcaccactactcaacgcctggtcgtcagtgccagggaccacatcagccagaagcaatactggagcgcctgtctctgcgtcctgcttcttgtggcttacgtggggcttacggccggagtggtgtgggctgtaatgccctggcttaagactttttttctggtgaaacttgccatttcaccattctgggtcatgccgttaaggggtttgctactctggggtatcggtaagatggttggggccatctgccgaaagtttactctaagcaagtaa

SEQ ID NO: 2570 - protein, 114 aa, Klebsiella pneumoniae
MKNTSDIVGTSVFPFQTEIAFIIAIFTTTQRLVVSARDHISQKQYWSACLCVLLLVAYVGLTAGVVWAVMPWLKTFFLVKLAISPFWVMPLRGLLLWGIGKMVGAICRKFTLSK

SEQ ID NO: 2571 - DNA, 291 bp, Klebsiella pneumoniae
atgagtaacagcagaaacagtcgatatgtctgtggcaacgtttccttttccgcgattgcaaagatggctcacgggcaggtcgtctgcctggcgctgaacccggatgaaaacgatgcccggagtgaagtatcaaaatccctgaaagctgccttttccagagccgggcgcagatgccgcctgacgtcgggaaccgcagcgggagaatttacccgtcgccgggctggaacggccacacacctctatgtcagagtttacgagacagcaccggcggggcagggagcaaataactga

SEQ ID NO: 2572 - protein, 96 aa, Klebsiella pneumoniae
MSNSRNSRYVCGNVSFSAIAKMAHGQVVCLALNPDENDARSEVSKSLKAAFSRAGRRCRLTSGTAAGEFTRRRAGTATHLYVRVYETAPAGQGANN

SEQ ID NO: 2573 - DNA, 501 bp, Pseudomonas aeruginosa
atggacagcgaggagcctccgaacgttcgggtcgcctgctcgggtgatatcgacgaggttgtgcggctgatgcacgacgctgcggcgtggatgtccgccaagggaacgcccgcctgggacgtcgcgcggatcgaccggacattcgcggagaccttcgtcctgagatccgagctcctagtcgcgagttgcagcgacggcatcgtcggctgttgcaccttgtcggccgaggatcccgagttctggcccgacgccctcaagggggaggccgcatatctgcacaagctcgcggtgcgacggacacatgcgggccggggtgtcagctccgcgctgatcgaggcttgccgccatgccgcgcgaacgcaggggtgcgccaagctgcggctcgactgccacccgaacctgcgtggcctatacgagcggctcggattcacccacgtcgacactttcaatcccggctgggatccaaccttcatcgcagaacgcctagaactcgaaatctaa

SEQ ID NO: 2574 - protein, 166 aa, Pseudomonas aeruginosa
MDSEEPPNVRVACSGDIDEVVRLMHDAAAWMSAKGTPAWDVARIDRTFAETFVLRSELLVASCSDGIVGCCTLSAEDPEFWPDALKGEAAYLHKLAVRRTHAGRGVSSALIEACRHAARTQGCAKLRLDCHPNLRGLYERLGFTHVDTFNPGWDPTFIAERLELEI

SEQ ID NO: 2575 - DNA, 186 bp, Klebsiella michiganensis
atgatgtggattctaattatctggatgttcgggagttacagctattcagaagctaaaccgacaataacaactcaggaatttaatacagaatcagcctgccgtgctgcgtttgccaaaattaaagagcttaacggtggtgagctagcgctgcgtggtgtgtgtacgcccaaaggagccaaccaatga

SEQ ID NO: 2576 - protein, 61 aa, Klebsiella michiganensis
MMWILIIWMFGSYSYSEAKPTITTQEFNTESACRAAFAKIKELNGGELALRGVCTPKGANQ

SEQ ID NO: 2577 - DNA, 129 bp, Citrobacter freundii
atgaataaaaaactcatcgctgaagcctcccggtttcagtcatcacatgagcgtaaaggattctggtggttaattattggcacgttaaccgcagccttaacgctctttattcttttcaatttccagtaa

SEQ ID NO: 2578 - protein, 42 aa, Citrobacter freundii
MNKKLIAEASRFQSSHERKGFWWLIIGTLTAALTLFILFNFQ

SEQ ID NO: 2579 - DNA, 276 bp, Klebsiella michiganensis
atgcactcaaaaaaacggcgtctcagcgtgttatgtgcgtgtttgatgacgatgttatgcggctgctccgggaagccagacaacgcgccgcaaccgcagcagcagatggtctttccggcagagatgaccgtaaagtgcccgcccccggaggaggcggacgataactcaatggatgccagcgcagtagccctgaaacgactgtacgacctgtacggcatctgcgcgggcagacacaccgatttaattcagtatattcagaacctgcaggggaaataa

SEQ ID NO: 2580 - protein, 91 aa, Klebsiella michiganensis
MHSKKRRLSVLCACLMTMLCGCSGKPDNAPQPQQQMVFPAEMTVKCPPPEEADDNSMDASAVALKRLYDLYGICAGRHTDLIQYIQNLQGK

SEQ ID NO: 2581 - DNA, 747 bp, Klebsiella pneumoniae
atgcgcattccgacatcgttgaagaagcaacctgtgatcgaggctgctttcgagttacgttacccaaaagatacccaagtttctgaaatagttccgggctttctttttcacgcattaggttgcaagaaaccagtaattagtttgccacctagccaaatcccaaaaaacgtaagggaagatgatgagcagttacattatgcacttgtttcacgcttagaagttgaagattatttcattggtctcagtgatcatggcatcgttatatcaacctctggtgcttacaagggctggacacattttaagtcaatgattctaaaggttttagtggaacttgataagctacaccttaataacaacattagtagatactccatcaaatatgtcgatttctttgaagcaaaagataatgacaatctatttccaaagctcaacattgatgtagttatggctggggaatcaatgtcatcttatccattaactcttcgtttagataaacctcatcagagttttgatattattatacaagttgtaagtcatgcattggtattagcaaacaatgagacatataatcgcaatggtttaatattggatatcgatacaatcaagagaatacaagatgaatccgagctaatatcttttaatagcgatcgacaaagtgctcttgatcagattcacgaatgcaataaaataacatttttcagttgcattagagaaagtacattagaagaattagaaccagtatactag

SEQ ID NO: 2582 - protein, 248 aa, Klebsiella pneumoniae
MRIPTSLKKQPVIEAAFELRYPKDTQVSEIVPGFLFHALGCKKPVISLPPSQIPKNVREDDEQLHYALVSRLEVEDYFIGLSDHGIVISTSGAYKGWTHFKSMILKVLVELDKLHLNNNISRYSIKYVDFFEAKDNDNLFPKLNIDVVMAGESMSSYPLTLRLDKPHQSFDIIIQVVSHALVLANNETYNRNGLILDIDTIKRIQDESELISFNSDRQSALDQIHECNKITFFSCIRESTLEELEPVY

SEQ ID NO: 2583 - DNA, 360 bp, Klebsiella pneumoniae
atgtctaatatttacagtaatacgactagttataaatctcacgctcaatttttaagttatcttatgtgtgggatttacattgcttcgatccccagcgaagctaaagataatcttctttctggtccaattcagcgtacgtcaatatctggctcacaaaacttgtcttcatataagcaactcatgccctcaactacgccaacgatctcactgtataaaagtgatgaaagcacctttaatgatgctaaattcgcctcagtcgtttcaaatttctatggcaccatgctctccaaccaaatcacattaggcaatgaaattgaatcagtgattgccggttccttatgggatatttatgtggactaa

SEQ ID NO: 2584 - protein, 119 aa, Klebsiella pneumoniae
MSNIYSNTTSYKSHAQFLSYLMCGIYIASIPSEAKDNLLSGPIQRTSISGSQNLSSYKQLMPSTTPTISLYKSDESTFNDAKFASVVSNFYGTMLSNQITLGNEIESVIAGSLWDIYVD

SEQ ID NO: 2585 - DNA, 618 bp, Klebsiella pneumoniae
atgagcacgaatttttttaatgatgttgataaattcaaagatcagataccctattatttgacccaaccacaaaaagaaggtcttgttaaagcattagcagactttccggagggtataaactactatttgtcaaattatcctgttgatttaaaagcagcagctttgcaaggcgatgtttttaaaggattaactatttatggccctagaggaagcaaagaagcaaaagggataattttaagtaacagttgtgatattgacactaataacaagcgtgatttccctatgcgcgcagtttttgcgcccttagttaatttagccaccctagttgagagacttcaaaaagcaggcattccacaagacaaaattgacaccaaattagatgctatgaaaaaacaacttgtaacaaacattgtttatttaccaagttgtgacaccattcctgaaagcattatatttttagatgatgtgtatcaagtatcaacagaagaattacgtcaatctctcgagagttcgaataagattctgacattaagccaagttggtttttatattctacttttcaagctttcgattcatttctgtagattccatgaagatgttgcgcgttatgacaactaa

SEQ ID NO: 2586 - protein, 205 aa, Klebsiella pneumoniae
MSTNFFNDVDKFKDQIPYYLTQPQKEGLVKALADFPEGINYYLSNYPVDLKAAALQGDVFKGLTIYGPRGSKEAKGIILSNSCDIDTNNKRDFPMRAVFAPLVNLATLVERLQKAGIPQDKIDTKLDAMKKQLVTNIVYLPSCDTIPESIIFLDDVYQVSTEELRQSLESSNKILTLSQVGFYILLFKLSIHFCRFHEDVARYDN

SEQ ID NO: 2587 - DNA, 282 bp, Salmonella enterica
atgaccggttcaaacaacaagacacgcgatatcactagcaaccgcaagtatctgatcaagaatgcacgcggccaggcagcctataaagcacgtatgcgcgaggcgggttataagcaaattgcggtatgggtacgagaagatgtcagagaggcaggacgacaagccggactggaatctgacgcgctgttgtcaggggctgcgcagcatgatccattaggctggatggtcggttttgctgagggactcaggcagcgagaaaaaaaagacagcaacccgcagtaa

SEQ ID NO: 2588 - protein, 93 aa, Salmonella enterica
MTGSNNKTRDITSNRKYLIKNARGQAAYKARMREAGYKQIAVWVREDVREAGRQAGLESDALLSGAAQHDPLGWMVGFAEGLRQREKKDSNPQ

SEQ ID NO: 2589 - DNA, 1284 bp, Klebsiella pneumoniae
atgaatactgataactattttttcagagtaccggccacacgcggaatacagggcggcatagaacaatacatgctgacggttcctatggtcgtgttacgtcgtattcttgcaatggacaatgatggcgatgttatggatcgcagccagcgagaagcgaacaaaacgcgggccaaaaaaatacggaattatgttgccggcgcaacatcaaaacgagccccctatattttgccgtcaattaccggaaatattgatagtcatgttgaattccttcccagcgaactctcgccggcagtgggaattcttaaaattccgatggacgctgatttaaaattattcgatggccagcaccgtgcgctgggtatttttgaatttgtacgcgattattccaatacggaagatacgatcagcttgttgcttaccgttggcctgccacttgagttacgccagcagtttttcgctgatattaataacaacgcgagcaaaccggctgcggcgatcagtatggcatataacaacaatgatccggtcaaccagctggcaatgcatctggcccgaaccgtcaccgggctggcgggctcagtggattttgaacacaacgtggtcccggcgaaaagcgcacggctgatcagctttaaagcactgaacgatgcgacgaaaaaaatgctcaacctgcgggccaacagcattccctcaacgcaacagcgtgatatggcagaaaagctctggactgcctgggcacaggcgatgcgctggaatgatattgcccaggatgatatcgctgcggagtaccgtcaggaggcgctgggactgcatggcatcatgataaatgctatcggtatggcaacggccaggatgttacggcacagaacacctgaaagcatcgagaaccttctggcctgcgcggaaaacggtgacaacggttttcattatcgggagtcgtttgtacctgagtgctgggaagggaagtgtgttgatccggagactggcaccattaaaactgaccggcgggcgcttgaagcaacggctgaagcgttgcaaaagctgatagatccgttcgcagatgcgctgtggttgcgtgcttatctgccagcggaagaggcgagtgatacggcattactgaaatatgcagctgacatcgagagttataagcagcgcacagccgtgccgatgatcaatatcgtggagaagctgaaggcgctgggtgacggcgaaccgcagttcagagcgtcggtgctggcttcacgtgaggggctaagccgctatctgaccggggctgaaagctga

SEQ ID NO: 2590 - protein, 427 aa, Klebsiella pneumoniae
MNTDNYFFRVPATRGIQGGIEQYMLTVPMVVLRRILAMDNDGDVMDRSQREANKTRAKKIRNYVAGATSKRAPYILPSITGNIDSHVEFLPSELSPAVGILKIPMDADLKLFDGQHRALGIFEFVRDYSNTEDTISLLLTVGLPLELRQQFFADINNNASKPAAAISMAYNNNDPVNQLAMHLARTVTGLAGSVDFEHNVVPAKSARLISFKALNDATKKMLNLRANSIPSTQQRDMAEKLWTAWAQAMRWNDIAQDDIAAEYRQEALGLHGIMINAIGMATARMLRHRTPESIENLLACAENGDNGFHYRESFVPECWEGKCVDPETGTIKTDRRALEATAEALQKLIDPFADALWLRAYLPAEEASDTALLKYAADIESYKQRTAVPMINIVEKLKALGDGEPQFRASVLASREGLSRYLTGAES

SEQ ID NO: 2591 - DNA, 462 bp, Citrobacter freundii
atgatgaagaaaccacttattgccggcatcatgctggttgtggcgcataccgccggcgctgcgcagggtgatgataccgatctgcagcagatttataccgaggcgggcattcaggggatatgcagcgccgggatgctggccgtgccggaagaggccagggatgaagttgtcccgcagaacgtcagacacctcctggttcagtgtgcctatttcgacgagcagcagctgcgccggcgtgctggtctgccggtacagacgtttaaccactggcgtgaccgccatgcggtccttaatctttcgtcagaccaggtatctgatgcgctctggttgtcagcgtggcgtgacttccgggcacagctggcatcggcctacccggccacggcggaaaaaaaggcacaggggaaagaggccgtacccgccggcacgaagcccgacactgagcatgggagtgcggcggattga

SEQ ID NO: 2592 - protein, 153 aa, Citrobacter freundii
MMKKPLIAGIMLVVAHTAGAAQGDDTDLQQIYTEAGIQGICSAGMLAVPEEARDEVVPQNVRHLLVQCAYFDEQQLRRRAGLPVQTFNHWRDRHAVLNLSSDQVSDALWLSAWRDFRAQLASAYPATAEKKAQGKEAVPAGTKPDTEHGSAAD

SEQ ID NO: 2593 - DNA, 546 bp, Klebsiella pneumoniae
atggatatcaactactacgatgaacatcaggaagaatttgaggcggttaaactggcgctgaagggcgaaatggagaggatctggggctccatgctgaaagaaagcggggatagcctggataatgaagccacgtaccttaacctgtttgaagaactgcagtacaccttctctccgtccagcttcagtaaactcaccccgtcgcaggatctggatgaagataaaattgccgcctttgtggccagaacccgcggctataagtacggcatcacgatcaaagcccggccaggccacccgcagaaatggctgaaaggacgaatcaagccacttgaggacgcggcaggcacaaaccagtgctggatcgacaccgccaccatcgtgcatatcggtgccggtcagcagtttgacgatcagtattacctcaccgtgaccacccagaccgggcagagctaccgcgtgaatgaattccgtctgccaggtcgcctgctggaagccgcccaggaatccctgttcagggcgcttgattcaaccacaggcggtaatttctga

SEQ ID NO: 2594 - protein, 181 aa, Klebsiella pneumoniae
MDINYYDEHQEEFEAVKLALKGEMERIWGSMLKESGDSLDNEATYLNLFEELQYTFSPSSFSKLTPSQDLDEDKIAAFVARTRGYKYGITIKARPGHPQKWLKGRIKPLEDAAGTNQCWIDTATIVHIGAGQQFDDQYYLTVTTQTGQSYRVNEFRLPGRLLEAAQESLFRALDSTTGGNF

SEQ ID NO: 2595 - DNA, 138 bp, Klebsiella pneumoniae
atgacgtccatgcctgtgatgagaggctataccaataagctgttattccccttttttatggtcgtgttccttcagtccgggatgctttggcttgttttccggagtgacacgccttcttttatcttctttgccagttga

SEQ ID NO: 2596 - protein, 45 aa, Klebsiella pneumoniae
MTSMPVMRGYTNKLLFPFFMVVFLQSGMLWLVFRSDTPSFIFFAS

SEQ ID NO: 2597 - DNA, 777 bp, Klebsiella pneumoniae
gtgcaatacgaatggcgaaaagccgagctcatcggtcagcttctcaaccttggggttacccccggcggtgtgctgctggtccacagctccttccgtagcgtccggcccctcgaagatgggccacttggactgatcgaggccctgcgtgctgcgctgggtccgggagggacgctcgtcatgccctcgtggtcaggtctggacgacgagccgttcgatcctgccacgtcgcccgttacaccggaccttggagttgtctctgacacattctggcgcctgccaaatgtaaagcgcagcgcccatccatttgcctttgcggcagcggggccacaggcagagcagatcatctctgatccattgcccctgccacctcactcgcctgcaagcccggtcgcccgtgtccatgaactcgatgggcaggtacttctcctcggcgtgggacacgatgccaacacgacgctgcatcttgccgagttgatggcaaaggttccctatggggtgccgagacactgcaccattcttcaggatggcaagttggtacgcgtcgattatctcgagaatgaccactgctgtgagcgctttgccttggcggacaggtggctcaaggagaagagccttcagaaggaaggtccagtcggtcatgcctttgctcggttgatccgctcccgcgacattgtggcgacagccctgggtcaactgggccgagatccgttgatcttcctgcatccgccagaggcgggatgcgaagaatgcgatgccgctcgccagtcgattggctga

SEQ ID NO: 2598 - protein, 258 aa, Klebsiella pneumoniae
MQYEWRKAELIGQLLNLGVTPGGVLLVHSSFRSVRPLEDGPLGLIEALRAALGPGGTLVMPSWSGLDDEPFDPATSPVTPDLGVVSDTFWRLPNVKRSAHPFAFAAAGPQAEQIISDPLPLPPHSPASPVARVHELDGQVLLLGVGHDANTTLHLAELMAKVPYGVPRHCTILQDGKLVRVDYLENDHCCERFALADRWLKEKSLQKEGPVGHAFARLIRSRDIVATALGQLGRDPLIFLHPPEAGCEECDAARQSIG

SEQ ID NO: 2599 - DNA, 351 bp, Klebsiella pneumoniae
atggaggtggtagccgagggtgtggaaacacccgactgccttgcgtggttgcggcaggcgggttgcgacacggtgcagggtttcctgttcgccaggccgatgccggcggcggccttcgtcggcttcgtcaaccaatggaggaacaccaccatgaacgccaatgaaccgagcaccagttgctgcgtgtgctgcaaggaaatcccgctcgatgccgccttcacgccggaaggggccgagtacgtggagcatttctgcgggctggagtgctatcagcgcttccaggcgcgggccagcacagcgaccgaaaccagcgtcaaaccggacgcttgtgattcgccgccgtcaggttga

SEQ ID NO: 2600 - protein, 116 aa, Klebsiella pneumoniae
MEVVAEGVETPDCLAWLRQAGCDTVQGFLFARPMPAAAFVGFVNQWRNTTMNANEPSTSCCVCCKEIPLDAAFTPEGAEYVEHFCGLECYQRFQARASTATETSVKPDACDSPPSG

SEQ ID NO: 2601 - DNA, 321 bp, Klebsiella pneumoniae
atggggaaactcattccgtttttgtttatcgccttagacggcaaaagtgctgtcgcccacctgcgcttgcgcataccaggccataagctccgtggttcctggttctccttccgctggagcccagtgcgcatagtcatcggcagccacgggttgatagccaccgtgttttacttcaaaaattatgccaccggtatccagcgacagcacggcatgccaggttcctgcggccatctccagcaccgtacaggtttcccccaatatcgcccgatgggtgacggtaccccgatcgtcaaaattcagcaccacgaaacgaccccttaa

SEQ ID NO: 2602 - protein, 106 aa, Klebsiella pneumoniae
MGKLIPFLFIALDGKSAVAHLRLRIPGHKLRGSWFSFRWSPVRIVIGSHGLIATVFYFKNYATGIQRQHGMPGSCGHLQHRTGFPQYRPMGDGTPIVKIQHHETTP

SEQ ID NO: 2603 - DNA, 831 bp, Klebsiella pneumoniae
atgaaaaacacaatacatatcaacttcgctatttttttaataattgcaaatattatctacagcagcgccagtgcatcaacagatatctctactgttgcatctccattatttgaaggaactgaaggttgttttttactttacgatgcatccacaaacgctgaaattgctcaattcaataaagcaaagtgtgcaacgcaaatggcaccagattcaactttcaagatcgcattatcacttatggcatttgatgcggaaataatagatcagaaaaccatattcaaatgggataaaacccccaaaggaatggagatctggaacagcaatcatacaccaaagacgtggatgcaattttctgttgtttgggtttcgcaagaaataacccaaaaaattggattaaataaaatcaagaattatctcaaagattttgattatggaaatcaagacttctctggagataaagaaagaaacaacggattaacagaagcatggctcgaaagtagcttaaaaatttcaccagaagaacaaattcaattcctgcgtaaaattattaatcacaatctcccagttaaaaactcagccatagaaaacaccatagagaacatgtatctacaagatctggataatagtacaaaactgtatgggaaaactggtgcaggattcacagcaaatagaaccttacaaaacggatggtttgaagggtttattataagcaaatcaggacataaatatgtttttgtgtccgcacttacaggaaacttggggtcgaatttaacatcaagcataaaagccaagaaaaatgcgatcaccattctaaacacactaaatttataa

SEQ ID NO: 2604 - protein, 276 aa, Klebsiella pneumoniae
MKNTIHINFAIFLIIANIIYSSASASTDISTVASPLFEGTEGCFLLYDASTNAEIAQFNKAKCATQMAPDSTFKIALSLMAFDAEIIDQKTIFKWDKTPKGMEIWNSNHTPKTWMQFSVVWVSQEITQKIGLNKIKNYLKDFDYGNQDFSGDKERNNGLTEAWLESSLKISPEEQIQFLRKIINHNLPVKNSAIENTIENMYLQDLDNSTKLYGKTGAGFTANRTLQNGWFEGFIISKSGHKYVFVSALTGNLGSNLTSSIKAKKNAITILNTLNL

SEQ ID NO: 2605 - DNA, 684 bp, Serratia marcescens
atggacagttttcgtgaagattttgagattaggtcaggagaaatcttagcctatctagatcttttaagattcattgagcatgcaggcgctgaactgttatcctctgacgatcccgaaaataagttcgctattacggctcaatcacgtaaaaccttaaaaggaacggtatatatactgctgtataatctaattgaatcaactatgagggaagctatttgctttattcatgagaccatttatgacagaaacatacagtttgatacactcaagaaaaacttaaaatgtgaaatcttaaaaagattaaaaaacgactcagttagcgttgaaaatcttattaacggcctcacagaaaaaggaatatcctgtggcatttcctatagtacctttaataaaaagaaactgttttcaggtaatatagaccgagaggaaataaaagagaaatcacaaatttatggtttttcaacacagtcagactatgcgcataccaaacatggtgaaaaattagcaacggtcaaacaacaccgtaatgatttggctcatggaaatgtttcttttgctgaactgggtaaaaacgtttcatatcaagacttagaaaatgtttctctagaggtgattgcatatctagactctatagcaaataatatcgaacattatattaactgtaatggttatcttgcttcttga

SEQ ID NO: 2606 - protein, 227 aa, Serratia marcescens
MDSFREDFEIRSGEILAYLDLLRFIEHAGAELLSSDDPENKFAITAQSRKTLKGTVYILLYNLIESTMREAICFIHETIYDRNIQFDTLKKNLKCEILKRLKNDSVSVENLINGLTEKGISCGISYSTFNKKKLFSGNIDREEIKEKSQIYGFSTQSDYAHTKHGEKLATVKQHRNDLAHGNVSFAELGKNVSYQDLENVSLEVIAYLDSIANNIEHYINCNGYLAS

SEQ ID NO: 2607 - DNA, 1143 bp, Enterobacter cloacae
atggacattcttgagttgaaaacacaacttaaatccgaagatgatcccaagaaaagagcagatctacttgctcagttagaagtttttaaacaaaatgccgaagagcaggttcgcgcagagcaaaaagatgtagatttcgaaactaaagagtttaccgtcgagcttctggtcaataagtatcacagtgggttggaagacgacactaatgaactgtttgttccagattatcaaagagatttcgtctggagtgaaaaaaggcagtctcgcttaattgaatctttgatactaggatttccgatcccatatatttttacagcagatgttctttctgaagatccagagttggatggccgtatagaaatagttgacggctcgcaacgtgtaagaacaatacatgcattcattcacaataaattgactttgcaagatttaaagtcattaagctcccttaacggatttaatttccaagacttacctttatcaagacaacgtcgctttatgcgaattccagtacgagtaattgaattaagttcaaaatgtaatgaggaaactcgtcgagatttgtttgagagaataaactctggaagtgacattctcaaggacatggaagtgcgtaaaggttctgaacttggttcaactactttatatacacaagtaataaaaccatgctcggccataccacaattcaaggaacttgctccattatcagaagcaaaagagaagcgtgatgaacgactcgagtttacgttacgattctttgcttatttagataactaccaaagctttgaccattcggttcgtgactttttgaatgattatatgagcgcaaatggagatattgacgctgctaaacaaagctcaatgaaaacagaattcagcaatatgttagattttgtcgaaaagtatttccctgctggttttagaaaaacggttacagcaaaatcaacacctcgcgttcgatttgaatccattgctgttggtacagctttagcgcttcgtttagatccgcatttagcgccaaaaaaccttgactggattagctctgaaaaattcaaaggactaacaacttcggacggagcaaatagtcgtattaaagtaattgagagaatcgaatacgttcgagaccaactcttagagggataa

SEQ ID NO: 2608 - protein, 380 aa, Enterobacter cloacae
MDILELKTQLKSEDDPKKRADLLAQLEVFKQNAEEQVRAEQKDVDFETKEFTVELLVNKYHSGLEDDTNELFVPDYQRDFVWSEKRQSRLIESLILGFPIPYIFTADVLSEDPELDGRIEIVDGSQRVRTIHAFIHNKLTLQDLKSLSSLNGFNFQDLPLSRQRRFMRIPVRVIELSSKCNEETRRDLFERINSGSDILKDMEVRKGSELGSTTLYTQVIKPCSAIPQFKELAPLSEAKEKRDERLEFTLRFFAYLDNYQSFDHSVRDFLNDYMSANGDIDAAKQSSMKTEFSNMLDFVEKYFPAGFRKTVTAKSTPRVRFESIAVGTALALRLDPHLAPKNLDWISSEKFKGLTTSDGANSRIKVIERIEYVRDQLLEG

SEQ ID NO: 2609 - DNA, 1119 bp, Klebsiella pneumoniae
atgaatatgttaagttctgtcaccacttttcagcatgagcagacgcgaacaatttcgcctgagaacatgaccggagaaaagggtaaatcatgtatggctgctagccatctcggtccgggccgtaaagggagtggttttattcgaattcctgcaggtgaaagtattactattgcagatatcaaaggaccggcagaaatacgacacatgtggtttacgttgacagataaaactcatcgtggcagctttgtcttacgagacgttgtgatccgtatttactgggatgatgaaacagtcccttccgttgaatcgccgattggggactttttctgtaatggttttggtgcgcgctgcgatataaattcgttgccgataatagttaatccgacaggcgggtttaactcttatttccgaatgccttttaatcgctcagcaaagattgtgatcagcaatgagcacgaagcagatattgagcatttctttttcacaattaactatgcgttggtatcctctccatttactgaccctctctacttccatgcacagtggcgacgtcagcgtgttaccactcctggagaagattatgttttgctggataatgtgcaaggttacggatattacgtgggcacatatctggctctgaccgcgctggaacgatactggtggggtgaaggggagtttaaattttacgtggatggcgactctacctatccaacccaacattctaccggttctgaagattattttggtggggcctgggctttccatcagagaaacgatcttggccacgcatcagcacaatgttttcagacgctatatgttggttatccttggcagtcgaaacgggatcatacccgtgatttcttccagactggggatgctaacccggtacatggtttcggtgatgatgcattgcctatgcatgggctgtaccgctggcacttacccgaccctgtagcgtttcatgaagagattaaagtaactttccagcaaatgggcaatgatgacattcgactctatgaaagacaggatgacatcgcgacagtagcttactggtaccagagtccgggtaataaccaaaacccgaaattcccgaatcaacaacaacgtcttccgcgttga

SEQ ID NO: 2610 - protein, 372 aa, Klebsiella pneumoniae
MNMLSSVTTFQHEQTRTISPENMTGEKGKSCMAASHLGPGRKGSGFIRIPAGESITIADIKGPAEIRHMWFTLTDKTHRGSFVLRDVVIRIYWDDETVPSVESPIGDFFCNGFGARCDINSLPIIVNPTGGFNSYFRMPFNRSAKIVISNEHEADIEHFFFTINYALVSSPFTDPLYFHAQWRRQRVTTPGEDYVLLDNVQGYGYYVGTYLALTALERYWWGEGEFKFYVDGDSTYPTQHSTGSEDYFGGAWAFHQRNDLGHASAQCFQTLYVGYPWQSKRDHTRDFFQTGDANPVHGFGDDALPMHGLYRWHLPDPVAFHEEIKVTFQQMGNDDIRLYERQDDIATVAYWYQSPGNNQNPKFPNQQQRLPR

SEQ ID NO: 2611 - DNA, 1260 bp, Klebsiella pneumoniae
atgagcaatagagcattttatcgtaatccaaattattggttttcctcatgttacagcatggtttactatgccgcgggaagtttagttttttcattttatgcaatctggttgagtagccagattggacttagtgcacggcaaacaggtattgtttattctctgaacttcttcattgcattaatcattatgtttatctatggagtagttcaggacaagcttgttttaaagaaaaatttagtctggttccaaagccttataattacatgtgcagctcctttcctcattaacgtttatgaacccttactccgcgaccatttttatataggagtagtgacggggagtgtatatcttggtctgggatgggtagccggtatggggcttattgactcctattgtgagaaaataagtagagcatttggttttgaatttggtcaggcccgtacctggggaagtatagcctacgctgctggaaccttacttgcaggaatactcattgctaaaaatcctcaccttaatttttgggccgcttctgttgtaggtattctgtttatcatcctgaatttcacctttaaaccggatatgtcacactacagttcagcgctaatgaaggtaaatgatcctttaacctttcatgagatcatggctgtttttcgattgaaagacttttgggttttcgttgtttacgttcttggcacatacagtttgtataatatttatgatcagcaactgtttcctgtctattttactcaccttttcggaaatgaaggtgaaggctataaaatttatggcgtgttgaattcattgcaggttttcctggaagcaggggtgatgtttacggtgccattcatcgttaaccgtgttggcgcgaaaaacgcattgatatttgcagcctgtatttctgctgcaagaatccttatgacaggatacacaagctctcttgtttttatttcgattataaaattaatgcattgcatggagattactactgtcctggttgcagtttttaaatatatcgcgattaattttgaccgtcgattatcagcgacagtctttctggttggatatcaagttgctggttctgttggggttatcctgttctcaactgttgcaggaaatttttatgataaggtcggtccagcgaccacctttaaaggtttgggattgattgttgttatcttcatgatattcgctgcaatattcctcaacagtgaaaaaaagagccaggtaaaaataaaaactaacgatacttcttttagctaa

SEQ ID NO: 2612 - protein, 419 aa, Klebsiella pneumoniae
MSNRAFYRNPNYWFSSCYSMVYYAAGSLVFSFYAIWLSSQIGLSARQTGIVYSLNFFIALIIMFIYGVVQDKLVLKKNLVWFQSLIITCAAPFLINVYEPLLRDHFYIGVVTGSVYLGLGWVAGMGLIDSYCEKISRAFGFEFGQARTWGSIAYAAGTLLAGILIAKNPHLNFWAASVVGILFIILNFTFKPDMSHYSSALMKVNDPLTFHEIMAVFRLKDFWVFVVYVLGTYSLYNIYDQQLFPVYFTHLFGNEGEGYKIYGVLNSLQVFLEAGVMFTVPFIVNRVGAKNALIFAACISAARILMTGYTSSLVFISIIKLMHCMEITTVLVAVFKYIAINFDRRLSATVFLVGYQVAGSVGVILFSTVAGNFYDKVGPATTFKGLGLIVVIFMIFAAIFLNSEKKSQVKIKTNDTSFS

SEQ ID NO: 2613 - DNA, 276 bp, Klebsiella pneumoniae
atggctaaggttgatgcaagatgcccgttttgtgagcaaacggctgcggtaaaaaagcatggtctgggaagtgcaggccaccaacgttatcgctgtcaggcgtgttgtcgtagttttcaacttgattatgcgtatcgcgcctgccagcccggaatgaaagaaaaaattgttgacctcgcgatgaacaatgccggtattcgtgatactgcccgtgcgcttcatatcagcattaatgccgttgtgcgcacgttaaaaaactctcgccgcgatgtgtaa

SEQ ID NO: 2614 - protein, 91 aa, Klebsiella pneumoniae
MAKVDARCPFCEQTAAVKKHGLGSAGHQRYRCQACCRSFQLDYAYRACQPGMKEKIVDLAMNNAGIRDTARALHISINAVVRTLKNSRRDV

SEQ ID NO: 2615 - DNA, 999 bp, Klebsiella pneumoniae
atggcaaaaaaaataaatttcagtcgtattgccgagttagctggcgtgtctacgacaaccgtcagtcatatatttaatggtaatgccgaacgacatcgtatttctgatatcacaaagaaaaaagtattagccattgcaacacaatttgctgatcaagaacatatacgcagagcgataataagggcatctttaactagaaccatcggtgtaattgtacctgacatgtctaatttcagttttgcgatgtttctgcacaaacttgaaatgatatccagtcaccaaggtatacaaattatcatatcttgtagccattacaacccagctcaggaggtcaatgctattaataatcttttggaacgaaaagttgatggtattattaccataacatcgttagatgatgatgtgctctattcaaaggtaagcatcaaaacgcctgttctattatacgatcgttttatttctcatagtcaattaccttttgtctcttgtgagtcaatttgttcagttacaaaacttatatctgaaaaagctaaactatttgatgagttctggtttttaggcggtgatattcaaatatcaactatcagagagcggctgattggtttcagaaaaggcttaaaaaaagcaggcctaaaactaaataaagaatggattgtctatgataagtatcatgagaatcttggttaccatttgatggagaaaataaccaaaaaaattggacgattaccaaaggctatatttacaccgtctggaaacttgttggaaggagttttgttatatttgaaggataataaagttgcacaaaatgagatttatctttgctcttatgattacaatatgtaccacgatttccttttttatgatgttgatattttatcacaagattatgaacaacttgccagacactgttttataaatattcagcaccttattaataaacatgctgttgagcatagaataacaagggtccctcctaaattaattgtatcttcaagataa

SEQ ID NO: 2616 - protein, 332 aa, Klebsiella pneumoniae
MAKKINFSRIAELAGVSTTTVSHIFNGNAERHRISDITKKKVLAIATQFADQEHIRRAIIRASLTRTIGVIVPDMSNFSFAMFLHKLEMISSHQGIQIIISCSHYNPAQEVNAINNLLERKVDGIITITSLDDDVLYSKVSIKTPVLLYDRFISHSQLPFVSCESICSVTKLISEKAKLFDEFWFLGGDIQISTIRERLIGFRKGLKKAGLKLNKEWIVYDKYHENLGYHLMEKITKKIGRLPKAIFTPSGNLLEGVLLYLKDNKVAQNEIYLCSYDYNMYHDFLFYDVDILSQDYEQLARHCFINIQHLINKHAVEHRITRVPPKLIVSSR

SEQ ID NO: 2617 - DNA, 447 bp, Acinetobacter baumannii
gtggtagagatagcccggtttggtctgcggattcagcgcttcgatgagtatccgcttgtcgtggcgggcaaagcactccgcggcgtagcgcagattatcgataagcacggcctcgcaggctgcgcgatccgctcccggcggcaccacgccggccatgatatgcacctgcgggcaaccgagctggcaggcatactccagcgccagctcaatatcgcgtcgggcctccgcgcttctcccggggatggcggcgagcccccattctccggcgttgacgtcgccgggtggggtattgaacagcaccagctgcagctggttctcctgcaggcgctgtctgatttccccggcggcatactcatagggaaacagaaactcaacggcttcaaatcccgcccgggcagcggcggcaaagcgttccaggaacggcagttcggtaaacagcatggataa

SEQ ID NO: 2618 - protein, 148 aa, Acinetobacter baumannii
MVEIARFGLRIQRFDEYPLVVAGKALRGVAQIIDKHGLAGCAIRSRRHHAGHDMHLRATELAGILQRQLNIASGLRASPGDGGEPPFSGVDVAGWGIEQHQLQLVLLQALSDFPGGILIGKQKLNGFKSRPGSGGKAFQERQFGKQHG

SEQ ID NO: 2619 - DNA, 1611 bp, Salmonella enterica
atgaaatacacacggcgtactttattaaggaatattttttctttaccaatattaggttacttgggtttagagcataaagcatctctggccaacgataatactcaacttccttcatcaaaggaaagattatgttcaaattctaacccaccagatttatcgatatataatatctttgaaaaattacctggtaagacattgaaaattaacaatgaaaagcagtttgtaatgttcgaaaacacattgtggaaacctaaagtgcaaagtaactacccaatagttttaaaaggagagtctaaagatgtaattgacatattaaaccaaaatttttctttaataattacaccaaataatgatatgaacaaaacaaatacaaacattgtattggcatcgcattttggtgtaaaaggcaatgggatcccatgtggggaacaatgcgtcgcagcaataaattatattatgataaatggtggtacattgctctttcctcctggagaaattaattggggtaaaattcgtggtaactttaatgttaagaacggtcctaattttaaattattaggtacgccaggtaagacagtttttacattcgacaatattgatccaataaaaataaataaactatggggacattcagaaccagcattaattacaattggttcaaactcgactatcagttctgaatatacatcatccttcattatggaaagcataaaaattgattattcaaggcaaaaaaatcaaggcgggccaacttacaatactatgaataacggagcacatccaaccccatattcagatggcacacttgctattcatattatgtatgcagactctccaatactaaaagatatagaaataagtaacgtttatggttccggaatttgtatatggaaatgtactgatgccataatacaaaatgtaaccacgtataatgtatccgcaaatcaagttctaagtgccgatggtaaaaatgaatcagttgatcactttggatactcaatatggtcgggtgctagtgctaacactaaaatttccaattgtaaagcatttaattatcgtgtatatagctgtgatccaaaattaaaatcccctcataataatgagcaatatgacggaaaaatatgtggatatataggtatttactgcgaatatagtccaatacaaggaaataaaaacattgaaagcatacattatgaatggctttcagatgagaacacagacaaaagaggttatgctaaggtaatcaactgctttgtacgtggttacacatttggttttaagtctgaatcgctaatgtacatacattttgataattgcaaagccatttacaattacataggttttagtattcaagcatcagctttaattgagaactgttatattaacggtctcactatcgattacgaaagatgcccacaacaaggcatagaatcacaacgaggaggtgtttgtttctcatggtggagtggtgaaaataatcttcacgagcaatatcttttaaactcatatattgaatcaagaaaatatcaatgcatttcgcttggtaaaggaacagtcacaatacaacataacacgctcagaatatatgagtttaaaagatattgctcgtga

SEQ ID NO: 2620 - protein, 536 aa, Salmonella enterica
MKYTRRTLLRNIFSLPILGYLGLEHKASLANDNTQLPSSKERLCSNSNPPDLSIYNIFEKLPGKTLKINNEKQFVMFENTLWKPKVQSNYPIVLKGESKDVIDILNQNFSLIITPNNDMNKTNTNIVLASHFGVKGNGIPCGEQCVAAINYIMINGGTLLFPPGEINWGKIRGNFNVKNGPNFKLLGTPGKTVFTFDNIDPIKINKLWGHSEPALITIGSNSTISSEYTSSFIMESIKIDYSRQKNQGGPTYNTMNNGAHPTPYSDGTLAIHIMYADSPILKDIEISNVYGSGICIWKCTDAIIQNVTTYNVSANQVLSADGKNESVDHFGYSIWSGASANTKISNCKAFNYRVYSCDPKLKSPHNNEQYDGKICGYIGIYCEYSPIQGNKNIESIHYEWLSDENTDKRGYAKVINCFVRGYTFGFKSESLMYIHFDNCKAIYNYIGFSIQASALIENCYINGLTIDYERCPQQGIESQRGGVCFSWWSGENNLHEQYLLNSYIESRKYQCISLGKGTVTIQHNTLRIYEFKRYCS

SEQ ID NO: 2621 - DNA, 234 bp, Klebsiella pneumoniae
atgtattcggtagttacaaaagccctgaaagaaaaagagatacaaggtttgacaaaggattacctgatagtagtctaccttacagcaattgctatctggccagtcaccctggcgttaattggtctctctgcaggagtggcattctttacgcgccgcagggggctgggcgttgtcctcgtcgttctgttcatgctggtggtcatcactgcatgtcagtttcaacgctatatgtaa

SEQ ID NO: 2622 - protein, 77 aa, Klebsiella pneumoniae
MYSVVTKALKEKEIQGLTKDYLIVVYLTAIAIWPVTLALIGLSAGVAFFTRRRGLGVVLVVLFMLVVITACQFQRYM

SEQ ID NO: 2623 - DNA, 1065 bp, Enterobacter cloacae
gtggctgagaacggaccgatagaagagttggcaaagatagtatcatcgaagatttttgagcgctttaaatggagcatatcaggaccgtgcgatcaggactttggatgtattgacgaaggtaatcataaacctctcgacaaaaagcaggctcatacgcatcctgtcgatgtagtttttagctataaagatccttatttaaataaaactattttattgaatactgacctcaaaagttattctaagggttctattaaccctgacatgattgagaaagcgttaacttccctaggttatacaatttcctgtgctcaatatagcccagaatggcgagaaaaatataacatatgcgtaggggatagcgaggttagagggttattatttgtttataatcatgataatgattttgaacatgatttttatgatttcttcgatcctccaaaaccagtgggtaaaaaaagaaaacccaaggcggttaaattagataatataaaagtgtctgaaggtcaacaaatacatataatcgaacctaaatctattagctatatgctatctataatcgctgatatgaatgagttaattagagataatcaattcccgagagaggcatacggtttctattatcctcaactgacatatcataaggtaattgtcacagatgattacttgcctgcaacgattgaatctttgacagctccatttttaattattaaacatgatgcagtttattcttataatcgtgatttaaagaaagaagtggaagtttatcctggagggtatgttgtttattataaccgatcaggttctacagatatggagttttattatctttttgatcttttaactaattaccagattctgaatggaaaaaataacataagaatacgcatcgctacaaaagatcgaaatgattcaataagatcacattttaatagagcccttcagaaatatgcgtttgattggaattatgatgatagtgcaaagcaaaaattactttctatggaaatttatttagttcctacggttaaagagttttacagtactgaatcaacatcttgggattattaa

SEQ ID NO: 2624 - protein, 354 aa, Enterobacter cloacae
MAENGPIEELAKIVSSKIFERFKWSISGPCDQDFGCIDEGNHKPLDKKQAHTHPVDVVFSYKDPYLNKTILLNTDLKSYSKGSINPDMIEKALTSLGYTISCAQYSPEWREKYNICVGDSEVRGLLFVYNHDNDFEHDFYDFFDPPKPVGKKRKPKAVKLDNIKVSEGQQIHIIEPKSISYMLSIIADMNELIRDNQFPREAYGFYYPQLTYHKVIVTDDYLPATIESLTAPFLIIKHDAVYSYNRDLKKEVEVYPGGYVVYYNRSGSTDMEFYYLFDLLTNYQILNGKNNIRIRIATKDRNDSIRSHFNRALQKYAFDWNYDDSAKQKLLSMEIYLVPTVKEFYSTESTSWDY

SEQ ID NO: 2625 - DNA, 1125 bp, Enterobacter cloacae
atgagcaatatttatagtgtgacggataaggttttatgtgatgctcttaatcagtcacaagtgacacaaaatgagatgagagagctttttctttctcgaggtataattatttcaaaaaatactgatagaaaattattagctaaaaatttctcaaaatttacacatgattactatgatcatcagaaaattgcagagatattaggaagtgagccacgaagggagcgctctacttcaaggttagtatctaatatgcctgaaaaaacaattttattgaaagcggcagatactctcaaaaaagagcttacagatcataaagacctctgccatgtggttgctgatagaagtggtatgataaatgtccatataacttatatgtcaaccaatttttcaaaaagcgatttcaaacaagtagttaaaaagcaagctgttatcgaggtggaaccaacagaaggtggttatgtgattcgccgcccagataacgaacaaaccgaagtttatgagaatcaactacttgctattgtagagaggttatcaaaagaaaaagcaattgaggacgggaaaccaatttctgaagctactctcgatatccaagaaataagtctagaacatattgattcgccccagtccagaactgatttctttactaaattaataaatgggctggagggttatgatctagatgatgtaacagatgcttatgtttaccatccaaaaccagaagagattgaagaggaagatggcgaaacagatataggtgtacatgttagtaaggcatcgctgaaaggtgaaggtgtgctgaaatctgaagaaatcaactccctttatgaacgtggcttttatatatgcaaaataaaatggcgagttaaagagaaaggagcggatccaaacatttttgagtttgaagcacagtttaatgatgctcaaaacttcaaggggttttcatatatagccaagggtattaaaaaatacaaaggaggaggtgagtataataaaacaacagttcaattgaatgatgggcaaaagttattttttagtcgtatgattgaaaaagcagcccgttccattataattgaattaaataaacaggctcaggggaagaaagatggaaaatctcatcaggattaa

SEQ ID NO: 2626 - protein, 374 aa, Enterobacter cloacae
MSNIYSVTDKVLCDALNQSQVTQNEMRELFLSRGIIISKNTDRKLLAKNFSKFTHDYYDHQKIAEILGSEPRRERSTSRLVSNMPEKTILLKAADTLKKELTDHKDLCHVVADRSGMINVHITYMSTNFSKSDFKQVVKKQAVIEVEPTEGGYVIRRPDNEQTEVYENQLLAIVERLSKEKAIEDGKPISEATLDIQEISLEHIDSPQSRTDFFTKLINGLEGYDLDDVTDAYVYHPKPEEIEEEDGETDIGVHVSKASLKGEGVLKSEEINSLYERGFYICKIKWRVKEKGADPNIFEFEAQFNDAQNFKGFSYIAKGIKKYKGGGEYNKTTVQLNDGQKLFFSRMIEKAARSIIIELNKQAQGKKDGKSHQD

SEQ ID NO: 2627 - DNA, 183 bp, Escherichia coli
atgagatatttttattgtgataaatttgaaagtatgatgatctatgtcatttatcgcattagagttattatcaaacactccggtcttttttttctcatcatatatcttggtgcttttattctcataaactttcaattcatacttaatagtttcgcccgaataactgttataggggttttttaa

SEQ ID NO: 2628 - protein, 60 aa, Escherichia coli
MRYFYCDKFESMMIYVIYRIRVIIKHSGLFFLIIYLGAFILINFQFILNSFARITVIGVF

SEQ ID NO: 2629 - DNA, 675 bp, Klebsiella michiganensis
atggagcagaacacttttgttgatcggtttttccacagcagcttggagctaacagatttcaggaaaactggtgagcgcgatattaatacattattcagctttctaaacaatttacattcattacaagacagattccgtgagcagtttcatagtaatatttcacagcacccggagtttaaattactgaggatattaagaaactatcatcatcatgtcggtgacgttgatgaatttagggtttacaatgttaggaatgaatttacacttagccattccgagatgattattatcccattatatatagttgccaaagcgatactcaacgcaaaaaaacggcataatgcagaaagagaaatacaatccatatcagagtttatcgatgattttgagtatatctcagcgaatgattcgtttttttcggaaaggcgccctatcattaacaatggtaaaacgtactatccaggatttgatatttataaatgtgtttacaatattacaaatatcattgctgacatctgtcgaaaaattcccgagctatcacaaaaaaaatgcattattaatttagacgacacatacactagtaaaaacaacatagaaaaacgtaatttattatgtcatgccggagaggttccattccttactactgaaggctatataatacctgaacaaaactaa

SEQ ID NO: 2630 - protein, 224 aa, Klebsiella michiganensis
MEQNTFVDRFFHSSLELTDFRKTGERDINTLFSFLNNLHSLQDRFREQFHSNISQHPEFKLLRILRNYHHHVGDVDEFRVYNVRNEFTLSHSEMIIIPLYIVAKAILNAKKRHNAEREIQSISEFIDDFEYISANDSFFSERRPIINNGKTYYPGFDIYKCVYNITNIIADICRKIPELSQKKCIINLDDTYTSKNNIEKRNLLCHAGEVPFLTTEGYIIPEQN

SEQ ID NO: 2631 - DNA, 720 bp, Klebsiella michiganensis
atgcttaagaatttagcaaggatgaaacatgctattacggaatgggccattaaagagagcatattggatgatgctacttttttaacccaaaaggaatggaacgaccgtggagaaaaaatccacaacgatgcattaatggtcctagtaattgacggaagtgggatatttagtttgttgaacaacggttgtgacacaaccgaatttgatgatctggttgagtcatttggcttctggtatgaacggggctatagctggagccttggcttttaccctacggacaattatgactacagaaggctgaatggtaactatacatccaaacttctagatccgaggtggttaaggaaagcagcattagttaaggcagcagctggacaccagtgcgaggattgtggaaagcaaggacgccttgaggctcatcactgctattacacgacgatgagtcttggttatgagccatgggagtatccacttagtgcatttcgggctttgtgtcctacctgccataccacacgacctattcctgaaataagggcaagggcattccttgcacgactgaatcagtcccaactctcaagactactcgatggcttagataatggcttcaaccgatttgaagccgattcctttattgactttatgcggaaagctagttttcataaaacgcatatggatgaagctcttttacttctgaaaaaaaacaccgatatatatgactaa

SEQ ID NO: 2632 - protein, 239 aa, Klebsiella michiganensis
MLKNLARMKHAITEWAIKESILDDATFLTQKEWNDRGEKIHNDALMVLVIDGSGIFSLLNNGCDTTEFDDLVESFGFWYERGYSWSLGFYPTDNYDYRRLNGNYTSKLLDPRWLRKAALVKAAAGHQCEDCGKQGRLEAHHCYYTTMSLGYEPWEYPLSAFRALCPTCHTTRPIPEIRARAFLARLNQSQLSRLLDGLDNGFNRFEADSFIDFMRKASFHKTHMDEALLLLKKNTDIYD

SEQ ID NO: 2633 - DNA, 822 bp, Klebsiella pneumoniae
atgaatttctcttatactaaacaagatggactgacaaagaagtgtcttgtcagaggctttaaagttaacacagcatctactgatattctttttgatcaaatagcaaagtctacaacctttcagataggctctgtcatcaaaatcagtgcagataaacaccttatgctgaaggcatttgaaacaaacgccaattgccactatcttcatgtagccctttacaaccctaaagcacaagtttctataactcctttaaaaaaagctgcaagcgatttactggatgtagagaaccttgatgatcttcatgcgttcttaatgataaaaggcaaccagatagcatcacttatgcagatctcaactaattggtgcgaagttaagattgctaaaatttttaatcaatttggtatatcgataacgccaacagccattctaaaaaacaatgttattcagaaaattaaagaggacaaattaaaagctctgcatctcaacattgacgttgatgaatctgatttcgttcaagcaccaagtgtgttagagtcaatattcaaaaaagaaccaacaattagagccaagggtatctctggtcacttaacaatagatgctaaaggtaatgcagaattagctcagtctattgagaataatcctgctacatgggttaatgatttggacagagatttttatattgaaacaaaaaaaggcgacaagttttatagtgacgatttgaaagtaactaaggtttactttacagtaccatatggttctaagtctataaatgcgaaatatgctaaagaaatcctagaggattttgtagcaaaagagctataa

SEQ ID NO: 2634 - protein, 273 aa, Klebsiella pneumoniae
MNFSYTKQDGLTKKCLVRGFKVNTASTDILFDQIAKSTTFQIGSVIKISADKHLMLKAFETNANCHYLHVALYNPKAQVSITPLKKAASDLLDVENLDDLHAFLMIKGNQIASLMQISTNWCEVKIAKIFNQFGISITPTAILKNNVIQKIKEDKLKALHLNIDVDESDFVQAPSVLESIFKKEPTIRAKGISGHLTIDAKGNAELAQSIENNPATWVNDLDRDFYIETKKGDKFYSDDLKVTKVYFTVPYGSKSINAKYAKEILEDFVAKEL

SEQ ID NO: 2635 - DNA, 486 bp, Klebsiella pneumoniae
atgctaaaaaatattaacacaacagggctgatcgtatcagcgctaaacatcatagcctcgttaagtttctcgatttttttaactggaagcctaactaataacactgatgcattaaatcttgtagccaatgtattctcaatactatctggttttttgcttttagtaataactatgtcaggtgagaactcaacgttgcttagtaacatgagcgcactggacgcggcaaatcaagaaagaagattcttgatgcgctttaacaaatactacgctctttttttactttacatactcacattggctttgatttttatattctatttgataacaaaagataaaaccaataactcagcaatattaacgagcttaaaatctataattggccattcaattgcatttctaacatgcttctcatttatccagtcaacattcatcccacttaaaataaaagagctatttaaggaaaaaagagaacttaataagaagtaa

SEQ ID NO: 2636 - protein, 161 aa, Klebsiella pneumoniae
MLKNINTTGLIVSALNIIASLSFSIFLTGSLTNNTDALNLVANVFSILSGFLLLVITMSGENSTLLSNMSALDAANQERRFLMRFNKYYALFLLYILTLALIFIFYLITKDKTNNSAILTSLKSIIGHSIAFLTCFSFIQSTFIPLKIKELFKEKRELNKK

SEQ ID NO: 2637 - DNA, 951 bp, Klebsiella aerogenes
atgaatattagagaagagtttaaatttgaagaagggcaagatgtaataatagaatttgagcgtattctaaaaaataacgatattaatgtaagtattgactcagatatggagtcaaaattcttatctgtctttgatattctttttcatttcaacagtggtaagcctctggattcaaatgttgacaaacgggctttgtttagggatttttctgcactgtacgatctcgctttaaaagttgtcaacgttgaaagtaacagtgcttttaatcaacttattccgcatttgaacttattgaatggttgtgcaatttctcaaaacacaagttctctcattacggatcaggattctaataagattattgaactctatctagcatgtttatgtatgagattaagcaataacgtatcattagatcatccgcagaactctcgtggtgataatccagatgttattgcggaaattaacagagtaaattgggggtttgcatgtaaaactgttcatactataaatcctcaaacgatatatgagaatattaaaaaggcaatagatcaaatagataagtcaaaatctgatgttggtataactgttattaaccttaagaatgttatagatcataacaagatatggccaaaagatactactttcctatctgtcgataccccgctgaaccaacttgttaacaatattgatatggttaagacatcattgttagagactattggtaaggatgaactcttgagtgtttttgaagggaaaaagtcattgccaggtgttatttttattgggcaaagcgtatcctctgttttccttccggaaacaaattcaccaactgctacaagattgaatgtaatgcgtttgttttctttggatgacggagggtttacagatgatcaatttaatactctgaatacaattaatcattacatgcagttggcaaatcgtgatttttaa

SEQ ID NO: 2638 - protein, 316 aa, Klebsiella aerogenes
MNIREEFKFEEGQDVIIEFERILKNNDINVSIDSDMESKFLSVFDILFHFNSGKPLDSNVDKRALFRDFSALYDLALKVVNVESNSAFNQLIPHLNLLNGCAISQNTSSLITDQDSNKIIELYLACLCMRLSNNVSLDHPQNSRGDNPDVIAEINRVNWGFACKTVHTINPQTIYENIKKAIDQIDKSKSDVGITVINLKNVIDHNKIWPKDTTFLSVDTPLNQLVNNIDMVKTSLLETIGKDELLSVFEGKKSLPGVIFIGQSVSSVFLPETNSPTATRLNVMRLFSLDDGGFTDDQFNTLNTINHYMQLANRDF

SEQ ID NO: 2639 - DNA, 900 bp, Escherichia coli
atgaatatattagctcgccaatgtggctacactgatgtatatcatccctcactgggcttaacaccgaaagagatttcttccatagagcggtaccttgatgccattcgaagtgatctattgttcgctaaaagtgtcattctcgtagaaggtgatgctgagcttattcttatacccgcaatgataaaagaaactttgggtattagcttagatgagttagggataagtctcattaaagtggatggaactgttttcaaacatgtttctaatctttttcacgaaaaacgtttgaaaagaaagtgtgctattctgacagatcttgattcggcttatgttagtgtcgctgacgatgagtttgatgataagttcgttcaatctttagaggctgctgaagatgatggtttacgaagaaaagatgaattagacagttatatcgaaggtaatgaatttgtttcggtatattatgctgaaaatacctttgaaacagaactggttcgatacgatgataacaaagacttgtttattaaagtgatgaggactaattacgaaaaggacgcctattttaaaaaggctgaatctgatgtaaattcatcagaccacaggattcgatatcgaagggttctaaagtttgcaaaaaaaataggtaagggctggttagctacagaaatgatagaacaccttagtgttgataaccgtgttcctgattatatattacaggctattaagtttgtcattcgtgatagaaacgtcgaactaatatatcaaaaaatgcttgattataatatgtctttgatgggagctaaagaatttgattgcataaatgaagaaaatagttttacaagcaaaatgacggaatataagaaacacttcaatgatagctttgtaagattattggagctataa

SEQ ID NO: 2640 - protein, 299 aa, Escherichia coli
MNILARQCGYTDVYHPSLGLTPKEISSIERYLDAIRSDLLFAKSVILVEGDAELILIPAMIKETLGISLDELGISLIKVDGTVFKHVSNLFHEKRLKRKCAILTDLDSAYVSVADDEFDDKFVQSLEAAEDDGLRRKDELDSYIEGNEFVSVYYAENTFETELVRYDDNKDLFIKVMRTNYEKDAYFKKAESDVNSSDHRIRYRRVLKFAKKIGKGWLATEMIEHLSVDNRVPDYILQAIKFVIRDRNVELIYQKMLDYNMSLMGAKEFDCINEENSFTSKMTEYKKHFNDSFVRLLEL

SEQ ID NO: 2641 - DNA, 132 bp, Citrobacter freundii
atgcatgatgaaatcattaatcaggcccgcgaaatcctcactcaacggctctaccgtaccgacacactggcatcaccgcaggacaccgcgagctatctggctttacagcttggcgaaaggggctggctatga

SEQ ID NO: 2642 - protein, 43 aa, Citrobacter freundii
MHDEIINQAREILTQRLYRTDTLASPQDTASYLALQLGERGWL

SEQ ID NO: 2643 - DNA, 543 bp, Enterobacter cloacae
atgataatctggatcaacggacctttcggcgccggaaagacgactctcgctgagcggctgcgcgatcggcgtccgaaatcgctgatctttgaccctgaggaaatcgggttcgtggtgaaagaaacggtccccataccagcgagcggagactatcaggatctccccttgtggaggggacttacgatcgctgcggtcagcgagattcgcaggaattactcgcaggacatcatcatcccaatgacgctcgtgcacccggactatctgactgagatactcgacgggttaaggcagatcgacgatcagctgctgcacatctttctgatgcttaacgaggacctattgcgtcaccggatctcgaaccagaccatgcatcctgacccgaatcggaatgcggagattcgagagtggcgattagcgaatgtcgcccgatgcttggccgcaagggaacggcttccgtccacaacccgtgttctcgatagtggtgcacacaccagcgatgaacttgcagcgatggtgctcgacagactcgatcagcgcacctga

SEQ ID NO: 2644 - protein, 180 aa, Enterobacter cloacae
MIIWINGPFGAGKTTLAERLRDRRPKSLIFDPEEIGFVVKETVPIPASGDYQDLPLWRGLTIAAVSEIRRNYSQDIIIPMTLVHPDYLTEILDGLRQIDDQLLHIFLMLNEDLLRHRISNQTMHPDPNRNAEIREWRLANVARCLAARERLPSTTRVLDSGAHTSDELAAMVLDRLDQRT

SEQ ID NO: 2645 - DNA, 861 bp, Enterobacter cloacae
atgcatacgcggaaggcaataacggaggcaattcgaaaattaggagtccaaaccggtgacctgttgatggtgcatgcctcacttaaagcgattggtccggtcgaaggaggagcggagacggtcgttgccgcgttacgctccgcggttgggccgactggcactgtgatgggatacgcgtcgtgggaccgatcaccctacgaggagactctgaatggcgctcggttggatgacaaagcccgccgtacctggccgccgttcgatcccgcaacggccgggacttaccgtgggttcggcctgctgaatcaatttctggttcaagcccccggcgcgcggcgcagcgcgcaccccgatgcatcgatggtcgcggttggtccgctagctgaaacgctgacggagcctcacgaactcggtcacgccttgggggaagggtcgcccgtcgagcggttcgtccgccttggcgggaaggccctgctgttgggtgcgccgctaaactccgttaccgcattgcactacgccgaggcggttgcggatatccccaacaaacgatgggtgacgtatgagatgccgatgcttggaagaaacggtgaagtcgcctggaaaacggcatcagaatacgattcaaacggcattctcgattgctttgctatcgaaggaaagccggatgcggtcgaaactatagcaaatgcttacgtgaagctcggtcgccatcgagaaggtgtcgtgggctttgctcagtgctacctgttcgacgcgcaggacatcgtgacgttcggcgtcacctatcttgagaagcacttcggagccactccgatcgtgccagcacacgaagccgcccagcgctcttgcgagccttccggttag

SEQ ID NO: 2646 - protein, 286 aa, Enterobacter cloacae
MHTRKAITEAIRKLGVQTGDLLMVHASLKAIGPVEGGAETVVAALRSAVGPTGTVMGYASWDRSPYEETLNGARLDDKARRTWPPFDPATAGTYRGFGLLNQFLVQAPGARRSAHPDASMVAVGPLAETLTEPHELGHALGEGSPVERFVRLGGKALLLGAPLNSVTALHYAEAVADIPNKRWVTYEMPMLGRNGEVAWKTASEYDSNGILDCFAIEGKPDAVETIANAYVKLGRHREGVVGFAQCYLFDAQDIVTFGVTYLEKHFGATPIVPAHEAAQRSCEPSG

SEQ ID NO: 2647 - DNA, 678 bp, Enterobacter cloacae
atgaaactgactcgcgaagcaaccaccgcagcaaacccggatttacgcggccgcaaacatcatttcatcatcgagagcgccacggcggcagagctggaagcgatggacgagatcctgacgctggcaggctgggaaaatgacagctgcccttgctatgaggacggctttggttgtggttactggatcgacatttccgaagtggcttgtttcaaagcggcatacaaagcagcgaaaacgggcctgaaaggctatatggcagttgaagcggagaaggccgcagcagtgagcgaagccaccgcagagccagccccggaacacatcccggcggcaagccttgacgattacaccgtgtacaccttgcatgaacctattgaagcggaagaaggcaagccatacgcagagaagcgcgtaactcgcgcctacgttgcccgcagcatgacccgcgccctggcgagccaggagaagcatacagagaagtacaaagcgcaggatgttatctggctggcggagcacaacgcagaccacgcttttagaatgggcgttttaagcccggaagagttcacagagatctatcggatggtacacgcagagaacgcgcagcccctgcttattctggcggccctgcgtgatgccctgctaaccggagcgccagcacttgccgccgtccgtgcggcataa

SEQ ID NO: 2648 - protein, 225 aa, Enterobacter cloacae
MKLTREATTAANPDLRGRKHHFIIESATAAELEAMDEILTLAGWENDSCPCYEDGFGCGYWIDISEVACFKAAYKAAKTGLKGYMAVEAEKAAAVSEATAEPAPEHIPAASLDDYTVYTLHEPIEAEEGKPYAEKRVTRAYVARSMTRALASQEKHTEKYKAQDVIWLAEHNADHAFRMGVLSPEEFTEIYRMVHAENAQPLLILAALRDALLTGAPALAAVRAA

SEQ ID NO: 2649 - DNA, 516 bp, Enterobacter cloacae
atgagaatggatatagttgataccccgaatgaaaatgcgcaaggaagtaaatatttaacgcctcagcttacgttcctcgataagcattataataattccacggactttttttcttcgatatttttactgctgaaagagaaaggctacgttcgggattctttcctcgatgccattcttgccagagaaaaagcctatccaaccgggttacccacgctgccggtggctatcgcgctgccgcataccgacccccagcacgtcattcgtccctttatctctgttacgcgactgtcacaacctctcgcctggcaggaaatggggaatgacgacaatacgctctacgttcaatttattgttcttcttggttttattgaccacagcagccacctgacagcgctgcaaaacctgatggactgccttgctgatgaacaggtcgtccagaccctacgcgagatagacgatgtagatacctttctctgtaccctcacatcaagactgcaattggataaggatttataa

SEQ ID NO: 2650 - protein, 171 aa, Enterobacter cloacae
MRMDIVDTPNENAQGSKYLTPQLTFLDKHYNNSTDFFSSIFLLLKEKGYVRDSFLDAILAREKAYPTGLPTLPVAIALPHTDPQHVIRPFISVTRLSQPLAWQEMGNDDNTLYVQFIVLLGFIDHSSHLTALQNLMDCLADEQVVQTLREIDDVDTFLCTLTSRLQLDKDL

SEQ ID NO: 2651 - DNA, 1287 bp, Klebsiella michiganensis
atgaatatgccagctggcgtagagctgcatgggaagggaataagaattagctttctatatcgcggcatacggtgccgcgaagttttgcggggctggactgtatctaatagcaatatacgaaaggctggtaacctccgtgctttaatagtaagtgagattcagcaggggaagtttgactatgcagagcactttcctgaatcaaaagcgattaaaaaatttaccacgacacaaaaagttaaaacctttggtgaattatgcaaagtttatcttgatgccaaaaagcttgaggtttcagctgcatcatacagaggcgcagaatcacgtatagcaacactttgcgctatcgtcggaagtaatacgcatattgcagatattcagcataccgatctgttgaattacagaaacgcgctgttaacgggaaacacttttagcgatcatgcgccctggttaaaaagaaaaggtcgtgctgtatccacggtcaacggcttgatgaacaacctgactgcgttgctcaagctggctaacctgagcggttttatagagcacaccccgcacgaaggtataaagatgctcaagcgctccaggagagacccggatccgcttctccagagtgagttcgaaggttttataaaagcgctatctcgtcgttatgttttactatggactacagctatctttaccggccttcggcatggagagcttacagctttagcctgggaagatgtggaccttgataagggtgagcttcacgtcaggcgtaatcagactaatgaggggctgtttgtgccacccaaaaccgaagcggggatcagaactataaccctgcttgagcctgcgctgaacgctttacgtgagcaattcaagctaactggcgcattaagcaaaaccgaaatcaccttccatcaccgcgaacatggtttaactgaacaacaaaaactgcggttcgtgtttatcccgcccaaaaactggcgcggggaaacgaagtattacggatctcagtctctggggtatagttgggaggcaggattaaagaaggcaggaatcaggaacaggcgcccttaccagtcgcgccacacttttgcgtgctggttattaactgccggtgctaacccgtcgtttatcgccggacagatgggtcacgaaaacgcgaagatggtttatgagatttactcgaagtggatcggagagatggaccgcaaccaggtggaaatgctgaatagcagtttttctgacgttgtgtcccaagggtgccccaaacgcaaggtagttggtataaaaaacgtttga

SEQ ID NO: 2652 - protein, 428 aa, Klebsiella michiganensis
MNMPAGVELHGKGIRISFLYRGIRCREVLRGWTVSNSNIRKAGNLRALIVSEIQQGKFDYAEHFPESKAIKKFTTTQKVKTFGELCKVYLDAKKLEVSAASYRGAESRIATLCAIVGSNTHIADIQHTDLLNYRNALLTGNTFSDHAPWLKRKGRAVSTVNGLMNNLTALLKLANLSGFIEHTPHEGIKMLKRSRRDPDPLLQSEFEGFIKALSRRYVLLWTTAIFTGLRHGELTALAWEDVDLDKGELHVRRNQTNEGLFVPPKTEAGIRTITLLEPALNALREQFKLTGALSKTEITFHHREHGLTEQQKLRFVFIPPKNWRGETKYYGSQSLGYSWEAGLKKAGIRNRRPYQSRHTFACWLLTAGANPSFIAGQMGHENAKMVYEIYSKWIGEMDRNQVEMLNSSFSDVVSQGCPKRKVVGIKNV

SEQ ID NO: 2653 - DNA, 216 bp, Enterobacter cloacae
atggccgatattactcaagaagatgaatgggtgatggaaaagggaattgtagcgaagatgtatatgactccccggcaaattaaatcttaccgggaggggagatggattgagggggttcattataagaagcacccacctgaccccaatgcttcagaaggaagggtgacacttctctacaactacaccaggattaacaggcttgtcggggaaacataa

SEQ ID NO: 2654 - protein, 71 aa, Enterobacter cloacae
MADITQEDEWVMEKGIVAKMYMTPRQIKSYREGRWIEGVHYKKHPPDPNASEGRVTLLYNYTRINRLVGET

SEQ ID NO: 2655 - DNA, 2142 bp, Klebsiella pneumoniae
atggatgttgaaatcagtcactgtaacaatattgattacgcccgtatcatactttcagaaaataagctaaacattaaatttgcaccaaatggtactggcaagagtaccgtttctcgcgcgatactacatagcgttgttggcgatatacaaagtcttaatgcccttcttccctttaagcttcgtgcatcaaatccgtcaaatttcataccaagcgtgcgcggtgcagaaattattcgcgaagtgatgtgttttgatgaaaagtatgtttcacagttcaccttccagcctaacgagttaattagcaacagctttgacatttttatcaaaactgaagcttacagtcagaccgagagcgagatagaagctatggtcatggcaattcggcaagagtttaccaataacaatgaactggaattattcattacccatcttcaagaacttagtggtgcttttaagctaactagcaggggtctttcgagagcctctacaggtatgagaggactgtctggcggtaataagcttcaacacatccctccagggcttgaagggtatcaaccatttatacaaagcgcacgtaacgtagagtggattgaatggcaaactaaaggatatgaaaacttctcagaactttcagacgattgctgccctttttgtacaggcaattcacacgataaaattgaacaaatacgtaaagttagtgatgaatacgacaaagctgttattaaaaacctcgttgttattatcaatgccattgaaaaacttggtgagtattttcatgacgatgctcgggctcgcctcaaggaaataacaactttacagggcggacttgaacagcgacatgaagactatcttctaacaattaagcgacagacagacagcctcctgactttactaaactctttgaaaattcttaatagtttttcattcgaagatggaagcaatgtgcgagcttctttagcagcctatcgactggacctgcagtttttttctgaacttcagtccgacagaactaagcaaatagttgatcgtctcaatgcttctctagatacacttatggctcaagctggtcagcttcagggaaaaatcaacatacagcgtgccggtatgaacaggttgatattgaagcacatgaccgatatcaatacattcctttcatatgcaggatataggtatcaagtagacatatctggtgacggttctgagtgtagactaaaactgcgacacgttgatcatgagcatcaccttagtggcgggagccaacacctcagttatggcgaacgcaatgcctttgcgatcgttctgtttatgtatgagtgtctagcacgtaaacccgatcttataatattagatgatcccatatcatcgttcgataagaataaaaaatttgccatccttgagatgctttttcgtcggaatacaggggaatgcttaaaaaacctcacagtattaatgttgacacatgatgtagaacccattattgatacgctgaaatcagtccgacagatgtttaataatcaggttatggcatcatacttacgttatagcgcaggaattattacagaattgccaatccgcgagagcgatataatgacttttgcgcaaatctgcaagactgtaactgaatcaaactgtgacgacctgataaaactgatttaccttcgccgacattatgagatcattgacgagcgtggcgacgcatatcaggtactctcaaatctttttcaccgtcgagctgaacccatcgattcacgtgaggaggtagaggacggtgctggttatcctaaaatggattcagttaagtttcaaataggctgcgataccatcgctgaacgtatttctggttttgactacgcaaaaatacttgagatggtgacaactcctgactatataagagccctttatcaaaactgtaggaccgggtatgaaaaactacaagttttcaggctattagaaccagaaattgataaccgagtgattcgtaagtttatcaatgagacttatcacatcgaaaacgaattcatttgccagctcgacccagtaaggtttgatctgatccctgagtacgtaattttagaatgtgacaaactccttaccacaccgttctcatccgcaaatgatgagatagagcaggagatagcttag

SEQ ID NO: 2656 - protein, 713 aa, Klebsiella pneumoniae
MDVEISHCNNIDYARIILSENKLNIKFAPNGTGKSTVSRAILHSVVGDIQSLNALLPFKLRASNPSNFIPSVRGAEIIREVMCFDEKYVSQFTFQPNELISNSFDIFIKTEAYSQTESEIEAMVMAIRQEFTNNNELELFITHLQELSGAFKLTSRGLSRASTGMRGLSGGNKLQHIPPGLEGYQPFIQSARNVEWIEWQTKGYENFSELSDDCCPFCTGNSHDKIEQIRKVSDEYDKAVIKNLVVIINAIEKLGEYFHDDARARLKEITTLQGGLEQRHEDYLLTIKRQTDSLLTLLNSLKILNSFSFEDGSNVRASLAAYRLDLQFFSELQSDRTKQIVDRLNASLDTLMAQAGQLQGKINIQRAGMNRLILKHMTDINTFLSYAGYRYQVDISGDGSECRLKLRHVDHEHHLSGGSQHLSYGERNAFAIVLFMYECLARKPDLIILDDPISSFDKNKKFAILEMLFRRNTGECLKNLTVLMLTHDVEPIIDTLKSVRQMFNNQVMASYLRYSAGIITELPIRESDIMTFAQICKTVTESNCDDLIKLIYLRRHYEIIDERGDAYQVLSNLFHRRAEPIDSREEVEDGAGYPKMDSVKFQIGCDTIAERISGFDYAKILEMVTTPDYIRALYQNCRTGYEKLQVFRLLEPEIDNRVIRKFINETYHIENEFICQLDPVRFDLIPEYVILECDKLLTTPFSSANDEIEQEIA

SEQ ID NO: 2657 - DNA, 1236 bp, Enterobacter cloacae
atgaatagcacattaaaagaacttgagagaaattgcgcaccaatagattttattgaaccactggctcgattggtcttggatgatttagctatgtgggcaaatgataatatatactcaaaaaaatctgggtgtttaacttatgaactccctcttgatggaaacatcaatgcagcttgtacaagttatcatgattcacgctatcgaacccatattgaaattaaccttggaatggttcaggaaatctacatccagtcatttacctatccaggttacattaaaaatctagaaagcggaaattggcatttcaacgctcttgatgagccctttagtgatgctgaatttttattcgaaggtggtatccccccaagaatcagcgcgtctgacacggtcgctcatatggtcgagctatacaaaaatattcctaacaacagaaataccatgtggactgatgaagaattaatttgccgttttgccatgtttgaattaatgattgcgtggatattttttcatgaacttgcacatcacgttcaagggcattacaagataaaaaaagaaataaaagaatcggttacttatcatgaactagattactcaagcaacactaataattccaatcctgaggtaactcccagcgtcatccaaaagaacattgaccagcatgccagagagatacttgcagacctcgaaggcatgtatttaacactgaggatgatggtgagaaatgatacattaacaccacctaacacttttttgcttttatatgtccaaacttcaatgtttaatgtattctataaattatctgagggaaagtatacggaattagatagcgttaaagtttctcacccccaccctgtaattagaaacaaatttgtgcacgccctgtatgtctctgtgatgagttgggaattgggtaatgagatataccaagattatcgtcaatctgttagccgaggttttgaatattatactgtaaaatcatcattattagctggaatgatatgggcaatgagacaatctgattacagtccggatgcaatgccccaatttcttaaatttagtgatgagaccgagtattccacagattataactaccttagagaattgaccttaagcgctgaaaggcaatcatccatgatatcactcttgcatatcatcgataatgattcagataatatttttaaattaacaaaattagacaatctattcactcattttttaaatgttaatgaagaataa

SEQ ID NO: 2658 - protein, 411 aa, Enterobacter cloacae
MNSTLKELERNCAPIDFIEPLARLVLDDLAMWANDNIYSKKSGCLTYELPLDGNINAACTSYHDSRYRTHIEINLGMVQEIYIQSFTYPGYIKNLESGNWHFNALDEPFSDAEFLFEGGIPPRISASDTVAHMVELYKNIPNNRNTMWTDEELICRFAMFELMIAWIFFHELAHHVQGHYKIKKEIKESVTYHELDYSSNTNNSNPEVTPSVIQKNIDQHAREILADLEGMYLTLRMMVRNDTLTPPNTFLLLYVQTSMFNVFYKLSEGKYTELDSVKVSHPHPVIRNKFVHALYVSVMSWELGNEIYQDYRQSVSRGFEYYTVKSSLLAGMIWAMRQSDYSPDAMPQFLKFSDETEYSTDYNYLRELTLSAERQSSMISLLHIIDNDSDNIFKLTKLDNLFTHFLNVNEE

SEQ ID NO: 2659 - DNA, 189 bp, Klebsiella pneumoniae
atgaaaaaagtgtttaggataatcggaataataactggcctaattacatttttaagtgccgggttctattttgtagagaattctttcgataaccttttttacggcaatatctttatcaatatctcaactggtattgtctttattttctcattgatcggcctgtatttcatatggaatagcaagccgtga

SEQ ID NO: 2660 - protein, 62 aa, Klebsiella pneumoniae
MKKVFRIIGIITGLITFLSAGFYFVENSFDNLFYGNIFINISTGIVFIFSLIGLYFIWNSKP

SEQ ID NO: 2661 - DNA, 153 bp, Citrobacter koseri
atgacgaaagaagagacatggctgaaagagcagatagaagagacattctcaagagtagacaaaggagagatccgctattactcagaagatgaagctgacgaacgcatgaactccttcatctctaaaatcgaacatcaacacgaaaccgcataa

SEQ ID NO: 2662 - protein, 50 aa, Citrobacter koseri
MTKEETWLKEQIEETFSRVDKGEIRYYSEDEADERMNSFISKIEHQHETA

SEQ ID NO: 2663 - DNA, 396 bp, Citrobacter koseri
atggcatttgttagtcaggttgataagtccagggctgcttcgagcaggattggtgattcgtctatagtggtcactcaatcatacaaggcgtcaactaaggctcaggagctatccattaggttgacatcgttagtgttatctaaaggaggcatgaaaattggtgattacgttgatgttctttatgacaaggatagtgatcgctggatgttaaggaagatggatggaggtttaaaaattactggtaaggatgatgcccctacggggttgattagatataccctgaaggatacacatgcgagatttaccgaagataaagagcacctccctattcgtaaatcctctattgaggattcactggagattgaggatgggcagattgtatttaagcttgattag

SEQ ID NO: 2664 - protein, 131 aa, Citrobacter koseri
MAFVSQVDKSRAASSRIGDSSIVVTQSYKASTKAQELSIRLTSLVLSKGGMKIGDYVDVLYDKDSDRWMLRKMDGGLKITGKDDAPTGLIRYTLKDTHARFTEDKEHLPIRKSSIEDSLEIEDGQIVFKLD

SEQ ID NO: 2665 - DNA, 429 bp, Klebsiella pneumoniae
atgaaaaagtttttaatcgacatgattgataagggcctctattacgcgttgcttgcggcgctggcttttgggtcggtcacagggcaaagcaacgtccttaacgtggctgctgctgcgttttgggtggtggtatttcttggcggggtggttggcattatcacaatatttctcgcacatggtgctgagcatataactgatgagaaatcacgtcagtctgtgctggagtcgctgaggaagattgtccggcgtaagaacgtcattgctcgatggtggggctggttctgcatgatggcgaccatcgctctacttgcctacggcggctgggtatttaccgcagtgtgttatgcgctttcatccctgtttgtgcggttctgcatttctctggccagagacaaagtagaaaaacagacggtcggcgttttagcttga

SEQ ID NO: 2666 - protein, 142 aa, Klebsiella pneumoniae
MKKFLIDMIDKGLYYALLAALAFGSVTGQSNVLNVAAAAFWVVVFLGGVVGIITIFLAHGAEHITDEKSRQSVLESLRKIVRRKNVIARWWGWFCMMATIALLAYGGWVFTAVCYALSSLFVRFCISLARDKVEKQTVGVLA

SEQ ID NO: 2667 - DNA, 549 bp, Klebsiella pneumoniae
atgttgatgaaagccaggggtgtgaagggtaaggcaccctctcatgttcgcgcatggactgaagaggaagatgccttgcttgtgatgttgtatgcagtacacaccggaaaagaagtagcgcagcgtatgggcaggcccttgggaggggttcaaaaacgcttacgaatcctgagagaaacacgccctgatctgttgtgtaagcatcgaccatttaccgatgaagaagagcagtttattcgccaaaactgcaagcagatgaccgttggtcaagtggctagcttgctaaagagaaagcgaggggatgtaactcagaaagcattgcgtatgaacgtcagcttttttaagtgtggcgatgcacatcatagcactcgaatttcggatgatgacgtactgcttatcagggcactgcgtgacgacgaacaaggcggaaaactgacattttcagagatcgcggagaagttcgatataactgagcatgcggcatggtgggcgtacaacctccgccttaccgtagacgacagcgtttcgcgtgagctgttatctaaatga

SEQ ID NO: 2668 - protein, 182 aa, Klebsiella pneumoniae
MLMKARGVKGKAPSHVRAWTEEEDALLVMLYAVHTGKEVAQRMGRPLGGVQKRLRILRETRPDLLCKHRPFTDEEEQFIRQNCKQMTVGQVASLLKRKRGDVTQKALRMNVSFFKCGDAHHSTRISDDDVLLIRALRDDEQGGKLTFSEIAEKFDITEHAAWWAYNLRLTVDDSVSRELLSK

SEQ ID NO: 2669 - DNA, 132 bp, Klebsiella pneumoniae
atgaacgaagaaaccaattaccgccggttctggcgaagccttgtgatctgcggcgtgctctgcctgctgcttttttggattccgtcggtaatcgccacgcttcgcatcttgaaaatgatttttgggggatga

SEQ ID NO: 2670 - protein, 43 aa, Klebsiella pneumoniae
MNEETNYRRFWRSLVICGVLCLLLFWIPSVIATLRILKMIFGG

SEQ ID NO: 2671 - DNA, 753 bp, Citrobacter rodentium
atgctatcaaataccgttcctacaaggctttacagcgaattagccattgatagtgttagagaatgtttatttcctgattgcgtatcaagattaagaggtttttttgttttcgatgaaatagaatcaatatctagattttggagttgtaattcttggggggggcatttttctgatcaatatttatctgatgtaggtgtggcagcaactagatctaccagagtagactccaattggatatctcatatagttgatgtggatggcagactaaaagaaggttggcatgataatacagttaactattggcgtggagatgcgtttccaggttctgaacctatatgggaaaggatcgtcgaaggttatttaacggtttggagtcccgttgttagaaaagaagcaatattagaaatagaggctgtctggccaaactctttgaaattattgaactattcttgcctgtgtgctgcttatggctctttagatggaatgattttcccatttttgatgcaagataatgaaggtaatattaaagttacctatttatctagaatggttcaagctaacgacaaaaatttcattgaagcgattattgaaaacgcaaagaaaatgccttcctttagtgttaacttgaacgatacgacaactaatgacgaagagatcagcacacctgatctaacctttttgaatgtctcactatcctctgacgataattgtgcttttgccgactttgttaaactcatgagtcactctcaatga

SEQ ID NO: 2672 - protein, 250 aa, Citrobacter rodentium
MLSNTVPTRLYSELAIDSVRECLFPDCVSRLRGFFVFDEIESISRFWSCNSWGGHFSDQYLSDVGVAATRSTRVDSNWISHIVDVDGRLKEGWHDNTVNYWRGDAFPGSEPIWERIVEGYLTVWSPVVRKEAILEIEAVWPNSLKLLNYSCLCAAYGSLDGMIFPFLMQDNEGNIKVTYLSRMVQANDKNFIEAIIENAKKMPSFSVNLNDTTTNDEEISTPDLTFLNVSLSSDDNCAFADFVKLMSHSQ

SEQ ID NO: 2673 - DNA, 894 bp, Klebsiella pneumoniae
atgataagtttatcaccaccgactatttgcaacagtgccgaacaaagtaccaaatcactacgtctcggggtttttgccgccattattttggggctcgtaggaaccgggttcggaatctaccagctcgtgaaagagaaggatctggcgcaagagatcgccaacgtgaagtccacggtcaaccaggtgaaagatgccgaaggcgtcaccttcaaaagcaaggcagagtttgaggctgctgtggccgaaagcatcaataagtttgtcgcgcagaaacaacaagccgacatcgatcagaagtatgcccagttcgaggcggcacctgaaaaggtcgaagacggcaaacacatctatggggaccttggtgcccgattcacgctggtggagttctctgatatggagtgccccttctgtaagcaattccacgacacgcccaagcaaattgtggatgccagtaaaggcaatgtgaattggcagtggaagcacatgcctctcgacttccataacccggcagctcacaaggaagcgttggccgctgaatgtattgctgaacagaagggcaaccgtggcttctgggtcttcgtgaatgagattttccatcacagcaaaggcaacggtgccggtgtttctgacttggcctctgttgtcacgggtgttggtgctgatctggatgctttccgtgagtgtctcagctctggcaagcacgaagataaagttcaagctgacatccagaaagccaagagttacggcgttaatggtactccagcaacctttgttgtagacaaccagacaggcaagagtcagctactcggtggtgctcaaccggcacaagccatcatggcggtgatgcgaaaaatgatgattgagtcgcaacaagacgactcagcgaaccaataa

SEQ ID NO: 2674 - protein, 297 aa, Klebsiella pneumoniae
MISLSPPTICNSAEQSTKSLRLGVFAAIILGLVGTGFGIYQLVKEKDLAQEIANVKSTVNQVKDAEGVTFKSKAEFEAAVAESINKFVAQKQQADIDQKYAQFEAAPEKVEDGKHIYGDLGARFTLVEFSDMECPFCKQFHDTPKQIVDASKGNVNWQWKHMPLDFHNPAAHKEALAAECIAEQKGNRGFWVFVNEIFHHSKGNGAGVSDLASVVTGVGADLDAFRECLSSGKHEDKVQADIQKAKSYGVNGTPATFVVDNQTGKSQLLGGAQPAQAIMAVMRKMMIESQQDDSANQ

SEQ ID NO: 2675 - DNA, 447 bp, Klebsiella pneumoniae
atgctaaaacgcggaattatcaatctcgctgctagttacatcattgttgatgccctactccggaatgcagcaatttggatctttggcttgtccttctccattggtggcacttacgtcgctggcgaggccagtacatggggcgtttacctagccacttctggtgcaatgacactctgttctgtcgtaacagcctacctgctcgtgacctatcaccgctgggggctgatgacggccagggtctggctgctattgagtgcctgcctaaacggctatgccgtctatttgagcagccacaacatccagttggtggtggcactgctttccagcctgtttattgctttgtggatgctcaagacccttgagcaaccagcagtgaaggggacgtacaaggtaatcgctgatcttcaccgtcagctatggggaatgttgaagggacaaacacaatga

SEQ ID NO: 2676 - protein, 148 aa, Klebsiella pneumoniae
MLKRGIINLAASYIIVDALLRNAAIWIFGLSFSIGGTYVAGEASTWGVYLATSGAMTLCSVVTAYLLVTYHRWGLMTARVWLLLSACLNGYAVYLSSHNIQLVVALLSSLFIALWMLKTLEQPAVKGTYKVIADLHRQLWGMLKGQTQ

SEQ ID NO: 2677 - DNA, 228 bp, Klebsiella pneumoniae
atgatcattgcaacgaagagcggcttgctggtggccgcagaactaatcaaggaagaggccgggtactggctactacagcctcgtgaccaaaagacgccggtcagagtgaataagcaagatgacaataaacgcgctttcacgcatatgggagacgcccttcgctgggcaggtgatcctgagcttgcaaagcagttcgatgccgagggggaagaacatgcaaattcgtga

SEQ ID NO: 2678 - protein, 75 aa, Klebsiella pneumoniae
MIIATKSGLLVAAELIKEEAGYWLLQPRDQKTPVRVNKQDDNKRAFTHMGDALRWAGDPELAKQFDAEGEEHANS

SEQ ID NO: 2679 - DNA, 858 bp, Klebsiella pneumoniae
atgcaaattcgtgactacatgacaaagttgtttgaagcatttggtgatgtagaagaagtcacccgagaaatgcttctggagcaggcggagctcattcatacgatcagcgataagtgtcagagcacaggcctgtttctggatagtcaggttcgtttcaaccagttcgttcaagagattgaggctgacgacaatgtagaggatcggttgcttcatgcttggtgctgggtaatggaccgaatagtgaaggcaccaacatcctttcacatggatggggctgtgattttgacaatgcctctggtcgccagatacctgccaccagttgaacgggagccggaaaccatcgtggtgaatctcgatgaggactacaaggctcctgtaggcaaccaaacactctgcgagctcattatggaacggaggcattggccgcaaggtgcaacgtgcgcgacccaagaagcggatggtgaaatcctctactgggacgccccggttcaggtagtagaggaaggcagaaaggccgctggcaagcatggcatgatggctgaaataggattaaagcatcaagtagacttttggttttctgacatggccgaaactcggctcgcaaccgattggaacaccgccgtcatcacacctcactgcttgctactttcctatcttgatgtgctccaaaagaacaaagtgccgtttgatgagggggtgcggctcgctgccgaatgggtaacgcaacttggtggggagtctcgtaaagataccgaggaagagccggaagctgatgctacggtgctttcccttgggcgagccacagctcattgctttaaaccttatccggacacacaaaatttctattacgaggcctaa

SEQ ID NO: 2680 - protein, 285 aa, Klebsiella pneumoniae
MQIRDYMTKLFEAFGDVEEVTREMLLEQAELIHTISDKCQSTGLFLDSQVRFNQFVQEIEADDNVEDRLLHAWCWVMDRIVKAPTSFHMDGAVILTMPLVARYLPPVEREPETIVVNLDEDYKAPVGNQTLCELIMERRHWPQGATCATQEADGEILYWDAPVQVVEEGRKAAGKHGMMAEIGLKHQVDFWFSDMAETRLATDWNTAVITPHCLLLSYLDVLQKNKVPFDEGVRLAAEWVTQLGGESRKDTEEEPEADATVLSLGRATAHCFKPYPDTQNFYYEA

SEQ ID NO: 2681 - DNA, 273 bp, Klebsiella pneumoniae
atgaacaaaagcgaactgattatgaaagtggccgaagacgctgatattagcaaagcaaaggccgaagctgcggtaaatgcgctgatcaactcagtgaaagaggtgcttaaagcgggtgggacagtagcgcttactgggtttggtactttccacgttaaggaacgcgcagcgcgaaccggacggaatccccagactggagagaacatccagatcgcggcggccaacattcctgggttcaaagctggtaaggggttgaaagactccgtgaactag

SEQ ID NO: 2682 - protein, 90 aa, Klebsiella pneumoniae
MNKSELIMKVAEDADISKAKAEAAVNALINSVKEVLKAGGTVALTGFGTFHVKERAARTGRNPQTGENIQIAAANIPGFKAGKGLKDSVN

SEQ ID NO: 2683 - DNA, 546 bp, Klebsiella pneumoniae
atggaacaaatcagaaaaggcttaaccctcgaatacgcaaaagagaagcgtgagaagctcttggcggagctcaaatcagatgaacactacagccagactgaaacagtagcctatgggcaccacgacccgctcagcgttcctgtggcagcctgcgatagttgtcatggccgggcgcaaatgcagaaggttataggtcctcctgtgcgctggaatatggtctgcctgggttgtgggaaggcgatccaacaaatccagaaacgaccgtggcaagcagcaatggcgtggaaccaaattaacttgggaacacaggactacagacaactgcccctctttggacttgggagtctgtctcctgaatcagcaagacagagaatggtgggaatacgcaggaacctggagctgagaaagagcctcgccggtatcgagaggacgatagcccacaaggaaggtcaacgcccaccagggaaagagtaccagcaacgactggaagcatatctgcaatgggccatgctggcgctgaggttgctcaaagtcaaagcaagttag

SEQ ID NO: 2684 - protein, 181 aa, Klebsiella pneumoniae
MEQIRKGLTLEYAKEKREKLLAELKSDEHYSQTETVAYGHHDPLSVPVAACDSCHGRAQMQKVIGPPVRWNMVCLGCGKAIQQIQKRPWQAAMAWNQINLGTQDYRQLPLFGLGSLSPESARQRMVGIRRNLELRKSLAGIERTIAHKEGQRPPGKEYQQRLEAYLQWAMLALRLLKVKAS

SEQ ID NO: 2685 - DNA, 939 bp, Klebsiella pneumoniae
atggctgttatcaactcactccgcgctctcaaaggcgtaaccgcccccgaagaactgaaaaaaggggatggattcactatctctcctcagcttctgctggaggaagaagggtttaacacccgtggcgctttctgcgaggactactacgagcgcccggacatcaaagctggtattcgagtgctggccgatgcttacaagcgtggcgactatgttccgccgatcatcgtcaaagttatcgacggaaaggtgtatgtccgtgaaggtcatcgccgtcgccgcgccatcctgcttgctatagaggaaggtgccgacatccagttcgtgcaggtcgtagagcacaagggcgatgaagccgaacagagccttctgatcgccaccagcaacgatgggctccctctttctccacttgagcgagccgtgatctacgctcggcttgcaaactgggggtggagcgaccagatgattgcccaacgtgttggccgctcggctgagcacgttcgtatcgcccgtgcccttttggagatgcctctggaactgaaacggatgattcaggaaggctctgtggctgccacctacgctcaggagctctacaacgagcacggcaccaacgctgttgagatcctgaaaaaggcgcaggaagaacaggccagtggcaatgacggcaagaaggccccgaaaaaactgaccaaaaagtctgtcgagaaaggtccccgcctgggcaaaaaggtggttgaagccatgcaccgaggcgtgagctctattaccagtcgtctggacaacatcaagccgaacgatgacggtgaaacgttcacccttaccctgagccgggaagatgttgatgcgtttcaggagctgaaagccaagctggcggagctggagcccaaaactgacgagtccaatgaagaccagcaagagctggatttggcgggtaatcagtaa

SEQ ID NO: 2686 - protein, 312 aa, Klebsiella pneumoniae
MAVINSLRALKGVTAPEELKKGDGFTISPQLLLEEEGFNTRGAFCEDYYERPDIKAGIRVLADAYKRGDYVPPIIVKVIDGKVYVREGHRRRRAILLAIEEGADIQFVQVVEHKGDEAEQSLLIATSNDGLPLSPLERAVIYARLANWGWSDQMIAQRVGRSAEHVRIARALLEMPLELKRMIQEGSVAATYAQELYNEHGTNAVEILKKAQEEQASGNDGKKAPKKLTKKSVEKGPRLGKKVVEAMHRGVSSITSRLDNIKPNDDGETFTLTLSREDVDAFQELKAKLAELEPKTDESNEDQQELDLAGNQ

SEQ ID NO: 2687 - DNA, 243 bp, Klebsiella pneumoniae
gtggcgaagttgaaggtttatggcgggatcacttatggggccgaggggcagttcagaactgtcgttgcggccacaagtaagagcaaggctgcttcaattctgaatatcacgatttaccagatgaatagctggtggacggagacttttaacaagtacgaggtcgaggcggcgatgtctgagccgggggctattttttcaaagcctctcgatggcagagacccatttgtaaagcaggaaggataa

SEQ ID NO: 2688 - protein, 80 aa, Klebsiella pneumoniae
MAKLKVYGGITYGAEGQFRTVVAATSKSKAASILNITIYQMNSWWTETFNKYEVEAAMSEPGAIFSKPLDGRDPFVKQEG

SEQ ID NO: 2689 - DNA, 243 bp, Klebsiella pneumoniae
atgtcatccacattggttaaagaaaagtttggcctagaccttggtgcaatgtgccgttatgacaaaccccagcatgtcgagttcaaagtccttcctgatcagacaatccagttccgctgctcatggtttgaaggtggcggattaacctggtggcctttctacaccgagcatgatgtaaagagcgccgaggcgacctctgtgctcaatgacatattccagggtacggaggggcatgatgagtag

SEQ ID NO: 2690 - protein, 80 aa, Klebsiella pneumoniae
MSSTLVKEKFGLDLGAMCRYDKPQHVEFKVLPDQTIQFRCSWFEGGGLTWWPFYTEHDVKSAEATSVLNDIFQGTEGHDE

SEQ ID NO: 2691 - DNA, 1245 bp, Klebsiella pneumoniae
atgagtagccagctagaactctttcatgtccaagaggcgtatgccaaggccgataagccgttatcgaatgaggagctctacgattcggtggcagagctcgctggaatcccgaaaagcgctctgaatgaacaaagtgaaattggcaaggcaaaggtcaagcggagcaagctgaaaagacagatacgctggtatcagcaaaccctcaagtcgatgaaccttctccagaaggtggacggcgagcggggtgtctgggagctctcaagcaaaaccaagaagggcctgcatgaagcgctaggtggcgttcgactggtcgcttattcaacaaatcttgggctggcggtgtggtcaaacaacaagagctttttctctgacctcgatgagccggtgcatctgtgtgtgacatctccgccgttcccgctccgtatacagcgtggctatggaaacgttgatgaagccaaatgggtggatttcattactcaggcactcgaaccgatagtcaagaacctggtgccaggaggaagcgttgtcctgaatgtcagcaatgacatattcgaggccaagagcccctccagatctctctacgttgagcgaatggtgctggcgctccatgatcggcttgggctctctctcatggatagatggccgtggatcaacctgtcaaaaccaccaagtccgacccactgggcttgtgtgaaccgttaccagttgtgtgccgggtgggagcctgtttattggttcaccaacgaccctgacagggtgcgttctgacaacagaagggtcctgatccctcatacagagaaacatcagaagctgatggcccaaggcggtgataacagagtggtcagttatggtgacggggcatatcgactgagagggaacgcattctctaacgtcacggaaggacggataccgaaaaacgttatccagcgcggccaccgttgtgcggatactctggagcttcggagaatcgctagagaactggggttgccaccgcacccggcaatgttcccaacagacatacctgaaatggctatccgctttctgacggaagagggcgaccttgttgttgatccgttcagtgggtcgaataagagcgggttggccgcagaaaggaataaccggcgctggatcgcctgtgacatcattcttgagtacattcgcacccaggcggaaatgttcaccggctttgatggattttggatgaacccggccatagcagcagtgggcgggggagcgttgaattaa

SEQ ID NO: 2692 - protein, 414 aa, Klebsiella pneumoniae
MSSQLELFHVQEAYAKADKPLSNEELYDSVAELAGIPKSALNEQSEIGKAKVKRSKLKRQIRWYQQTLKSMNLLQKVDGERGVWELSSKTKKGLHEALGGVRLVAYSTNLGLAVWSNNKSFFSDLDEPVHLCVTSPPFPLRIQRGYGNVDEAKWVDFITQALEPIVKNLVPGGSVVLNVSNDIFEAKSPSRSLYVERMVLALHDRLGLSLMDRWPWINLSKPPSPTHWACVNRYQLCAGWEPVYWFTNDPDRVRSDNRRVLIPHTEKHQKLMAQGGDNRVVSYGDGAYRLRGNAFSNVTEGRIPKNVIQRGHRCADTLELRRIARELGLPPHPAMFPTDIPEMAIRFLTEEGDLVVDPFSGSNKSGLAAERNNRRWIACDIILEYIRTQAEMFTGFDGFWMNPAIAAVGGGALN

SEQ ID NO: 2693 - DNA, 312 bp, Klebsiella pneumoniae
atggacactcaagaactgaaccacatgatagctgaggcctacagccgggatttgcaaaagcctgagctggtatcgttcaaagaggtgagtcgctgggggcgtaagtacggtttccccgtcgtatgcactctggccgatgaaagtgaagaaaagcagattcactgggctgccagtttgctcattcaagtagccggtacttggccgcgagaagatatgccggaattgctcacaccggaacggggctccgcgctgttcaacgatgcgatgcagttattggcgaatgggcttggagcagcaaatcaattgcgctga

SEQ ID NO: 2694 - protein, 103 aa, Klebsiella pneumoniae
MDTQELNHMIAEAYSRDLQKPELVSFKEVSRWGRKYGFPVVCTLADESEEKQIHWAASLLIQVAGTWPREDMPELLTPERGSALFNDAMQLLANGLGAANQLR

SEQ ID NO: 2695 - DNA, 786 bp, Klebsiella pneumoniae
atggcaaaagtaatcagcttcgccaaccagaaaggcggagtgggtaagagtaccctctgtatccagcaggccttttatctggcgttacagaagaaaaagaaagtgctggtcttggatatggatggtcaggggaacacgtcctctcgactggcccccagacgagagcttgaggatggtgactacgagcccatcctcactggaaccaaaaccgcagagctgttcgcttacgagctggacggcattgaggtcatgcactgcccttgcggtgcagacctcattcatacgccgaagaatgacccggatctgtttgagatggaggctgtgcctcttgaccaagccatgaatccggctcgccatttggctgagctgtttgagaactacgactacgtgctgattgattgtccgcctagcctcggcagaaagctggtggcagcgttggtgatgtctacccatgtggcatgtccggtaaagctctctggcttcgctgtggacggcgtagaaggtctcctgaacacgattattggtgtgcgcgaggcatacaaccaaaatttggagatcctgggcatcgtgatcaacgacatggaccgctctgtcaatcacgacaaagccctcaagtcgctggagaacacagttccggatctgctgtttgagaacaaaattatgcaccggcctccgctcgatacggcgacgactgatggcatccctgtctgggagcttcgctatggacatgtcgcggccaaagaggttgaggcggtgttggaagaactattagagaaggtgggctaa

SEQ ID NO: 2696 - protein, 261 aa, Klebsiella pneumoniae
MAKVISFANQKGGVGKSTLCIQQAFYLALQKKKKVLVLDMDGQGNTSSRLAPRRELEDGDYEPILTGTKTAELFAYELDGIEVMHCPCGADLIHTPKNDPDLFEMEAVPLDQAMNPARHLAELFENYDYVLIDCPPSLGRKLVAALVMSTHVACPVKLSGFAVDGVEGLLNTIIGVREAYNQNLEILGIVINDMDRSVNHDKALKSLENTVPDLLFENKIMHRPPLDTATTDGIPVWELRYGHVAAKEVEAVLEELLEKVG

SEQ ID NO: 2697 - DNA, 1182 bp, Klebsiella pneumoniae
atggcattgaacaatttaaaaggcctgtccgaacttgctaaagccgccaaaggcaagaaaggcaaagaggttcttaccgtacctgttgacgacgttgtatccaaggtccaggttcgtaagcgcttccgtaacattgaagagctggcggcaaccttgctgaccgaagggcagcaatctccgatcatcgtgttcccgaagaatgaagaaggcaagttcgtcatccaaaaaggggagcggcgttggagagcgtgtaaacacgctggtatcgagaccattgacctggtggtgaatgataaggtccagaacaatttggacgagactgctggtgagctgatcgaaaacatccagcgggatgacttgactccggtagagattgccgaggcgttaaacctgtttattgaagaaggttggaagcaaaaggatattgctgatcggctcggtaagaatatcactttcgtatctacgcatctgtcgttgctcaagctacctgactgtgtgcgtgagttatacgataatgaagtatgttctgatacagagaccttgaataaccttcgtctcttgttcgatctgaatgaagaaagatgtcgcgccgtctgcgcggtggctatgtctgacgggattactcgtaaacaaagccgtgagctgctgaatgatgccaaacgtatcaaagacgaaatggaaaaaggcccactgactggctcccaccagaatgatgagcttggcgctggcaacaccgacgagcaatccctcaactcgggtggggatggtacgtcggaacaaaccgggaatgacgacctgaaccttgcccaggaggaactggaagggggtaaaaattccaatggtcaggacgatgatgacgaagaccctttgcgtgatgaagagggtgagcacaaagatcctgtcaagcagccagataacagcggcaaggacaaagatgaagaaggcggtgatgctcttcctcctctgccgaaggacaaggaatggaagaacgtccgggctgacagtttgatttttgctgtcaacgttaacctggatggcgagaccaaacgtggagtcatcatgaccgaccgtgttgctctggttccgtctactgtctgggttaaaacgctcgatggcgaaggcaaggaaaagcatgttcatgtgcctgtgtcagacattgaactcctgagtgtcgaaggctaa

SEQ ID NO: 2698 - protein, 393 aa, Klebsiella pneumoniae
MALNNLKGLSELAKAAKGKKGKEVLTVPVDDVVSKVQVRKRFRNIEELAATLLTEGQQSPIIVFPKNEEGKFVIQKGERRWRACKHAGIETIDLVVNDKVQNNLDETAGELIENIQRDDLTPVEIAEALNLFIEEGWKQKDIADRLGKNITFVSTHLSLLKLPDCVRELYDNEVCSDTETLNNLRLLFDLNEERCRAVCAVAMSDGITRKQSRELLNDAKRIKDEMEKGPLTGSHQNDELGAGNTDEQSLNSGGDGTSEQTGNDDLNLAQEELEGGKNSNGQDDDDEDPLRDEEGEHKDPVKQPDNSGKDKDEEGGDALPPLPKDKEWKNVRADSLIFAVNVNLDGETKRGVIMTDRVALVPSTVWVKTLDGEGKEKHVHVPVSDIELLSVEG

SEQ ID NO: 2699 - DNA, 969 bp, Klebsiella pneumoniae
atgagcgaaataatggatttagtcgtcatcgagaaaaaaaacgcgatggcggttttcaccaataacgaccagctcgacccgcttatcgaagcgatcgaaaaagaggctcgcagcctggtgccggacgtgaccaccaaaaaaggccgtgatgctatcgcatccatggctcacaaggtcgcgcgctctaaaacctacatcgacaacgcaggtaaagacctggtcgctgagctgaaagccctgccaaagcagatcgacgaaagccgccgtgttgtccgtgagcgtctcgatgcgctgaaggatgaagtgcgtcgcccgctgactgaatgggaagccgaacaggagcgcattaaggccgaagaagccatgaacgcactgcatgccgaagcgctgtccatgaatgaagagttcgatcggcagttggctgctcgtattgagtctgaccacgaaatggccctgctgatgaatgacgctttcgaccgcgaacaggccgagaagaaagcagaagccgaacgccagcgcattgcccgcgaagaagagattaagcgcctggcagaagagaaagcgaagcgtgaagcggcagaacaggcgcagcgtgaaattgacgccgcagccgccagagagcgcgaagcgattttggcaaaggagcgagccgaacgtgaacagcgagaagcagctgagcgtgcggagcgcgaaaagcaggccgcaatcgaagcggagcgccgcaaagctcaggaagaagccgatcgcatccgccgcgaggcagagcaacgcgaacaagtccgcctggcggaggagaaacgcaaggccgaagaagaatcgcgccgcgccgctgatgttgaacatcgccgcggaataaatacagcagcggtacaggctcttatcaatcagggcatccctcatgaatgggctaaagcctgcatcattgctgtagctctcgggaaagtccctgcgacagccatcaaatactga

SEQ ID NO: 2700 - protein, 322 aa, Klebsiella pneumoniae
MSEIMDLVVIEKKNAMAVFTNNDQLDPLIEAIEKEARSLVPDVTTKKGRDAIASMAHKVARSKTYIDNAGKDLVAELKALPKQIDESRRVVRERLDALKDEVRRPLTEWEAEQERIKAEEAMNALHAEALSMNEEFDRQLAARIESDHEMALLMNDAFDREQAEKKAEAERQRIAREEEIKRLAEEKAKREAAEQAQREIDAAAAREREAILAKERAEREQREAAERAEREKQAAIEAERRKAQEEADRIRREAEQREQVRLAEEKRKAEEESRRAADVEHRRGINTAAVQALINQGIPHEWAKACIIAVALGKVPATAIKY

SEQ ID NO: 2701 - DNA, 1308 bp, Klebsiella pneumoniae
atgcaaaaccagccacaacggaaagggggaggggatgatggcctgatgattatcggggcccttctcatcatgatcacagtgatgtggtttggctttcgtgattatgtgatttacggagtctgtcgcctgctttactggatctacggtgtactgccggacgccattacaccgggtaatgcggccgagcgccgggacatgctgctgtcggcggcgcggtataaccaccaggtttcgctgtgggactttatcagcgtgatgaacgacacggccagcgtgctctttcccctgttcattttaatcatcgggttgttcgtctgggttatctcgcgcaatccttactaccgtctgacccgtaaactgaccatccggaaccttccctgggtgatggtaaaaaactatccggggatagctcatatcctcgcccggtttggccacctcgatcagctgctgctgaatgaagatccggaagaagcacgcagcgcgcagtcacccgttgagtttgcccaggaacataacctgattgataccgctaagcgccgcctccgtaaaaaagccgcacataaagtcttcctgtcacaggtaaacttggcccccgaaggggcggccctttccctggcgccctgggaaaaagcgctcgcagcctcgtttgtacatctgcggtttatgggcgaccggccaacggctaaatccattctcgacgatctcaaccgttcctgcctgcggactaaagacggtttccctgattattcgctggccgccgggttctggaccgtcgccagccagtgtgaagcgttccgagaatttgcaaaggggcgccgcagctcccgttcgctactctacgcgctgttcgatgatgacctgcagctgccatccgctaatttccggtggcttaaaggtgtggaccgcacgttatggtatgcactttcaagcgccggccgcgggaagttcttcattgagggaggtggtgttattgcctggagtcagtgcgaaagttaccggctgacgctcgatgaagaaaaggcggcgaaattcccgccgaccgtgcgggcggccgtgctgggccttgagctggatctgctccattaccgccatattgaccgccgcgatcccgccattccggtcgctcactggcaggaagacgttataccgccatttgcatttgaatctgacgctgaagcggaagacgagccggctacgccgcctgcagctccgcacgacaccccgaacaacagtctgcgactgacagacgatgaaccgacgccggctaaacctcagccggcaacccgacccgatcacctggaactctaa

SEQ ID NO: 2702 - protein, 435 aa, Klebsiella pneumoniae
MQNQPQRKGGGDDGLMIIGALLIMITVMWFGFRDYVIYGVCRLLYWIYGVLPDAITPGNAAERRDMLLSAARYNHQVSLWDFISVMNDTASVLFPLFILIIGLFVWVISRNPYYRLTRKLTIRNLPWVMVKNYPGIAHILARFGHLDQLLLNEDPEEARSAQSPVEFAQEHNLIDTAKRRLRKKAAHKVFLSQVNLAPEGAALSLAPWEKALAASFVHLRFMGDRPTAKSILDDLNRSCLRTKDGFPDYSLAAGFWTVASQCEAFREFAKGRRSSRSLLYALFDDDLQLPSANFRWLKGVDRTLWYALSSAGRGKFFIEGGGVIAWSQCESYRLTLDEEKAAKFPPTVRAAVLGLELDLLHYRHIDRRDPAIPVAHWQEDVIPPFAFESDAEAEDEPATPPAAPHDTPNNSLRLTDDEPTPAKPQPATRPDHLEL

SEQ ID NO: 2703 - DNA, 357 bp, Klebsiella pneumoniae
atggaatatgaagcgtacaaggttcgcggctacggcttcggactgaagaaagagatcaccggcgtgctgggtcgttaccccacgcaggaagaggcgcagaaggtcgcggacgactacacgcaggcctgcctgcgggataacctgccggacagttacgatatgggcatggtccggccggtcgctgccggcgaacctgctgccctcgatccggacgtgtttcgcggtccgggcgcgccgttcctgatggatgccggccagataaccacgggtcacacggtatgcctgggcaaagcagcggatggaaaacggttttattttggcggggagcattccgatggccaccaaacatataaatga

SEQ ID NO: 2704 - protein, 118 aa, Klebsiella pneumoniae
MEYEAYKVRGYGFGLKKEITGVLGRYPTQEEAQKVADDYTQACLRDNLPDSYDMGMVRPVAAGEPAALDPDVFRGPGAPFLMDAGQITTGHTVCLGKAADGKRFYFGGEHSDGHQTYK

SEQ ID NO: 2705 - DNA, 471 bp, Enterobacter cloacae
atgataaagaaaccacttattgccggcatcatgctggttgtggcgcacaccgccggcgctgcgcagggtgatgataccaatctgcagcagatttataccgaggcgggcattcaggggatatgcagcgccgggatgctggctgtgccggaaggggccagggatgaagttgtcccgcagaacgtcagacacctcctggttcagtgtgcctatttcgacgagcagcagttgcgccggcgtgccggcctgccggctcagacatttagccactggcgtgaccgcaatgcggtccttaatctgtcgtctgaccaggtatctgatgcgctctggctgtcagcgtggcgtgatttccgggcacaactggcctcggcctacccggccccggcggaaaaaaggcacaggggaaagaggccgtacccgccggcacgaagcccggcactgagcatgggagtgcggcggattgaccggctttga

SEQ ID NO: 2706 - protein, 156 aa, Enterobacter cloacae
MIKKPLIAGIMLVVAHTAGAAQGDDTNLQQIYTEAGIQGICSAGMLAVPEGARDEVVPQNVRHLLVQCAYFDEQQLRRRAGLPAQTFSHWRDRNAVLNLSSDQVSDALWLSAWRDFRAQLASAYPAPAEKRHRGKRPYPPARSPALSMGVRRIDRL

SEQ ID NO: 2707 - DNA, 408 bp, Klebsiella oxytoca
atgggcgcggacgtgcttgatgttgagcgtgccgccgatcatcggtttcaacgcctcgtaggtggcatcgcccttcgggatgtagagcttggtgtcgcccaggtcacgaatgcgcggggcgaagcggaagcccagcaggtgcatcaacgcgaagacgtggtccgtgaaccctgccgtgtcggtgtagtgctcctcgatccgcaggtcggattcgtgatacagcaggccgtcgagcacgtaggtcgagtcgcgcacgccgacgttcacgaccttggtgtggaacggcgcgtactggtcggagatatgggtgtagaacgtccgccctgggctgctgccgtatttcggattgatgtggccggtgctctcggccttgctgccggtgcggaagttctggccgtccgacgatga

SEQ ID NO: 2708 - protein, 135 aa, Klebsiella oxytoca
MGADVLDVERAADHRFQRLVGGIALRDVELGVAQVTNARGEAEAQQVHQREDVVREPCRVGVVLLDPQVGFVIQQAVEHVGRVAHADVHDLGVERRVLVGDMGVERPPWAAAVFRIDVAGALGLAAGAEVLAVRR

SEQ ID NO: 2709 - DNA, 243 bp, Klebsiella pneumoniae
atggggcgtatcgttggcgatggtgcattaaacttcgagatagtcgatatagccgtcgaccccgcccatcaggggcgtggacttggccgaatcattatggaaaacattattcgctggctggacagcaacgcttataaaggcgcttatgtctctctggtggctgatgtaccggaactctacgcgaagttcggttttgagttagtccgcccggaaagcgaaggaatggcgagagtctgggggtaa

SEQ ID NO: 2710 - protein, 80 aa, Klebsiella pneumoniae
MGRIVGDGALNFEIVDIAVDPAHQGRGLGRIIMENIIRWLDSNAYKGAYVSLVADVPELYAKFGFELVRPESEGMARVWG

SEQ ID NO: 2711 - DNA, 939 bp, Klebsiella pneumoniae
atgaaaaattatgtattgattctatcaagtatgtatgatttttccacggatttggttgttcagcgactggaaaataatggcgataattttattaggctaaacaaagagcaattaagtgattatgagatttttttagatcccataaatacaatcctaagggtgaaaggtgaatatgttgatgtagaaacatctaatgtaaaatcagtttggtttcgacaaccagtttttctaagaaatactccagggcgtagcattgatataaatgagcagctttcattatcacaatggaatgcttttcttaggggattaatggtttttgataaggcgtattggatgaattggccgcaagcaacatatgctgctgaatctaagccatatcagctaatgattgcaaaaaagatagggttttgtgtacctcaaacgattattagtaattctcttggttttgagaaactcccttcaacgaagtttattataaagtcgatggataccgttttacttaaagaaaatgatgattgctattttacatacacatcgaaagctaatcctgcggactttactttagacaaaaccaaacaagcaccgataacgtttcaagaatatattgaggataagttagatattagagttactattgttggctccaaagtatatgccgttgcaataaaatctaatggtaatgctatctctgatgattggagaaccttaaaaaaagaagatcttgaatatgtcgacattgaacttcctgttagaattaaaaaactttgcatagagtatgttaagttacttgggttgaattatggtgctattgattttatcaaaacaaaagacgaatatatatttattgaaataaatccaactggcgagtggggatggctttctaatgataaaagagaaattgattacgatattgcaaagaaattatctgaggctaattaa

SEQ ID NO: 2712 - protein, 312 aa, Klebsiella pneumoniae
MKNYVLILSSMYDFSTDLVVQRLENNGDNFIRLNKEQLSDYEIFLDPINTILRVKGEYVDVETSNVKSVWFRQPVFLRNTPGRSIDINEQLSLSQWNAFLRGLMVFDKAYWMNWPQATYAAESKPYQLMIAKKIGFCVPQTIISNSLGFEKLPSTKFIIKSMDTVLLKENDDCYFTYTSKANPADFTLDKTKQAPITFQEYIEDKLDIRVTIVGSKVYAVAIKSNGNAISDDWRTLKKEDLEYVDIELPVRIKKLCIEYVKLLGLNYGAIDFIKTKDEYIFIEINPTGEWGWLSNDKREIDYDIAKKLSEAN

SEQ ID NO: 2713 - DNA, 1167 bp, Klebsiella pneumoniae
atgactttttggaatgattcctaccagagcgaattaaaatcaatagacctttggattgataaaaacatcagatataatgatgttattcctggcgatcttagcaagcttagtgatgatgagtttatagaagctgtattgtttcttagttgggattattttcgaaacttatttgtttcccacagggattctctcaataaatatactcaattcaatcagcgctacttacaagaaagagctctcccaaggttggataaactagagtcaaaccgtttttattttttaaatattctaataagaaatgtgtacgagcactatttctggactcaagattctgcacatcctcctgtttttgtagaaagggagacacttgaaagattagaccaactagcctccccctctgatagagatgcgcaattcttgtggattgagcgctcaatgcctgccgcattaataaagagtattttatcatcggaagaatttgttacattgagaaagatggctaacgatgtcagtgggtatgaagaaaaattcaccaaccagatagagttaggaactcagaaagctcaagaacaaatagaaaaagcttctgataaccttaaggcgttaattaatagagctgaaaattctcaaaaagatatcagtacgtatgttgataagcttaatgaatataaaagcgagtataacttcgtcttgttgagcaaagcattttcaaatttactacatacaaaacaagatgagtaccaaaaaaatcaccatagcgttattttcttttcagttttattggttcttatccccacaggggctttgataaaccatattttcgagctgtataaggttgaattcaaccttagcgcacttgcttattacttaccgatactatcgctagagttgctaatgttttattttatgcgtctttattacattgaaggaaaagctattaaggctcaactcttacagatagaacagaggctcagtctatgtgagtttatacatgattatgtggagacaaaaagtaaatcaggctctgaaaaggaatcgtggtcattatttgaaaagctaattttcagccctatacaggtttcttctgaaaacataccgtccttactggatggcgcatcatctattgccgagttagctggaaaagtcttgtccagagattcaaaataa

SEQ ID NO: 2714 - protein, 388 aa, Klebsiella pneumoniae
MTFWNDSYQSELKSIDLWIDKNIRYNDVIPGDLSKLSDDEFIEAVLFLSWDYFRNLFVSHRDSLNKYTQFNQRYLQERALPRLDKLESNRFYFLNILIRNVYEHYFWTQDSAHPPVFVERETLERLDQLASPSDRDAQFLWIERSMPAALIKSILSSEEFVTLRKMANDVSGYEEKFTNQIELGTQKAQEQIEKASDNLKALINRAENSQKDISTYVDKLNEYKSEYNFVLLSKAFSNLLHTKQDEYQKNHHSVIFFSVLLVLIPTGALINHIFELYKVEFNLSALAYYLPILSLELLMFYFMRLYYIEGKAIKAQLLQIEQRLSLCEFIHDYVETKSKSGSEKESWSLFEKLIFSPIQVSSENIPSLLDGASSIAELAGKVLSRDSK

SEQ ID NO: 2715 - DNA, 309 bp, Klebsiella variicola
atgtcagcagattttagattacaagaagaacaagatagggttgacgaagaaaatcgcgcgatctacgccgagattgccgcaaaactggtcatccttggctatgatcgccactctgcgatagaaaaggttaaaaaagtgaatgagaaccgggagtattatagaaatgttccaggtgcttacatcgaaggtgatgagtaccatccaaaccaatggacaatagacgagtgtaactatccaaaagagattgcaggcaagtttaactcgcggcaggtgcataagatctctcaagagcttattgatgatttctag

SEQ ID NO: 2716 - protein, 102 aa, Klebsiella variicola
MSADFRLQEEQDRVDEENRAIYAEIAAKLVILGYDRHSAIEKVKKVNENREYYRNVPGAYIEGDEYHPNQWTIDECNYPKEIAGKFNSRQVHKISQELIDDF

SEQ ID NO: 2717 - DNA, 261 bp, Klebsiella pneumoniae
atgagtcctatcgacgatctaacgataggctttgaaacccttgtgtgtctcattacgggactggatatgcggctcgacgcggcgactcagccggccggcttcgtaatctttttcctggcagagtctgagtttttgtccagtatgacccgtctggagggttttgaatgtatccgcaatcagtttgatgtcatgcctgttcgctgcggcgacgaccagcgacagaggaagcccattggcatctgtcatcagactgcgctttag

SEQ ID NO: 2718 - protein, 86 aa, Klebsiella pneumoniae
MSPIDDLTIGFETLVCLITGLDMRLDAATQPAGFVIFFLAESEFLSSMTRLEGFECIRNQFDVMPVRCGDDQRQRKPIGICHQTAL

SEQ ID NO: 2719 - DNA, 627 bp, Klebsiella pneumoniae
atggaaacggttggtcagcgcattaaagccctacgcagggttacaaaaacctctcaaaaagaacttggtaagttctgcggggttagtgacgtagcggtgggttattgggaaaaggatgtgaatatcccaaacggagaatcgctggttaagctggctaaattcttcaatacatcaatagattacattctttacggcactgaatttgaaggtaccctcataactaaaatgaggcgtgtgcccgtgatttcctgggttcaagctgggcagtttacggaatgtaaggccgctgatttattcagtgatgttgataaatgggttgaaacatcactacgcattggggatagctcgttcgctttagaggtcaaaggggattcaatgaccaatccaaatggcctcccaacaatccctgaaggggcaaccgttattgttgatccagatgccgaacctcttcatggcaagattgttgttgcgcgtattgatggcactaacgaagcgactgttaaaaaactggtcattgatggcccacaaaaatttttagtcccactaaatcctcgctaccccaacatcccgatcaatggtaactgcctcattattggcgtagttaaaggcgttcagtacgaactctaa

SEQ ID NO: 2720 - protein, 208 aa, Klebsiella pneumoniae
METVGQRIKALRRVTKTSQKELGKFCGVSDVAVGYWEKDVNIPNGESLVKLAKFFNTSIDYILYGTEFEGTLITKMRRVPVISWVQAGQFTECKAADLFSDVDKWVETSLRIGDSSFALEVKGDSMTNPNGLPTIPEGATVIVDPDAEPLHGKIVVARIDGTNEATVKKLVIDGPQKFLVPLNPRYPNIPINGNCLIIGVVKGVQYEL

SEQ ID NO: 2721 - DNA, 216 bp, Klebsiella pneumoniae
atgacaaccgacgagattgaacaacatttcggcagcactgagaaagttgccgaattttttggcatcaccagtgaggccgtttaccagtggcgtaatcgccccggacgcttaatccctaaaggacgagctgctgaagctgcgtatcgaactgctggtgaactggaattcaacccagaacgttatggcaagaatacaacgcctaacgatcagaaataa

SEQ ID NO: 2722 - protein, 71 aa, Klebsiella pneumoniae
MTTDEIEQHFGSTEKVAEFFGITSEAVYQWRNRPGRLIPKGRAAEAAYRTAGELEFNPERYGKNTTPNDQK

SEQ ID NO: 2723 - DNA, 168 bp, Klebsiella pneumoniae
atgcgcaatccatttttttgcccggccgaactccacggcctctttgagtatctcggcttccatcgtctttttgcccagaaggcgctggagttcgcgaatttgcttattggcggcagcgagttcggaggccggcaccacttcctcgcccgatgcaacagccgtcagtga

SEQ ID NO: 2724 - protein, 55 aa, Klebsiella pneumoniae
MRNPFFCPAELHGLFEYLGFHRLFAQKALEFANLLIGGSEFGGRHHFLARCNSRQ

SEQ ID NO: 2725 - DNA, 162 bp, Klebsiella pneumoniae
atgatcctctttgcctggcacaatcaagccgtcagaaatgaaggcaaggcaaagattcatacgagtttggcgactcctattggtcatgcaatgcaagccgggtttgtgaaaatgaacccggtttttttatgcctgcaatttaggcaatggtactacatgtag

SEQ ID NO: 2726 - protein, 53 aa, Klebsiella pneumoniae
MILFAWHNQAVRNEGKAKIHTSLATPIGHAMQAGFVKMNPVFLCLQFRQWYYM

SEQ ID NO: 2727 - DNA, 522 bp, Klebsiella pneumoniae
atgaaggcagttctctggatattcgtccttatcattgcacctttcgtcattgcgaaagtggaccagtggcgcaaacgcggcattggagacacctgggcgtggtggaaatcagagaacatgccttatgagctgcgctcggccactctgtttttatccgaacaggacatatcaaccacacagccggtgcccatgcacggcagggttgatcaggtgtacaaagccaagaatggggttctcattcccttggacaccaagctgcgccaggtaaaccacatctatgagtcggacattatccagctctcggtttaccgggtaattctgtcacacaagtacaaggcacccgttgccaagtacggctatgtccgaaccgttgttgagacagcggacggggatagagtccgttacatcaagacaaaccttctcagcgaaaaagaagtggtcaagttgtggcaccgctatcaatccatccgttctggtcaggtaaaaacctcctgttcctgtggcggaaagtttcacatgtga

SEQ ID NO: 2728 - protein, 173 aa, Klebsiella pneumoniae
MKAVLWIFVLIIAPFVIAKVDQWRKRGIGDTWAWWKSENMPYELRSATLFLSEQDISTTQPVPMHGRVDQVYKAKNGVLIPLDTKLRQVNHIYESDIIQLSVYRVILSHKYKAPVAKYGYVRTVVETADGDRVRYIKTNLLSEKEVVKLWHRYQSIRSGQVKTSCSCGGKFHM

SEQ ID NO: 2729 - DNA, 1263 bp, Klebsiella oxytoca
atgaattttttacagcaatttaaatgccttgtatgtgacacggtcattgatacaagaataggtatgtctaatcgagacatacaaccgttccaatttgcatgtccaaattgtgagaataatatatcgtttactcttggggagggagagcctgtatttaacggtgcggaaactgtagaaagcaatgactttggcacaacaaatccattcatcgatttgcatttagattttcccgtaggctttggaaaatacgaaaaaggaaaaacagcattcttaaaaataacaagtgcaataggtcatgaaaaatacttaatgctgaacgcacatctaaatggaatgaattatatttataaacatcgcgataagctccagcgactcattactcaatacaaacaaggaaattacaatactttcagtaacctaatgaaagaattacctactctgaaaaaacctcgttcgctaaaaatacaagatatcctttccgcactttatacagcaacctctgcaatgtcatttccctttacaatacatgcacataatgctgaaattagtgaaaaaatgccacaatttcttcattatattcagaaatatcatccaaaacagctaaataaatttttagatgatattattggaagtgggtttctgaaaagtttgcatttcgattgtttaagcctatatcccaaaatgcttgactttgaactcccttcacgcccagcgctttactatgattatgataaaaacgtagatttatcaatgattcctgctcgagtttcaactgccgaatttgatgactgtaacaatttttacaaagacttatctgaagtattctctcggcaattaataattgtggccggattgaataacttattaaaacgcggagatcataatatttttgacgattcagtaagactaaataaaaaaggcgatttaattaaaggtttttctagtctcaacgaatatgcaaacgttgatttaggcacgaaaataagcggattggatgatagcttttatatagttgatctcaatgctttagacaacaagctgcgaaatggcattgcacattataaatatgaatataaagagtcaattcagatgataacctactatttcgctaaggaaggaatggaacgcactaaatacaacgaacttagtttcatgtcttttatgaggaagctattactattatttcgcgaggtgcacagcattaatcacattatcaaaaccttatatttttactgtatttttatcgctaaaaagaaaatttga

SEQ ID NO: 2730 - protein, 420 aa, Klebsiella oxytoca
MNFLQQFKCLVCDTVIDTRIGMSNRDIQPFQFACPNCENNISFTLGEGEPVFNGAETVESNDFGTTNPFIDLHLDFPVGFGKYEKGKTAFLKITSAIGHEKYLMLNAHLNGMNYIYKHRDKLQRLITQYKQGNYNTFSNLMKELPTLKKPRSLKIQDILSALYTATSAMSFPFTIHAHNAEISEKMPQFLHYIQKYHPKQLNKFLDDIIGSGFLKSLHFDCLSLYPKMLDFELPSRPALYYDYDKNVDLSMIPARVSTAEFDDCNNFYKDLSEVFSRQLIIVAGLNNLLKRGDHNIFDDSVRLNKKGDLIKGFSSLNEYANVDLGTKISGLDDSFYIVDLNALDNKLRNGIAHYKYEYKESIQMITYYFAKEGMERTKYNELSFMSFMRKLLLLFREVHSINHIIKTLYFYCIFIAKKKI

SEQ ID NO: 2731 - DNA, 528 bp, Klebsiella variicola
gtgagtgataaaacccaaattgaactcggtcaatttttgtccgaactaaataaagaatcagatcgtggctctgttctaatagcagcatccattttcgatgagtggttatccgagatcatccaggctcacctgttaaatgacaaagtagctaaaggtctactgaatggtgcaacagcgcctttatcatcttttgctgctagaacaggcttagcatatgcgttaggactgataatggaacacgaatacaaagaactaaacacactgcgtagcattagaaatgcttttgggcatagttggaatggtgttagcttcgcaacacccaaaatacaaaatcaactggagcagctaccttggcttggacccaaagatgttcctaatactcccaaaacaaaattcatattctttgtttctatactgcttgccgatttgatgcaccgtaaacaactagtggaaagagataaggtgacctctaaagtatggggtcacactgcgcgcggtaatttggtcggaaagactacaaattgttaa

SEQ ID NO: 2732 - protein, 175 aa, Klebsiella variicola
MSDKTQIELGQFLSELNKESDRGSVLIAASIFDEWLSEIIQAHLLNDKVAKGLLNGATAPLSSFAARTGLAYALGLIMEHEYKELNTLRSIRNAFGHSWNGVSFATPKIQNQLEQLPWLGPKDVPNTPKTKFIFFVSILLADLMHRKQLVERDKVTSKVWGHTARGNLVGKTTNC

SEQ ID NO: 2733 - DNA, 678 bp, Klebsiella oxytoca
atgaaaaaatttaaatggattaaactcaacaatcgtttcactactagtgaaacagttgaaaaactcatgcgtgatccttttactgaagagaaagggaaagggtttatatttgataaatcacgaacatctcattttcacgctcgcttcatcgaaaagataattagcgaagatagaataagtaatctatacggcaacagtaccgctgttgaacgcattgaatatagagtaacatctttcagttttgacgaacaatacaccccagttttacttattgataatccaccgagaacacttaaaccatttgctcaggcactggtaaaaaaccttggtcttggtaccagcttagaagagattgagattgacccgttcatatggttcagttctttaaacacagagttgacacttaatatagtgcaactagatgtatctcaaattcaagttgctgaatttgctcttgccaagatgcaaattaatagtaccagcgatcttaaaaaatatttcaaagatgagcttattcacaaaaaaatgagacttgatcgattgacatgtactattcatgaccaagaatttagcggtaaattaaaactcttccgaaatggtatggctcaaatcgaagcacgagcggaaaaagagttaaccaaaagactatttgacagtttaatgaatatctacatgtaa

SEQ ID NO: 2734 - protein, 225 aa, Klebsiella oxytoca
MKKFKWIKLNNRFTTSETVEKLMRDPFTEEKGKGFIFDKSRTSHFHARFIEKIISEDRISNLYGNSTAVERIEYRVTSFSFDEQYTPVLLIDNPPRTLKPFAQALVKNLGLGTSLEEIEIDPFIWFSSLNTELTLNIVQLDVSQIQVAEFALAKMQINSTSDLKKYFKDELIHKKMRLDRLTCTIHDQEFSGKLKLFRNGMAQIEARAEKELTKRLFDSLMNIYM

SEQ ID NO: 2735 - DNA, 1080 bp, Klebsiella oxytoca
atgaataacatgaatatttatttcgcaactgacaaaaatatatatgatgcacttcatcataaacgaattaccatcgcaagattacgcgagatattattacggaaaggtattattgttgctcaagacttaacaaaggaggaattaattgaagaggtttgcaaactacctcagggatatagtgatctagattctattaaggaacttgtacaaacttatgataaaagagagagtataactagcgtcaagcttcaagcatcatcctctcagacggaattaaaaacagcagcagagttagttaaaagaaaattagccactggctctggtgaaacagtaaaaatcactgcgaaaaaagatgggtctttagcaatcgaggtaaactaccaagaagtagacttgtccagaacagcattgcgtcagatagacaaccgaaacatcaagattgatcttactgtaaataacgataatgttgatattcgtatgcctcagaaccaaaaggctaaagatgtaataacactattacaaaaagagttgtcaaagattaaatccgttgatgttgaaaagtttgaaatttctttagaagcgattcctacaccagcgctaagaagtcagttttttcaagaggttatgggcggcttgagtggatatgaaattgacgacgttactaatgtagagcttaaccgttcaacaagcaaaggtgatgacgaggaagaagaagaaatcgagacaggattcgtaaaaaaagcggttctaaaaggtgattctgttaatagttctgctattttcacccaactacacaacaaaggatactatattggaagaattgcttggtctgctaaacctaaaaacggaataggagacaggattttggttgaagctttctttaaggattcagaaaattgctctgatttttcctatcaaattaaaggaatcaataaccaaaaaggtagtggatacaatgttactattcgtgcagcaaatgaagttgaaaagaagaaaatcagcctactaattgaacagtcagcagcagatgcctataatatcgtgacgggtaaaaaggtggaagagcatgaaaaaatttaa

SEQ ID NO: 2736 - protein, 359 aa, Klebsiella oxytoca
MNNMNIYFATDKNIYDALHHKRITIARLREILLRKGIIVAQDLTKEELIEEVCKLPQGYSDLDSIKELVQTYDKRESITSVKLQASSSQTELKTAAELVKRKLATGSGETVKITAKKDGSLAIEVNYQEVDLSRTALRQIDNRNIKIDLTVNNDNVDIRMPQNQKAKDVITLLQKELSKIKSVDVEKFEISLEAIPTPALRSQFFQEVMGGLSGYEIDDVTNVELNRSTSKGDDEEEEEIETGFVKKAVLKGDSVNSSAIFTQLHNKGYYIGRIAWSAKPKNGIGDRILVEAFFKDSENCSDFSYQIKGINNQKGSGYNVTIRAANEVEKKKISLLIEQSAADAYNIVTGKKVEEHEKI

SEQ ID NO: 2737 - DNA, 1002 bp, Klebsiella oxytoca
atgggcggagagacctcttcaatacagcatgttgcaaataagataacccaagatatttttaaaattttcaaatggcaacgagctactagtcaagatatgaactgggattgcgacctagaggctcatgacaaaaaaacacatcctagcgatgtggtgttttactataccgatccttatgaagaagagattgtgtacttgaacacagacctcaaaagctatgctcaaagtagtatcggcaaagggatggtagaaggtgcactttcttctttagctctcgctacagaatgcgccaacattagccaacagtggtgtaaacgatatgtgcgggatgagtcattaggttacaaagttcgaggtttattatttctctataatcatgacaacctttatgacaaggatttttactcatccgtgatgaagaaagtcgatcctgaaataataaaatgccccccaaacataaaattacaccttttagatccattcaaaatatccgatatgataaatatagcatcagatattaaaatgcttattggtaccggggctttacctcaaccagatttgtactatttctattacccagacttagcactaactaggataaaacatcctatcaacaataagactgcagctactgttgaggtcttaacatcaccattcataataataaagcatgaagaattcgattggatgggtgaaaaagaagatagtggttacgtaatttattataatcaaccagggaatagtgaagatgagttcatctatttccttgacatgctttctaattatcaaatactgactgatgcaaaaagaataaaaattagacattgtcatataaatccgcatgaagactccattcatcactttgaaagagcaaagcaaaaatatagtgcccattggctatcaggcgaaagtgaacgtttgttttcaaaagttgcattcgaaaaaacagctgcaatggtaattcaatatagtcttgaagctataggcatggagcaacgttaa

SEQ ID NO: 2738 - protein, 333 aa, Klebsiella oxytoca
MGGETSSIQHVANKITQDIFKIFKWQRATSQDMNWDCDLEAHDKKTHPSDVVFYYTDPYEEEIVYLNTDLKSYAQSSIGKGMVEGALSSLALATECANISQQWCKRYVRDESLGYKVRGLLFLYNHDNLYDKDFYSSVMKKVDPEIIKCPPNIKLHLLDPFKISDMINIASDIKMLIGTGALPQPDLYYFYYPDLALTRIKHPINNKTAATVEVLTSPFIIIKHEEFDWMGEKEDSGYVIYYNQPGNSEDEFIYFLDMLSNYQILTDAKRIKIRHCHINPHEDSIHHFERAKQKYSAHWLSGESERLFSKVAFEKTAAMVIQYSLEAIGMEQR

SEQ ID NO: 2739 - DNA, 891 bp, Klebsiella oxytoca
atggattataaaaataagttagttgatgcatcaccaaaattaaacaaccctcaactattggctataatatacttaataccttttggatacttgattgtagaaaacccattatggctagaaaatatatacattgccgctccaattttcctatcatctatagctttattaaccagtgtatacataggatatcgtgatttattaaataaagtatttaataatgcagtagttaaatggggcgtaactggctttacatattccgtatgcttatggatcgcaaagtttaagcttgacatagcttatggtatagtcccagaaaaccttaattactcgacattagcttatgctttcatgctctcatttccaataggggcaatgatttgtgcaattacagtctatatatacatatttttgcgagatgtatccccagcaaaaatagtaatatcctctatgatttcagtatatattggaagcttggctcaacatcatatacaggtgaacaatcttcctgaaaaaataatattaataggacttataattatggtcccctataacatggtcaatttagctagttcattagttattaaaaggaaatttaattttaatcgtttagtatcaggcttatccctttttgctgtgtcagttgctctttttattattagcatgacagcaatgaaatacattgaaagatttcaagaaaagtttatttttctcgatgcaagaacatctacgacatgtggtagctcagaaagcaaatctctttatattgaaaaaaatgaaaaccagtgttataaaatatcaggaaataaattctcggagttaagactaactcttgtagataaaaacatcttgaatataaataataaaggcacttcaacttatgaacaaaaataa

SEQ ID NO: 2740 - protein, 296 aa, Klebsiella oxytoca
MDYKNKLVDASPKLNNPQLLAIIYLIPFGYLIVENPLWLENIYIAAPIFLSSIALLTSVYIGYRDLLNKVFNNAVVKWGVTGFTYSVCLWIAKFKLDIAYGIVPENLNYSTLAYAFMLSFPIGAMICAITVYIYIFLRDVSPAKIVISSMISVYIGSLAQHHIQVNNLPEKIILIGLIIMVPYNMVNLASSLVIKRKFNFNRLVSGLSLFAVSVALFIISMTAMKYIERFQEKFIFLDARTSTTCGSSESKSLYIEKNENQCYKISGNKFSELRLTLVDKNILNINNKGTSTYEQK

SEQ ID NO: 2741 - DNA, 288 bp, Klebsiella michiganensis
atggaagataaaaaattgctggcatccatatcggtcgacaccagcgaggctcaatcgcaacttgatagcctaatctccttacttgagcttaaatttggttcccttcagtctgtccctgagcgtatctacgaggaaatccttgccgtggcgaaagacatcgtttttgctgatagcccttccgcaggaggcacaggactcgacattgtctatggtgtgcggttcggcgctaaatatgaattgctcactgccgcaatcagggcaggagagtttgactctgaatttctctga

SEQ ID NO: 2742 - protein, 95 aa, Klebsiella michiganensis
MEDKKLLASISVDTSEAQSQLDSLISLLELKFGSLQSVPERIYEEILAVAKDIVFADSPSAGGTGLDIVYGVRFGAKYELLTAAIRAGEFDSEFL

SEQ ID NO: 2743 - DNA, 948 bp, Klebsiella pneumoniae
atgaaattatctattattattccctgttataactgtgccgaaaggataaataaattattaatgcaaatttatccgcaggttgaagataatgataatgttgaggttattttagttaatgatggttccactgataatactaaagatgttatatcagctttcttgcaaaataatgattcgaataaattcttactgataaccacgcaaaataaaggtgctgccgctgccagagaaaaggggcttgaatttgctacaggcgaatatgtgtttttttgtgattctgatgacttgatttcacataaattcgttcaaaccatattaagtgtttgtgagacatgtgctgatgttatctattttagctctgagattatttctagtggtcaaaattatcacaaaattgctgataaggttttattcgaagataatattagttttacttcaccggatgattttttgttacatcagttaaagcatggatattggactgctgccgtatggacttatgtattcaagagaagcattgctgtttcacaacatataactttctcttctcgaagagcgcatgaggaccatctgttcactgcaaagattattttaaatgcaaaacaaataatttgcttaaaagatactttatattttcaaatcttaactttaggttcattaactaactctaaaaaaaatttaagatatatatccgaaagatatttgtcattcgttcaggctagggagctcctaaaagggaggtgcaaaaaaaagactatttttcattatgaaatatggtctctaagatctataatttcattgtttttagaaaatagaagtattcttttaaatgctatgttctcctatcctgtatggaaagctgcctttgcggaaaggacattaatatataaattcgcattttttatttttaaaaataagatatggcgtggtgtaaataacaatgactga

SEQ ID NO: 2744 - protein, 315 aa, Klebsiella pneumoniae
MKLSIIIPCYNCAERINKLLMQIYPQVEDNDNVEVILVNDGSTDNTKDVISAFLQNNDSNKFLLITTQNKGAAAAREKGLEFATGEYVFFCDSDDLISHKFVQTILSVCETCADVIYFSSEIISSGQNYHKIADKVLFEDNISFTSPDDFLLHQLKHGYWTAAVWTYVFKRSIAVSQHITFSSRRAHEDHLFTAKIILNAKQIICLKDTLYFQILTLGSLTNSKKNLRYISERYLSFVQARELLKGRCKKKTIFHYEIWSLRSIISLFLENRSILLNAMFSYPVWKAAFAERTLIYKFAFFIFKNKIWRGVNNND

SEQ ID NO: 2745 - DNA, 222 bp, Citrobacter rodentium
atgaactatgcaggacacgaaaaactccgcgcagaagtggcggaagtcgccaacagcatgtgtgacctgcgggcgacgctgaacgggatggagcaccgctatcgctttgactctgatgtgctggccgaacgcctgacccgtcagaccctttttcgcatcaatgccctgtttatggcggcatacaacgaaatgcttgagctggatgcctgctttaaggactaa

SEQ ID NO: 2746 - protein, 73 aa, Citrobacter rodentium
MNYAGHEKLRAEVAEVANSMCDLRATLNGMEHRYRFDSDVLAERLTRQTLFRINALFMAAYNEMLELDACFKD

SEQ ID NO: 2747 - DNA, 252 bp, Enterobacter cloacae
atggactggattttacttactatcgccattgctctacttgttgtagctgtctactcaggaatctcatactacaaagaaaaaaaacaatcagtcgtacatttaggcgatagcgccctatttaccataatcccttcttacgcgcaccgcgaaaacggcctcagggcgtttctgcgccttcagccacaaaagagcacgtcttacccccagaaaaccgcccggaatcgctctggtgagttttacgggggtgaatga

SEQ ID NO: 2748 - protein, 83 aa, Enterobacter cloacae
MDWILLTIAIALLVVAVYSGISYYKEKKQSVVHLGDSALFTIIPSYAHRENGLRAFLRLQPQKSTSYPQKTARNRSGEFYGGE

SEQ ID NO: 2749 - DNA, 207 bp, Raoultella ornithinolytica
atgcgtaaatcaataaaaatgcctgttgttcatttatcgctacccgtccctgaaaacttcacaggcaaagtgcttgtgaatgtcgaaaaaggcgtagctgttggcgggtttccattaagaccagatgagtttgttggttccgtcgatagctttattaaatgttgccgcctgacagggctccagattgtagaggtgcgtcatgagtga

SEQ ID NO: 2750 - protein, 68 aa, Raoultella ornithinolytica
MRKSIKMPVVHLSLPVPENFTGKVLVNVEKGVAVGGFPLRPDEFVGSVDSFIKCCRLTGLQIVEVRHE

SEQ ID NO: 2751 - DNA, 741 bp, Escherichia coli
atggcaaaaccggactggggagcactgcaacaccagttcctcgccgagcatgccaaaacaggaatatccccgaaagactggtgcgcagcgcagggactgaattactcatctgcgaaacgctatatcaaagtaacgacttacggtgcgaattcgcaaaaaaaaactgcgaacaaatctgcgaattcgcagaaggagaaaggcggggccaataaaaacgggaaggtgaaaaaaaaccagcccgacacaggcacccgctcaaaatctccagaaacgaaaccgatacgcggatcgcgcaccgcaccgccgacgaacgctttccagcctggcaaccagaatgcattaaagcacggtggctacggccgccggatgctgctctctgacgctatcactgaagatgcccagatgctcacgctcgacgatgagcttttctggctgcgtgcggcgagcctgacagccgcagagaatatcgggcgctggcagacagagctggagacagccgacagcgatcaggccaaagatttgcacgaccttatctctcaggcgcagaaggctatgcatcgcaacacagcgcgcattgagtctctggagtacaccaaggcggcgattatcaagcagcgcgttgatgctgcttaccgcgaagctgcgaccgaaaaggttgagctcgaaatcgatgtgctaaaagacggcgacaaggataacgcgatcgtcgtgcataactcgctgccaatcccgggaagataa

SEQ ID NO: 2752 - protein, 246 aa, Escherichia coli
MAKPDWGALQHQFLAEHAKTGISPKDWCAAQGLNYSSAKRYIKVTTYGANSQKKTANKSANSQKEKGGANKNGKVKKNQPDTGTRSKSPETKPIRGSRTAPPTNAFQPGNQNALKHGGYGRRMLLSDAITEDAQMLTLDDELFWLRAASLTAAENIGRWQTELETADSDQAKDLHDLISQAQKAMHRNTARIESLEYTKAAIIKQRVDAAYREAATEKVELEIDVLKDGDKDNAIVVHNSLPIPGR

SEQ ID NO: 2753 - DNA, 573 bp, Klebsiella pneumoniae
atgaaaatcgacaagaaattgaatttggtcaccaacattacccgcgaagacggctctatcgtctacctacatgtaacgccgtttccctatgaggtagtagaagagcattgtgtcctgctggggaacctcttcaccagattcatctcgcaggttggcggtcttggcgccgccagaattgccgcgatgatgctgaggcagagcctgaaagcggaaatagataacggtcggacaggtccgaacatcgttgatgaaattcagcgactgacggtagttatccataacgtcggcggccagtggaaaaccacgccccttgaggtggcattcaatcaggggattatcgaccctgatgagtatcgcgaggtcgaaggcgaagtggttttttttatggtttcctctgctattcagaaggcaaacctgatcgcgccgaccgtgggaacggtaatcaaaatgtacgatgggcaactaacctcatcgagcgttacggcgttccgcgattcgttgcagacgtcgaagccggataccgatacccagacccagaatgccccgccggaaacgtcatttataccctcttag

SEQ ID NO: 2754 - protein, 190 aa, Klebsiella pneumoniae
MKIDKKLNLVTNITREDGSIVYLHVTPFPYEVVEEHCVLLGNLFTRFISQVGGLGAARIAAMMLRQSLKAEIDNGRTGPNIVDEIQRLTVVIHNVGGQWKTTPLEVAFNQGIIDPDEYREVEGEVVFFMVSSAIQKANLIAPTVGTVIKMYDGQLTSSSVTAFRDSLQTSKPDTDTQTQNAPPETSFIPS

SEQ ID NO: 2755 - DNA, 903 bp, Klebsiella michiganensis
atgcattctccagttattgagcttcaggctcttgcgagtgacccaaattcagacatcgttgctgttctaatgaaagcaaagatgattgcgattaagttagaccttaaagaccttgttgaatggatagagttagagcttaatggttaccctaatattgcctctgcacctgattataggtctgggcaaggtgtattgaaggctttcaatcctgtaaatgggtggattcctgtggatttggggacatctgacccaaagtttacaaaacattttacaacttttgctttaactgaatcagtctcatcaatggctcattcgaaggtcaaagatgcagggactgtcagtctcactgtgcctgctccacttgctgagatgcttttatctggtcagcgttcaagatatgagattcgttggttctttagtgcgggtaagattcagcatataattactacagtgcgaaataaaattctcgactggtcacttgaattagagaaaaagggaatactcggagaaggattaatatttactagagaagaaaaagaggttgcaccaatgacagttaacaatacgaacatctttcatggctcagtgaataacgccggagctatcggggcaggaaatactggtaacatcagtcaacaaaactctatctcggtgggtgacattgcatcccttgagcgtgagctaaagagccacggtcttgatgataatgatgttgctgaattgaaacagcttgttgagcaatcacctaaaccagcttcgaaagaagaagttgaaaaaggtttcggctcatggattggtaagatgacaggcaaggcttttacaggtgcgttaaaggtcgctggtgcggcggctcctgctgttcttactaatgcactttgctgttacttcgggatccctgtttaa

SEQ ID NO: 2756 - protein, 300 aa, Klebsiella michiganensis
MHSPVIELQALASDPNSDIVAVLMKAKMIAIKLDLKDLVEWIELELNGYPNIASAPDYRSGQGVLKAFNPVNGWIPVDLGTSDPKFTKHFTTFALTESVSSMAHSKVKDAGTVSLTVPAPLAEMLLSGQRSRYEIRWFFSAGKIQHIITTVRNKILDWSLELEKKGILGEGLIFTREEKEVAPMTVNNTNIFHGSVNNAGAIGAGNTGNISQQNSISVGDIASLERELKSHGLDDNDVAELKQLVEQSPKPASKEEVEKGFGSWIGKMTGKAFTGALKVAGAAAPAVLTNALCCYFGIPV

SEQ ID NO: 2757 - DNA, 663 bp, Klebsiella quasipneumoniae
atgaaaatttatcagcgtataaatggcgaagaatggcgccgggttttggtatgcggtgacctgcacggctgctacaccaacctgatgaaccggctgggcgcggtcgggttcgacccagcacaggatctgctggtttcggttggcgacctcatcgaccgcggcaccgagaacgtcgaatgcctcgacctgattaatcagccatggttccgcgcggtgcgcggcaaccatgagcagatgatgctggatgctgcgatgggtgccggaagtatcctgcactggatgcagaacggtggtagttggttctacaacctcgatgccgatcagcagatccttgcgaagtcactggtcagcaaggcggcagcacttccgctcatcatcgaggtggagaagggcggcaagaagtttgtcatctgccatgcagactatcctcacgacgaatatgagtacggtaagccggtagattcacagcaagctatctggagtcgtgagcgaatcagtttatccattgatggctttagctccaatatttctggcgcagacttattcattttcggccacactccagcgcttcagccaatgcgtatcaaaaaccagctctacatcgatactggtgctgtttttaacggtaatttgaccctttatgaattatccgggggtgaataa

SEQ ID NO: 2758 - protein, 220 aa, Klebsiella quasipneumoniae
MKIYQRINGEEWRRVLVCGDLHGCYTNLMNRLGAVGFDPAQDLLVSVGDLIDRGTENVECLDLINQPWFRAVRGNHEQMMLDAAMGAGSILHWMQNGGSWFYNLDADQQILAKSLVSKAAALPLIIEVEKGGKKFVICHADYPHDEYEYGKPVDSQQAIWSRERISLSIDGFSSNISGADLFIFGHTPALQPMRIKNQLYIDTGAVFNGNLTLYELSGGE

SEQ ID NO: 2759 - DNA, 639 bp, Acinetobacter baumannii
atggacaagactatttattccaaaaagattgccgaaagcctttcatctggcaatcatcctaaagagttcgcaacgctctttgtcgcgctgctccgacagctagcgatggggggacctgtatcacgcgaaaagctcgccggcgcactcggatggtctggagcgagagttgcaacggtacttgagcaggcacctggtacggaatatgacgacgaggccaatatcattggactggggctgacactacgtgaaacctctcacgtttttgaggtggatggccgtcatttgtacacatggtgtgcgctggacaccttgatgtttcccgccttgaccggcaagattgcccgtgtcacttcccgctgcgccgccaccggtaggccgatcactctcaccgttgcaccagaagcagtgcttcatgtcgaaccggcagaagcaatggtttcactgcgaactccggatacttcgcccgacattcgttgttcgttttgctgtcatgtgcatttctttgcgtctccgtctattgcaaattcgtgggcttcgacccaccaagggattgaggtcgtgcctgtcgagagtgcgttcgaccttggtcatgatgtcgcgcttaagctgctagaggactgcgaggaaagcccagtatga

SEQ ID NO: 2760 - protein, 212 aa, Acinetobacter baumannii
MDKTIYSKKIAESLSSGNHPKEFATLFVALLRQLAMGGPVSREKLAGALGWSGARVATVLEQAPGTEYDDEANIIGLGLTLRETSHVFEVDGRHLYTWCALDTLMFPALTGKIARVTSRCAATGRPITLTVAPEAVLHVEPAEAMVSLRTPDTSPDIRCSFCCHVHFFASPSIANSWASTHQGIEVVPVESAFDLGHDVALKLLEDCEESPV

SEQ ID NO: 2761 - DNA, 654 bp, Acinetobacter baumannii
atgttttgtgacatcagacttaaattacgccgtgtacgcgcgtgcttgacgatcgtactggcaagtaccgcaacgttaggcatgccaaaccaagcgttggcggcttatgatttttctaagctcggcgccgcgattgaaacattgtcgccagagaccgtcagtgattgggaaaagaaggccagggctggcgatgccatggctcagaacatcatgggtcttgcgtacaaatgcggtatgggcgtaaagcaaaaccacgcggcatcgatccagtggttccgcagggcggccgagcagggtgaagccgatgcacagttcaacctcgggcgcctctacggaagtgaagtcgacggtatgtataagaatgggcgtgcggctcctgccaacgatgcagaggctttcaagtggtaccgcctcgctgccgagcagggacacacgcaggctcaagtcaggctggcccagctgtttgcaaagggtcttaccgacatcgcgcccgaccaggtgcaggcataccagtggatgagtctggccgcagcgtcgggagaaccgacagcagcaaaagtcgttgcagactatgcagctcaaatgaagcccgaacagttacagcaagcccagctgctggccgaggaatggcaacgccggcaaggcacaaagtaa

SEQ ID NO: 2762 - protein, 217 aa, Acinetobacter baumannii
MFCDIRLKLRRVRACLTIVLASTATLGMPNQALAAYDFSKLGAAIETLSPETVSDWEKKARAGDAMAQNIMGLAYKCGMGVKQNHAASIQWFRRAAEQGEADAQFNLGRLYGSEVDGMYKNGRAAPANDAEAFKWYRLAAEQGHTQAQVRLAQLFAKGLTDIAPDQVQAYQWMSLAAASGEPTAAKVVADYAAQMKPEQLQQAQLLAEEWQRRQGTK

SEQ ID NO: 2763 - DNA, 270 bp, Klebsiella pneumoniae
atgaatcagctgaccaaaaccaaacctatccttttaacctacgcacaacgcgaagcactggaaattatccagagtgaagagcgggcgcgttctccctacggcgcagcgccatcaatccccgagctggtgcgtagcctgcttgatatagcgctgaaggatgtctacgcagatattgaaaataaaaaacaactggaggaattattaaaaccgactccaatcgctgatacagcgaataaagatttttcgaaagcccatttagaggaggagtaa

SEQ ID NO: 2764 - protein, 89 aa, Klebsiella pneumoniae
MNQLTKTKPILLTYAQREALEIIQSEERARSPYGAAPSIPELVRSLLDIALKDVYADIENKKQLEELLKPTPIADTANKDFSKAHLEEE

SEQ ID NO: 2765 - DNA, 822 bp, Klebsiella oxytoca
atggttgaaaccagaaaaacgatgttaaaaatccatgataatgataaagcccgtagagttacgaaaaacgatactattgaaactgaaagtatcgttatgagtggtttatttttgaatactattgatagttttgcgagaaactttgatcaggaaagtattaatgatgggttaggaagaagacataattttgtttatgctgaaagaggggaaaaagttgtcccaacttggacagtagatcagatcatcgaatctctcaaagagggattagatgatttcttcactactgttaaaacaaacgtaatctatacatattccccagaatgtagaaagatttatgatcatttttatatggtttataaggaaaaatttgatcatatattaggagaagaaacaaacggaacattcttcagaacttattttatgttgagttggaaatatgcagcaatatatcatattttattaaaacaagaaggaaccgagattcaggcaaaatcttttgattatgggattaaagtttcattaatgtttttatccagtataaaaaggtttttagattataaagtagatttaaaatctggtgctaaacaagtaaggaaagaatatttacaaaaagcagcagaaaaagaattaaataatttacaaaaatacaaagagtttttgcttgataatattgaaatttcattaagagacttcaatagaaaatttaatattaaaaagatcgaaagtctaaaaatactcaaaacaatcagagaaaataaattaataaaatatcatccattgtttgaagtgttagcaaaagaagaagccaaagcaaaaaaataa

SEQ ID NO: 2766 - protein, 273 aa, Klebsiella oxytoca
MVETRKTMLKIHDNDKARRVTKNDTIETESIVMSGLFLNTIDSFARNFDQESINDGLGRRHNFVYAERGEKVVPTWTVDQIIESLKEGLDDFFTTVKTNVIYTYSPECRKIYDHFYMVYKEKFDHILGEETNGTFFRTYFMLSWKYAAIYHILLKQEGTEIQAKSFDYGIKVSLMFLSSIKRFLDYKVDLKSGAKQVRKEYLQKAAEKELNNLQKYKEFLLDNIEISLRDFNRKFNIKKIESLKILKTIRENKLIKYHPLFEVLAKEEAKAKK

SEQ ID NO: 2767 - DNA, 528 bp, Klebsiella oxytoca
atgcgactacgcagcaaacgacctccggtgggcgcttcaacctcaattttatccgtccacggaatttcagctgtgaggcgtgccaataaccgttcacgaacatcatccgctccccagaatatggcaatttgtggatcgataagtcgcgcagcgcccagtaactctgcggcgttgctgaggttgatcgcatcacaatcaggccttaaattgcttagcgccgccctgatactgtcaggaatatccatgccgaccaaagtacccataaaggtacataagcgtggcgtatcagcgcgtacgactaatgcgtttattgtgtccggggaaagtgcggacagtaacacttgtcgcggatctgtggccgaatgtacccgtaactcacccatggctttttgcaggcgctcgggaaagggaattattgatgtattttgccccgccacaacgaacatgacggccagggtaatcaatgttggttccacgccaatcacccgcgcctggggtatccaggcactcagcgttgtttcgatatga

SEQ ID NO: 2768 - protein, 175 aa, Klebsiella oxytoca
MRLRSKRPPVGASTSILSVHGISAVRRANNRSRTSSAPQNMAICGSISRAAPSNSAALLRLIASQSGLKLLSAALILSGISMPTKVPIKVHKRGVSARTTNAFIVSGESADSNTCRGSVAECTRNSPMAFCRRSGKGIIDVFCPATTNMTARVINVGSTPITRAWGIQALSVVSI

SEQ ID NO: 2769 - DNA, 468 bp, Klebsiella oxytoca
atgaagagttcagggcagctgttatcgctggcaggtataattctcgcggtgtactcattgttctttatggatgtgagtgttgaggttggcgatggtacaagagttaataatattgggctaatggctcaacagcaaaactatttattagttgcggttgttctttttcttgctggtatcttcatttctttctcagggagaaagaagtcattacaagaggtagattttactaaaatagaatctttctcatcagatgactttgtttctttgaaagatggtgaaccatgccttaatatattggctgtagacaatcttgcaattatgtttttaaaaaaacatggttcaaacagtgtaaatgatatcctttttatgaatatgcctttaatcgataggctagaacaaggtctccctgaatcactaaggaaagattttaaatctacccttaaaaagaggttaaaggacaattgttaa

SEQ ID NO: 2770 - protein, 155 aa, Klebsiella oxytoca
MKSSGQLLSLAGIILAVYSLFFMDVSVEVGDGTRVNNIGLMAQQQNYLLVAVVLFLAGIFISFSGRKKSLQEVDFTKIESFSSDDFVSLKDGEPCLNILAVDNLAIMFLKKHGSNSVNDILFMNMPLIDRLEQGLPESLRKDFKSTLKKRLKDNC

SEQ ID NO: 2771 - DNA, 123 bp, Klebsiella michiganensis
atgctccaggaaattaaacagggccagcgccacatcctgctgaacagtattggcgaggtctgtggccccctggttcataatgagatagatcgcgctgttaccaaacactgtcatccacattag

SEQ ID NO: 2772 - protein, 40 aa, Klebsiella michiganensis
MLQEIKQGQRHILLNSIGEVCGPLVHNEIDRAVTKHCHPH

SEQ ID NO: 2773 - DNA, 267 bp, Escherichia coli
atgtgtagccagttaaaccccttgttcgcagacgcatacttgaagccacagcagactcattatgtgcagctggtgaatacaaccccgttgttcgcagtcggataccagaagccactgcagactcatgatgtacagcaggtgataacaattccctgttcgcagtcagatacctccatcctcatcagacccttgatgcgcagcaagttaaaccccctcagcttgtcctcatttggttacctgaagtctcttcaggctaccgatgtgtag

SEQ ID NO: 2774 - protein, 88 aa, Escherichia coli
MCSQLNPLFADAYLKPQQTHYVQLVNTTPLFAVGYQKPLQTHDVQQVITIPCSQSDTSILIRPLMRSKLNPLSLSSFGYLKSLQATDV

SEQ ID NO: 2775 - DNA, 252 bp, Klebsiella oxytoca
atgaacgcttatttttcaaatgacgggcgggcgaacaaatcgggtatttacatcatcaataatggaatgggaacggcatttgtctctgctatatctgcaacggtcaatggcaaaaaagttgaacctgttgccgggaatatttttgtcggagcagtgcaggcgttaggcctggatatccagtgctttgtgattggcggacccagaccaaatgattcatttaaagttggcgaggaggcgaggagattttcttaa

SEQ ID NO: 2776 - protein, 83 aa, Klebsiella oxytoca
MNAYFSNDGRANKSGIYIINNGMGTAFVSAISATVNGKKVEPVAGNIFVGAVQALGLDIQCFVIGGPRPNDSFKVGEEARRFS

SEQ ID NO: 2777 - DNA, 132 bp, Klebsiella pneumoniae
atgaaagttttgcgctcgcttgtgatcgaatacaatgtgaatccggcgtggttcttacttggaaccggcaatttttcatatctgcctgaagctgaagaaatgacaaacatcgcggccaagttggaaatttga

SEQ ID NO: 2778 - protein, 43 aa, Klebsiella pneumoniae
MKVLRSLVIEYNVNPAWFLLGTGNFSYLPEAEEMTNIAAKLEI

SEQ ID NO: 2779 - DNA, 1278 bp, Klebsiella pneumoniae
atggtaagacccatagccctgattgatgggaataatttctatgtttcgtgtgagagggtgtttcagccgcacttgctaggcaagccggttatcatcctgtcaaacaatgatggttgtgccgtagcacgatcagaggaagcaaaagccctcggtattaagatgggtgcgccgctgtttaaaatccgtgagctggtcaaagaacacggcgttaaagtgctatcctcaaactatacgctttacggagatatgagccgccgtgtcgtggatgctgtgagccagttttcacctcattacgaaatctattcgatagatgaaaactttgttgatttgtcgggctttggtgatcgttatgaagccattgccgttgatatgcgagccaccgttagacaagtgaccggaatccctaattgtgtcggcattgccgagacaaagacacttgcaaaacttgccaattttgccgccaagaaaaacccgatttttggcggtgtttgcgacttcacgcaaccggcagtattggcatggtgtttagaccggattccggttgctgaagtgtggggaatagggcggcaaacacaaatcaagctggcatcacaaggaatagcaacggcggcacagttgcgcgacatgccgcgcacacttgcacgtcaactcggtacagttgtcttagaaagaacagttgcggagcttcagggcatccgctgccttgagatcgaggacattgcaccacaacgcaagggcatggctgttacgcgctctgctggtgcgcctatgcgcgatttagaggctgttatgcaggcactcaccgcccacgcttcccgtgccgctgaaaagcttcggttgcatggattagttgctggtcagatcacagcgttttttcacacaaacagtttttcaaaaaacgccgcgcagcactcggtatcaagaaccgtaaagctgaagcccatgacgaataatacattcgatcttgtgcaggctgttaaccggtgcgcccgtgctggttggcatcctaaagcgcatgagcatggctatagctatacaaaggcgggtgtgatgctcgatgatcttctgaaggcagaggacgcgcccaaaatgctttttgatatagtgcagccccgtgatgctcgcctaatggaagcaatggacgcaattaatgaccgatacggcaaacgcaaggttgttatcggtgcgcaaggctttcagaataaacatgaagcgaaagcggatatgcgttcaccacgcttcacaacaagactttcagacttgccagtaatttgttga

SEQ ID NO: 2780 - protein, 425 aa, Klebsiella pneumoniae
MVRPIALIDGNNFYVSCERVFQPHLLGKPVIILSNNDGCAVARSEEAKALGIKMGAPLFKIRELVKEHGVKVLSSNYTLYGDMSRRVVDAVSQFSPHYEIYSIDENFVDLSGFGDRYEAIAVDMRATVRQVTGIPNCVGIAETKTLAKLANFAAKKNPIFGGVCDFTQPAVLAWCLDRIPVAEVWGIGRQTQIKLASQGIATAAQLRDMPRTLARQLGTVVLERTVAELQGIRCLEIEDIAPQRKGMAVTRSAGAPMRDLEAVMQALTAHASRAAEKLRLHGLVAGQITAFFHTNSFSKNAAQHSVSRTVKLKPMTNNTFDLVQAVNRCARAGWHPKAHEHGYSYTKAGVMLDDLLKAEDAPKMLFDIVQPRDARLMEAMDAINDRYGKRKVVIGAQGFQNKHEAKADMRSPRFTTRLSDLPVIC

SEQ ID NO: 2781 - DNA, 1200 bp, Klebsiella pneumoniae
atgcattttacaaaattaaagaccgtggtaatcgctgctctcctgagcgcaactgtcagctcatttaccctgccagcttattctgccgatctcatcggtttttgggacacacagcgaaaaggcgggaacagctttaacaaaacgcctcctgatgaggcttatttcaaaacgctggccgcgacgggcgctacctgggttcgtctgacttttagcaaatggcgtggggaagatcgggatttcctgatcggcaatgctgatcactatcgaagcctgagagaaaaagatttacaaattctgcggaagacattggatgccgctcaggcagccggacttaaagtcgttcttacatcggtaagccttccaggtgcccgatggactcaacaaaatggtggtaaatttgatgatcggctatgggaaagccctgaatatgtcgagcaagccgtcaagttctggaccgatctggccggagaactgaaggatcacccagcgatagccgcctataatttaattaatgaaccagcacctgagaaaaccaccgggcttaaagaaaatgcatcgatggaagttttagaagagtggcagaaggaacatcagaacggcacaagggatttacgagcgttttaccaacagctcattgaaggcatttggaaagtcgatccggcaacacctataatggtcgacagtgggtattacgcgaatgctcgatcactagcagcatggcctgcaccgcttgctgacaccaaagttctttatgcatttcatatgtatgaaccctatgatgccacaagcgcgccaaatatgaagcgcaaggtgcctttacgctaccctggtgtaaagacgcgatactctggttcagaagttatttgggaccgcaaaacagttgctgctcatatcaccctcccttttgaatgggccaggaaaaacggcttaagcaccaatcgaatagtgatggccgaattcggttgtatgcgcctctggccagactgcagcgcctatttgaccgatgtaatggatgcagccgagaagtttcaggctcaccgtgcattttatgcatttcgggaagacgagtgggacggcatggattacgaactgcctgcaagtctgcgtcccggccagttttactggctgacagaacagggtaagcaaaacaaaattccgcgaaatggcgaactcatgaaactgctcaagaagcggatgtaa

SEQ ID NO: 2782 - protein, 399 aa, Klebsiella pneumoniae
MHFTKLKTVVIAALLSATVSSFTLPAYSADLIGFWDTQRKGGNSFNKTPPDEAYFKTLAATGATWVRLTFSKWRGEDRDFLIGNADHYRSLREKDLQILRKTLDAAQAAGLKVVLTSVSLPGARWTQQNGGKFDDRLWESPEYVEQAVKFWTDLAGELKDHPAIAAYNLINEPAPEKTTGLKENASMEVLEEWQKEHQNGTRDLRAFYQQLIEGIWKVDPATPIMVDSGYYANARSLAAWPAPLADTKVLYAFHMYEPYDATSAPNMKRKVPLRYPGVKTRYSGSEVIWDRKTVAAHITLPFEWARKNGLSTNRIVMAEFGCMRLWPDCSAYLTDVMDAAEKFQAHRAFYAFREDEWDGMDYELPASLRPGQFYWLTEQGKQNKIPRNGELMKLLKKRM

SEQ ID NO: 2783 - DNA, 867 bp, Klebsiella pneumoniae
atgacaagatctgcccttttgattccactcaccacggcggctatcgcgctaaacgcaatatcgccggtttatgcgagcgacacccattctattgatgataccgtaaaacaggttgaaaccacgctgggagcaaaagtgggtatagccgtcctggacaccgggtctcaacgtgcctggttccaccgtgctgatgaccgtttcccgatggcgagcacatccaaagctctgacctgtgcagcgctgttggataaaggtcagagctttatgaataaagaggccttgatcaaaaaggcggacctggatgaatatgcaccagtgacatccggcatagtcggcaaaaaagtaagtgcggctgacctttgcagcattaccatgcgtacaagtgacaataccgccgtcaacaaagttcttgaaatcctgggaggaccgcaagctgtaaccgcttatttgcgcaagacaggtgataacattactcgacttgacagaaatgaaccggacctcaacgaaggaacgcctggagacgtgcgcgacacgacaacgcctcgcgctattctcgaaacacttaataaactggtactgggccccactcttggctctgacgagcgaaaacaactcacaacctggcttgaaagtaatgaggttggtgaccctttgctgcgcgctggagttccttctgattggcgcgtcgccgatcgaactggcgctggaggtaacgggacgcgtggggtgattgccgtcatgtggccgccaaaacacgcgccaatcattgctgcgatttacattacacagacgaaagccactatggaggaaaggaacgctgccatcgcctctattggcaaagcgattgctgccgaagttctggaataa

SEQ ID NO: 2784 - protein, 288 aa, Klebsiella pneumoniae
MTRSALLIPLTTAAIALNAISPVYASDTHSIDDTVKQVETTLGAKVGIAVLDTGSQRAWFHRADDRFPMASTSKALTCAALLDKGQSFMNKEALIKKADLDEYAPVTSGIVGKKVSAADLCSITMRTSDNTAVNKVLEILGGPQAVTAYLRKTGDNITRLDRNEPDLNEGTPGDVRDTTTPRAILETLNKLVLGPTLGSDERKQLTTWLESNEVGDPLLRAGVPSDWRVADRTGAGGNGTRGVIAVMWPPKHAPIIAAIYITQTKATMEERNAAIASIGKAIAAEVLE

SEQ ID NO: 2785 - DNA, 249 bp, Klebsiella pneumoniae
atgagtggattgaaaggccgccgaatcagcgcggatatgtttgctatgatgttaaaagtatctgccgggcagctggtttttgcagcccggcatgacaagcctttacgcagactgaccctacccccttacagaatcgaaggcgggaaaagctggagctcgaccgcctccacccgcagtatgacgtttgatatgcaggatgcggtcgctttcagcgagaaatttcataaaattcagtcgcctgacggctga

SEQ ID NO: 2786 - protein, 82 aa, Klebsiella pneumoniae
MSGLKGRRISADMFAMMLKVSAGQLVFAARHDKPLRRLTLPPYRIEGGKSWSSTASTRSMTFDMQDAVAFSEKFHKIQSPDG

SEQ ID NO: 2787 - DNA, 249 bp, Klebsiella oxytoca
atgagcagggacccgccgcaacgtcggggcgcggcacgcgaaacggcggtgccccttacagcccggcggtcactggccggggtgcagggagcgcagggcacggcgcgacagggcggcgcctccggaacggaggctgcaagcctgccgttgacgttgcgtcatgggatggaagcccgacagggcggagacagcctggctggctccgttcacgacagcccgcccggacgcccactgcaggacctgaaataa

SEQ ID NO: 2788 - protein, 82 aa, Klebsiella oxytoca
MSRDPPQRRGAARETAVPLTARRSLAGVQGAQGTARQGGASGTEAASLPLTLRHGMEARQGGDSLAGSVHDSPPGRPLQDLK

SEQ ID NO: 2789 - DNA, 225 bp, Klebsiella pneumoniae
atggatcaaatgaaaatgaacgaacatggactagctgaatcgctagaatctgtactctgtcagatagttgctttgctaaatattacccagaatgcacttgatggaagtgaaagtagcatctatgtgcgagatgctgtgcaaatgctaagtgctgcacgtaatctggctattgaagcagagcaataccgagccgaatgggaacagctaaccctcggtaataggtag

SEQ ID NO: 2790 - protein, 74 aa, Klebsiella pneumoniae
MDQMKMNEHGLAESLESVLCQIVALLNITQNALDGSESSIYVRDAVQMLSAARNLAIEAEQYRAEWEQLTLGNR

SEQ ID NO: 2791 - DNA, 174 bp, Klebsiella pneumoniae
atgtatcagttcaaattcgcggcgatctgtcggaccgaccgtaaaaacaacattcatcatttttcgactattgctgatagtgagcatgcagcgcgccgccagctttcctacaagttcgttctgtttttccaggcacgcctaccagtatcgggaggtgcaatatggatcaaatga

SEQ ID NO: 2792 - protein, 57 aa, Klebsiella pneumoniae
MYQFKFAAICRTDRKNNIHHFSTIADSEHAARRQLSYKFVLFFQARLPVSGGAIWIK

SEQ ID NO: 2793 - DNA, 1182 bp, Citrobacter freundii
atgaagggtatgcagaagatcaaaaggggtaagaacttctcaggtgtggtccagtatgcattgaagctaggttcacatcatacaagtgatccaatcgtcattggcgggaacatgttaggtgattcagcctttgaactgatcgctgaatttgatggcactaaacagcttcggccagatgttcagaaggccgtatggcacaactcgcttcgattaccggatggtgaatcactaacggctgaacagtggtccagcatcgcagatgactatatggagagaatgggattcagtgatactcatctccgttgctatgtgcttcatgacgacgaaggccagcatatacacattatcgccagcagaatcgacatagtcagtgggaagctctacttaggtaggaacgaaaatcttataagcacacggatcatcagtgaacttgaaatcactcataacctgacagtgaccatgacagcaccaaagcaaccgaagcgaagaaaggtttcccgcaatgaacagatgctttcagaacggactggccttccctcccccaaggaagctctacaacagattcttgataaaagtttggcagatacacctgaccttttaacttttatcaagaggctggaagaagcggaagtatcttggaaggccaatattgcctctaccggtaaaatgaacggcttctcattctcttaccgcgatatagctttcaaagcttcgcagttaggcaagggttactcttgggcaaatcttcaaaagcaacttagctacaaccctgaccacttagaagcgatacgaaccaacacaccaacaaaagccccccctgctgctgctgctgctgctcctgctcctgctcctgctcctgctcctgctcctgctcctgctcctgctcctgcaaaagatgttgcaacaacggatattccaagggaaagcataagtgaaaaaattgtcgaactggaactacggctcagagaagacaaacggaatgaaatcgtagaaaagattcttcaaaaaaattccgtcaaaaagcaaaagcatctcaggctcatcggctggattccatttatcagaaggttcatagagcttctgcgaagctatggtaagagcattcttcataagacccctacaaacttctcagaagtctattcaacacatcatctaaaacctgcaagaaaaattcgtttatag

SEQ ID NO: 2794 - protein, 393 aa, Citrobacter freundii
MKGMQKIKRGKNFSGVVQYALKLGSHHTSDPIVIGGNMLGDSAFELIAEFDGTKQLRPDVQKAVWHNSLRLPDGESLTAEQWSSIADDYMERMGFSDTHLRCYVLHDDEGQHIHIIASRIDIVSGKLYLGRNENLISTRIISELEITHNLTVTMTAPKQPKRRKVSRNEQMLSERTGLPSPKEALQQILDKSLADTPDLLTFIKRLEEAEVSWKANIASTGKMNGFSFSYRDIAFKASQLGKGYSWANLQKQLSYNPDHLEAIRTNTPTKAPPAAAAAAPAPAPAPAPAPAPAPAPAKDVATTDIPRESISEKIVELELRLREDKRNEIVEKILQKNSVKKQKHLRLIGWIPFIRRFIELLRSYGKSILHKTPTNFSEVYSTHHLKPARKIRL

SEQ ID NO: 2795 - DNA, 765 bp, Klebsiella oxytoca
atggtggatagtcgtcagttcattaaatcggttaagcagaatccggaaaatttttttatcattcactactcgtgtcagaacctaaatgacgataatgatgctctttctccacgtataacttctatcgctataaatcacttctcttcagggcaatcggttagcttttcgactcattcaatctcagaggaaatgcacatcccgcgtgatgacgtgttagatcgatttgatgaagtcgagttagagttgttatcccagttttataagtttattagagatcgacgtgacaaattttgggttcattggaacatgcgaaatctaacatatggttttgagcatttagagcaccggtatcgcgtactcggtgggaaagatgcctgtgttattgccgttgagcgtagactgaatctaaacgaccttttagctgatcgatacggagccgactatgctaagcatccaaagatgctttcattgatggatcaaaatggcggcaggcatagagatttccttggtggtaaggaagaggtagaagcttttgaaaataaagagtttctacgcatgcatacatcaacactatctaaggtaggattttttagctctaccatgggtaagtttgtcagtggcaaactcaaaaccgcctcaaaaggatatggagtacgactcgataaactttttgaaagtcgcacagttaaatcgttaggtttgatctcaattatctttgggttacccgtagccatctggcaactttatctctggacagtcggttaa

SEQ ID NO: 2796 - protein, 254 aa, Klebsiella oxytoca
MVDSRQFIKSVKQNPENFFIIHYSCQNLNDDNDALSPRITSIAINHFSSGQSVSFSTHSISEEMHIPRDDVLDRFDEVELELLSQFYKFIRDRRDKFWVHWNMRNLTYGFEHLEHRYRVLGGKDACVIAVERRLNLNDLLADRYGADYAKHPKMLSLMDQNGGRHRDFLGGKEEVEAFENKEFLRMHTSTLSKVGFFSSTMGKFVSGKLKTASKGYGVRLDKLFESRTVKSLGLISIIFGLPVAIWQLYLWTVG

SEQ ID NO: 2797 - DNA, 210 bp, Klebsiella pneumoniae
atgagcaagcctaccgatgaagaaatcatccaggttatttccgaacacggtcagtgcatgacttacgtcgtggcctactggctacgcaggaagcacaaaagcactaatacggcctatgcgctgcgtcgccttaagaagctcgaaaccatcggcgtggtgaagcgcatgaaaagttcgtacaaaactcaaatttgctgggggttggcatga

SEQ ID NO: 2798 - protein, 69 aa, Klebsiella pneumoniae
MSKPTDEEIIQVISEHGQCMTYVVAYWLRRKHKSTNTAYALRRLKKLETIGVVKRMKSSYKTQICWGLA

SEQ ID NO: 2799 - DNA, 438 bp, Citrobacter freundii
atgaaccagaatataccgaattatgccaaatattgccagagaggtttcgtgttgcaaaacactaaacaccgaagtatattaaacgctatgaaaaactttggtgaaaccatccgcgaccttcgagtcgcccaagaccttgggttgcgcgagactgcgatcaaggtaggcatttcccccgcctatctaagccgcattgagcgtggcaaggagcgtccgccaagaccagaggtaatcaaggagctggccaagatactggcggccgaccctgacgtgctgttccgcttgtcttcgtccacggacccggaagttgtcgactaccttcatgaccaacccgaggtcatgaatttgctccgctatgtcaaggaggcctgctttaccgaggatgagctcaagagcctcgttcaagcagccgaaagcatcaaggccaactctcattag

SEQ ID NO: 2800 - protein, 145 aa, Citrobacter freundii
MNQNIPNYAKYCQRGFVLQNTKHRSILNAMKNFGETIRDLRVAQDLGLRETAIKVGISPAYLSRIERGKERPPRPEVIKELAKILAADPDVLFRLSSSTDPEVVDYLHDQPEVMNLLRYVKEACFTEDELKSLVQAAESIKANSH

SEQ ID NO: 2801 - DNA, 207 bp, Klebsiella pneumoniae
atgagcaatgacgaggttctgaaaataaaggatgtcgccaccctacttaaggtcggtgagaagacagtctattccatggcccagaccggggaactacctgcttttaaggtccgaggccagtggcgattttcccgaaaggatatcgacgcatggatagaacaacagaaacatacaacaaaagatttcggtgagggtaatacaaaatga

SEQ ID NO: 2802 - protein, 68 aa, Klebsiella pneumoniae
MSNDEVLKIKDVATLLKVGEKTVYSMAQTGELPAFKVRGQWRFSRKDIDAWIEQQKHTTKDFGEGNTK

SEQ ID NO: 2803 - DNA, 4167 bp, Citrobacter koseri
atggcgaaggtcatacccatcgggcaacccgcaaacgaatctgaacgccaggccatcggtttccttcgggatcatctgcccgatggctggttgatcttccacaacttcgagatgcgtcaaggggaggtggtgttcgaaatcgacatcgccatcctagcgcctcacgcggtgtatctggtggatgtcaaagggacgcggggcaacatcgatgtgtatggctccaagtggtatcccgaggggaggcaaaaatttcactctcctctggcaaagctgcgcaaccacgccaaggtgatgagcaccttactggctgatagcaataaaggaataatcgagttacgtaaagtgcatgtacatgcggttgtattacttacagcagatgatgcccaactgtatgatcctgctggcatcgatagcccggatgtgactgactacaagcgctgcttaaaattctttactgacaagagcaaaatcccgagccaccgtctttctgatattcgttcttatcactcacatattgataaagccattcaaggcagagccaaaccaaaatcagctccacctgtgtttggaagttggctggttatagaaaaacttggtggcacagaccgttacaccgagtatcgggcaaagcacaatttattgggtacgaaggcaggtcaggtccgcctaagagtttatcgcgcagacccctatttagaggaagccgcccgcaaagaagaactaaaaaaaatcagtaatgcttttgtggctgtccagcacatgagtgcccattcgaatgtattggctgttcgtgatctgattcaatctgacgatggtaatgaaattactttggtgaccgatgatatttcaggtcaagcgctgcgtcagcacttaaaaaagcctacttttgcgctcacaacagatcaaaaataccaagtgatcaaaggtgtgctttctgcattggatcacgcacatcaacatcaggtcattcatcgaaacctcacaccagatgcgattctcatcacgaaagggggtatagctcgcatcaccgatttcgactttgctcgggtaggtaaaaaccgatcgacgtcagaaacgattgctaaccaaattaccgaagatctcgattcggcttatcgcgctcccgaattagtgatatccgagcaaaagtctgagccgaaagaggcctctatcgcttctgatttattttctgcgggcttggtattttacgagctgctgactggtgagttgccttacgagaatattgatcaaatgatcgaagccgatggcaaattccccatcaaaccctcggagcacaaacctgatttatccaaggggattgacgcgtggttgcaaaccttttgtgagttcgatcctgaagatcgttttaccagtgctgctatagctaaaaggcaatttgaagagctgatattgcccgaaggtaaaaatgaacaaagtgaaaaaaaaccttatgcaccagcttttgacattcctgatgacctaaccaacctgcctgtcgattttgtattagctgagcgtttcagcgtgcaaaggaaactcggcagcggtggctttggggtggtctataaagtatttgatgctttaggcgatgtagttcgtgttatcaaacttgtgactaaagaccgtcgtagcgtttatgagcgcctgcgccgcgaatataagacactcaccagtctgccagatcatccacatgtcgttaaggttatttgggccgatcgaatggctgattcaaatcaaactccttatatcgtctttgagtatgtggaaggcttggacgtgtccgatctgatcgatactgaagccttggcgttggatgatgctgttcgtattgtacgcgaagcagccgaaggtttagcgcatctccataaacatggtatttatcatcaggacgttaaaccctctaatttgctatggactgataagggtgttcgtatcattgatttcaatgtcgcggtatccgaaagtgacgaggctcagggaggtggtggcactcgccgctacctgccgccggattatgattacaattccgagccggatgcttctggtcgggtagatcgcgacatctatgcgttgggtatcaccttctacgagtgcctgaccagcaagtatccgttcgacgatcccacgccgccgatcaaggctcaacccaaggaccccaagcagttcaaaggctgtgccgacctcagctcgtcattggtgaacattctggtgaagatgatcgcgccggagcgcaaggagcgcttcacttcagtcgatgagttcttgactgccatggctgaggtcaagcgtctgcgctcggtgctgaccaccggcgagattggagccggccccaaggtggtatctaggctgggcttcgagctgaccaagcccaatagcaacccctttgtcacccatctgctgaccctctacagccagagccaagtatccaacgcgggaacccgtggcctcgacgaagttggtaaggccacctacgtgccgacatatctggacgaaaagcttaagcccgccttgctcaaaggcgagtttaagctcgtgatcattagcggtaacgcaggtgatggcaagaccgcctttattcagcaggttgagtcctttgccgagagcaagggcgcgcagatgcaacgtggcgcaaatggagctgtgttccagatcaaggggcatacctacctgagtaactatgacggtagccaggatgaaggcgatgagcgaaacgatgctgtgttgcggaaattctttgctcccttcgcgggtaaggatgcctctagttggcccgagaatcagactcgcctaatagccattaacgaggggcgactagtcgattttttcctagagcatgaagaggaatatccgttgctcgccaggcagatccaacagggtttggtcggggccgttccggaaggcggtatagcgatcatcaaccttaatttgcgctcggtagttgctgaccccgaagaaagtcagtcttcgattttggagaggctgattgcccgcatgacacaacaggaatactggcaagcctgcgagaagtgtgacatcaagggcaagtgttttgcttaccataatgcccggactttccaggatccggttgccggtcccaaggtgatcgaacgtctgaagatgctctataccattactcaccttcgcgggaggttgcatatcactatgcgcgacctacggtcggcgttagccttcatgttagtgggcacccaagattgtgacggtattcaccagctttatcataccggtggtgaagaggcccaaaaccgcatcctggatggattctatttcaactcgtggcttggtggggaaaaaggctccaatgaccgacttattgctctgctgcgcgagatcgacattgctgaagtcagcaaccctgatctggaccgcgagttaggcttcctccatcccagggctaaggctatgagtcgtttttcgtttgcagaacgagctggatatgataatgaactggttgaagcgctgtttgacagtctgcctcgtgattactcatcgaaaaatcgtgcccgattgatctccagacatcggaattacctctcacatatgcgacgtcgccatttcttcgaacgaagggatatggggtggaaggagatgcttccatatgaaagcatcgatcccttcttggtcttcacgcagcgggcaggtacaaaaagcaacgatgaggtgaccgcaattctccgcgcaatcaaccgaggcgaaggtttaagcgacccagcgaggttaggtaaccagttggcactgcgtgttcgccaagtggataaaggtaccattcgcagttaccggcttttcgacggtatccatttttcgcttcgtaccgaacaggagaccgcgtctcatcctttcctcgagtgcctgtctcaggcgctggtcctcctttatgactccggcgaagggcacaaggccagcctgcgaatcaatctcgatatatatgaaatgctgatgcgtcttaacgacggttaccgaccaagtgtagaagagcaagaaggatttttgttgagtttgtccgtcttcaagaatttgttggcttctgtaccttacaacgaagtattgttaaccaaggctggccacaaattttacgagatccgtcgagaacaagatggacggctagtaatggaagcatctgaaaagggggccgaatacaatgtcaattaa

SEQ ID NO: 2804 - protein, 1388 aa, Citrobacter koseri
MAKVIPIGQPANESERQAIGFLRDHLPDGWLIFHNFEMRQGEVVFEIDIAILAPHAVYLVDVKGTRGNIDVYGSKWYPEGRQKFHSPLAKLRNHAKVMSTLLADSNKGIIELRKVHVHAVVLLTADDAQLYDPAGIDSPDVTDYKRCLKFFTDKSKIPSHRLSDIRSYHSHIDKAIQGRAKPKSAPPVFGSWLVIEKLGGTDRYTEYRAKHNLLGTKAGQVRLRVYRADPYLEEAARKEELKKISNAFVAVQHMSAHSNVLAVRDLIQSDDGNEITLVTDDISGQALRQHLKKPTFALTTDQKYQVIKGVLSALDHAHQHQVIHRNLTPDAILITKGGIARITDFDFARVGKNRSTSETIANQITEDLDSAYRAPELVISEQKSEPKEASIASDLFSAGLVFYELLTGELPYENIDQMIEADGKFPIKPSEHKPDLSKGIDAWLQTFCEFDPEDRFTSAAIAKRQFEELILPEGKNEQSEKKPYAPAFDIPDDLTNLPVDFVLAERFSVQRKLGSGGFGVVYKVFDALGDVVRVIKLVTKDRRSVYERLRREYKTLTSLPDHPHVVKVIWADRMADSNQTPYIVFEYVEGLDVSDLIDTEALALDDAVRIVREAAEGLAHLHKHGIYHQDVKPSNLLWTDKGVRIIDFNVAVSESDEAQGGGGTRRYLPPDYDYNSEPDASGRVDRDIYALGITFYECLTSKYPFDDPTPPIKAQPKDPKQFKGCADLSSSLVNILVKMIAPERKERFTSVDEFLTAMAEVKRLRSVLTTGEIGAGPKVVSRLGFELTKPNSNPFVTHLLTLYSQSQVSNAGTRGLDEVGKATYVPTYLDEKLKPALLKGEFKLVIISGNAGDGKTAFIQQVESFAESKGAQMQRGANGAVFQIKGHTYLSNYDGSQDEGDERNDAVLRKFFAPFAGKDASSWPENQTRLIAINEGRLVDFFLEHEEEYPLLARQIQQGLVGAVPEGGIAIINLNLRSVVADPEESQSSILERLIARMTQQEYWQACEKCDIKGKCFAYHNARTFQDPVAGPKVIERLKMLYTITHLRGRLHITMRDLRSALAFMLVGTQDCDGIHQLYHTGGEEAQNRILDGFYFNSWLGGEKGSNDRLIALLREIDIAEVSNPDLDRELGFLHPRAKAMSRFSFAERAGYDNELVEALFDSLPRDYSSKNRARLISRHRNYLSHMRRRHFFERRDMGWKEMLPYESIDPFLVFTQRAGTKSNDEVTAILRAINRGEGLSDPARLGNQLALRVRQVDKGTIRSYRLFDGIHFSLRTEQETASHPFLECLSQALVLLYDSGEGHKASLRINLDIYEMLMRLNDGYRPSVEEQEGFLLSLSVFKNLLASVPYNEVLLTKAGHKFYEIRREQDGRLVMEASEKGAEYNVN

SEQ ID NO: 2805 - DNA, 1683 bp, Escherichia coli
atgtcaattaaaggccgtgacaaagaatttcgaatcccgaaagtttcttatctcgattttaaacatattgagatggatcgcgtactcaccatgttgtttccacgattgaaatacgatggttatggtagtcgcagacctcctcgcggtggcgatctttcagttgaggagtttctcgaagatttccttgaacatcccgagtggtttgctggtttcgatcaaaaccctgacattgttcgagcctggattgaaacagatcttatggatctagtgaatagaggtaaaagcaaccaggctctagctgcaccacggcctttgcatggcaatacctataagtttcgtaacgcgaagcatacccgagattacggcgctgcagagcaaatctactggatgctcttctatgcccgcaaaggtaagggccaagcggcgcgagatgccttgaagcgtttcttcttcccggggatcgacctggtgacggaccgttacgatcccaacgcttccgtggatgtggaaacgcaggccatcttgcgattagaccaacaggttacgcaggatatgaaggattccaaggagcccgcacgtttccaacctctgtgtatcgggcaggccgatattttggcagacgatattctgcgtttactcgcctatgagccttatatcccgcgctcggtgttggttgactatctcaaaactttgatggctttccatctggcactatatcacctcaaactactgcaaatgctgcccaagctggtgaaacagcgctcaggtaacgatctctgcaccgccagggaatgcccgatcaacccgggtctcgacaatgctctggaaggttgcccttaccgcttggcgttgatagtagatatgggggacgtcaacaatccgcacatggttgagttagctcgaaaatccactgaccggctctatcgtcagatacctgcttttgtgcaggccaattttgtcgtcaagaaactcgatgaaatggcggaatacctgagcaaaaaaactggtaaattggctcctcccggaggcggtgtgttcactgttagtgatctgatatccctgctgaagcccgaacacgacaccgagcgtcaagcctacttcaaattccgcttggcgagcctaattgaagaatcggcctccaggaatgaggatttagacccagagatcagggacgtcaccgccatgggcttgggtgaattcgattccttcattgaaatactgatggcctatcgaggtaaatatcaccgccaatacatcactgagtgcctggattctcttctgctgaagaataaagaaagtgggcttttggctcaggcccggactaagggaagcccacgtcgatttgtgttaggaagcaagctgctcgaagtgctcctccaggtagctgtacttacccaagacggcgggcgttttgtgacccacgaggttcgcatcgaagaattgttagcctttttaaggaaccgctacggtctttacatcgaccagttaccagaaggaaccatagctaacagcagcatactagacaaacgtgccctgcgtcttaatctcgaagccttcaagcgccgccttcgtgaaactgggttctaccaggacttgtcggatgcttatgtaacccaaaaagtatcgccccgatatgcaattgaaagatttgatagaactgataagaatgggagacacacatga

SEQ ID NO: 2806 - protein, 560 aa, Escherichia coli
MSIKGRDKEFRIPKVSYLDFKHIEMDRVLTMLFPRLKYDGYGSRRPPRGGDLSVEEFLEDFLEHPEWFAGFDQNPDIVRAWIETDLMDLVNRGKSNQALAAPRPLHGNTYKFRNAKHTRDYGAAEQIYWMLFYARKGKGQAARDALKRFFFPGIDLVTDRYDPNASVDVETQAILRLDQQVTQDMKDSKEPARFQPLCIGQADILADDILRLLAYEPYIPRSVLVDYLKTLMAFHLALYHLKLLQMLPKLVKQRSGNDLCTARECPINPGLDNALEGCPYRLALIVDMGDVNNPHMVELARKSTDRLYRQIPAFVQANFVVKKLDEMAEYLSKKTGKLAPPGGGVFTVSDLISLLKPEHDTERQAYFKFRLASLIEESASRNEDLDPEIRDVTAMGLGEFDSFIEILMAYRGKYHRQYITECLDSLLLKNKESGLLAQARTKGSPRRFVLGSKLLEVLLQVAVLTQDGGRFVTHEVRIEELLAFLRNRYGLYIDQLPEGTIANSSILDKRALRLNLEAFKRRLRETGFYQDLSDAYVTQKVSPRYAIERFDRTDKNGRHT

SEQ ID NO: 2807 - DNA, 5454 bp, Citrobacter koseri
atgagtagcgcgttcataaagcttccacaggataaattgaatgcggcgttggctggagtgctgtgtcctcgtatcgaagcgatcctgagtgatcgtggcccaggccactgtgtgcgggtcactgaccttgatgacgaagttatggagtcagtatgctgggaacttaggcgaatctggtctgacgggaacatatttatactcggcagtcatgaccaagaaggcatgcctttccgagtaacttccaccaagttggtggaactgcgtaatcctgacgcgaacggcgagctgcgccagcctttgctagtgttcataccgacctcgctccgtactagtgctgaggattcttttggcgtggcgacctttgaggaacttaccttcaccgatatctacgaggatctgatcgaatcgctgtttgaccggctcccggcaacgctggctagctatgttcgcgatcttttgggtattctcaccgaggaggaatggctgtttgcagacgatgtttctcgcgtgaggtatctacttaccgcgctcgaaaatgggattgatggcgaaacgcttggggccagtctgtatgaattggcgttgattccggacttcaagctctttgccgatccgggcatggtcattggaaaaattctccgtaatcttgttagcgtccgcagtttgataacctcgcacaagtcggttcgtggtcgtattgctgatcttgggctcagtgataaggcattggagtcgcgtctattcacctattttgaaaaacacgatgtccatgagtcagaatcctggacgccacccattgcgacagacaagagttggtggagcatttctttcgataaatggacgttcaaagaagagctatcactggacaaggttcttctgactgtgttggaaaccgacttgccggtcgttgcggatgatgagaccgacgatcaactcagtggcctcatcgggcaacaggttctggtaccgaatgaccgtcgtaaaatgaacgtggtgtttgaggttaatcctcaccccggtaaggtcagtgggcttgaccattttatggtgcaaatcatttcacagaatgacggcccggtaggaaagtctaaaaaggtaaaagtatggacgccgaaccgcctgcaatgtactaccagtctggctaaactcaataaaatcgaattcgaggaaggatggcatttcatccgtgtaatgccttggactgctgatggcgacccgattccgctggaagcggattccgcctccgagggtgctaagcgctcttacgagagcgagcctttctacgtcctgcccggtggcaacattgaagaagagcccccccaacgtgccattcctattgagcagagcctggaacatgcacttttccgactgcaattgacagccctgggcgatgaacgtgatcccgatgatatagctatcagtggtgtcgtctggtccgagggcggtcgtaccaagaagacctcccgcctagaaaccttgcacgcaaaattcggtcgtgagggggctgttcagattccgctatcacgtacgctcaaaatcattgagcaacgcatcttagcaaagcctaagcacccgtcaggctggcgaatgcagatcaacatggataccgctgagccgccctccgaggctggactcatgctgccctcttctgcagcgatggcatctttcctggctgcccgtgaagaattttttgcagcggtgcgtaaagacactgctgaactaatcatgcaggggctgttgtttcaggactctgaagaggaatgcctcgcgtatgctgaaagctatcttgacttgatcaggagtcttatccgccaggctgagatgacttctggtgtcgagcgccagcaacacctgcaatcgctaagaaacgtactggccgttgattcaatccatgtcatcctgaccgacttccgtggtcggcatcgtgaggctgttttagtctccccaacccatccgctccgagccttgtggctgaacagttgggtcactctaggtaaggattggatcgggaagatcaagtcaggtgggaaagaatacattcctcacgtccgttccgccctattagatggccttgtgccctctgcctatcctgttggcattcctgtagaagatggtcgtatcttcacgccggtggacaatctaaatgcgttttgggcgctatacgctccaacaaccgaggataattctcgtggcctgatggcggagatctgttcggcacttggcttggtcgagccttctacggcgggaactgatatttccggaaaggtcattgcggataagattgagcgctatctctctcagcatccttatgtgagagagctatcgctgaatatctttaaccccggatctggttcgttaatagctgaggctctgatagcgcttcaacagaaacgtgagtatgtcgatttgcgctacgacatacggctctttacctccgagcctgactcgccggttttgggtgaagcgcttgaatccatagctcgtcccggagcgacggtgaatgaggctgcagacgcgtttgcggcatcaactggcaatcatctgttttccaagctgaacttggccaagcacgcgctgaaggaattccatgcaaattccaaggattttccagcgcacatcagcgttcttttggatgtgttccccgccgaggagctttccatttccgagaggccgatgggggtgactccgttgtatgggttgatacagggttttgacaccgaatttgttgacgacgattcgggtaccttctggaataagcggccgattatagggcgctccttcggtgcgaacaaccacgctgcgtgtttcgacttgctgtcgtcgctgagccgtcacctctgttttgcaacctcagcggttgctacttctggcgctagtttcaaggccgtacccgttgtaacccttggcctcgatgtggcccaacgagaactgatctacgaggttcaccagatcagcgattgggtgttcactatcgaccgaaatatggggattgagtttttcgaccatggcggtcggaagaacagaccggattatctgattgactatgtgccaggagccagctcccaggcgacacataatctgatgatctcctcgcgctcgaacgatgagttggaggccatgctgaagccggtgctgcttgagcacgatttgtccgccgacggtgagcagtcggttcagatactcgcgaacctgcgctcgctttctggtcagcttgccctgaaactgatttccgcacgtacacaacaggcggaggctcttggtctggctctggcgaggctctatctcgaatatcaaggcgcgttaaacaatcagatcattgtgccattagacgcacacacggacctctaccgctcaagcggtgagtcagacgatgttaacgatgctatcagcctacaacgtaccgacttgggtttgtttgatttagatttaaacaccaggacgatcacctgcaatctggttgaggtgaagtgttattcgcaggttggtgcctttgcagctttcaaccaactgaaggaacggatctccgcccagataaatcagagtgagcgcatcctccagcgtcactttgacccggctctgaaaaaaccggatcggccggataggttgctcaagagccgggagttggctcagattcttaggttctatctggaacgctcactgcgttatgggatctttgaagagaccgccgcgcaggaagcgaaaggactactagaatccattgagcagggctactcgcttcaattcaggcggtgcgctttgattttcgactttgacaagtctgggacagaatctccggacaacgaggtaggcatcgaattccatcgcatcggaaaggatctcattcatgctttgctggagaactgccgcaagcctgtgtctgttgagagtgaggaagtactgacctctcctactctgagcgaacagttcattctgaatgtgccgaagctcgagactgccgctttcatcgcccctaatagagtccgctctacatcttggacggtggatgagctcttggtcgatgagccggagactccagtcacccagctaacacctcctgtctcagaggaaaccacggcgcttgttcaaaaggaagaacgggcgaaacccgtcgagcaagcacctaaacctaccaccatcgcgcccaaacaagaaaaagacgacgaacaattcgccgccgttgatgtggaactggaacaaggtgttcaactcgagcttgaagtgcagaagcatctgacacccgagcctcaagctgaagtcagctacgacatcatgctgggcgttaatggtgattcaccgcagtacggattgctcggagaggtttccggccgaaaaatcgcgctggacctcaatcatacccacacgatcagtctctttggggttcagggtggcggaaagagctacacccttggaacagccattgagatggcctccatgccgattcagcacatcaatgtgctgccaagcccgctcgccacagtcattttccattatagcccgacgcaggattatgcgccggagtttacctcgatgatcaatgccaactcggtagaggatgagatctgtatccttcgagagcgttacaaggccaacccggaagccctgaacgatgtcttgattctaacccctgccaacaaggtagacgagcgtagggccgagttcccggatatcgaggttaagccgattgctttttctgcctctgaactcaaggcggcacactggaaattcctaatgggagcgattggtagccagagcatgtatatgcgccaaatcaatctcatcatgagggggctgcgggataacctgaccttggattctctgcgagcaggtatcgataactctggtttatccgatcatctaaaggagctggcccagacgcgcctactatttgcaagcgaatatatcgatgataaccagcgtctccaggatctgattcgtccaggccggttgatcatcgtagatctgcgagatgaatacatcgaaaaggacgaggcgctcggtttgttcgtggtgatgctgcaggttttctcagaagcaacttaccaggggagcgccttcaataagctggtggttttcgatgaagctcacaaatatatcgaaaatgatgacttggtttctggccttgtcgaggttgtccgtgagatgcggcacaagggaacaagcattatggtcgcctctcaggaccctccatcagtcccgatctctctgatcgagttgtcttcacagatcatcatgcataaattcaactcacccgcatggttgaaacacatccagaaggcgaatgccgctcttggtgagctgacctccgacaagatgagccatcttggaaccggcgaagcctatgtatggtcgagcaaggcctcggacgactcattcacccggggcgctgtgaagatcaagtgccgtcctcgcattacccagcatggtggcagtaccaaaacggccgtgggtcggtag

SEQ ID NO: 2808 - protein, 1817 aa, Citrobacter koseri
MSSAFIKLPQDKLNAALAGVLCPRIEAILSDRGPGHCVRVTDLDDEVMESVCWELRRIWSDGNIFILGSHDQEGMPFRVTSTKLVELRNPDANGELRQPLLVFIPTSLRTSAEDSFGVATFEELTFTDIYEDLIESLFDRLPATLASYVRDLLGILTEEEWLFADDVSRVRYLLTALENGIDGETLGASLYELALIPDFKLFADPGMVIGKILRNLVSVRSLITSHKSVRGRIADLGLSDKALESRLFTYFEKHDVHESESWTPPIATDKSWWSISFDKWTFKEELSLDKVLLTVLETDLPVVADDETDDQLSGLIGQQVLVPNDRRKMNVVFEVNPHPGKVSGLDHFMVQIISQNDGPVGKSKKVKVWTPNRLQCTTSLAKLNKIEFEEGWHFIRVMPWTADGDPIPLEADSASEGAKRSYESEPFYVLPGGNIEEEPPQRAIPIEQSLEHALFRLQLTALGDERDPDDIAISGVVWSEGGRTKKTSRLETLHAKFGREGAVQIPLSRTLKIIEQRILAKPKHPSGWRMQINMDTAEPPSEAGLMLPSSAAMASFLAAREEFFAAVRKDTAELIMQGLLFQDSEEECLAYAESYLDLIRSLIRQAEMTSGVERQQHLQSLRNVLAVDSIHVILTDFRGRHREAVLVSPTHPLRALWLNSWVTLGKDWIGKIKSGGKEYIPHVRSALLDGLVPSAYPVGIPVEDGRIFTPVDNLNAFWALYAPTTEDNSRGLMAEICSALGLVEPSTAGTDISGKVIADKIERYLSQHPYVRELSLNIFNPGSGSLIAEALIALQQKREYVDLRYDIRLFTSEPDSPVLGEALESIARPGATVNEAADAFAASTGNHLFSKLNLAKHALKEFHANSKDFPAHISVLLDVFPAEELSISERPMGVTPLYGLIQGFDTEFVDDDSGTFWNKRPIIGRSFGANNHAACFDLLSSLSRHLCFATSAVATSGASFKAVPVVTLGLDVAQRELIYEVHQISDWVFTIDRNMGIEFFDHGGRKNRPDYLIDYVPGASSQATHNLMISSRSNDELEAMLKPVLLEHDLSADGEQSVQILANLRSLSGQLALKLISARTQQAEALGLALARLYLEYQGALNNQIIVPLDAHTDLYRSSGESDDVNDAISLQRTDLGLFDLDLNTRTITCNLVEVKCYSQVGAFAAFNQLKERISAQINQSERILQRHFDPALKKPDRPDRLLKSRELAQILRFYLERSLRYGIFEETAAQEAKGLLESIEQGYSLQFRRCALIFDFDKSGTESPDNEVGIEFHRIGKDLIHALLENCRKPVSVESEEVLTSPTLSEQFILNVPKLETAAFIAPNRVRSTSWTVDELLVDEPETPVTQLTPPVSEETTALVQKEERAKPVEQAPKPTTIAPKQEKDDEQFAAVDVELEQGVQLELEVQKHLTPEPQAEVSYDIMLGVNGDSPQYGLLGEVSGRKIALDLNHTHTISLFGVQGGGKSYTLGTAIEMASMPIQHINVLPSPLATVIFHYSPTQDYAPEFTSMINANSVEDEICILRERYKANPEALNDVLILTPANKVDERRAEFPDIEVKPIAFSASELKAAHWKFLMGAIGSQSMYMRQINLIMRGLRDNLTLDSLRAGIDNSGLSDHLKELAQTRLLFASEYIDDNQRLQDLIRPGRLIIVDLRDEYIEKDEALGLFVVMLQVFSEATYQGSAFNKLVVFDEAHKYIENDDLVSGLVEVVREMRHKGTSIMVASQDPPSVPISLIELSSQIIMHKFNSPAWLKHIQKANAALGELTSDKMSHLGTGEAYVWSSKASDDSFTRGAVKIKCRPRITQHGGSTKTAVGR

SEQ ID NO: 2809 - DNA, 252 bp, Klebsiella oxytoca
atgaagccggaagcctatccagcagaaatgctgtcaaaatatcggaaactcactgagccgggttcagcgccggccaccacaacccaatccctctaccttgggaccattacggctaccgcgccgtcgcttttacccttggtatttcttcccgccttgagcgggttttttattttcagggtcgcgggaatcaccctcgacgctttgttggtaaatcagcccgacggccctgaacattttactgactacagatag

SEQ ID NO: 2810 - protein, 83 aa, Klebsiella oxytoca
MKPEAYPAEMLSKYRKLTEPGSAPATTTQSLYLGTITATAPSLLPLVFLPALSGFFIFRVAGITLDALLVNQPDGPEHFTDYR

SEQ ID NO: 2811 - DNA, 765 bp, Klebsiella pneumoniae
atgaatctttcactgaaaaataaagttgcgctggtcaccggtgccgcgtccggtattggctttgcaactgcacgagcttatgccgaagcgggcgctgccgttgtgttagcggatattaattcagagctggtaaataaggccgcaaatgatttgatttcccgtggttttgaagctaaatcgtttacctgtaatgcggcaaaccttgatgaagtcgaagcgatggttcagttcactgtttcaacttacgtccatctggatatcgcttttaataatgccggtgtacagaataaacttgttgaaatcgcggacgccaccgtggaggactttgatcgcgttaatgccgtgaacctccggggcgtgtggggatgcatgaagtatgaacttcagcagatgcgcaagcaggaaagtggtgtcatcgttaactgttcttctatcggcggaattgtgggcggagcagaacgtgcaaactaccacgccgcgaagcacggtgtgcttggcctgaccaagagtgccgcacttgaatacgccggccggaacatccgtgtgaatgcagtttgtccgggtcttatctggacgccaatggtcgatgcgatggtcgcttcgggccagaaggaagctctggaagccatggtgaaagccgttccgttgcagcgtcatggtaatccggaagaaatcgccgatgcggtcctctggttgtccagtgatgcgtcgtcctacgtaacaggtcagtcaatttcgattgatggtggcctgaccatgcgctaa

SEQ ID NO: 2812 - protein, 254 aa, Klebsiella pneumoniae
MNLSLKNKVALVTGAASGIGFATARAYAEAGAAVVLADINSELVNKAANDLISRGFEAKSFTCNAANLDEVEAMVQFTVSTYVHLDIAFNNAGVQNKLVEIADATVEDFDRVNAVNLRGVWGCMKYELQQMRKQESGVIVNCSSIGGIVGGAERANYHAAKHGVLGLTKSAALEYAGRNIRVNAVCPGLIWTPMVDAMVASGQKEALEAMVKAVPLQRHGNPEEIADAVLWLSSDASSYVTGQSISIDGGLTMR

SEQ ID NO: 2813 - DNA, 1023 bp, Klebsiella pneumoniae
atgtccttaattaagatttctcttttgtgtgcttcaatgctgatggcaggctctgttttggctgcacaaaaaatcccttcaactgttgcggagggcgtcaatgttttggggtcgcaaaaagtgacgtttaaaaatggcagcatcaccatggcgggcaatttatattttccgcctgattatgacagcgccaggaaatatccggcgatcgtagtctctcatccctggggcggtgtgaaagaacagacgtccgggctttatgcgcaacaactggcaaagcgcggatttattactctggcttacgatgcctcgcattatggtgaaagcggaggattaccgcgtgacctggaaaatccgtccgatcgcgtacaggatatccgcagcgccgtaggctatcttgccagcctgccgcaggttgatgccagccgcattggtaccttggggatctgtgccggtggaggctatacgctgcacgaagcgcagaatgatttacgcgtcagggctgttgccggtgtcgtcacttacgacattggcgatgcgacccgcaacggtattgaaggcctgccggttacggcaagcgacagaacgaagttaatgcaaagcgtggatgaacaactgaacaaagaggccagcggtgcaccggtgctggttcagcagttgctgccttcccgggataagttaaatgccagtacgcctaactttgtccgggaggcgaccaattattacctgacgccgagaggcgcgcatccgaatgccaataaccgttatgtcgtcacgagcaccggactccatatggcctactatccactggagcatatggatttgatttccccccgtccggtgctgttaattgccggagaaaaagctgaaacaagaaaattcagccagcaagcctatgacagagcgaaagagccgaaggagctggttattattcctggcgcttcacattttgatttatatgacaagccaaaatttgttaaccctgccttaaataaactggcagagttctttagcaaaaacctttaa

SEQ ID NO: 2814 - protein, 340 aa, Klebsiella pneumoniae
MSLIKISLLCASMLMAGSVLAAQKIPSTVAEGVNVLGSQKVTFKNGSITMAGNLYFPPDYDSARKYPAIVVSHPWGGVKEQTSGLYAQQLAKRGFITLAYDASHYGESGGLPRDLENPSDRVQDIRSAVGYLASLPQVDASRIGTLGICAGGGYTLHEAQNDLRVRAVAGVVTYDIGDATRNGIEGLPVTASDRTKLMQSVDEQLNKEASGAPVLVQQLLPSRDKLNASTPNFVREATNYYLTPRGAHPNANNRYVVTSTGLHMAYYPLEHMDLISPRPVLLIAGEKAETRKFSQQAYDRAKEPKELVIIPGASHFDLYDKPKFVNPALNKLAEFFSKNL

SEQ ID NO: 2815 - DNA, 126 bp, Klebsiella pneumoniae
atgaattattttatactacatctactgagcaatcaggtggaggaagtcatggcggtggcacgacagtggttaaagatagaatattataccaatgtagatgacttctttaatacaatcaaaaaataa

SEQ ID NO: 2816 - protein, 41 aa, Klebsiella pneumoniae
MNYFILHLLSNQVEEVMAVARQWLKIEYYTNVDDFFNTIKK

SEQ ID NO: 2817 - DNA, 1050 bp, Citrobacter koseri
atggcccgtgccggagtcacttatcacgatatcgctaaagccgctgaagccattaaaacgcaaggccaggaacccacggtggatcgggtgcgcgaacacctgggcaccggcagcaaaagcaccatcgcgccattgctcaagcgttggcggtcagacaatggggaggcggccgatgtcagtgggctgccgaacgacctcgtcgaggtggtaaagtccctgcatgagcgggtacagcagatggccgaccaccgtatcgaacaagctcgccaggaattcgagactttaaaggaagaactccgcaaagagttgacccatgccgacaacaccatggcgcaactaactgcccgacaacgggacctggagaaccagaccgaacggctgagcaaagaaaaaagcgagcaaagtcggtccctggaagacgcgcgtgtcagcctggccaaggccgagtcccagcgggacgaagctgctgcacggattgttgaattgaaggagagcgttgcggaactcaaacaagaaaataaggatatccgcgatcatttcgaacattaccagcagcgtactgccgaagaccgccagcaggagcgcgaacaattccgttcagttaaccaggggctgaacgatcagatccaggatctgcaacaccggctcgcccaggctgagtcgagagcgtcagagctgtttgacgccaatgtgcagttacaacgacatgccgatgaattaaaacgggccaatggggcgctaaatagcgacgtgaagggaaagatagaagatgtccagaacctgaaacacgagcttgaagaagccgtggcaaagtgccgggaataccagcatcaaaatgatcatttggcgcaaaacatggccgtgctcaccactcagaaagctgatgttgataagcaagtggccgtcttatcccaaacactggagaccacaaaaaccgaattgaaaaccacccaggataaagcggcgcttctgatcgacgagaataaagtcattcttcaggaaaaagccgtgatccaaggtcaatttaaacagctccaaagttcgctgtag

SEQ ID NO: 2818 - protein, 349 aa, Citrobacter koseri
MARAGVTYHDIAKAAEAIKTQGQEPTVDRVREHLGTGSKSTIAPLLKRWRSDNGEAADVSGLPNDLVEVVKSLHERVQQMADHRIEQARQEFETLKEELRKELTHADNTMAQLTARQRDLENQTERLSKEKSEQSRSLEDARVSLAKAESQRDEAAARIVELKESVAELKQENKDIRDHFEHYQQRTAEDRQQEREQFRSVNQGLNDQIQDLQHRLAQAESRASELFDANVQLQRHADELKRANGALNSDVKGKIEDVQNLKHELEEAVAKCREYQHQNDHLAQNMAVLTTQKADVDKQVAVLSQTLETTKTELKTTQDKAALLIDENKVILQEKAVIQGQFKQLQSSL

SEQ ID NO: 2819 - DNA, 333 bp, Citrobacter koseri
atgaatctgctgtcaattttcacaatatttgtaattactgcggttgccgaaattgtaggttgttatctgccgtggctggtactgaaacagaacaagtcggtatggttgttaattcctgctgcgctttcgctggcgttatttgcgtggctgttgacgcttcacccaacggcggcaggtcgcacttatgctgcctatgcgggcatatatctgggcgttgctctcctctggttgcgtattgttgacggagtggcgctcacccgttgggacatcgcgggggctttggtcgcattggtaggggttaccatcatcgttatacagccaacggccggttag

SEQ ID NO: 2820 - protein, 110 aa, Citrobacter koseri
MNLLSIFTIFVITAVAEIVGCYLPWLVLKQNKSVWLLIPAALSLALFAWLLTLHPTAAGRTYAAYAGIYLGVALLWLRIVDGVALTRWDIAGALVALVGVTIIVIQPTAG

SEQ ID NO: 2821 - DNA, 135 bp, Klebsiella pneumoniae
atgcatacagtctttgaaccgtatgttaaagttgatttatacgaattatttgtaatgttcatccttaactatataacgcatttcgatattatttataatttggttgacagatacttttcaattttattgagttaa

SEQ ID NO: 2822 - protein, 44 aa, Klebsiella pneumoniae
MHTVFEPYVKVDLYELFVMFILNYITHFDIIYNLVDRYFSILLS

SEQ ID NO: 2823 - DNA, 1410 bp, Escherichia coli
atggggcaagtgattatagatggctcagattatgaggaaatgaactctcctattttctggataaaaggctacaaaattaattatgatcaacaattattagttggtgagatattatcagcaacaatgggcggtgggtttacatttataggtccgtttcctagtagaaagaatcatatagttgttcttagaataggtaacactgataaagaaaatggacgtaatggtttctccaattgtaatatttcaatgtccaatgttcatataaaaagaggaacaattgggcttgaattaacatcttttgatgttttcttatgttccttttcgtattgtacatttgggccaggtagctataaaaacatttgcgtttcagatatatttgaccgtgaatctaataatgctggagaaaggatatcatttactgattgcgtaatctatggtggagggcaaggagctcatgtttttataagcgtaccaggatttaatatcgactttactaatgttagtttcgactattgtttcggtgactatatttatatagacgcttcttatactaagttacggattattaattgtcatatggagggattcgatggttatgttataaactcaagtgatacaaaaaaaattagtaattgtgtagtctctttattcaatacagacataatgagtacacttggtgatggtaatcatgttaagatggttaatgatacaataatttcggctaactctatatgtagacctttttttaatcattttaaaggggttcaagtagtattgaatcagtcgggtaatgttagccaagtcattccaccttttaatgaaaatattttttggatgaaccctaaggctaatggcgatctgaagattattaattatcaaggtgaacatcctaaacctatatctaaaaataaactaatgctgtgtattgagaattttaacgaggaaaaatattcctataccaattcatctacagttaatgcagaagttgaccatgatctttctctaaatttaagagtaataaataatgctgcgattgcaagttttattctaaatcaaactgaattgcttccctgtacccaattgcgttcatatgcagcagtattatttcttggtttttcaggtaaaaatgaaaccttaaaaagtaatcaacaattatatatagaaacacaatatatttggtttgattataatcagaagcaaattcttcaagaatctgttaatgtatcccttcaagatatgttaaagtcatttgatgaaatgttacctaatatttcaaaggtagatactcttccggtgtggccacttcaaaaacaagctcctccttgtgcatgttatttcaaagttagatggcacattgggaaaattgaaaatgctattcaccttaaaaaaatttttgtttgggaaatatag

SEQ ID NO: 2824 - protein, 469 aa, Escherichia coli
MGQVIIDGSDYEEMNSPIFWIKGYKINYDQQLLVGEILSATMGGGFTFIGPFPSRKNHIVVLRIGNTDKENGRNGFSNCNISMSNVHIKRGTIGLELTSFDVFLCSFSYCTFGPGSYKNICVSDIFDRESNNAGERISFTDCVIYGGGQGAHVFISVPGFNIDFTNVSFDYCFGDYIYIDASYTKLRIINCHMEGFDGYVINSSDTKKISNCVVSLFNTDIMSTLGDGNHVKMVNDTIISANSICRPFFNHFKGVQVVLNQSGNVSQVIPPFNENIFWMNPKANGDLKIINYQGEHPKPISKNKLMLCIENFNEEKYSYTNSSTVNAEVDHDLSLNLRVINNAAIASFILNQTELLPCTQLRSYAAVLFLGFSGKNETLKSNQQLYIETQYIWFDYNQKQILQESVNVSLQDMLKSFDEMLPNISKVDTLPVWPLQKQAPPCACYFKVRWHIGKIENAIHLKKIFVWEI

SEQ ID NO: 2825 - DNA, 2724 bp, Citrobacter koseri
atgacttttaaacccggtgaacgcgtcagccattttgaatttggccaaggtgttgttatctcggcagtgggtggctacgcccgtgtcttctttccccagggtgagcgacaagtacccgtcagcaccttggtggcggcacttagccataatgagcgcgtggtagccagcattggcagccatacagatagtgacacgaaagcctggctctcctggaaggcgcatgaattaccccttcaggattcagccagctcgctgacttcagccaagattgatttgctaccccaccaggtggtgctgactcatcgggttgccagcgcgagcccacgtcgctttctgattgccgatgaagtaggtttggggaaaaccattgaaacagcattagtgctgcgggaattggccagtcgtggcgagctaaaccgggctttaatggttgtgccggcaggtctggttaacaactggcaccgcgagctgaatgaagttttcaatttgaattttgaagtattcggccgcgaaggtgatgtcagcgaccgccgcagtaatgcgtttgctaaacataacctgctgattgctagcatcgacaccttaaagcgtccagcaagaatcaagaaaatactcgaagcaccccgttgggatttgattgtttttgatgaagcgcatcactgcactgcctataagcaaggtggcaaaacccgcaagacccagaactacaaattggcggaagccttacgtgaccacagtagggatatgattctgctttcggccacaccacaccagggcgatcattttcgtttctggaagctgattgatttgcttgaccccactttgttttccagtgaaacagagatggtggaagaacgtcaccgcctgaatccaatcatcttccgtcgcaccaaagccgacgcctgtaaagccgatggatccacgttgtttgctaggcgctgggtgcataccgaagccttttcaatgtcaggtcaggagcgcgatttctataacgccctgaatgaatacctgcgcgacggttttgctctggcgaagaagcaaggcggcaaaggaacggctctgggctttgtaatgacgatcttccaaaagattgcggcgtccagctttgcggcggtgcatcgcaccttgagacgaagactgttggccctgactgttcatgagggcttgatgcacgatgaaaacctcgacatcgacgccagagactttgcttttaatgaggcgaaagaacagattcgcgttgagttcgatttaggtcatgaccgtctttctgaccttgagatcgaccgtatattgaatgacatcaagcgtcgcctacttaaaaagatcaatgaagagcagctggccgctgtatccgatacgtttaccgatgagctggaaactgccgccgctgaagatgcggccatggatgctgtggcatacgccctgccagaagagcgattccgcattaaagaactactggggctgttcccttcagcccgtgaaactaaagtagataagctcattggggctttgggtgtgctgtggcaacaaaacccagaggaacgcattgtgatatttgccacctatctgggtacggttgaaatgctgggcgaccagattgaaaaagcgtatccaggccaaggtgtggttgtgcttaaaggtggtgatcacggaagtaaactcgcggcagaacggcgcttcaaacaggccaatggtcctcgcgtaatgatctgtacagccgccggtcgggaaggtatcaacctgcaacatgcacgggtgctgtttaactttgacctgccgtggaatccaatggatatggaacagcgcattggtcgtattcaccgctatggacagcgagatacagcgcaggtttataaccttgtgttgggtgacaccattgaaggtcgcattttcctgctactagatgaaaaactggaggagattgccaaggcgcttggtaaagtggatgaaaagggccaggtggaagaagaccttcgatcacaaattctaggccaattatctgagcaggtgaactatcagcaactttattcgcaggcactgcaagacccagagcttaaacggacccggctggagcttgaagcggctatggataatgcccgtactgctaaggatgcggtattcgaactattccaggacctagatggcttcagtttggatgactacgcatcactctcagatacaagggaatccatagacgatctgatccggtttatgcagaaggccttgccatacgaaggggaagctattgagattcgcggacaaaagcaatgggccctggtaaaagatggtctcgaacaaatgctgtttaccacggttcgagaagacgcgaccaattcggaaaaattgcatttgattggtttggatcatcccgtgattgcaaaacagctcgataaataccgcaatcttgatcctgaataccttggtttctattctagtgagctgaatgctggtgaaaccgtttctttatgggaagtaagggctgccaacgaaaaagggcacaatgttcactccatcatgaaacttgctgtcgattgcaatggtaaccggctacctcatttagaaaagcaaatagacgcagtgtttaaacctaagggaaagaaaggcgctcacgaagtagatttgcataaaattgaagccgtcttggagcgtgaacttcatcaccggaatatcgtgaaacctgagcagtctttctctgccaagctgatctgcttagcgtgtggttga

SEQ ID NO: 2826 - protein, 907 aa, Citrobacter koseri
MTFKPGERVSHFEFGQGVVISAVGGYARVFFPQGERQVPVSTLVAALSHNERVVASIGSHTDSDTKAWLSWKAHELPLQDSASSLTSAKIDLLPHQVVLTHRVASASPRRFLIADEVGLGKTIETALVLRELASRGELNRALMVVPAGLVNNWHRELNEVFNLNFEVFGREGDVSDRRSNAFAKHNLLIASIDTLKRPARIKKILEAPRWDLIVFDEAHHCTAYKQGGKTRKTQNYKLAEALRDHSRDMILLSATPHQGDHFRFWKLIDLLDPTLFSSETEMVEERHRLNPIIFRRTKADACKADGSTLFARRWVHTEAFSMSGQERDFYNALNEYLRDGFALAKKQGGKGTALGFVMTIFQKIAASSFAAVHRTLRRRLLALTVHEGLMHDENLDIDARDFAFNEAKEQIRVEFDLGHDRLSDLEIDRILNDIKRRLLKKINEEQLAAVSDTFTDELETAAAEDAAMDAVAYALPEERFRIKELLGLFPSARETKVDKLIGALGVLWQQNPEERIVIFATYLGTVEMLGDQIEKAYPGQGVVVLKGGDHGSKLAAERRFKQANGPRVMICTAAGREGINLQHARVLFNFDLPWNPMDMEQRIGRIHRYGQRDTAQVYNLVLGDTIEGRIFLLLDEKLEEIAKALGKVDEKGQVEEDLRSQILGQLSEQVNYQQLYSQALQDPELKRTRLELEAAMDNARTAKDAVFELFQDLDGFSLDDYASLSDTRESIDDLIRFMQKALPYEGEAIEIRGQKQWALVKDGLEQMLFTTVREDATNSEKLHLIGLDHPVIAKQLDKYRNLDPEYLGFYSSELNAGETVSLWEVRAANEKGHNVHSIMKLAVDCNGNRLPHLEKQIDAVFKPKGKKGAHEVDLHKIEAVLERELHHRNIVKPEQSFSAKLICLACG

SEQ ID NO: 2827 - DNA, 507 bp, Citrobacter koseri
atgagcgatgtgctgaccaacgacaaatggaagcgacgcggtgtctcagtgctttggtgtggcaaaacactggctgaattaaatgccgcaagtcaggtgatcagtctgcgtcagttcatcggctattacgaagcgggctggccggacgatatgcctctgctgaatgacgatggcttatacgtcgcagggttggacgtagccgtagacgctttatcaccagaagatgcactggaatggctggaatccgagatttacgaaatgatctacgactttcagaaccatgccgatgccgcgttgattttctggatgccggatcaggggcgctggaaggaagatctgaccaccagtacctacaactggtgcttggctggtaaatacgatgcgcaaatgttcccgttggggcaatgcatctggaacggcgcacaaaaggacgtgcgccggattgaatccgcttttggcggaaaaacgaacgaatggctgggtttatacctagagcggatcagctaa

SEQ ID NO: 2828 - protein, 168 aa, Citrobacter koseri
MSDVLTNDKWKRRGVSVLWCGKTLAELNAASQVISLRQFIGYYEAGWPDDMPLLNDDGLYVAGLDVAVDALSPEDALEWLESEIYEMIYDFQNHADAALIFWMPDQGRWKEDLTTSTYNWCLAGKYDAQMFPLGQCIWNGAQKDVRRIESAFGGKTNEWLGLYLERIS

SEQ ID NO: 2829 - DNA, 3264 bp, Klebsiella pneumoniae
atggcaactaaaaaaacgaaagcggaactaacgactgagttagtcgcagaagctgttggtgcgggtaaaaaggcgcagcttgaaacggttgatttttctgatcccaatcgccccctaacttgccttgaggttgattttcctattctaccaatcaaccagattgcgcaaatcgaaggcaacgcaggtaagccaatatatcaaatgagtaagtggtgggcacgccgtcgctccagtgtgttccgctcgatgttgattgcggctgcgactaaggctcctgaagagccagccgaggcagcaaaactggtatgggacaactactactccaatcatcaagataacaaagcttttaatgatctcaaggtcgctgacatcttcatgggtggtggtaccacgctggtcgaaggtgcccgactaggcatgcagatgacaggcaacgatctcaatccggttgcctggctggttgtaaagaacgaactggctgatgtcgatctgaacgaagtaaacaaactgtttgatcacatcgaacgggaagtaaaaccccagatcatgccgttttacgcctgtgaaggccctagcggtgaaaaaggcaaatggacacagcgttctactggcaaagtcatgggcaatgattttgatccgctggctctgacacctgaagaacgcaaagactacgtatacgaaggtccggaggttatttacaccttctgggctaagcatggcccctgtgctgctcccggttgcggacatcgtacgccattgatgacctccccagttgtggcggtgaagtctctctcggttaaaacctggcaagatgttgagtgccaacactgcggttcgagctttgatcttgagcgccaggaagcccgtatggctccagatgttccgctggtcgtaagcgattcagaagctccttacgccatcatggatgatgctgggaactatcaatgccctcattgccagcatcaatatcgtgatgaggcggcagcgcagaagggagagtcttcgcgcttactcaagaagatgagtaaaaataaaaaggttgatttgtctctgcttgttcatcctgattggctcaaaggttcttcaaaagcagacgaaaaaggaatatttggcggcacctcccttagtgaggtggaagcaacgcagcgttggaatctgcacagaacaaagacacttaagctgctggaagtacggggtaaattgccagaagaaattacctgccctgattcaggtttggtgataaacactcagcaaggaaccattcctaagaagtctaatttcacctgtcaggaaagcacttgcggtcgtcaacaagatgttctcgacagcattaaagcttctggccagaccggcccgatggctgcttacgtattacagtgttattcacctggacgtgatgcaacaggttcaccatacaatggccgctactttgctccagctgacagcaatgctgccaaaagacaaaatttggcggtatctgagtgggcgcaaaggaaaaattcggatttgcggggttattggcccgaatccgaattgccctatggatttatgacacaccatttgcaaggcggcgttcctaatcatggttttacgcactggaacaccatgtttaacccgcttcagcttctgattcatgcacaaattctcaaggctattgacacatcccatggcttcagcgattcaagcaaagagatcgtactgggtgcttttcagcaatatcttcgcaatcagaatctcttttgtttctgggatcgtggttacgacaagcttgttccaatgatgagtaacaataactttcaccctaagtcgaacattgtggaaaattccgttttttctagcttagggcgaggcaattgggattcgtgcagagcaaacaccttgaaaggtcttgaatggtgtaagcaaccatgggaaaccgtttctaacgagatgttaaccaatatgtccgccgacattggcaaattggtgagcggcaaaagctcaaaggccatgccaaacgatcctgtgttgccgggtaccttagtgacctgcggctcgtcgacggagttaaaacagtatgccgatcagtcgtatgatctcgttattaccgatccaccatttggtggcttgctgcactacgccgagttagcggatttcttctatgtgtggctacgtctgctgctgaaggataaatacccagaggtttatgctggggaatacacaccaaagacgctagaagctgtttctaacaaagcacgccatccagatgatccagatgcgttttataagcgcctgctgaccgaatgttggcgggaggcgaatcgcttgctgaaaccagggggcattttggcatttaccttccatcacagcgaagacgagccttggttggatgtattagagagcttatttgacgcaggttactacctggaagcaacgtatcctattcgcagtgatgaaactaaaggaaagggcgagtttggttccaagaccattgaatacgacattattcatgtatgccgtaagcgtactgaagcgcccagtaaaatcagctgggctcgcttgcgtcgcaagattcttgcagatgtgcgtcagttgcaagagttgttggaacatcaccagtcaaaaggtttgccagtagcagatattcaggtcatcaagcgcggtaaggctttagaatatttctcacgccactatggccaggtatatgttgaggaaggccgcgaattcacggttaacgaagcgttggtagggattaaccaaattctggatgaccaatcagaatcagtatcgggtggtaccccggtggtgtgtgagccaaacacacgccaatttctgcgtatttttgcacgccaaccttcagtcgagcgcgatcagatgcagaaattcctacgcggtagcggcatagcaccatcgacttttatcgctttgggctgggctaccgaaaccacacgaccaaaggcttttcattggcgatctccgctagaaattgcgcaagagcgaatggccagcagtcgcagtgtgagccgcgactttgatcaggccatgttgcttgtgggggcctgttatccggaaagcggtatcaataccaagaaaattctggatgataactttaagcctcacccggcattaggtcatctattagattggcttgttcacaacggagctgacttatctatgcgcagtgcctgcactttggcaaggcaattgtttaatagatgggaagcagatcatcagcaggttatgcaggaacaaatatcattgtttggtatggaagatgaaatatga

SEQ ID NO: 2830 - protein, 1087 aa, Klebsiella pneumoniae
MATKKTKAELTTELVAEAVGAGKKAQLETVDFSDPNRPLTCLEVDFPILPINQIAQIEGNAGKPIYQMSKWWARRRSSVFRSMLIAAATKAPEEPAEAAKLVWDNYYSNHQDNKAFNDLKVADIFMGGGTTLVEGARLGMQMTGNDLNPVAWLVVKNELADVDLNEVNKLFDHIEREVKPQIMPFYACEGPSGEKGKWTQRSTGKVMGNDFDPLALTPEERKDYVYEGPEVIYTFWAKHGPCAAPGCGHRTPLMTSPVVAVKSLSVKTWQDVECQHCGSSFDLERQEARMAPDVPLVVSDSEAPYAIMDDAGNYQCPHCQHQYRDEAAAQKGESSRLLKKMSKNKKVDLSLLVHPDWLKGSSKADEKGIFGGTSLSEVEATQRWNLHRTKTLKLLEVRGKLPEEITCPDSGLVINTQQGTIPKKSNFTCQESTCGRQQDVLDSIKASGQTGPMAAYVLQCYSPGRDATGSPYNGRYFAPADSNAAKRQNLAVSEWAQRKNSDLRGYWPESELPYGFMTHHLQGGVPNHGFTHWNTMFNPLQLLIHAQILKAIDTSHGFSDSSKEIVLGAFQQYLRNQNLFCFWDRGYDKLVPMMSNNNFHPKSNIVENSVFSSLGRGNWDSCRANTLKGLEWCKQPWETVSNEMLTNMSADIGKLVSGKSSKAMPNDPVLPGTLVTCGSSTELKQYADQSYDLVITDPPFGGLLHYAELADFFYVWLRLLLKDKYPEVYAGEYTPKTLEAVSNKARHPDDPDAFYKRLLTECWREANRLLKPGGILAFTFHHSEDEPWLDVLESLFDAGYYLEATYPIRSDETKGKGEFGSKTIEYDIIHVCRKRTEAPSKISWARLRRKILADVRQLQELLEHHQSKGLPVADIQVIKRGKALEYFSRHYGQVYVEEGREFTVNEALVGINQILDDQSESVSGGTPVVCEPNTRQFLRIFARQPSVERDQMQKFLRGSGIAPSTFIALGWATETTRPKAFHWRSPLEIAQERMASSRSVSRDFDQAMLLVGACYPESGINTKKILDDNFKPHPALGHLLDWLVHNGADLSMRSACTLARQLFNRWEADHQQVMQEQISLFGMEDEI

SEQ ID NO: 2831 - DNA, 999 bp, Citrobacter koseri
atggataagtcactgatcgctgatatacacagactgcccgcacaggaagcatggccgaaaattttttcggccctctggtccctgtttgcagaaccgatcaggcaggatctggcggatgcaaaaacaaccgaacgggaccgcgccatcaaaccattagatgacgtgttggcaggcagtgcctgggatttgtgggcatcgttcgagagtgcttcgccaaaaacggcagatgctctgaaagcattctggcaacgccagacaacaccgaaagccatcctgattctggatgcactgtcgctccgcgaagcgccctggattctcgaaagtgcgcagcagcggggctacacaattcacagcgccggtgcgaccgcctctgagctacccggtgataccacaccgtttgcacgggccatggggtttgggcagcgcaccagattgcaaaacaaccaggggaatagtgctgctttccctgaagccttcactgagtccaccgacttgccatgggtggattgtgcatctctgatcaaggctgacccgaatattattttctggcatcactggcctgatgaacgtatgcatcatctggcagaacagggagcaggttatcgggtgttggcgaaagaagccgcagccgtattaaccggcgatgaattctgggccttcatcgacaaactagccacgggccgtcgtctggttattactgccgaccatgggtattcaaaccccgcgttgtttccagatgtttacccggaagatcaaaaagcctatctgaaagggcaattcaagtctggccgcaacagcgaagtgaaagacgcaaaagccgaacagcattgggtgccgccattatctcaggtactgacgacgcagcatggcaattggaacatagtactgggccgcaagaaatggcgttcacaagggggctacccaagcttggctcatggtggacttagtctgctggaagtagcggtacctttcatcgaactatcgaaacagaataattag

SEQ ID NO: 2832 - protein, 332 aa, Citrobacter koseri
MDKSLIADIHRLPAQEAWPKIFSALWSLFAEPIRQDLADAKTTERDRAIKPLDDVLAGSAWDLWASFESASPKTADALKAFWQRQTTPKAILILDALSLREAPWILESAQQRGYTIHSAGATASELPGDTTPFARAMGFGQRTRLQNNQGNSAAFPEAFTESTDLPWVDCASLIKADPNIIFWHHWPDERMHHLAEQGAGYRVLAKEAAAVLTGDEFWAFIDKLATGRRLVITADHGYSNPALFPDVYPEDQKAYLKGQFKSGRNSEVKDAKAEQHWVPPLSQVLTTQHGNWNIVLGRKKWRSQGGYPSLAHGGLSLLEVAVPFIELSKQNN

SEQ ID NO: 2833 - DNA, 405 bp, Klebsiella michiganensis
atgtcgaaagccaataatccgggatttgtcttatcaccttactcccagaagaaaatcctcaaagcactaggaagtcaccaagaaaagacggacgctaccgctaaacggcatggaaaaccgacccgctataatattgccatcagcgattatgacaatcttgtcagcggtgagcacggtccgctgatcctgaaagtgagaagggggaaaatcgttacagaaaaacattactgtgccgaatgccacagttacatcagcccaatcagggcatatgccgacagcaactatgggaaagtgcatctttgtacgccttgccatcttgcagcgttcaaccgtagctttggacacgcggatgctatgccgctcaaattggatcatgctcatgcacataagggaaaatggaaatag

SEQ ID NO: 2834 - protein, 134 aa, Klebsiella michiganensis
MSKANNPGFVLSPYSQKKILKALGSHQEKTDATAKRHGKPTRYNIAISDYDNLVSGEHGPLILKVRRGKIVTEKHYCAECHSYISPIRAYADSNYGKVHLCTPCHLAAFNRSFGHADAMPLKLDHAHAHKGKWK

SEQ ID NO: 2835 - DNA, 834 bp, Citrobacter freundii
atgaaggagtttgagtggcatatcaagaccatccttgagacaaaaatcactgaaggtaaacgagcgttgatcgttgaaggtaaagcggatgaacttgtttttacccagctcttaaaaaaagtcgatccccaatgggaaaccaactgggttcttgccgaagtcggcgggaaacgcaatgtggtagaaattttgtcaaaacaatatgattggttgggcattgttgatcgcgatgagtgggatgatgcccagttgagccaacggcaacaacaattgcctaacctgctagttttgcccagattttgcattgaaaactatcttgttgtcccgagtgagcttttatctggactgccacccaaacaaagagccaaactccccggtgagagcgcagcggcgatagaggctattacgtcatcgattaccgcaaatcttgaaagttggattcagtttggtaccgcatgggccattatcaacccgctttgggatgaactgcgattgctcggatttaaccgagatcttcttgatccgcaacaggtgattacagagcccgggtttttggcgcattgcgaacgttggcatgcacatctggatcctgcagtactgttacaaagataccagagcaaactggccgaaatccgcgatttgccagttgatgaacagttacgcaaaattgttcacggcaaaaaattttttaaagccgttgtgacccctgcattcatgcagttacttgcaattacgaaagcgatttcagttgatgtatggttcagggaaatgccggtgccaactgaccttgactttatatggcatgaaatgaatttgcctgtagaagaaaattaa

SEQ ID NO: 2836 - protein, 277 aa, Citrobacter freundii
MKEFEWHIKTILETKITEGKRALIVEGKADELVFTQLLKKVDPQWETNWVLAEVGGKRNVVEILSKQYDWLGIVDRDEWDDAQLSQRQQQLPNLLVLPRFCIENYLVVPSELLSGLPPKQRAKLPGESAAAIEAITSSITANLESWIQFGTAWAIINPLWDELRLLGFNRDLLDPQQVITEPGFLAHCERWHAHLDPAVLLQRYQSKLAEIRDLPVDEQLRKIVHGKKFFKAVVTPAFMQLLAITKAISVDVWFREMPVPTDLDFIWHEMNLPVEEN

SEQ ID NO: 2837 - DNA, 546 bp, Enterobacter cloacae
atggatatcaactactacgataaacatcaggaagaatttgaggcggtcacgctggcgctgaaagccaatctggaagaagtttggggcagcagcctgaaaaatcagggggaaagcctggatgatcaggtgacgtatatgaagctatttgaagagctgcaatacaacctcaatccgtactacttcaaggagaacacctcagcaaaagagatggatgaagataaagtagcggcctttgtggccagaacccgcgactataagcacggcattaccattaaatcctggccgggacgcccgcagaaatggctgaaaggccgaatcaaacctcttcatcctgtggaaggcacaaacctgtgctggatcgacacgtccaacattgtgcatatcggtgccgataggcagtttgacgatcaatattacctcaccgtgaccacacagaacggtcagagttaccgcgtgaatgatgtccttctgcctggacgccttctggatgccgctcatgaagccctgttcagggcgctggattcaagcactggcggtaatttctga

SEQ ID NO: 2838 - protein, 181 aa, Enterobacter cloacae
MDINYYDKHQEEFEAVTLALKANLEEVWGSSLKNQGESLDDQVTYMKLFEELQYNLNPYYFKENTSAKEMDEDKVAAFVARTRDYKHGITIKSWPGRPQKWLKGRIKPLHPVEGTNLCWIDTSNIVHIGADRQFDDQYYLTVTTQNGQSYRVNDVLLPGRLLDAAHEALFRALDSSTGGNF

SEQ ID NO: 2839 - DNA, 828 bp, Enterobacter cloacae
atgccaaaaacccgaaaacacctcaccccgaccgaagcagaggccaaggggcttctatgccgtaagcacctcaaggaacgcctccgcctcatgccgggactaaacaccaagcccgctggcagtgtctggcaaggtcagggggcttatgatgtgtacaacccagccgagtgcgtgccgtggcgctggatgcctgggcgtgcccaagtccgtcgccagcacgtcgcagcgcaggcaaaagacctgatcgccgcaggctgcattgtgctcgacaccgaaaccaccggcctcggtgatgacgccgagatttgcgagataaccatactcgacgtgaccggcgcaccgatcctcgacacgctggtacgcccgacccggccaatcccggtcgaggcgacagcgattcacaaaatcaccgacgccatggtggccagtgcgccgagctggcccgaggtggccgagcagtacgccgcagccgttgctggccgaaccgtcgttgcctacaacgtcgcttttgatgcgcgcttgctgcggcagacctatcagatacacggaatcaccgcgccagtgttgacgaccgcttgcgcgatgctgatgtatgccgagtggcatggagagtacgaccggagccgcgaccgctggcgatggttgaagctgatcgaggctgcgaccgactgcggcgtggcagaagacggcgcacaccgcgcccttgccgacgcccgcatgacgctgggtgtgctgcgatacttgcagcgccgcacgaacggacggcgaccggcagggccgaaagtggccaccgtcccgcaggaggctttgccctctgttttaggatga

SEQ ID NO: 2840 - protein, 275 aa, Enterobacter cloacae
MPKTRKHLTPTEAEAKGLLCRKHLKERLRLMPGLNTKPAGSVWQGQGAYDVYNPAECVPWRWMPGRAQVRRQHVAAQAKDLIAAGCIVLDTETTGLGDDAEICEITILDVTGAPILDTLVRPTRPIPVEATAIHKITDAMVASAPSWPEVAEQYAAAVAGRTVVAYNVAFDARLLRQTYQIHGITAPVLTTACAMLMYAEWHGEYDRSRDRWRWLKLIEAATDCGVAEDGAHRALADARMTLGVLRYLQRRTNGRRPAGPKVATVPQEALPSVLG

SEQ ID NO: 2841 - DNA, 1173 bp, Escherichia coli
atgaagggtatgcagaagatcaaaaggggtaagagcttcgctggtgttgttcgttatgcattgcagccaggagtacatcataaaagcgatccagtcgtaattgggggcaatatgctgggtggctccgctcttgaactgattgctgaatttgatggcaccaaacagcttcggccagatgcccagaaacctgtttggcacaactcgcttcgcttacctgatggtgaatcattatcgaatgaccaatgggcaatgatagctgacgactatatgaagaagctggggttcaatgagacccatctccgctgctatgttctacatgacgattctgccggccagcacatacatatcattgcaagcaggattgacatggccggtggtaagctttacttgggcaagaatgaaaacctcatcagcacccggatcattagtgaactcgaaatcactcacggtctgacagtgaccaagacagcaccatccatctcaaataaacaaccgaagcggaaacgaatctctcgcaacgaacaaatgctatcagaacggactggggttccctgcacgaagaaatctcttcaacggaccattgatagtagtttggctgataagcctgaccttttgacttttatcaagaggctggaacaagcagaagtatcctggaaggttaatgttgcctctaccggtaagatgaacggcttttcattcgaatatgcaggaatcgctttcaaagcttcgcaattaggtaaaagctactcttggtcaaatctcagtaatcggcttaactacaaccccgaccacatagaagctctgcgagcgacaaaggaagttatccctgcccctgctcctgctcctgctcctgctcctgctcctgctcctgctcctgctcctgcaacagttttgaaaaacactgagagaaaggaaagtatcagtgaaaaaattgctgaactcgaactacgactcaaagaagacagaagaaacgaaatcgtagaaaagattcttcaaaaaaactcagtacaacagcaaaagcatctcaggcttatcggctggattccatttctcagaaggctcgcagagcttctcagaagctatgggaagagcattcttcacaaaacccatatgaccttctcaaatatctccgcaatgaaacctttaaacaaggcgagaaaaattcgtttatag

SEQ ID NO: 2842 - protein, 390 aa, Escherichia coli
MKGMQKIKRGKSFAGVVRYALQPGVHHKSDPVVIGGNMLGGSALELIAEFDGTKQLRPDAQKPVWHNSLRLPDGESLSNDQWAMIADDYMKKLGFNETHLRCYVLHDDSAGQHIHIIASRIDMAGGKLYLGKNENLISTRIISELEITHGLTVTKTAPSISNKQPKRKRISRNEQMLSERTGVPCTKKSLQRTIDSSLADKPDLLTFIKRLEQAEVSWKVNVASTGKMNGFSFEYAGIAFKASQLGKSYSWSNLSNRLNYNPDHIEALRATKEVIPAPAPAPAPAPAPAPAPAPATVLKNTERKESISEKIAELELRLKEDRRNEIVEKILQKNSVQQQKHLRLIGWIPFLRRLAELLRSYGKSILHKTHMTFSNISAMKPLNKARKIRL

SEQ ID NO: 2843 - DNA, 258 bp, Klebsiella pneumoniae
atgtcagaacatcaaaaaccagatacgaaaatttatgatgaagcctgcaggatagtgggtcagtgttgtcttgcactggctgataacggtgctgaaacccaccgggaccagcttgtgcatcaactaaaacgtctatcatggctgtacatgcaggaaaccaacgaaacaaaccttgctatgctgtttgctattgaaaagttggcgaccagtgaagactggaaaaagccttacttgggtgaagaccataacaaagggtag

SEQ ID NO: 2844 - protein, 85 aa, Klebsiella pneumoniae
MSEHQKPDTKIYDEACRIVGQCCLALADNGAETHRDQLVHQLKRLSWLYMQETNETNLAMLFAIEKLATSEDWKKPYLGEDHNKG

SEQ ID NO: 2845 - DNA, 423 bp, Enterobacter cloacae
gtgaaattagcaaatcagcaaatacgtgctgaattattttatgaagtctgtgacagccttacaagctttgcctcttacatgcgaaaactggttaaattcagaccttacgatcttggttttgatccctattttttcatttatggtcaggccattgatatcgtcagaaatgaaggtctggtgagtacacttaaaaaactcaacatttttaagatgaatattggccttgaatcaggatctgaccatacgttaaaaatgatgaaaggcaagagagattcagttgatgtgaattatgcagcgctgcgaaaactcaaagaagcaggtatctatgtatatagttcattcgttctcgggactgagtttgaaacggactcaacgttaaggggaactattgagtggatcaaaaaatcatacatgaaggattaa

SEQ ID NO: 2846 - protein, 140 aa, Enterobacter cloacae
MKLANQQIRAELFYEVCDSLTSFASYMRKLVKFRPYDLGFDPYFFIYGQAIDIVRNEGLVSTLKKLNIFKMNIGLESGSDHTLKMMKGKRDSVDVNYAALRKLKEAGIYVYSSFVLGTEFETDSTLRGTIEWIKKSYMKD

SEQ ID NO: 2847 - DNA, 948 bp, Enterobacter cloacae
atgaacagagaagaaaaaaaacaggagcttgccgcccgggctgcgtggatgtattacgttgccgggatgacgcagcaggaaatcgccagggcattaggaatgtcgcgccagatggcgcagcgtttggtttcgggcgctcgcgaaacgggcatggtgtcggtcggcatcacccatccggttacacactgtatgaaactggcacgccagctacaggataaatttagtctgtctttgtgccgcatcgtgccttccgttggattagaaaacgacgcgattcagcagatgctggcagtggagggctcggaggtgatggcgcagtttattggcgatgagaagccgcgagtctttggcgttggctccggtaaaacgctgcgcgccgttattgatgctctgcctcattacgatcgcccgcaacatcaatgtgtatcactgattggcgcgattgcccgcgacgattcaggtacccgttacgacgtaccactcaaaatggcggaaaaaatgcgggggaaatatttcttcatcccggcaccactatacgcagaaaatctggaagacaagacaatgtggtgccagcatccggtttaccagcgcgtcgccatccgggcgctcaatgctgatatcacttttatcgggattggtgaagtcgagttaggtggtccgttaaatgccgaagggtttattactgacgcccaggtacaagcattaaaaagccagcatgtggcaggtgaaatgttaggtcattttatcaatcattatggtgagcgtctcgcatcagaactggatgcgctgcttaccagcgtcccgctaacaagtcacaccgggcgccagattattgctttctccggcggagccaggaaatatcaggctatacgtgctgcactgatcggccagtggatcaccggactagtcaccgatgaagacacggcgctgaaactactgaaagagtaa

SEQ ID NO: 2848 - protein, 315 aa, Enterobacter cloacae
MNREEKKQELAARAAWMYYVAGMTQQEIARALGMSRQMAQRLVSGARETGMVSVGITHPVTHCMKLARQLQDKFSLSLCRIVPSVGLENDAIQQMLAVEGSEVMAQFIGDEKPRVFGVGSGKTLRAVIDALPHYDRPQHQCVSLIGAIARDDSGTRYDVPLKMAEKMRGKYFFIPAPLYAENLEDKTMWCQHPVYQRVAIRALNADITFIGIGEVELGGPLNAEGFITDAQVQALKSQHVAGEMLGHFINHYGERLASELDALLTSVPLTSHTGRQIIAFSGGARKYQAIRAALIGQWITGLVTDEDTALKLLKE

SEQ ID NO: 2849 - DNA, 1398 bp, Enterobacter cloacae
atgaatagtgaaaaatcggtgtggatgcatattggcgcaggttcgtttcatcgtgctcatcaggcgtggtatctgcacaaactgatgcaacagggtgatgatagctggattattgcgctggggaatattcgtggggatctgacttcttttctgacagcacttgctgcacagaacggggaatacgtgctggagaccgtctcgccggaaggcgaacgtaactacgaaaccatcacatctattcataaagtgttaccgtgggatgaggatatcagcgcactggtggcgcagggcacggacaaacagacccgggtgattgcgtttaccgtcacggagagtggctactatctgactcctgaacatgaacttgacagccagcaagcggatatcaaaaccgacattaacggcggtatttgcactctgtacggcgccctaacccgtattctgaaagagcgtatggaggtccatggtgaaccggtcacgctactgagctgcgacaacctgcggcataacggcgaacgtttccgccacggatttctctccttcctcaaaaccaaaggtgaaattgcactacacgactgggtgaagaacaacactacatcgccaaatactatggtagaccgtattacgccgcgtccgacgccggatgttgccgagcgggtgctggcagcaaccggtaagaaagacgctgtaccagtgatgggggaatccttcattcagtgggtcattgaagatgactttatcaatggccgtccgtcactggagaaagtgggcgttgaactggtggaatccgtacttccatgggaagaggcgaaaattcgtatactcaatgcgactcacagctgcatcgcctgggccggtacgctgacaggcctgagttatatcgacgaaagtacccgccagaaagcgatccgccagatggcctgggaatatatcactcaggacgttattccatgcctcaccccaagtccgctggatctggaactgtatcgcgatatggtactggcgcgttttggcaatccctatatcaaagatactaaccagcgcgtggcggcagacggcttttctaaaattcccgggatggtcacgccgacgcttatcagctgctaccagcgcggcgcaactccagatgcgacggcagtgttaccagcactgttcttcctcttcttaaaacgttgggccgaaggcaccctgccgtattcctatgaggatggcgtaatgcgtccggaagcggtacgcgaggtgttcgccagtgaagatccgctggcgacctgggtggcggatgaaacactgtttgcagaattggcgaacaaacctgaatttctgtcgctattgcgtcgcaaggtcagttcactggagcagtgggtaaaacagccgcaggcacagctgacaataatctga

SEQ ID NO: 2850 - protein, 465 aa, Enterobacter cloacae
MNSEKSVWMHIGAGSFHRAHQAWYLHKLMQQGDDSWIIALGNIRGDLTSFLTALAAQNGEYVLETVSPEGERNYETITSIHKVLPWDEDISALVAQGTDKQTRVIAFTVTESGYYLTPEHELDSQQADIKTDINGGICTLYGALTRILKERMEVHGEPVTLLSCDNLRHNGERFRHGFLSFLKTKGEIALHDWVKNNTTSPNTMVDRITPRPTPDVAERVLAATGKKDAVPVMGESFIQWVIEDDFINGRPSLEKVGVELVESVLPWEEAKIRILNATHSCIAWAGTLTGLSYIDESTRQKAIRQMAWEYITQDVIPCLTPSPLDLELYRDMVLARFGNPYIKDTNQRVAADGFSKIPGMVTPTLISCYQRGATPDATAVLPALFFLFLKRWAEGTLPYSYEDGVMRPEAVREVFASEDPLATWVADETLFAELANKPEFLSLLRRKVSSLEQWVKQPQAQLTII

SEQ ID NO: 2851 - DNA, 1473 bp, Enterobacter cloacae
atgtatctgggtattgatgttggaacatcagaaatcaaaacgctactactggatgacagcaacaaaattgtcgccatggcaggcgtgccgctcacggttcagaggcctcggcctcatttttcagagcaggatcccgaaagctggtggcgggcgttgaaccaggcaatgggcctgttacgtactcaggctggaaaacgctggcaggagttgcgggcaattggtctgtccgggcaaatgcacggcgcagtgttgctcggcaagcatggtaatgtactgcgcccctgcattttatggaatgacacccgcagcgcttcgcagtgcgaactgttgacgcagcgtgcgccggaactgcatcaggtggcaggcaatctggcaatgccgggctttaccgcgccgaaactgctgtgggtggcggagcatgagccggacgtatttgcccagattacccatgttctcttgccaaaagattatctgcgctggcgtatgaccggggaattcatcagcgatatgtcggactctgcgggcactctttggcttgatgtggcgcgtcgggactggtcggatagtctgctggctgcctgcggactgaaccggggcatgatgccacgtctggttgagggttcagaacctggcgggcagttaaaagatactgttgccagcgaatggggtatgccgtcaaatatcatgctcgcgggcggcggtggtgataacgctgccagtgcggtcggcattggcgcagtgaaaacgggagatgcctttatttcactgggaacctccggggtactgtttgtggttaacgatcgcttccgtccgaatccgcaatcggcggttcacgcgttttgtcatgcactgccgcagcgctggcatcagatgagcgtaatgctgactgcagccagtgcgctgcgctggttgtgtaacctgctgaactgcgatgaggtcacgctgatggcggaagttgcgcagttgggtgccgcaaagcgtcataccgcgccgctgtttttgccttacctctccggtgagcgcacgccacacaacgatccttatgcatatggagcgttcagtcatttgacacatgatgtggaccgcgcccgcttaggctatggagttattgaaggggttaccttcggtctgatggatggtctgcaggtactgtatgaggctggcgctgaactgacagaatgttctttggtgggcgggggggcacgcagtgccatctgggcacagttgattgccgatgtgctgaatattccgattatcacccatgaaggcggcgaagctggcggtgcgcttggcgcggcacgcctggcctggctggtgacagggggcgatgagcaactggtttgcgccaaaccgaaggagcggcagcgttatctccctgatagctcgcagcaggcgtttctgcagcagcgtttgcaggaattccgtctgcaataccggcaacaggtagaggcccggggaatgctgcgttcttaa

SEQ ID NO: 2852 - protein, 490 aa, Enterobacter cloacae
MYLGIDVGTSEIKTLLLDDSNKIVAMAGVPLTVQRPRPHFSEQDPESWWRALNQAMGLLRTQAGKRWQELRAIGLSGQMHGAVLLGKHGNVLRPCILWNDTRSASQCELLTQRAPELHQVAGNLAMPGFTAPKLLWVAEHEPDVFAQITHVLLPKDYLRWRMTGEFISDMSDSAGTLWLDVARRDWSDSLLAACGLNRGMMPRLVEGSEPGGQLKDTVASEWGMPSNIMLAGGGGDNAASAVGIGAVKTGDAFISLGTSGVLFVVNDRFRPNPQSAVHAFCHALPQRWHQMSVMLTAASALRWLCNLLNCDEVTLMAEVAQLGAAKRHTAPLFLPYLSGERTPHNDPYAYGAFSHLTHDVDRARLGYGVIEGVTFGLMDGLQVLYEAGAELTECSLVGGGARSAIWAQLIADVLNIPIITHEGGEAGGALGAARLAWLVTGGDEQLVCAKPKERQRYLPDSSQQAFLQQRLQEFRLQYRQQVEARGMLRS

SEQ ID NO: 2853 - DNA, 960 bp, Enterobacter cloacae
atgaaaaagttggttttgggtatagcgcttgccgttgcggccatttccgtgaccgcacacgctgatgacaaaattaaggtcggctttgctaaccgtactcttaatggcgctttctttaatggattaacggaatacatgaaaatccatgctaaagagcatggctatgaactgatcaccaccgatgcgcgtggcgatctgaataaacaaatctccgacgttgaagatatgttgtctcagggcattaactacctaattctcaacccacaggatcccgaagccgggatgcgtattactaagatcgccaaaagcaaaaatgtaccggtcgtcgtgctcgacagcgatatttcgctggacgcaccagtcatcacacgcgtacaagccaataacatgaaaaacaacattctgattggcgaatatgcggtgaacaaatttggcgataagccaatgaactgcatcattattagcggcaatcagggcaacctggtgggtgaagcgcgccgtaccaactttatgcgtggggttatggaagcgcaactgcggaagtataaccatacacaacttaccatcgtcagccagggctggggtaactgggaccagcagggcggcctgaaagcgatggaagatttaatcgtcgcacagggggacaagatcaactgcgtttatagcgagatggatgatatggcgcttggcgcggtgctctcactgaaagcagcaaacaaactgggtagcgtcagcgtattctctcacgatggctataaaaaaggtctggaagccgttcaacgtggtgatatccaggcaaccgcttcaaataacccggatcagctgaccagcactgtcctggacgttattgctaaatataatgccgggcaaaaagacttcccggactacgtctatatcccgtcaatcttgatcacgaaagataatgtgagcaagtactataacaaggacgccattttctaa

SEQ ID NO: 2854 - protein, 319 aa, Enterobacter cloacae
MKKLVLGIALAVAAISVTAHADDKIKVGFANRTLNGAFFNGLTEYMKIHAKEHGYELITTDARGDLNKQISDVEDMLSQGINYLILNPQDPEAGMRITKIAKSKNVPVVVLDSDISLDAPVITRVQANNMKNNILIGEYAVNKFGDKPMNCIIISGNQGNLVGEARRTNFMRGVMEAQLRKYNHTQLTIVSQGWGNWDQQGGLKAMEDLIVAQGDKINCVYSEMDDMALGAVLSLKAANKLGSVSVFSHDGYKKGLEAVQRGDIQATASNNPDQLTSTVLDVIAKYNAGQKDFPDYVYIPSILITKDNVSKYYNKDAIF

SEQ ID NO: 2855 - DNA, 939 bp, Klebsiella pneumoniae
atgagcaaaaaagaagaccacggcagtattaaaatcccacctatggaatactttacgctcgacagggcggccagtattttgcaatgcgatacagatgatttacttcactatggagttattggggctataccgttatgcgtaatgatgaggggttttccctctgccttgatttttgtgggcggtaaagatatacaagacacaattgagttttatcacgaacacaaaggaaactcatcatttctttttcgtgagaataactacatatctcattttaattcctttctcaccgagcatgacgtatacaaaacagatggtgggtttattttatttaggggattggcgcatgggctatggtgtctgggacatggtgaaatagaaagcctcctttattctgagagggcaagggtgatagatacgacaattttcaggccgttcggatgggatactttccgcgagaagactggcctttcgtgtcatataattagcgatagatattttaatcagagctggctaccgacgctaaacagacaactagccgaaagcgcagggtttcagttaagagagagccgaaagcccgcgattaatgagattttgacaacttccgatctatttattgccagagataccatcttaaaactaaaagacgcaatagacacaggcgagccaatgaaaagcatgattaacggaggcgttaccatcccgccagaacccagcgagcaaaagcaaatagcgccaacagtgaacagcaataaggttggtgagtttattgaaatgctaatccgatgcgtacctgagctgggtgaagatgtaataaccgcaaatcccaataaacgctatgaaattctaataaaatttctggaggataagaagagagaaggcaagctcgccggcatgagtatgccttcctctgcaaccattgagaaatacttcaaaatttga

SEQ ID NO: 2856 - protein, 312 aa, Klebsiella pneumoniae
MSKKEDHGSIKIPPMEYFTLDRAASILQCDTDDLLHYGVIGAIPLCVMMRGFPSALIFVGGKDIQDTIEFYHEHKGNSSFLFRENNYISHFNSFLTEHDVYKTDGGFILFRGLAHGLWCLGHGEIESLLYSERARVIDTTIFRPFGWDTFREKTGLSCHIISDRYFNQSWLPTLNRQLAESAGFQLRESRKPAINEILTTSDLFIARDTILKLKDAIDTGEPMKSMINGGVTIPPEPSEQKQIAPTVNSNKVGEFIEMLIRCVPELGEDVITANPNKRYEILIKFLEDKKREGKLAGMSMPSSATIEKYFKI

SEQ ID NO: 2857 - DNA, 1518 bp, Klebsiella variicola
ttgactcaacgcctcgttaaagatattccaaacggaacaattgggtacgctgcaattatcccgaaagaggataacttccttgagttcaagtgcccgcactttatcgagcttggcgacagccgccggttcctgaacatcgaagtatcacggccgatggtcaaggtaaaaaaccttgtgcatacctcattgcagactgcgggtacaagcctggaaagccgggtggtggtatcagcgcgggagatgttcgacgtttactgcgaatatggtgaggcaacgtgccatccagctgagaacgggtcttatgttatctgcataagagacacatgtaatgttcatatcgacaagtattatggattacatggatggggttttcaggggcatcatgggattaaagggcttttcatcaacgattccacgttcaaccgattcgatttccactcattcgggtacgattgtttctccgacaatatggccattaaagggaaacagattaacatacagggcgggaatacgtggcgcttccggaatctctcgtttattgtcacaaggtcggatggcgacgcgatagagtatttcctgaacttcgtaatcggtatgcgccaggactatgcgagtgattgtgagtgcaatttgacaattgatgggctgacagtcctttgggataaaaacctaccagcgtggtacaacacgacgcgctcatttgatgttgtgcgaattattgatacggcgaactctgctgatcagggtatcgacagcaaacttccgtacacaatcaatattcgtaacgtagtgtttgatctggccggtgtgcagaccgggcggccgaatgcgaactttgaatttagcgctgtaacagcacttcggtctcagtttactgattattccgtgactggcaaaaagaccttactgccagacaacattattgtagatggaatgactgcaattaatgtccagccaactcaaaacgcagtcatgtgcggcattaaattgcctactgacctgtatcagaactacgttggatcacgcaataaaaaaggaagcgatggaacgaacgcaaaagttactttgcgtaacctgcacagtgtgatcaatagccctgttattgagttggctgctgctcagacggtcgatatgcctggggatgcatcctcatggaattcaaattatttgactagcgactatagctggataccacgggttacacttgaaaattgctatccggcaattgttcatgtgtcaggtgcaaaagctattgtcgatattcatggagggaaactaggcagattttacacgaacggtaatggcaaccgctgccgggtcaccggtgctgatattgagctgatacctgatgcggcgggtatgacataccttgctgctgataaaacactggtaacgggatgctcctggttaaatcctgccaatggagctacctacacaggttctcttcgtggttcgggaaatgaaatgattggagatagctccatggcgccaaaccttcctgcaaacgtttttatttaa

SEQ ID NO: 2858 - protein, 505 aa, Klebsiella variicola
MTQRLVKDIPNGTIGYAAIIPKEDNFLEFKCPHFIELGDSRRFLNIEVSRPMVKVKNLVHTSLQTAGTSLESRVVVSAREMFDVYCEYGEATCHPAENGSYVICIRDTCNVHIDKYYGLHGWGFQGHHGIKGLFINDSTFNRFDFHSFGYDCFSDNMAIKGKQINIQGGNTWRFRNLSFIVTRSDGDAIEYFLNFVIGMRQDYASDCECNLTIDGLTVLWDKNLPAWYNTTRSFDVVRIIDTANSADQGIDSKLPYTINIRNVVFDLAGVQTGRPNANFEFSAVTALRSQFTDYSVTGKKTLLPDNIIVDGMTAINVQPTQNAVMCGIKLPTDLYQNYVGSRNKKGSDGTNAKVTLRNLHSVINSPVIELAAAQTVDMPGDASSWNSNYLTSDYSWIPRVTLENCYPAIVHVSGAKAIVDIHGGKLGRFYTNGNGNRCRVTGADIELIPDAAGMTYLAADKTLVTGCSWLNPANGATYTGSLRGSGNEMIGDSSMAPNLPANVFI

SEQ ID NO: 2859 - DNA, 420 bp, Enterobacter cloacae
gtggtggcgtatcacttcgtagaacagatcgcgcagttgctggagctggtcgggatcgttaatggttgttttgccgataccgtgggtggtttggtcccacttcagccagtctatccagtaggggcgggggataaagtagatccacagatggtcccagtactcgctgtgttcgtccctgccgtaatgatggggcacgccgggaggaaacagcaacagatcgttttcccggcacagcaggaagccatcgcccgctttcgcccgcgcctggccgcgcagggtcagattaatgatgtaacctttcatcccctgcgggcgattaatgtagtagtccagcgtggagccgcgggtaatcggcgtgaagcctgcgacgacccaggcattgaaggtaaaggtcttcatcaatggcgagaaattgagtag

SEQ ID NO: 2860 - protein, 139 aa, Enterobacter cloacae
MVAYHFVEQIAQLLELVGIVNGCFADTVGGLVPLQPVYPVGAGDKVDPQMVPVLAVFVPAVMMGHAGRKQQQIVFPAQQEAIARFRPRLAAQGQINDVTFHPLRAINVVVQRGAAGNRREACDDPGIEGKGLHQWREIE

SEQ ID NO: 2861 - DNA, 258 bp, Klebsiella pneumoniae
atgacaaatatcgaattcagtgcctgcgcctacgaagccgctgttcagttcagtgtccagcaacgttttgcagcgatgatgacgcacactcataactggaatgtgaatcgccgcggcgcagacatgattgctttcattttggatcgtaaggctgactacaaagcggcttacccggacatgcttacctccgataacactatcgttaaccagcagcactttaccgatttcattatgtctggagtctggcgcctgcaataa

SEQ ID NO: 2862 - protein, 85 aa, Klebsiella pneumoniae
MTNIEFSACAYEAAVQFSVQQRFAAMMTHTHNWNVNRRGADMIAFILDRKADYKAAYPDMLTSDNTIVNQQHFTDFIMSGVWRLQ

SEQ ID NO: 2863 - DNA, 192 bp, Klebsiella pneumoniae
atgagttataaagtagatcaagtcaaagctctctggcttcaattgactgatgcggagaaaaaagaatttacaacatatctttttaatggtgaaaaaaaatccttacgtgaaggattcgaaagttttagtgtgaataaaagcactacaatgcaatttggtgatgcaaacgtctgccctgcttgcggaaaataa

SEQ ID NO: 2864 - protein, 63 aa, Klebsiella pneumoniae
MSYKVDQVKALWLQLTDAEKKEFTTYLFNGEKKSLREGFESFSVNKSTTMQFGDANVCPACGK

SEQ ID NO: 2865 - DNA, 576 bp, Klebsiella pneumoniae
atgagtatgcaaccgaatgaagaaatggacctcaggaaattttacgcagagggaacagctgactacttaaaaactaaaatcaaaaaaagcgaacgacttttaaaaataaaccaatatctatcatttgccctccctgtcctagttggaggatacgcatcggttgatcacagctccaaatattttaattttttagtttggggcacagggatattatcagtgatagtcttgctttctaatttatacacactggtcatgaagactgatgaaaatttatctcgatatctggaatcatactctttcaataaactcctaactgatttgtatggcgaactgtcgagcatgtttaaatcaaagacaggcaaccagcaacccgctaaccatttgttttcagtgataaaatcaaaagatgacttcaatgccaaggaagatgaaaaatatgttagcaataatgataagaaacggattatgttcgacattctggtaaagaaaaataaagaatgcgtacgttgcaataaaataccgactaaatttaacaagcggaaaggttgcacaaattgtggcaatctcgtgaaataa

SEQ ID NO: 2866 - protein, 191 aa, Klebsiella pneumoniae
MSMQPNEEMDLRKFYAEGTADYLKTKIKKSERLLKINQYLSFALPVLVGGYASVDHSSKYFNFLVWGTGILSVIVLLSNLYTLVMKTDENLSRYLESYSFNKLLTDLYGELSSMFKSKTGNQQPANHLFSVIKSKDDFNAKEDEKYVSNNDKKRIMFDILVKKNKECVRCNKIPTKFNKRKGCTNCGNLVK

SEQ ID NO: 2867 - DNA, 183 bp, Klebsiella pneumoniae
atgcaaatcgaagacagaacaaagcctgtccggcgggaaaattatcttgttgtgctggagcaccgggacgacctgccagataaatccgtgcgtggcaaccaagctgcgcgtaggaagttgttaaatgctggttggtgcgaggatgagtttgacgagatggagcgcaatataaaagcgagttag

SEQ ID NO: 2868 - protein, 60 aa, Klebsiella pneumoniae
MQIEDRTKPVRRENYLVVLEHRDDLPDKSVRGNQAARRKLLNAGWCEDEFDEMERNIKAS

SEQ ID NO: 2869 - DNA, 717 bp, Klebsiella pneumoniae
atgaaaaatgatgacgttttagagctattggaaagcgcaaaagataaactcaatcacttctttagaataatagaacttgcaaaaaaaggagatgaatcagttacgatttcccctataatgctgaaagaaatatcagaacacttaagaagctgccttgattacatggctgttgatattgttaaaaaatacaatttacaatgtagaaaaatatacttcccatatggaaaagatgctcaaagtttagaaaaaatgaatccttgggtgagtcaactaaagcaagtttcccctcaaacttacagtcatatattatccgtacaagacttccagttgcctgcagaaagccaatggttgatacaactctgtaatttaaacattttaataaaacataacaaattggaaaggccgaagaaggtaaacaatgaattatcagtgggatacggtgggtttcttaagacaacggactgtgatgtattcattcatgatgtcaaaataatttctaatggaagagaatactcagtcggcagtctatcaataaaatcaactgatactattcagatagcaaatgaaaaattaagcgcagctggtttaaatgacatatcatgtacagagtatgaatcattaatgttttgcacaagctcaggtgttgatgtaactcttgtattaaaaaatgctataaatgccataacaagacttcactcgttactttatcaaaaataa

SEQ ID NO: 2870 - protein, 238 aa, Klebsiella pneumoniae
MKNDDVLELLESAKDKLNHFFRIIELAKKGDESVTISPIMLKEISEHLRSCLDYMAVDIVKKYNLQCRKIYFPYGKDAQSLEKMNPWVSQLKQVSPQTYSHILSVQDFQLPAESQWLIQLCNLNILIKHNKLERPKKVNNELSVGYGGFLKTTDCDVFIHDVKIISNGREYSVGSLSIKSTDTIQIANEKLSAAGLNDISCTEYESLMFCTSSGVDVTLVLKNAINAITRLHSLLYQK

SEQ ID NO: 2871 - DNA, 258 bp, Klebsiella pneumoniae
atgtcattgtcgttataccgctcaacaagaactgtccaagctttaaagatagcatccgtctctatagatgaggattactcggcggttctgaaagatgcttcaggtaatgagattaccgtcagcgcggattatgtcgtgcgtgaaaagccaatgattggaggatattatatgaaaaatgatgacggctttgaggcttttatagttgcgcaggtttttgaaaaggagttttctgaatctaatggagatgttgaattttag

SEQ ID NO: 2872 - protein, 85 aa, Klebsiella pneumoniae
MSLSLYRSTRTVQALKIASVSIDEDYSAVLKDASGNEITVSADYVVREKPMIGGYYMKNDDGFEAFIVAQVFEKEFSESNGDVEF

SEQ ID NO: 2873 - DNA, 309 bp, Enterobacter cloacae
gtgtttgatcagcggttcatgtccgatattgcaggcttcagcgagcagtacggcacacaggctgatgttaagatcctgagcacgggcttcagactcactcacatgagtgaattcgcgggtaaaaccagtccgggcgtcaatttcaagcagcagctctgtcagatcaacaggggggaccagctgcctgacgcggctgttcagaagaatcagcggctgcggttcttccagtttttccagactgctgatggtcagggacggatatttaccctgatgacagatgctcacggcagcattcagctcaaagcgtga

SEQ ID NO: 2874 - protein, 102 aa, Enterobacter cloacae
MFDQRFMSDIAGFSEQYGTQADVKILSTGFRLTHMSEFAGKTSPGVNFKQQLCQINRGDQLPDAAVQKNQRLRFFQFFQTADGQGRIFTLMTDAHGSIQLKA

SEQ ID NO: 2875 - DNA, 882 bp, Klebsiella pneumoniae
atgacgcgcagctatctccctcttaattccctgcgggcgtttgaagcagccgccaggcatctcagttttactcatgccgctatcgagttgaatgtcacccattccgcgattagccagcacgtcaaggcgctggaacagcaccttaattgccagctgtttgtccgcgtttcgcgagggctgatgttgaccaccgaaggcgagaatttgctgccggtgctgaatgactcgttcgatcgcatcgccggaatgctggatcgttttgccagccagcgcgctcaggagaagctcaaaataggtgtggtagggacttttgccacgggtgttttattctcgctgctcgcggactttcgccgctgctatccgcatattgatcttcagctttccacccataacaatcgcgtcgatccagcggccgaagggcttgattacactattcgctacggtggcggcgcgtggcatggaaccgatgctgaattcctttgccctgcgccgctgtctccgctctgtacacccgagattgcctcagttctcaaaagcccggcagatatcctgaagtttaccctgctgcgctcctaccggcgcgacgagtgggctgcgtggatgcaggcagcgggcgaacactctccctcgccgacgcaccgggtgatggtgtttgattcgtccgtgaccatgctggaagccgcgcaggcaggcgtagggattgccattgcgcctgtcgacatgtttacccatttactcagcagcgagcgcatcgtgcagccgtttgcaacgcagattgatctcggcagctactggctgacaaggctacagtcacggtcacggtcagaaacgcccgcaatgcgcgaatttgcccagtggctggtggggaagatgcagaaataa

SEQ ID NO: 2876 - protein, 293 aa, Klebsiella pneumoniae
MTRSYLPLNSLRAFEAAARHLSFTHAAIELNVTHSAISQHVKALEQHLNCQLFVRVSRGLMLTTEGENLLPVLNDSFDRIAGMLDRFASQRAQEKLKIGVVGTFATGVLFSLLADFRRCYPHIDLQLSTHNNRVDPAAEGLDYTIRYGGGAWHGTDAEFLCPAPLSPLCTPEIASVLKSPADILKFTLLRSYRRDEWAAWMQAAGEHSPSPTHRVMVFDSSVTMLEAAQAGVGIAIAPVDMFTHLLSSERIVQPFATQIDLGSYWLTRLQSRSRSETPAMREFAQWLVGKMQK

SEQ ID NO: 2877 - DNA, 360 bp, Klebsiella pneumoniae
gtgatcaatccaaatccaaaacgttctgacgagccggtcttctggggcctgtttggcgcaggcggcatgtggagtgccatcatcgcccccgtcatcattctgctggtcggcattatgctgccgctggggctgttcccgggcgatgcgctgagctacgaacgcgtactggcgttcgcgagcagctttatcggccgcgcgttcatcttcctgatgatcgtcctgccgctgtggtgtggcctgcaccgtattcaccatgcgatgcatgacctgaaaattcatgtaccgagcgggaaatgggtgttctacggtctggcgaccatcctgaccgtggtgacgctgattgccgtggtcaccatctga

SEQ ID NO: 2878 - protein, 119 aa, Klebsiella pneumoniae
MINPNPKRSDEPVFWGLFGAGGMWSAIIAPVIILLVGIMLPLGLFPGDALSYERVLAFASSFIGRAFIFLMIVLPLWCGLHRIHHAMHDLKIHVPSGKWVFYGLATILTVVTLIAVVTI

SEQ ID NO: 2879 - DNA, 396 bp, Klebsiella pneumoniae
atgacgactaaacgcaaagcctatgtgcggcctgtgccgtccacctggtggaaaaacctgccgttttatcgcttctatatgctgcgtgaaggcacggcggtaccggcggtctggttcagccttgagctgatgtacggcgtttttgccctcaagcatggcccggaagcctgggccagctttgtcggtttcctgcaaaacccgatcgttgttgttctgaacctgatcgtgctcgcggccgcgctgcttcacaccaaaacctggtttgagctggcgccaaaagcggcgaacatcatcgtaaaagacgagaaaatggggccagagccggtgattaaagggctctgggcagtgacgattttggtcactgtggtcattctgtttgtcgcattgttctggtaa

SEQ ID NO: 2880 - protein, 131 aa, Klebsiella pneumoniae
MTTKRKAYVRPVPSTWWKNLPFYRFYMLREGTAVPAVWFSLELMYGVFALKHGPEAWASFVGFLQNPIVVVLNLIVLAAALLHTKTWFELAPKAANIIVKDEKMGPEPVIKGLWAVTILVTVVILFVALFW

SEQ ID NO: 2881 - DNA, 324 bp, Acinetobacter pittii
gtgcgcatcaccgatacctccagcgtattcaacaccgacctgctctacaccatcgagctgggccacggcctgaacgtcgcggaatgtatggcgcactctgcgctggcgcgtaaagagtcgcgtggggcccaccagcgtctggacgaaggctgtaccgaacgtgacgacgtcaatttcctgaaacacactctcgcctggcgcgatgcagatggcaccacacgtctggactacagcgacgtgaaaatcaccacgctgccgccggctaaacgcgtgtacggtgcagaagcagaagccgccgagaagaaggagaaggcgaatggctga

SEQ ID NO: 2882 - protein, 107 aa, Acinetobacter pittii
MRITDTSSVFNTDLLYTIELGHGLNVAECMAHSALARKESRGAHQRLDEGCTERDDVNFLKHTLAWRDADGTTRLDYSDVKITTLPPAKRVYGAEAEAAEKKEKANG

SEQ ID NO: 2883 - DNA, 201 bp, Klebsiella pneumoniae
atggtccaagacatctatgacattgggcatcagaaggactatgtgcttgatatgagatcaaaaaaatatcagaagcatcacaactccaatggcattcaaagaaatgcctttgttttgttagtacaccaaacaacccaaaattcatgcagttatatcaaagactcattcgcaaaaggactcagccagaaagcatttgcttaa

SEQ ID NO: 2884 - protein, 66 aa, Klebsiella pneumoniae
MVQDIYDIGHQKDYVLDMRSKKYQKHHNSNGIQRNAFVLLVHQTTQNSCSYIKDSFAKGLSQKAFA

SEQ ID NO: 2885 - DNA, 429 bp, Klebsiella pneumoniae
atgtctaataatactgaagtcattagctgtgatttattttcaactctatcttcacttaattttagcaccgaggatattacaggtttgactccggccaactttcgaaagggagctttcttacatgcaaaaatttctgctagccaggccacgcgagcgactgatatttccattcaattactcacggatcgtgtttcaggtgaaatgaactacgtaatagtaattggcaggcacgaaggactcctgcaaagcgaagcaattgacccaaacgctgataagcaataccgggaaaaccgttattctcgccattttatctcagtaaccgatgccaataccaaagccctgaaaaaaacctgcaaggtaatgaaaacatatatcaaagagcaggcatttaagcctaacacctgggggcacagtttcattaagggttga

SEQ ID NO: 2886 - protein, 142 aa, Klebsiella pneumoniae
MSNNTEVISCDLFSTLSSLNFSTEDITGLTPANFRKGAFLHAKISASQATRATDISIQLLTDRVSGEMNYVIVIGRHEGLLQSEAIDPNADKQYRENRYSRHFISVTDANTKALKKTCKVMKTYIKEQAFKPNTWGHSFIKG

SEQ ID NO: 2887 - DNA, 123 bp, Klebsiella pneumoniae
atgtctgcaaaaggccccatcggtaaattgttggggctttttctttgcgtagttctgatacggtttatcctgtggagcattatggccaccagccagctggtgactggccaacgctttgtatga

SEQ ID NO: 2888 - protein, 40 aa, Klebsiella pneumoniae
MSAKGPIGKLLGLFLCVVLIRFILWSIMATSQLVTGQRFV

SEQ ID NO: 2889 - DNA, 981 bp, Klebsiella pneumoniae
atgggcagacaccaaccctgtcccaccatggcagtggagacaggcaaacgaaaagcccagaaaggtgaaagggaagaaataaccatgatgaaagagcctcatccgttacttcagttggtactaaacgattccggtcgtctaaccatgcctgtttattatagagatcaacagtattgcccgacttgccttacaaaggtgttgaagagtgaggatggaagtttggcgcacctcggggaaataaatcaaaatacatgtagaccttctatttcagtagttgtgacaaaagcaattattgaaatgttatgtgacggggaaaaaatatttgtaaatccaatacgataccgaggccgggtgctggcaccctcagtaattttttctcccgacactcacactttcaaaccgtttataaatacagactatcagcctgtgggagcaaactggaaaagtgaaaagggatataaactcggtctgttttatctcaaagatcgagccaactctatcaataaagaggaatttgatttcattgccgttatagaccctaaggcaatgcagaaagaatttatttcggcctggtctgaggttgatgaaaaaaatccattggaaacgctgaagcagatcttacgatctaaaaacaactcttctttatgggtaaaatggcctggcaaaattgagcatgcgcaaaaaggaaattgcaacgaaaattactggttcgattatcaatctgataatcaggaagtgaactgtacggtctctgttgtaggtatcgaaggtaacagttccggtgagacaatttatagattgcaaactttgctaaagcgtaagctcaatgaatatcaactggttcggtctttagggactattatgcttcttgataataccgggaatatgattccatcaaaccatccttattttgaagtcatctcaaaagcatgtataaatggagtgcgtgactttgttcgtcaaaacccgtgggtagtctga

SEQ ID NO: 2890 - protein, 326 aa, Klebsiella pneumoniae
MGRHQPCPTMAVETGKRKAQKGEREEITMMKEPHPLLQLVLNDSGRLTMPVYYRDQQYCPTCLTKVLKSEDGSLAHLGEINQNTCRPSISVVVTKAIIEMLCDGEKIFVNPIRYRGRVLAPSVIFSPDTHTFKPFINTDYQPVGANWKSEKGYKLGLFYLKDRANSINKEEFDFIAVIDPKAMQKEFISAWSEVDEKNPLETLKQILRSKNNSSLWVKWPGKIEHAQKGNCNENYWFDYQSDNQEVNCTVSVVGIEGNSSGETIYRLQTLLKRKLNEYQLVRSLGTIMLLDNTGNMIPSNHPYFEVISKACINGVRDFVRQNPWVV

SEQ ID NO: 2891 - DNA, 255 bp, Klebsiella pneumoniae
atgaatttggcctattttttatttttgtctataactgttatgcttacgagctttattattaaatcacttgtcgtattggtaaagttcaaattacttcgtgatgaacgtctcgaatataccagcaataaaaatattgatgagatgtacgatttaatgaatgcgaaggaagaaatcctcataaggcatcataagcagatgttggcattgcatctttcactattaatattcgttctatttattgcttacatttactaa

SEQ ID NO: 2892 - protein, 84 aa, Klebsiella pneumoniae
MNLAYFLFLSITVMLTSFIIKSLVVLVKFKLLRDERLEYTSNKNIDEMYDLMNAKEEILIRHHKQMLALHLSLLIFVLFIAYIY

SEQ ID NO: 2893 - DNA, 492 bp, Klebsiella pneumoniae
gtgaccactctcgtatttgaaatggcagatatcaataaactgatcgaagaaattcgcaccgcaaaaacgttttcggtcaccccagatcagatctatgacccggcatgctatccggggggagccctccttaacgctgagggacagactgaagaagaggcgcgtaaagctggtagggttttctttccctcatcctcaaaaattgccagcacacatctggtgccaaaagtgcttctcgcgcacagtcatggtgtatacctgatcactaatgctgagcttgagggctctcccgcatcccgcgatactgtggcttacgcccaggggatgaatccaaaactggatgaggactgggattacgcttgtgatgccgctttgggtgggtctgattgtagctataccattcccgttgagtggctggagttagcggtagagcagggttttcaggagtttcgacttcgaatgagtgaaaccaatatcaaacttgtcagcaaatag

SEQ ID NO: 2894 - protein, 163 aa, Klebsiella pneumoniae
MTTLVFEMADINKLIEEIRTAKTFSVTPDQIYDPACYPGGALLNAEGQTEEEARKAGRVFFPSSSKIASTHLVPKVLLAHSHGVYLITNAELEGSPASRDTVAYAQGMNPKLDEDWDYACDAALGGSDCSYTIPVEWLELAVEQGFQEFRLRMSETNIKLVSK

SEQ ID NO: 2895 - DNA, 312 bp, Klebsiella pneumoniae
atgcaaattgaaaaggtgatgtcattacttgaagtgctttcaagctggcttgaagataacatcaatatggattctgaaattatctttgataatgacgaagataataccaactcagaaattctgtatcctgctgtagaaaaggctaatgccgttttgcgcaaaatggcatctttatcttcagattctgttcatgcaattcgacagcgcttgcagcttgccgtagaaggcaaagctgaattgtccctcaaggatgtgggagagcttctgctggcaacaaagtatctgatgttgtccactgaagagggagagtaa

SEQ ID NO: 2896 - protein, 103 aa, Klebsiella pneumoniae
MQIEKVMSLLEVLSSWLEDNINMDSEIIFDNDEDNTNSEILYPAVEKANAVLRKMASLSSDSVHAIRQRLQLAVEGKAELSLKDVGELLLATKYLMLSTEEGE

SEQ ID NO: 2897 - DNA, 321 bp, Klebsiella pneumoniae
atgtccaatagcttcgataagccgcaaacgctcccggtacataattctgatgccgaacccttttttccgaaaaaccttggtccatttatcgagcaggtatccggaagggatctggcaatgctcacagaatcagagaaggaaaaacttgcgcacctgatcagaactgggcgtaaatatggagtttctgtcgctatcgttcctgatacagattctgctgagcttcatgaattactgtctaatgccgattccattgaaaggcagttttccatctatgaacgcatccagacgaagattgcgttcacgcggtgtcaggaagcataa

SEQ ID NO: 2898 - protein, 106 aa, Klebsiella pneumoniae
MSNSFDKPQTLPVHNSDAEPFFPKNLGPFIEQVSGRDLAMLTESEKEKLAHLIRTGRKYGVSVAIVPDTDSAELHELLSNADSIERQFSIYERIQTKIAFTRCQEA

SEQ ID NO: 2899 - DNA, 585 bp, Enterobacter cloacae
atgcagaaaatgaatgacacatttccctatatgccattaatggcttttgcgatgaccggatttatttgcatcatgacggaaactattccagcaggattattgccagaaatcagtaagggaatgaatatttcgctggctagcgcaggccagtgggtcaccgtctacgccctcgggtcattatttgccgctattccgttaactatcgttacccggtcgtggaatcggaaatatgtcttattaatgaccgtagcgggattcttcatttttaataccattaccgcactttcatcaaatgtttacctgaccctgttagcgcgtttgggggccggggcggctgcgggactggcgtggagcctgctggcggggttttcacgccgaattgttgagccgcttcatcagggtcgggctatggcgatagccatggctgggacaccgctggcgctctcactaggcgttccgctgggaacctggcttgggcattatcttggctggcgcctgacgttcggtattatgtcagtactttcgctgttactaatgatatggatccgtatcagcgttccggactctgcggggcggctttgttga

SEQ ID NO: 2900 - protein, 194 aa, Enterobacter cloacae
MQKMNDTFPYMPLMAFAMTGFICIMTETIPAGLLPEISKGMNISLASAGQWVTVYALGSLFAAIPLTIVTRSWNRKYVLLMTVAGFFIFNTITALSSNVYLTLLARLGAGAAAGLAWSLLAGFSRRIVEPLHQGRAMAIAMAGTPLALSLGVPLGTWLGHYLGWRLTFGIMSVLSLLLMIWIRISVPDSAGRLC

SEQ ID NO: 2901 - DNA, 1158 bp, Enterobacter cloacae
atgcaagattttatctatcataatccggtaaaaattctttttggtcgcgatcaaatttctgcgttagcacaagaagtcccgcagggtaaaaaggtcatgattgtctatggcgggggcagcgttataaaacacggtatattgaaacgcgtaaaagagtccctgacaaacaccctggtttatgagtttggcggtgtagaagcaaaccctcattatgaaaccctgatgaaagccgttgagattgtcagaacagaaaaaattgattttcttctggccgtgggcggcggttcagtgatcgacgggactaaatttattgccgccgcagccctctacgaaaatgatccatgggagatcgtcaagagttatggcggcgtggtgaaacaagctctcccttttggatgcgtgctgaccctggcggccacgggttcagagatgaataacacggcggtgattaatcgggtgaccacccaggataaactctttttcacctccccttacgttatgccgaaattttcagtgctcgaaccggaaatgacctacacgctgcctgaacaacaaaccgcaaacggggttgttgatgcctttgtccacgttcttgagcaatacattacttacccggttaacgctaaggtgcaggatcgcctggcggaaggactgctgagcacgctgaaagaagaaggcccagtagcccttaaaaatccacagaactacgacgccagagctaacatcatgtgggctgcgacgatggccctgaatggaatgttgagcgcaggtgtcccaactgactgggcttctcacatgattggccaggaaattactgcattatacggaatcgaccacgcccgtaccctcgctatcgttatgcctgcactatggcgcttgtgcaaaaaggaaaaagcagaaaagctggctcagtacggtgcgcgtgtctggaatattcctgagtctgatagcgaaaaaatggccgatgaggctatcaatgccaccgtggaattttttgaactgatgggcgttaaaacccgactttctgattatggtctgggcgcggaagatatttcagctgttatcggcaagttaaaagaacatgggcacatcgcattaggtgaacatggaaaaattactgctgaagtggcggaaacaatactgaacatggcactttaa

SEQ ID NO: 2902 - protein, 385 aa, Enterobacter cloacae
MQDFIYHNPVKILFGRDQISALAQEVPQGKKVMIVYGGGSVIKHGILKRVKESLTNTLVYEFGGVEANPHYETLMKAVEIVRTEKIDFLLAVGGGSVIDGTKFIAAAALYENDPWEIVKSYGGVVKQALPFGCVLTLAATGSEMNNTAVINRVTTQDKLFFTSPYVMPKFSVLEPEMTYTLPEQQTANGVVDAFVHVLEQYITYPVNAKVQDRLAEGLLSTLKEEGPVALKNPQNYDARANIMWAATMALNGMLSAGVPTDWASHMIGQEITALYGIDHARTLAIVMPALWRLCKKEKAEKLAQYGARVWNIPESDSEKMADEAINATVEFFELMGVKTRLSDYGLGAEDISAVIGKLKEHGHIALGEHGKITAEVAETILNMAL

SEQ ID NO: 2903 - DNA, 894 bp, Enterobacter cloacae
gtggatgaattaaaggtttttttaacagtggccaggctgaaaagctttaccaaagccgcagctgaaataggtgtgacaccctcagccatcagccacacggtgaaatctcttgaggaaaggcttgggatccgcctgctggccagaaccacccgcagtatctccactacggaagcaggtgaaaggctcattaacgaagttggcccgttaatggaacaggttgatgatgctattagtcggttgagtgagcttagggaaaaacccactggcgtcatacgcctcacggcggcagatgatgttatccagtatttgatccgtcctgtattaccggactttctgagtcgctacccagatattcagattgaaatcggcattgactatggatttacagatattgttgatcagcgttttgatgccgggattcgtccgggcgatgttctgaataatgatatgattgccgcaaaaataagccagaactggcgccagcttgttgttgctgcaccagattattttaagcgttatgctaagcccaggaagccgcaggatcttttgaaccacaactgcattaacgtccgctattctgatacgagtggattgtacgcctgggaattcgagaaagatgctcagaaattcagtctgaaagtcaaagggcaatatattgcgaacagcacgattcatcagctcgatgcagcattagacgggctggggattgcctatattcccgagtatgttgcagatggatatatcaaaagcggcaagctgattgctgttctgaccgagtggtgtccatattttgacggctaccatatttattatcctcaccgccgacaggattctcctgcgtttatggcttttctgcaacttttgcgcgacaggtacaataatggaataagataa

SEQ ID NO: 2904 - protein, 297 aa, Enterobacter cloacae
MDELKVFLTVARLKSFTKAAAEIGVTPSAISHTVKSLEERLGIRLLARTTRSISTTEAGERLINEVGPLMEQVDDAISRLSELREKPTGVIRLTAADDVIQYLIRPVLPDFLSRYPDIQIEIGIDYGFTDIVDQRFDAGIRPGDVLNNDMIAAKISQNWRQLVVAAPDYFKRYAKPRKPQDLLNHNCINVRYSDTSGLYAWEFEKDAQKFSLKVKGQYIANSTIHQLDAALDGLGIAYIPEYVADGYIKSGKLIAVLTEWCPYFDGYHIYYPHRRQDSPAFMAFLQLLRDRYNNGIR

SEQ ID NO: 2905 - DNA, 195 bp, Klebsiella pneumoniae
atgaccaaagagatgtttttacgcattttaaatgaggcacaggctcgtgtggataacgattcgcttccgcttgatgttcgtatccggtcacgcaccacggtaaatgattgcgtcatccgggcagataaagaggggtggcctattgagtataaacagaaggtctgggtagatgcagtcagtggctgttatctttag

SEQ ID NO: 2906 - protein, 64 aa, Klebsiella pneumoniae
MTKEMFLRILNEAQARVDNDSLPLDVRIRSRTTVNDCVIRADKEGWPIEYKQKVWVDAVSGCYL

SEQ ID NO: 2907 - DNA, 312 bp, Klebsiella pneumoniae
atgactttgaaaatggaaagttcccggacttccaagcctgaggggccatttgtattaatcacttttgagggggacgaatttctttttgatgacagacataatgtcgtcaagataaatggcaggcctaaaaaaatggatgtaaagcgaaattattttgagtccgatctgggagaagggaaagcgaaatactggactttaaatatcgaagaggctcatcggttcaattcgattgatgaagcgacagaacaactttgtaaactgagtcgccctcatctgatcaaaattcgcaaagttgagggggtatctgaatga

SEQ ID NO: 2908 - protein, 103 aa, Klebsiella pneumoniae
MTLKMESSRTSKPEGPFVLITFEGDEFLFDDRHNVVKINGRPKKMDVKRNYFESDLGEGKAKYWTLNIEEAHRFNSIDEATEQLCKLSRPHLIKIRKVEGVSE

SEQ ID NO: 2909 - DNA, 534 bp, Klebsiella pneumoniae
atgttaacccatcaaataatacaaagtgaagttgaagagttaaaacggattcttacagagagagatttgacgatcccctcgttctggagttgtatctggcccggattggcatgtatgttatggtttcttctttcatcatattttccgtactggctcagtgattatgcatctgggattgataaaattactgttacggtttttgcgggtgcgatgggtttctttttcatcgtagtgacagctaaagctcgatcttattttctatcgctgcctgaatcattccggaagcaatcaaaatttgttaactttctgctggctaaatgtaaggtgtatgggggtagcatcttattaatgtttacatgtttatcgttttattgttcattcacttatatagattctattgttttttgtgtaataacatttttttacataatagttacggtcatggtgatgaatattgatcttggtcgctatcagttagctaccctgatgtctgttgttgaatcggttagaaataaaggcgttaaactgcagtag

SEQ ID NO: 2910 - protein, 177 aa, Klebsiella pneumoniae
MLTHQIIQSEVEELKRILTERDLTIPSFWSCIWPGLACMLWFLLSSYFPYWLSDYASGIDKITVTVFAGAMGFFFIVVTAKARSYFLSLPESFRKQSKFVNFLLAKCKVYGGSILLMFTCLSFYCSFTYIDSIVFCVITFFYIIVTVMVMNIDLGRYQLATLMSVVESVRNKGVKLQ

SEQ ID NO: 2911 - DNA, 351 bp, Klebsiella oxytoca
atggctatgggcgaaaatgactgcgtgtcgatgcgcgccccgggattttcctcgccggggatgcgcagcgccatgatccgccgccactgcgtttgcaacgccgcatcacgggttaccgccgcctgcggcgggcgcagatcgcgccagagcgccacgccgcctcccgacagccccattgcgagcaggatcggcagccccgtccaggtgccccgaaggttaatccgcatcagcgcgcgctcccgtcagggtaaaactgaactgccaacgcccctcggcgtcgcgctgggtcccgccggcttttgccggcgcgaatcccgcgacgcgagtcagcgcagcctccacgctggttag

SEQ ID NO: 2912 - protein, 116 aa, Klebsiella oxytoca
MAMGENDCVSMRAPGFSSPGMRSAMIRRHCVCNAASRVTAACGGRRSRQSATPPPDSPIASRIGSPVQVPRRLIRISARSRQGKTELPTPLGVALGPAGFCRRESRDASQRSLHAG

SEQ ID NO: 2913 - DNA, 753 bp, Klebsiella pneumoniae
atgagaatcaagatcaaaggagaaatcacggcagaacgcctagcggaagcactgcacgcagcagcagaaaaatacgaagctgtgaggccggggcacaaggtctatggggccaatctctacctaaccgccttcgatgctgatggtctgccgttcgatctggtagaccatcgcggcgaaccgctttcgatcaccatcgaggccaagtctggcgaactggtaaaaccagcactcacagcagagggtgaagcacaccgacagaaagccaaagaggaagcacgaaggcaagctgaagaagcggaagctgaagcacagcgcagacacaggcaagccttagacgaatacgaacaggagcggcaaaaacgacggaaaaaggaagccgaagcaagaaagcaatttgaggacgcgaacgcaatcactgccgaactcttgaaaaccatgccggaacgcttcatcgacgaactgaacaaaaccgtgcaaggcgtttgggacgacctcaagccaaccgaaacgcaaggcaagaagaagggccagccgaaagcgctaccagtcttttccatccatgcggacgggctggtgctttccgtcgagacatggaagaacccgcgccgggttctcaatccgctttgcacactccagcacggcgaaatagccccattctggatgcacgaagcgtggttagaagccatgaggcggatagtcgatctgctggatacgctcaccgcagccccggcagaggccctagaaagccagtag

SEQ ID NO: 2914 - protein, 250 aa, Klebsiella pneumoniae
MRIKIKGEITAERLAEALHAAAEKYEAVRPGHKVYGANLYLTAFDADGLPFDLVDHRGEPLSITIEAKSGELVKPALTAEGEAHRQKAKEEARRQAEEAEAEAQRRHRQALDEYEQERQKRRKKEAEARKQFEDANAITAELLKTMPERFIDELNKTVQGVWDDLKPTETQGKKKGQPKALPVFSIHADGLVLSVETWKNPRRVLNPLCTLQHGEIAPFWMHEAWLEAMRRIVDLLDTLTAAPAEALESQ

SEQ ID NO: 2915 - DNA, 639 bp, Klebsiella pneumoniae
atgagtgacctagacgacagctttgcaaagctgctcggcaggcaacctagtgacgcggagcggcaaagtctttaccgggttcgggatgcgctcggcctgaaaaacaatgatgcgctgtggctggtgctcatggccttgcaacactaccaaggccagtatgagaagttcccgcaagcgatagcacaagcggccaaagataccttggtcaatttcaaggtaacggcggatgcaaccgtgaaagcatcagcggaagcagccaaggcggatttggcgcaagcggtagcagcagcagcgcaagaggtcgcgcacaacacatcggcaaagcagatgtggcagtgggcggcgggctgcatcgcggtggccttcctgtgcgtcggcctgttcggctggtacatgcacagcagcggcaaggattcgggctatcaggccggatacggcgcgggatacaccgaagccaaggacgagaaagcggcggcggcatgggccaacacgccagaggggcgcttggcctaccgcttcgcgcaaacgggaagcctcgccagcttggcgaagtgcgataggccggggtggtacgtcgaaaaaggcgtgtgctacgtcaagcccgcatcggatggcacctacggatggaggttgccatga

SEQ ID NO: 2916 - protein, 212 aa, Klebsiella pneumoniae
MSDLDDSFAKLLGRQPSDAERQSLYRVRDALGLKNNDALWLVLMALQHYQGQYEKFPQAIAQAAKDTLVNFKVTADATVKASAEAAKADLAQAVAAAAQEVAHNTSAKQMWQWAAGCIAVAFLCVGLFGWYMHSSGKDSGYQAGYGAGYTEAKDEKAAAAWANTPEGRLAYRFAQTGSLASLAKCDRPGWYVEKGVCYVKPASDGTYGWRLP

SEQ ID NO: 2917 - DNA, 555 bp, Enterobacter hormaechei
gtgggtatagaacctgaatggaaagttgagaagcagcccgcctggctagtggccgcaatcaggaagacgattgccgcgttgccaggaggatacgctgaagcggcggaaattctggacgaaacccagaattcactctttaaccgccttcgtgctggtggcgaccagatctttccaatgggctgggcaatggtgctgcaaagcgctgctggagtaagttacatcgctgacgcgttctctcgtgaaactgataacggaattcacgttcccggcgcagtgcctgatgatgaaaacgaagagattggcctgaaactggccgagctggtggggaggcttggtgagctggtcaacgcttaccgtcattacattgaagatggtgtagttgaccggagcgagtggcaaagtcttaacgatatcgcatatcagttcagggtcactctcatgacgttcctgaaccttatttcccgtgtttattgccttccagaaatgggtgaggcccgcgagtgtgcagctccgggccccttggcgtgtcgtgtcagtggagaaactaacgcatga

SEQ ID NO: 2918 - protein, 184 aa, Enterobacter hormaechei
MGIEPEWKVEKQPAWLVAAIRKTIAALPGGYAEAAEILDETQNSLFNRLRAGGDQIFPMGWAMVLQSAAGVSYIADAFSRETDNGIHVPGAVPDDENEEIGLKLAELVGRLGELVNAYRHYIEDGVVDRSEWQSLNDIAYQFRVTLMTFLNLISRVYCLPEMGEARECAAPGPLACRVSGETNA

SEQ ID NO: 2919 - DNA, 180 bp, Enterobacter hormaechei
atgcgagaacttaaccggcgtttcagagatcactatggcgtcccggtgcgcgtcatcagatgggagcccgagacccgacgcgttatatacctccgcgaagggtacgatcatgagtgcttcagccctcttgagcaattccagcgtaaatttacagagttaaaggacgatcatgagcactaa

SEQ ID NO: 2920 - protein, 59 aa, Enterobacter hormaechei
MRELNRRFRDHYGVPVRVIRWEPETRRVIYLREGYDHECFSPLEQFQRKFTELKDDHEH

SEQ ID NO: 2921 - DNA, 753 bp, Citrobacter freundii
atgaatataaataaaataatcacatacaaaaatatacagcaagaaaatatagagtttgttgatgctgcaattaaagatctttttataacagcatcaagagatgtaattgctctttgggtaaaaagaatagatgaaaggatagtgaaaaataggggcttaaaattttggtttatgagaaataatgatgaatatgcgtcaggaaccttcctttatagccattgcactctttcagcagtaaaatcaatatacttactattcgatttcataaagtcggatgaaggacaaaaagcttggatgtctttgattgatgcttatgattatattgatgttgcaaaaatattcttaaataaatataaaatacaaagcgaaggacttgatgcctttactcatcggatagaatctttagaaaaagtgattttccctacccatcatttgtttttaagcccaggagccaaagaaactctggggaattgtaatatttgtggtagtgattactttgagtgtgagtatattgaacgggaaatatataatggtatgctttgcttgcgaattaatagaaagatattagaggccaatcatatagctttagtagaaaacccaagggataggcggtgcattattttaacgattcaaaatactgatggaactaaacttgaaatattcagccgtaaaagaaagattggtgaaaagaacgctgatgaaatgactttgaatgcaattatacataattttagacagccagtgtttaattga

SEQ ID NO: 2922 - protein, 250 aa, Citrobacter freundii
MNINKIITYKNIQQENIEFVDAAIKDLFITASRDVIALWVKRIDERIVKNRGLKFWFMRNNDEYASGTFLYSHCTLSAVKSIYLLFDFIKSDEGQKAWMSLIDAYDYIDVAKIFLNKYKIQSEGLDAFTHRIESLEKVIFPTHHLFLSPGAKETLGNCNICGSDYFECEYIEREIYNGMLCLRINRKILEANHIALVENPRDRRCIILTIQNTDGTKLEIFSRKRKIGEKNADEMTLNAIIHNFRQPVFN

SEQ ID NO: 2923 - DNA, 210 bp, Citrobacter freundii
atggaaattaaaacttcagattttggaatttctacaaaagatgttcgcaaagtattagttctccctaatattggcttaggtagcgaaaatatttttagcacagattctattagttttattaaatatctaaaaaaagaaattgatttggagttttatcatcaaccagaaggattttgggaacagtaccaaaagcatggagataaattatga

SEQ ID NO: 2924 - protein, 69 aa, Citrobacter freundii
MEIKTSDFGISTKDVRKVLVLPNIGLGSENIFSTDSISFIKYLKKEIDLEFYHQPEGFWEQYQKHGDKL

SEQ ID NO: 2925 - DNA, 216 bp, Klebsiella pneumoniae
atgaatacatatattttcctgggaggggctattgtggctgaagtcataggcaccacctttatgaaatattcagaaggatttacacgcctgtggccgtctgtaggaactgcaataagttattgcgctgccttttatctgctttcccaaacattggaaaatatacggggtctgacgctcagtggaacgaaaactcacgttaagggattttggtcatga

SEQ ID NO: 2926 - protein, 71 aa, Klebsiella pneumoniae
MNTYIFLGGAIVAEVIGTTFMKYSEGFTRLWPSVGTAISYCAAFYLLSQTLENIRGLTLSGTKTHVKGFWS

SEQ ID NO: 2927 - DNA, 594 bp, Klebsiella pneumoniae
atgagcaacctccgccggcctgttcgccgcatccaccattttctgcacgtctttgctggcaccgtaacgccggaccactccaacgaactcctcgacgtcgtgtccgcgaagcttcagaaccggcatcccggtctctttgttgaacttcggcgcgccatagtcatcggtagcctgggcgatgtggtaaagctcatgctccaccagtgcgcagaactccagatcggtacattgcgcgcagaaatccgccgccagcgtgatgatgaactccggcacatcgccgaaccactcatacatttgctgctcctgccgtgccttctgccagccgccgacgcgcatcatcaccgattccgcctggccgagtacggtacgcccttgtttcgcgaaagcgctggaggcccacataaagcgcaggtccgcatcaatcaggtggccgtggtcagggttatgcagatagccgtcagcagacagtatctggctgtttacccactcaccgatttcaggtgcggggatcagccgtacgtaaggaagaacatcaaaaaaattcctgtctggatgtggacgcacattcaattctccatgattattattccgtaa

SEQ ID NO: 2928 - protein, 197 aa, Klebsiella pneumoniae
MSNLRRPVRRIHHFLHVFAGTVTPDHSNELLDVVSAKLQNRHPGLFVELRRAIVIGSLGDVVKLMLHQCAELQIGTLRAEIRRQRDDELRHIAEPLIHLLLLPCLLPAADAHHHRFRLAEYGTPLFRESAGGPHKAQVRINQVAVVRVMQIAVSRQYLAVYPLTDFRCGDQPYVRKNIKKIPVWMWTHIQFSMIIIP

SEQ ID NO: 2929 - DNA, 2202 bp, Klebsiella oxytoca
atgatccgtaggcttattctgctactggcattcagccccctgctggcacaggcgagtcagccgctcacctggtcgctggccggaatgtggcgcgtgcatgatgctaacgacagcacattcgacggggttaatgcccctgaacacggctggcgtgcgcttcgggtgcctgccaactggtacagcgccggatacgatcatcagggcgccctgtggtatcggcatgaatttacgcttcctgagcgtgcgccgaataccatggcgaccttagtttttgacggcgtggactattttgccgacgtcacgctcaacggaaaagcgctggctcgtcatgagggctattttcagcgcttcccggtggatgtcagcgacgcgctgcgccgccataatcggctcgcagtccgggtagacagcccttatgaagatcctgaaaaaatctggccgctgcacaaaacgctggtgaaggggatacttaaccaacacgacacccgccccggcggcgcatggtcggttcaggggcaggatgccaattcaggagggatctgggcgccggtaaaactgcatctgagccgcggcgtaacgatagatgacgtgattctacggcctgactggcagaaggggctggaaaacccggttttgcgagtggaaatccgttatcgggcactgacgaccggacctgccactctgtgcctctcagcaatgccggataatttcaacggccagcgcttttatcaggattttccggtcaatctcgcgacaacggacggtaagatgcaaaccctgagcgtcacgctgccgatggacggcgccaggctgtggtggccggtgggctatggccgaccaaacctgtaccgggtgcgcgccaccctcaaggatgagcagggggtaatggacaccaccgtcacccgcacgggcctgcgcaagctggaggaacagccggataacaaaggctggctgattaacgacaggcggctctttatcaaaggcagcaactatatcggttccccgtggctcgggacgatgacgcggaaaaaataccgcagggatttcgaactggtggaagcgatgaacgccaatgcgatccgcgttcacggacacgtggcaggccgcgccctttatgaggtggccgacgagatggggttgatgatctggcaggatgttcccctccagtggggctacgacaacagcgctgcctttgccgacaatgcggtgcgccagacccgtgaaatgattgaacagttcggcaattccccggccattatcgtctggggtggacataacgagccgccctggaactccccgtggatggaaaaacgcttcaccgactggaataaaacgttaaaccaggctctgacgaagcgggtgggcgatgcgctggcggaagacacgtcgcgcatcgtacatcgtttttccgccgtcgaggaacactactgggccggatggtattttggcaccatgcgcgatctgctcgctcccgccaaaaccgggatcatcactgagtttggcgcccaggccctgccgcgactctcaacactgaaaaccatcgtacccacccatctaatatggccgaagagtacagcggcagacgatcccggctggacgtactggaaataccataatttccagcctttccagacctttaaatttgcgaacataccgcgcgggaataacattcaggagatgattgataatactcagaaatatcaggcggatctggtcgccatggcggcggaaagctatcgccgacagcgctttcagccggtgaccgccctcttccactttatgtttgtcgagacctggccctcgatcaactggggcgtggtggattatctgcgtaagccgaaagcgggctactacgcgctacaaagggcttatcaaccgatcctgccctccattgagcccgtaaccgccgtctggcgtcagggaagcaaggcggccttacgactatgggcgatcaacgacacctggtccgcatgtaatgattgccgactgaagtggcaagtgaagcaaaatggacggacacttgccaaaggcgatataacgcggacgctacctccggattcaggcttccaggtaaaggaaattaccgtcacgcccaccaccagacataaagtgaccattgaataccgcattgagaatgacgccggaaaaacgatgggatacaacgtacgccatgagaacgtagaggaaccaatctcacgataa

SEQ ID NO: 2930 - protein, 733 aa, Klebsiella oxytoca
MIRRLILLLAFSPLLAQASQPLTWSLAGMWRVHDANDSTFDGVNAPEHGWRALRVPANWYSAGYDHQGALWYRHEFTLPERAPNTMATLVFDGVDYFADVTLNGKALARHEGYFQRFPVDVSDALRRHNRLAVRVDSPYEDPEKIWPLHKTLVKGILNQHDTRPGGAWSVQGQDANSGGIWAPVKLHLSRGVTIDDVILRPDWQKGLENPVLRVEIRYRALTTGPATLCLSAMPDNFNGQRFYQDFPVNLATTDGKMQTLSVTLPMDGARLWWPVGYGRPNLYRVRATLKDEQGVMDTTVTRTGLRKLEEQPDNKGWLINDRRLFIKGSNYIGSPWLGTMTRKKYRRDFELVEAMNANAIRVHGHVAGRALYEVADEMGLMIWQDVPLQWGYDNSAAFADNAVRQTREMIEQFGNSPAIIVWGGHNEPPWNSPWMEKRFTDWNKTLNQALTKRVGDALAEDTSRIVHRFSAVEEHYWAGWYFGTMRDLLAPAKTGIITEFGAQALPRLSTLKTIVPTHLIWPKSTAADDPGWTYWKYHNFQPFQTFKFANIPRGNNIQEMIDNTQKYQADLVAMAAESYRRQRFQPVTALFHFMFVETWPSINWGVVDYLRKPKAGYYALQRAYQPILPSIEPVTAVWRQGSKAALRLWAINDTWSACNDCRLKWQVKQNGRTLAKGDITRTLPPDSGFQVKEITVTPTTRHKVTIEYRIENDAGKTMGYNVRHENVEEPISR

SEQ ID NO: 2931 - DNA, 2676 bp, Klebsiella oxytoca
atggggtctccttcttgtttcgatctcaacgtgctgccttctgcggtgatgatttacgatccgggcgaacgcctgctggcatggaatgacaaagtggtgcagttttacccggtgatcgctccgtggcttgccgtcggcgcgcccctcgaaagtcttgcggagaaatttattgatgcgggctacaacatcgaccctgcccgacgccagctcctgcatgaggcaataattcgcaactgccgccagccggatcaccgggaagtccggcagtcgggtagacggcggctctatgttcagcaccagcggctaagcgatggcggcatcatcagcctgcataccgatatcaccgagcttgacgaggcgcagcgctcgcgccaccagttgcacgacaactttttgctgaccgcagagtctatccagataggcatatgggactgggaggtctcccgcgacagcctgcaagtgaacgatacgctgctagcgatggtgggcctgccgcgcgtacagctacgctatccgctgcgctttctgcttaacctgatccatgaagaggatcgcgccaccctgcgccacgcgatgagcgcctccaggcaagatcatatgccggtgtttgagtgcgaaattcgtgtacagcatcccacgcaaggctggcgctggatgttaatctcaggacaagtggtgaccctcaatatgcagcagcaggccgaacgggtgatcggcaccctgcaggatattacccgccgcaaggaggccgaactgctggccatcgaggcggcgaaagtggcccgggaagccaacgaggcaaaaagcgcctttctggccaatatgagccacgaaattcgtaccccgatgaacggtatcctgggcatgactcaactctgtctggacacccagcttaaccccgaacagcgggaatacctttcgctggtcatgagttcagcccagtctctgctgcatatcatcaatgacatcctcgacttctcccgcatcgagtcgggcaaaatgtcgctggatgccgaaccgctggagattcgccccttcgtccaggcgctgatccgcccgcatatgcccgccgccagtgaaaaagggattgagctgctggtggacatcccgccagtggtgccggacgtgctgatagtcgacggcccccggttgcgacaaatcctcaccaatctgctgggcaacgccctgaagtttacccatcaaggcgaggtacttctggccattgagcctgccgacggtgaagagcaatggcgttttcgcgttcgcgacagcggcatcggaataccagttgagaagcaaaaggccatctttgaggccttcagccaggccgacagttctaccacccgccgttacggggggaccggcctggggctgaccatctcggcccgcctggtcagtctgatgggcggtgagctgacggtgcagagcgagcctggcgtgggtagcgaatttggctttactctccccctcgagagccagcagacgctctccacagctgccgcccctgtggcccacttcagcggccaaaaagtactggtggtggatgacaacagcacgaacctgcgcctgcttgataccatgcttcgtcagatgggactggtgccgacctgcgtcaacaacgccagcgaggcgttacggctgacgaccgggagcgaacgctggccgttattcctgctcgatgcgcagatgccggatatggacggcatttcgctcgcgcttgagctttccgccctgccgcaaaccgggcagagcaatatcatcatgctcagctcaatgaaccgccattttgacgccaggatgcttaaacgcatcggcatcgcccactatctgcacaaacccgttgcccagcgtgagctgcaccaggttatcgccagtgtccttgaatccctccccgccgcggcccttgcccctgaccccattgtgacgaccaccgtgccgcagaccgaattacgtattctgctggccgaggataacctggtgaatcagaaagtcgccagacgcctgctggaacagctcgggcaccggtgcgaagtggtcaacaatggccgtgaggcccttgaacgctggcgggaacagccctgggacctcctgcttattgacctgcaaatgcctgagatggatggagaaaccgccatccgcctgctacgcgaagaaacccacgcacaggggcgcagccaccagcccgccatcgcgatgaccgcccacgccatgcagggagataaagagcgctgcctggcgatgggcttcgatggctatatcgccaaaccggtaagccaggagactttgcgcgaagaaatagcccgcgtccgctttgagggagataagggcctgccggacgaagcgcggctattaaaacagtgcgcggacgatccctcgctggtcgatgagctgttgggactgttcggccaggggcttgacggagcaatggcagccatacaacaggccatcgacagcgacgatcgtgaggctctgcgccgggccgcgcataagcttcgcggcgaagcggttaccctcggttttaccgcccttgcagagcgactacagcagcttgagagccaggccccattgctggagcaggccgggattaacattcgacaaggcgaagttagcgaggaggcaaggcgcagtgctgcgtggctacgccgcagaacgcaggaggtaaaacatgatccgtag

SEQ ID NO: 2932 - protein, 891 aa, Klebsiella oxytoca
MGSPSCFDLNVLPSAVMIYDPGERLLAWNDKVVQFYPVIAPWLAVGAPLESLAEKFIDAGYNIDPARRQLLHEAIIRNCRQPDHREVRQSGRRRLYVQHQRLSDGGIISLHTDITELDEAQRSRHQLHDNFLLTAESIQIGIWDWEVSRDSLQVNDTLLAMVGLPRVQLRYPLRFLLNLIHEEDRATLRHAMSASRQDHMPVFECEIRVQHPTQGWRWMLISGQVVTLNMQQQAERVIGTLQDITRRKEAELLAIEAAKVAREANEAKSAFLANMSHEIRTPMNGILGMTQLCLDTQLNPEQREYLSLVMSSAQSLLHIINDILDFSRIESGKMSLDAEPLEIRPFVQALIRPHMPAASEKGIELLVDIPPVVPDVLIVDGPRLRQILTNLLGNALKFTHQGEVLLAIEPADGEEQWRFRVRDSGIGIPVEKQKAIFEAFSQADSSTTRRYGGTGLGLTISARLVSLMGGELTVQSEPGVGSEFGFTLPLESQQTLSTAAAPVAHFSGQKVLVVDDNSTNLRLLDTMLRQMGLVPTCVNNASEALRLTTGSERWPLFLLDAQMPDMDGISLALELSALPQTGQSNIIMLSSMNRHFDARMLKRIGIAHYLHKPVAQRELHQVIASVLESLPAAALAPDPIVTTTVPQTELRILLAEDNLVNQKVARRLLEQLGHRCEVVNNGREALERWREQPWDLLLIDLQMPEMDGETAIRLLREETHAQGRSHQPAIAMTAHAMQGDKERCLAMGFDGYIAKPVSQETLREEIARVRFEGDKGLPDEARLLKQCADDPSLVDELLGLFGQGLDGAMAAIQQAIDSDDREALRRAAHKLRGEAVTLGFTALAERLQQLESQAPLLEQAGINIRQGEVSEEARRSAAWLRRRTQEVKHDP

SEQ ID NO: 2933 - DNA, 1395 bp, Klebsiella oxytoca
atgcttaaaaccctagcccgctggctggccgtcgccatcgtcgtactgcttatcgccttcgcgctgttcagtcgcgaaggcgcggggtggcgctggctcactaaaggcggttggcacaccaccgcgcgcatcagcagcctgacgccgcaagagcaggcgtgggcgcacatcgcctggcgctatttcgagaataatacccagccgcaaaccgggctggtcaacggcagcgacaagcagccgcgcgtgaccctgtggcaaatgggcgacaccctgatcgccctgatcgccgccagagagctgggactggtgcaggaagatgaattcgacgcccggctgacgcgcctgctcggtaccctgaatcgcctgacgctcaccgatgtccgcacgccgggaaggctctactccagccagacggcgatgcctgttgatttcagcggccagccgacaaaaagcggctggtcggcaaaagatatggcgcggctaatgctggccctgcggctgaccgccgaacgcgcgccgcagtatcgtgagtatctggataaaatcatcctgcgctggaacttctgtccggtcatagataaagacggggaactgtggtcagcctctgttcagaacggtcagacggtcatacgcgaggagctacggctgggggagagcgaatacgcggccagcgcctttcgcctgtggggattcctgcctcagaaagcgctctctcctccctcgcgcaacgtcattatctatcagcgtagcctcgccgtagatgaccgtgacccgcgtacaacatggcagccgtcgctgttgaccaccctgcccgccatgctgccagggctggagttcggctggcagccgcccggcgtgccgccggaggtacaaaaagcgctgcgcacccgcgcccagggagtatggctgagtcagaaaacgcgctgggagcgtgacaaagtacttaccgcgcgagccgattttacgctgccgcaggccccctggcacgttgaggacaccgtctgggggaacggctacgcctggaacaccattggcgacgacggtcgcgactatccccgactggcgcaggtatccactaaagcggttttcgtcctctggacgctgtggaaaaccgactacaccgatgctctgatggcggtgacaacacatcttaataacccacaacaaggctggtttgaggggcgcgtggaggcgaccggggacgtcaaccggaccctcactctctccaccaacgccatggtgctggaagcacttctctataaacacaacgccggaccgctgtttgaaaacggccttacagatgacaacagctattttgtccaccgcgcgacagacgaatttaacccgccaggcttgtgtctgccaggcgaacgggcagcgagggccgcaccatga

SEQ ID NO: 2934 - protein, 464 aa, Klebsiella oxytoca
MLKTLARWLAVAIVVLLIAFALFSREGAGWRWLTKGGWHTTARISSLTPQEQAWAHIAWRYFENNTQPQTGLVNGSDKQPRVTLWQMGDTLIALIAARELGLVQEDEFDARLTRLLGTLNRLTLTDVRTPGRLYSSQTAMPVDFSGQPTKSGWSAKDMARLMLALRLTAERAPQYREYLDKIILRWNFCPVIDKDGELWSASVQNGQTVIREELRLGESEYAASAFRLWGFLPQKALSPPSRNVIIYQRSLAVDDRDPRTTWQPSLLTTLPAMLPGLEFGWQPPGVPPEVQKALRTRAQGVWLSQKTRWERDKVLTARADFTLPQAPWHVEDTVWGNGYAWNTIGDDGRDYPRLAQVSTKAVFVLWTLWKTDYTDALMAVTTHLNNPQQGWFEGRVEATGDVNRTLTLSTNAMVLEALLYKHNAGPLFENGLTDDNSYFVHRATDEFNPPGLCLPGERAARAAP

SEQ ID NO: 2935 - DNA, 339 bp, Klebsiella oxytoca
atgaacattgatacagacaggcagcacaacgtgaatattatgatgccgtcggtacgccgactggacgcctcggtggcggcggcttttaaggatgctatcatccgggagatcggagaggatcgtaaagacctgataatcgatttcagcaagatcgattttatcgacagtagcggtctgggaatgttagtttccctgctgaaaatgatgaacggtagaggtgaaatgacgctgtgcgcgctgaatcccggcattcacaatatgttcaccctgactcgtatggatcgtatcttccgcatctgccaggatcgcgccacggcacttgcactgctgaatcagtga

SEQ ID NO: 2936 - protein, 112 aa, Klebsiella oxytoca
MNIDTDRQHNVNIMMPSVRRLDASVAAAFKDAIIREIGEDRKDLIIDFSKIDFIDSSGLGMLVSLLKMMNGRGEMTLCALNPGIHNMFTLTRMDRIFRICQDRATALALLNQ

SEQ ID NO: 2937 - DNA, 420 bp, Klebsiella oxytoca
gtggctaacgctatttcgcttccggccgccttaacctctgtctcgccgcttgcggcgtggcttgcgcagcaggtggctccgctgtctgtcagcgacgaatggcgctttgcgctcgatctcgccgtttgtgagaccgccaccaatatcattcgccatgcgttacatgaggacggagagcgtcgcttcaccgtggagtttatcgccgctgcctcgggagtgatgctgcgttttaccgatgctggcgatccctttcccgctgattgcctcgcggcggcgcgcgataatcccttgttcgataccgaccctttggctgaaagcggcagaggagtgaaattgattttgtcgtatgtcgacacttttaccgcagaaaacagggaggggaaaaatgtcaccgtccttgaaaaaaggatgtcgggatag

SEQ ID NO: 2938 - protein, 139 aa, Klebsiella oxytoca
MANAISLPAALTSVSPLAAWLAQQVAPLSVSDEWRFALDLAVCETATNIIRHALHEDGERRFTVEFIAAASGVMLRFTDAGDPFPADCLAAARDNPLFDTDPLAESGRGVKLILSYVDTFTAENREGKNVTVLEKRMSG

SEQ ID NO: 2939 - DNA, 231 bp, Klebsiella oxytoca
atgaaacaacgtactactcagagtgtcactgtcacgctggaacgcgatctgatcgccgccgcccgtgctgctggggtgaatatgagccagactctggctgtagcccttgatgccgaactgaaaaagcacgcagccgctcgctggaaagcagaaaatcgtgaaggactggaagcgcttaaccgcttccatgatgagcacgggcacttcagtgatgactacaggacgttctaa

SEQ ID NO: 2940 - protein, 76 aa, Klebsiella oxytoca
MKQRTTQSVTVTLERDLIAAARAAGVNMSQTLAVALDAELKKHAAARWKAENREGLEALNRFHDEHGHFSDDYRTF

SEQ ID NO: 2941 - DNA, 207 bp, Klebsiella oxytoca
atggaaactgaacatgaagctattactattgaattaatcattaagaatggtgttgttacctatgtccgcaaagttcaaaagggagaaattacagcctctttcgatacttttttctggttagcaaaacaggccggttacaaaataatcccaccacaagaaaacactcaagaatcacaagatattctaactttcgcagaagtcgattaa

SEQ ID NO: 2942 - protein, 68 aa, Klebsiella oxytoca
METEHEAITIELIIKNGVVTYVRKVQKGEITASFDTFFWLAKQAGYKIIPPQENTQESQDILTFAEVD

SEQ ID NO: 2943 - DNA, 312 bp, Citrobacter freundii
atgaagagggaagaaattacagcgattatagaaaacaattcaattcaacaattgaaagagatccaagaattgttagatctgaaatcgatagaaacaaagcagagtttgctgaaagaattgaaaaaagaaaaagcagaaatagatcaaagtttaaaaactcacagagcaaaaataaaccagagaatacaaaaaacattaaaggaaaaaatagcaatattgaatatagatctattaacaataatattgattttactgtcaacaacaacggttttacagatattaacgataatatatttgatatggagaaaataa

SEQ ID NO: 2944 - protein, 103 aa, Citrobacter freundii
MKREEITAIIENNSIQQLKEIQELLDLKSIETKQSLLKELKKEKAEIDQSLKTHRAKINQRIQKTLKEKIAILNIDLLTIILILLSTTTVLQILTIIYLIWRK

SEQ ID NO: 2945 - DNA, 414 bp, Klebsiella michiganensis
atgagtcaattaattcaaaatataaaacaaaaacagaagaagaagaaagaggaagaattgcaagagcaagagatattgaacaaattaataaacagcaacaactcattaaacgaagaattgaggaggttagacgaacggacagccagctctcaaagtctattgaaacaacaaatgaaagagttagaagagatcgaagatcgatacaatcaattatatataatgctcgaagacacattagaacgctttcagcttattttagaaaaaacgaacacaaaagatattttgaagaaaaaaaacgactcgaagaagaaaaacaatttaaccaaaaaagaagaaaaaaatttatatattgaggatataaaatcaatgcttaatattttattagatcaatacgaaaaaaccgcgaacaagtga

SEQ ID NO: 2946 - protein, 137 aa, Klebsiella michiganensis
MSQLIQNIKQKQKKKKEEELQEQEILNKLINSNNSLNEELRRLDERTASSQSLLKQQMKELEEIEDRYNQLYIMLEDTLERFQLILEKTNTKDILKKKNDSKKKNNLTKKEEKNLYIEDIKSMLNILLDQYEKTANK

SEQ ID NO: 2947 - DNA, 459 bp, Citrobacter koseri
atgagtcaggtgatcctcgatttacagctggcctgcgaagagaccagcggcctgccggacgaagcccttttccaacgctgggtcgacgccgtcattccgccgtttcaggaggagtcagagttaacgattcgtctggtcgacgttgcagaaagccatgagctgaacctgacctatcgcggcaaggataagccgaccaacgtcctctccttcccgtttgaagcaccgccgggaattgaaatgccgctgctcggcgatctgatcatctgccgtcaggtggtagagcaggaagccagcgagcaaggtaagccgctggaggcgcactgggcgcatatggtggtgcacggtagcctgcatctgctgggctacgatcatatcgaagacgacgaagcggaagagatggaaggccttgaaacagagataatgcttgctctgggctatgaggacccgtacatttcctag

SEQ ID NO: 2948 - protein, 152 aa, Citrobacter koseri
MSQVILDLQLACEETSGLPDEALFQRWVDAVIPPFQEESELTIRLVDVAESHELNLTYRGKDKPTNVLSFPFEAPPGIEMPLLGDLIICRQVVEQEASEQGKPLEAHWAHMVVHGSLHLLGYDHIEDDEAEEMEGLETEIMLALGYEDPYIS

SEQ ID NO: 2949 - DNA, 267 bp, Klebsiella pneumoniae
atgaagattcgcctcacagtgacagttagcgcttatggccagggtgataaccctttgtttacgagattgatatttgtagataaagaccttactaatgcgcctccgatagaggtttttgtggaaagattacaaatggagttgcttcctgatttccaaaaagaaaacagtagcattgcaagcattgcggttgaatcaattgtgattattgacagcggaaaaagcgtcgcgcatacagtctggccgaagcctgataaaaaaggtgcataa

SEQ ID NO: 2950 - protein, 88 aa, Klebsiella pneumoniae
MKIRLTVTVSAYGQGDNPLFTRLIFVDKDLTNAPPIEVFVERLQMELLPDFQKENSSIASIAVESIVIIDSGKSVAHTVWPKPDKKGA

SEQ ID NO: 2951 - DNA, 1113 bp, Klebsiella pneumoniae
gtgtttaacggttctaatttgcgattggctcgtctgtatcatgagttatcactggagcaagtagctgagcgggtcgataagacccgccagtacattcagcggctggaatccggctcggctgtgcctactcctgagcttgcgaataaattagctgccgtattgctggttacgcctgaatttttcgcagtgcaagagcagtctccagtgaatgaagagctcgttcatttccgcaagcgtagttcaacacgcatggctactaagttgtcgacgctcgctaaagctgaattatatcgccgcctcattgaagtttttgaagattacttgaatttaccgccagtaagatttcctgaactgagagtaaatactcaagaggacatagaaagagccgctgagaaatgccggactgattggggattaggttttgggccgatcgacaacatgactcgacttgctgaaaagctgggagcatttgttacttctttcgattctgtctctgatgatgtggatgcgctttctgttcctttaagccggccattcattgtaagaaatacggctaaaaaatcgccttgccgtcagcgttttgatattgctcacgaagtagcacatttgattttgcatgaaggtatttcaacgggggatcgggtaactgaatctcaagccaaccgttttgcatcggcattgcttttaccccgttcggcgatggcaaaatatttccctcgcccaattggtggtcgtatcgactggcaagggctgagtcaatttaaattgacatggaaagtgagcaaggcagcaacaatttatagggcgcatcagctttctctcttaaccgatgcccaatataaaacggcattcttcggtttaaagcgcaagggggaagcaattgatgaaaaagaggattatttgattcctaatgaaaagcctgagctttttcataaggcaatgaagtttctcttaacggatctgtcagttgatgttgattacttagccaagcgtttgtgtattaccccgacgatgttagcagagttagcaaacgataatgcgttagattttgccccagaaatcgctaacgaaaatgtcgtttctctgtctgcataccgaatgaataccgcttaa

SEQ ID NO: 2952 - protein, 370 aa, Klebsiella pneumoniae
MFNGSNLRLARLYHELSLEQVAERVDKTRQYIQRLESGSAVPTPELANKLAAVLLVTPEFFAVQEQSPVNEELVHFRKRSSTRMATKLSTLAKAELYRRLIEVFEDYLNLPPVRFPELRVNTQEDIERAAEKCRTDWGLGFGPIDNMTRLAEKLGAFVTSFDSVSDDVDALSVPLSRPFIVRNTAKKSPCRQRFDIAHEVAHLILHEGISTGDRVTESQANRFASALLLPRSAMAKYFPRPIGGRIDWQGLSQFKLTWKVSKAATIYRAHQLSLLTDAQYKTAFFGLKRKGEAIDEKEDYLIPNEKPELFHKAMKFLLTDLSVDVDYLAKRLCITPTMLAELANDNALDFAPEIANENVVSLSAYRMNTA

SEQ ID NO: 2953 - DNA, 594 bp, Klebsiella pneumoniae
atgcaaaattacccattaccttggacgtttcatccacagttaaccgaagaacgcttatctatcattgcggaggctctccttaaagtgcaggaagacacgcatgagcttttgtcttcttcgcttgatgataattatacccgagcaacatgtacttttgggcgccagaaaaatcgaatcgtcaaactgtgcatgtcaaaaaaatacgactggttggggctttctaatccgaataacgattacacaatcactattggtggtatcccaatccgttcttttagcgatgatccaactaatccgaaaaaggctaacttctttcgaaagaatagtgttgatcagctattcgcatcggaagatacaatccctacgatttggcgcttcgttgtagagaaacctgagttcgaaggtgagggtgggcgagtgcattttgcgggttataatgcgctggaagaaatgctctctttatggacgtatggcgaagaacgggtaactgtgctgcattctactgatgataccccgccagcacctgtcaagattgaactggatgatatcagcgcttctgttcctgaaaaggaaaagaaaagcgataacggataa

SEQ ID NO: 2954 - protein, 197 aa, Klebsiella pneumoniae
MQNYPLPWTFHPQLTEERLSIIAEALLKVQEDTHELLSSSLDDNYTRATCTFGRQKNRIVKLCMSKKYDWLGLSNPNNDYTITIGGIPIRSFSDDPTNPKKANFFRKNSVDQLFASEDTIPTIWRFVVEKPEFEGEGGRVHFAGYNALEEMLSLWTYGEERVTVLHSTDDTPPAPVKIELDDISASVPEKEKKSDNG

SEQ ID NO: 2955 - DNA, 342 bp, Klebsiella pneumoniae
atggcaaaagttagatttgaaaactcacttaataagatgatatttgaaattcgtggttatgaatcattttccgaaatggaaacagcattactagatttttgtgatgaaactatgggggcaaaccatcctgatattgtggtggaatatccggtttattataagcattttaataatgataaaatttcatatgagcatataggttatgttaatttaggaatagatcaggatgatggttcttgctatacgattgaacatctgacattagaccgcaaaacacttaaaaaccactggcatcccttctatttttataaaggcgaatgtgagtacgggtttaaaaattaa

SEQ ID NO: 2956 - protein, 113 aa, Klebsiella pneumoniae
MAKVRFENSLNKMIFEIRGYESFSEMETALLDFCDETMGANHPDIVVEYPVYYKHFNNDKISYEHIGYVNLGIDQDDGSCYTIEHLTLDRKTLKNHWHPFYFYKGECEYGFKN

SEQ ID NO: 2957 - DNA, 207 bp, Klebsiella oxytoca
ttgggaagaaatgacctgcttattcgcaccttccttaagaaagataaaattacagatcgggaaatgaaaattatccgcatgaccgcccagggcatgcagccgaaatcgatcgccagaattgaaaattgtagcgtgaagacagtgtatacccatcggcgtaatgctgaggccaaactgtattccaaaatatataagttagttcagtaa

SEQ ID NO: 2958 - protein, 68 aa, Klebsiella oxytoca
MGRNDLLIRTFLKKDKITDREMKIIRMTAQGMQPKSIARIENCSVKTVYTHRRNAEAKLYSKIYKLVQ

SEQ ID NO: 2959 - DNA, 183 bp, Citrobacter rodentium
atgatccgtcacacccctccggaagtgatttttcaccgtatctccgccagcgcgcgccgcccaacgctgctggcgccgctgtggtgtgagaaccgctggaccgggatggttgaactggataaatacctcaatgaacacggcgtgcaggggtctgctctcggtcgtcgctggatctctccatag

SEQ ID NO: 2960 - protein, 60 aa, Citrobacter rodentium
MIRHTPPEVIFHRISASARRPTLLAPLWCENRWTGMVELDKYLNEHGVQGSALGRRWISP

SEQ ID NO: 2961 - DNA, 462 bp, Citrobacter koseri
atgacagcacaaatttcagcctacgggcggctggtggcagatccccagaccagaacgacgaacagcggaaccagcatggcaatggggcgtttagcggtggcactcccctgccatgcagtagagggcggagaggttactttctggctgggcgtggtggcattcggcaaacaggccgacgcactggcagaacacgttaaaggcgatttagtcagtgttgccggaacaatgcaggtcaatcagtggacgggcaaggatggaggaacgcagcaggggtatcaggtagtagccgacagcgtgatcagtgcgaggacagcaaggccgggcggaaagcgtggcgcggcagctagaacaaatgaagtcaacaaaggccataccacgcaacccgcgccgggatgggaaatatacagcacccctgatgattttgaccagcgcccaccattcgacgatgaagcgccattctga

SEQ ID NO: 2962 - protein, 153 aa, Citrobacter koseri
MTAQISAYGRLVADPQTRTTNSGTSMAMGRLAVALPCHAVEGGEVTFWLGVVAFGKQADALAEHVKGDLVSVAGTMQVNQWTGKDGGTQQGYQVVADSVISARTARPGGKRGAAARTNEVNKGHTTQPAPGWEIYSTPDDFDQRPPFDDEAPF

SEQ ID NO: 2963 - DNA, 222 bp, Enterobacter asburiae
atgagccagttacaactgattgatgctgcctgccagattgaacaggcacaggctgttttatccatgtggctggagagcaccaccaaagacactagccccgaccttccgcgtcttatcggttcaatcctcactttgctgcatggcgtcccggaggcaatggaagaagccgaaagcaagctggctgactatgtgatgcgtgaatatcgggagggcaaagcatga

SEQ ID NO: 2964 - protein, 73 aa, Enterobacter asburiae
MSQLQLIDAACQIEQAQAVLSMWLESTTKDTSPDLPRLIGSILTLLHGVPEAMEEAESKLADYVMREYREGKA

SEQ ID NO: 2965 - DNA, 843 bp, Salmonella enterica
atgactatcgaaaaaagccgattcaattcggaggccgccccacaatccagcgttaaccagggcgaatatagcactaatgactttgccgctattgttcccgttatttccggtcaaattggcgggcgtgaggccagtattgttagtgctaaggcactgcatacagcgcttggagtaggtaacgacttttcaacctggataaaactacgcattgatgaatatggctttagcctgagtgctgattacgtggtttttgattcctcatatttcaggaatcaaagttcaaattttgaacagggtagccccggatgggtgacaaagcgtggcggcgaccgtcgcagtaaagattatggcctttctctgggaatggctaaagaactggcaatggttgagcgaaacgaacaaggtcgcgccgttcgccgttactttattcagtgtgaagaagccctacagcgcagcgtgccagagattgccgctcagtatcgccgccagctcaaagcccgtatcggtgccgccaacctgtttaaaccgatgtgcgtagcactggaaagcgcccgcgcagaacagggtaaacagacgcaggctcgccactacagcaacgagagtaatatgatcgcccgcattgttttgggtggcatgacggcgaagcagtgggcgcaggcgaatagcattactggcgaaccacgcgacagcatgaacgccgggcaactggaacacctcacctacctggagagtaccaacattacgctgattgatatgggtatgggatatgaccagcgtaaagccgagctaatccgcctctctcagcgctggttagctaaacatctgggggctaatcatgcttaa

SEQ ID NO: 2966 - protein, 280 aa, Salmonella enterica
MTIEKSRFNSEAAPQSSVNQGEYSTNDFAAIVPVISGQIGGREASIVSAKALHTALGVGNDFSTWIKLRIDEYGFSLSADYVVFDSSYFRNQSSNFEQGSPGWVTKRGGDRRSKDYGLSLGMAKELAMVERNEQGRAVRRYFIQCEEALQRSVPEIAAQYRRQLKARIGAANLFKPMCVALESARAEQGKQTQARHYSNESNMIARIVLGGMTAKQWAQANSITGEPRDSMNAGQLEHLTYLESTNITLIDMGMGYDQRKAELIRLSQRWLAKHLGANHA

SEQ ID NO: 2967 - DNA, 234 bp, Klebsiella oxytoca
atgagcattcgagctaagtatggattcggacctgtgactgtagaggttaattggctagataagtgccctaattgcaacaacagaacagttagagtcaccggttggtcaaccactccagaagctctatgggctggcgataaagctgagtgctcaaaatgcggccataaaggcgagattgatgccgatggtgacaatgcctgggtggaatgggacgaaatcaaggaggcccaatga

SEQ ID NO: 2968 - protein, 77 aa, Klebsiella oxytoca
MSIRAKYGFGPVTVEVNWLDKCPNCNNRTVRVTGWSTTPEALWAGDKAECSKCGHKGEIDADGDNAWVEWDEIKEAQ

SEQ ID NO: 2969 - DNA, 303 bp, Klebsiella pneumoniae
atggataagaaaaatagtgacgacttggtgtattcgaaggtgctgatccagaaaattgtggaacataaagatatgtttggggttcctgacagtaaaagagatttgcaggttatgccgctaagcgaataccgggaactggttaagagagaggctttcttttttgtggatcacaatggcttcctgcgtcatcaattctctggtgatgttatggccgccagcaaagaacaactggatatccttatcgaggaactgaaagcaaagagtaagctgcttgatgatgctctggattgtgccaaggaataa

SEQ ID NO: 2970 - protein, 100 aa, Klebsiella pneumoniae
MDKKNSDDLVYSKVLIQKIVEHKDMFGVPDSKRDLQVMPLSEYRELVKREAFFFVDHNGFLRHQFSGDVMAASKEQLDILIEELKAKSKLLDDALDCAKE

SEQ ID NO: 2971 - DNA, 1992 bp, Klebsiella pneumoniae
atgagtgaaataaacgaaatacaacaatgggaagacggcattccatttattacccgcagtgataaggttgaaggtggcaatgcaggcaagattaatattcagactcgcattctggcgaatcgcacgcgctacctgaaaaatcagctagaggcttataacggactggtgaaatcaggagaactgccattttccgattttgaaacggctcaggaatttattgatgccggtaagatccccgctggcagtttgttttctgttcgctctgataacccggattattgggttgacgaatgcgttaaccgaaatggtaaggtcactgccaccggtaaacatctgctttcagaatcagctatcactgcccgtattaacatggatgataacggcaatattacgttccataaggatgcggacgggctgagcctgatagtcgttgatgatatcggcgggatgcacctcaccggcgtgaaaggaacggttcaggagcggctgaatatcgtcgggaaaaacacatcacctgccatcctccgtctgaccgatgccgaaaatgcggcttttgcctcagtggatgaatacggacatttacgcctgccgggtatgcctgacagcgttcaggaaaggcttgatgcgctgaaaaaacgcatggaagagttccgtaagcgcggcatgattctggatgcacgggaatgtaatctgaatacgaaaaccgggcaggatgctcatcgaccgctgcaacgcggttacaactggttatcagcgaatggcggtggctatttatacgtaccacccggtcattacaaaatgcctgtcccggttacaccccgatctggtgtgtcgctggttggggccggacaggacggaacaatatttttacctatggggtacctgcctgcgtttcagtatcgggggaaaccagccgaggcatcgccggaagtttacgtcgaaaatatccagttctgtgattttaccgtcgacggtgaaaaccagcagttacacccggagcgcggttatataccggatatcaaaggaatcttccttcagtactaccgcaatgcctactttgatcgcctgaccatccgcaataccggggcgaccggtttcggtgtggatatgcctgataaggttttcgtcgcgaatttcctggttgaaaactgcggcaggctggcgaaagtcggcgacctcggtgcgtcggggttcggcctgggtaccagcttcctgagcagtgaaccgattttcctgtcaaaaattgtggggcgcgggaataaaaattacggcatcttctttgagccacaacgcggcgttggtactgcgcaggatgcgattgtttcgggcgcgaccttctccggcaacttcgcgggcatggcagattgcggtattgaggggctgatagcctctgacgtcaatctgcgagggaaccagtacggatttatggcggataccggcaccaacaacggcggacgtccaggtcatcgcgggaagctgattaactttattgttaaaggcaatacaaaacacggcatgtattttgtctcggctaaagacgaaaatttaactggtgaatacgccattattggcgcgcatatcttcgggaatggtgaggacgggattaactttaagtaccctgagaaacgggcaaacaacggcctgcgtgtttcagactgcgatattaacgacaacggccgtcatggtctgaattttgaatccggcccggtcatcaacgcccatgtgacaaatacccgtttctggaataacgggaaacaggctgcgggtaacggtattaacagcagtgcgagcgtgaagaaaagccggttctccatgaacagttattatgatttgcaggcgaaacccacgcagcaatatcccgtttccatcagcggagatatggaagatgttgatatctcctttaaccacggcgcgggcaatgtgaataacaaacttaacctgaccgggaataaaacccgcgtcaccacgctttctaatccgggaattgaataa

SEQ ID NO: 2972 - protein, 663 aa, Klebsiella pneumoniae
MSEINEIQQWEDGIPFITRSDKVEGGNAGKINIQTRILANRTRYLKNQLEAYNGLVKSGELPFSDFETAQEFIDAGKIPAGSLFSVRSDNPDYWVDECVNRNGKVTATGKHLLSESAITARINMDDNGNITFHKDADGLSLIVVDDIGGMHLTGVKGTVQERLNIVGKNTSPAILRLTDAENAAFASVDEYGHLRLPGMPDSVQERLDALKKRMEEFRKRGMILDARECNLNTKTGQDAHRPLQRGYNWLSANGGGYLYVPPGHYKMPVPVTPRSGVSLVGAGQDGTIFLPMGYLPAFQYRGKPAEASPEVYVENIQFCDFTVDGENQQLHPERGYIPDIKGIFLQYYRNAYFDRLTIRNTGATGFGVDMPDKVFVANFLVENCGRLAKVGDLGASGFGLGTSFLSSEPIFLSKIVGRGNKNYGIFFEPQRGVGTAQDAIVSGATFSGNFAGMADCGIEGLIASDVNLRGNQYGFMADTGTNNGGRPGHRGKLINFIVKGNTKHGMYFVSAKDENLTGEYAIIGAHIFGNGEDGINFKYPEKRANNGLRVSDCDINDNGRHGLNFESGPVINAHVTNTRFWNNGKQAAGNGINSSASVKKSRFSMNSYYDLQAKPTQQYPVSISGDMEDVDISFNHGAGNVNNKLNLTGNKTRVTTLSNPGIE

SEQ ID NO: 2973 - DNA, 1422 bp, Klebsiella pneumoniae
atggcaacgaatattcagggcaacatgaaatataaagggcgcttaaatctgctgccgtcagcaaatgcccccttacctgagggtgcaaatcttttcgcggattttgcaggcgggcgtcacgtcattaaacatgccagcgggaatgttttacggtcatccatcctgaccgacattctgtcattctcccgcgacagtaccgcgacgcggattgctgagagcggcctgctggaatacctccagcctaacgaaccggcgattgattatcaccctatgaccggggagtgcctgggcctgcgggttgagcgcagcacgtggaaccgcctggaatggagccaggatttcagcaaaattgccacctgggcggcgtcgggtgtcgtactgacgccgggggcgacgcaggcaccagatggcaacatgacggcgaccaaactgattgaggccacggatacgcaggccgcagtgcgcaagttagtggcaaccaccacggcggaagcgactaaggattttccgtatagcttcagcatatttgcaaaagcgaacaccgccagcgtgctccagctgtcagcggtgggggcatttcctgagccgacctttgttaacttcgatctgaaaaacggcaggcttggaaaaacgtcttcaggttcaacaaagcgcgggctaatgcaggccactattgagccttaccgcaatggatggtaccgctgctcaattactatcatgccgtacagcgccgcaaatccagaatttaccctggcactgaccgaaagcgacaccagcgccggagcactgccgtcgtacctccctgcgacaccgaagtcggtgtttatctggggcgcgcaggctgagctttctgacggcgcgacgtcttatatcccgactattggcgcagaagtgcagagggggagtgatatctgtaccaccccgccggtggcctcgtttgtgtccgctgcggcgggtacggtgctggtttcggtcgtgcatcctcacagcatcaaggcgctgacagataagtacggtgcgctctcctgcgccgcagtgattgataattctgttgccgggccgcacgtgcgctttgcctaccgaaacacgaatgtggatggtgactacggcgccgtgctcggggtggtaccggatgagagcggcacagcgcagaatctggaaatacccagcatgccgccggtaccggacagcgaacaggcgtgcattttttcattcgacgcaacggcgctgactgcacgtctttttgacgggtacaactggtatgagcgcagtctgacggcaacgcctccggcactgaatcgcctgaccatcgggcggggctacctagggtcaagcaattacctaaaagggtacatcaaaaaaatcgtctactggccttctgcgctgagcgaatcagcgatggaagaaatgctctctctttaa

SEQ ID NO: 2974 - protein, 473 aa, Klebsiella pneumoniae
MATNIQGNMKYKGRLNLLPSANAPLPEGANLFADFAGGRHVIKHASGNVLRSSILTDILSFSRDSTATRIAESGLLEYLQPNEPAIDYHPMTGECLGLRVERSTWNRLEWSQDFSKIATWAASGVVLTPGATQAPDGNMTATKLIEATDTQAAVRKLVATTTAEATKDFPYSFSIFAKANTASVLQLSAVGAFPEPTFVNFDLKNGRLGKTSSGSTKRGLMQATIEPYRNGWYRCSITIMPYSAANPEFTLALTESDTSAGALPSYLPATPKSVFIWGAQAELSDGATSYIPTIGAEVQRGSDICTTPPVASFVSAAAGTVLVSVVHPHSIKALTDKYGALSCAAVIDNSVAGPHVRFAYRNTNVDGDYGAVLGVVPDESGTAQNLEIPSMPPVPDSEQACIFSFDATALTARLFDGYNWYERSLTATPPALNRLTIGRGYLGSSNYLKGYIKKIVYWPSALSESAMEEMLSL

SEQ ID NO: 2975 - DNA, 363 bp, Klebsiella pneumoniae
gtgaaaaaaacgctgttagttgtaaccctgttaggtgttatggctactgcttcggcggctcccacccaagagcaatatgatgcgcgagttagagccgtgaagctattcaaaaacgaagcaaaatcaatcaaaggcttggctgagagtgatgctgagaaacttagcgatcaagtgctggatagtttaaaaacaatcaataaagaacagctatctaaagggatgaattgcgaggagataaaagaatttatacatgcctcgctatcaaaaaagaaaactgaaacagatggtataaacgctcttatgttcaaggctgataagttccaacagactgattgtgcaatacagcaggcgtggatgaagtaa

SEQ ID NO: 2976 - protein, 120 aa, Klebsiella pneumoniae
MKKTLLVVTLLGVMATASAAPTQEQYDARVRAVKLFKNEAKSIKGLAESDAEKLSDQVLDSLKTINKEQLSKGMNCEEIKEFIHASLSKKKTETDGINALMFKADKFQQTDCAIQQAWMK

SEQ ID NO: 2977 - DNA, 759 bp, Klebsiella pneumoniae
atgcaaaaagataggttcaaaataactgaatgggccacagtaataacacttgcaataggtttgtactgttatttatataattatatttattggagatactttgggatcaatgcttatgactatttttcatatattgatagtcttcaacgttctgtcccactacttattattgcacttagcgctgtttacaccgtttttatcatattttttgttgtgtttttgttagtaagaaagagggcgctgagtttctttcgattcgttaaaggcctacataaagagattcgatcagatcattactttgttttatcggcaattgctttaattgcttttttcctttcaagtctactagtgatgccgattcttaaaatagaaagcttgtcatatgaacaaaagaatctaattataggtgcactttatgttgtttttgctgcttttttctcctctgcgatttcgttatatgcttttattagaaacattgagcgaaaaagaaaattaaaaaatgggatgtttttgttttttatttcaccaatgccatttcaaataattatgtctatactttatatgccaataacagatgcgtatagagatgaaaatacaattcaggctcaggttgtaacaaagattgggaatgcctattcatcacataaaatgttagccttaacaaaggactttgtccttaccattgatgataaaaatgtaatggtaagaaaaattagtgatgttgaatatatatattacagagttgaaaaagttaagtag

SEQ ID NO: 2978 - protein, 252 aa, Klebsiella pneumoniae
MQKDRFKITEWATVITLAIGLYCYLYNYIYWRYFGINAYDYFSYIDSLQRSVPLLIIALSAVYTVFIIFFVVFLLVRKRALSFFRFVKGLHKEIRSDHYFVLSAIALIAFFLSSLLVMPILKIESLSYEQKNLIIGALYVVFAAFFSSAISLYAFIRNIERKRKLKNGMFLFFISPMPFQIIMSILYMPITDAYRDENTIQAQVVTKIGNAYSSHKMLALTKDFVLTIDDKNVMVRKISDVEYIYYRVEKVK

SEQ ID NO: 2979 - DNA, 237 bp, Klebsiella pneumoniae
ttgacgtttcgcgggaacctgctgctgtattccctgtggtatgaacttcacccgtttgagaaccttcgccgcaaggggcatcactgccacggcctgacgcacctgtcctgggcagaacgcaaaattttttaccgggttttaggtaaaaaattttgtgggctgttcatttaccctggacagtcagtgcggcaggttgtggctgtctatgcccccggcgacaggggcttaaacaggtga

SEQ ID NO: 2980 - protein, 78 aa, Klebsiella pneumoniae
MTFRGNLLLYSLWYELHPFENLRRKGHHCHGLTHLSWAERKIFYRVLGKKFCGLFIYPGQSVRQVVAVYAPGDRGLNR

SEQ ID NO: 2981 - DNA, 1185 bp, Citrobacter rodentium
gtggccatcggcaacggtaccgcctcgcgtgaaaccgagcgtttcttcctcgacgtgcagaaacagttcccgaaggtcaccgcccagaaggtgatcgtcagcgaagccggggcttccgtttactccgcctccgagctggcggcgcaggagtttccggacctcgacgtgtcgctgcgcggcgcggtctccatcgcccgccgtctgcaggatcccctggccgagctggtgaaaatcgacccgaaatccattggcgtcggccagtatcagcacgacgtcagccagacccagctggcgcgtaagctggacgcggtggtggaagactgtgtgaacgccgtcggcgttgacctgaacaccgcctccgttccgctgctgacccgcgtcgccggcctgacccgcatgatggcgcagaacatcgtcgcctggcgcgacgagaatggtcagttccagaaccgccagcagctgctgaaagtcagccgtctggggccgaaagcctttgaacagtgcgcgggcttcctgcgtatcaaccacggcgacaaccctctggatgcctccaccgttcacccggaagcttacccggtggtcgaacgtattctggccgccacccagcaggcgctgaaagatctgatgggcaatagcagtgcgctgcgccacctgaaggcagtggacttcaccgatgagaagtttggcgtcccgacggtcaccgacattatcaaagagctggaaaaaccgggccgcgatccgcgtccggagtttaagaccgcgaagttcgccgatggtgtggagaccatgaatgacctgctgccgggaatgattctggaaggtgccgtcaccaacgtcaccaacttcggcgcgtttgttgatatcggcgttcatcaggacggactggtacacatttcgtcgctttctgaccggtttgttgaggatccgcacaccgtggtgaaagcgggcgacatcgtcaaggtcaaagtgatggaagtcgatctgccgcgtaagcgtatcgccctgaccatgcgtctcgacgagcagccgggcgacagcaacgcccgccgcggcggtggtcaggagcgcccgcagggaaatcgcccggccgcgaaagccgccaaaccccgcggtcgcgaggcgcagcctgccggcaacagcgcgatgatggatgccctcgccgcagcgatgggtaaaaaacgctaa

SEQ ID NO: 2982 - protein, 394 aa, Citrobacter rodentium
MAIGNGTASRETERFFLDVQKQFPKVTAQKVIVSEAGASVYSASELAAQEFPDLDVSLRGAVSIARRLQDPLAELVKIDPKSIGVGQYQHDVSQTQLARKLDAVVEDCVNAVGVDLNTASVPLLTRVAGLTRMMAQNIVAWRDENGQFQNRQQLLKVSRLGPKAFEQCAGFLRINHGDNPLDASTVHPEAYPVVERILAATQQALKDLMGNSSALRHLKAVDFTDEKFGVPTVTDIIKELEKPGRDPRPEFKTAKFADGVETMNDLLPGMILEGAVTNVTNFGAFVDIGVHQDGLVHISSLSDRFVEDPHTVVKAGDIVKVKVMEVDLPRKRIALTMRLDEQPGDSNARRGGGQERPQGNRPAAKAAKPRGREAQPAGNSAMMDALAAAMGKKR

SEQ ID NO: 2983 - DNA, 534 bp, Klebsiella pneumoniae
atgcgcattttgcccgtcgttgctgcagttacggctgcattcctggttgtcgcgtgtagctccccgacaccgccgaaaggcgttaccgtggtaaataactttgatgccaaacgctatctgggaacctggtatgaaattgcgcgcttcgaccatcgtttcgagcgcggattggataaagtgaccgcaacatacagcttgcgcgacgacggcggcatcaacgttattaacaagggctataaccctgacagggagatgtggcagaaaacggaagggaaagcctatttcaccggcgacccaagcagagccgcgcttaaggtttcttttttcggccccttctatggcgggtataacgtaattgcactcgaccgggaatatcgtcacgcgctggtttgtggtccggatcgcgactacctgtggatcctttcacggacccctactatttcagatgaaatgaaacagcaaatgttagccatcgcgacccgggaagggtttgaagtgaataaactgatttgggtgaaacagcctggcgcttag

SEQ ID NO: 2984 - protein, 177 aa, Klebsiella pneumoniae
MRILPVVAAVTAAFLVVACSSPTPPKGVTVVNNFDAKRYLGTWYEIARFDHRFERGLDKVTATYSLRDDGGINVINKGYNPDREMWQKTEGKAYFTGDPSRAALKVSFFGPFYGGYNVIALDREYRHALVCGPDRDYLWILSRTPTISDEMKQQMLAIATREGFEVNKLIWVKQPGA

SEQ ID NO: 2985 - DNA, 1257 bp, Escherichia coli
ttgaataaaaaaataatctctaattcaatttggatgatgtcagagaaaataatttctatcttcggattaatctttgttacttcttttgtagctaagtatgttgggcccactatttttggtgacattgctttggcaatgtcaatttttcagcttgttcaaataatttcgcagctgggatcagatgtattgatctttaaaagaattagtaggaaagtgtcatcaggagttaatttaattaatgttaccctcccattgagggtgtcaatatatttactattttcacttccagtcttattatatagtttcatatataatcatcattccggtttttactatgttttagctgcttttattgcatgccttctgcaggctttagatgtatatgcaatttactatgatgcattacttaagtctaaagttaatacattaatcaatatcgtgggtttgattatttcgcttttagttcgatggcttattgcattcttcgaattgaatccgttgtggttggtaatccccataattcttgcggctttaattcctttttctattagatatatagtttatatgacgaataacgcgtcaacgaaaatttcaccaaaatatcaaaaaaaatataaaatttatcttttaaaagcaggatcgacatttgtattgtcatccgtttcggtagcaatttatactcgattatccctctttattttaggttttttctatagttcttctgcagtaggtcttttctcagtagcatcaactcttgcaacttcgtgggcttttattttaaattcgataattgtatcaaccctcccgtcaattttttctgagaataataaagaacatgctttaaagcaaacagcaaaactgaacataatagttattttgatttctgtaccaattgttcttggtgtatatttactaggtggctattttattgactttttctatggggcgaaatatcatgatgctgttgaacctttaagaatactatgtatttccactgttatagcagctttaggtacagtctctgcgagatttattgcaaaatactctggatatttatatctttcaaaaaaaatgttatcagtggcgatcgctagtttatttttaaatctgctatgtgtttatttcggtggtgtaaaaggtgctgcttttgcgactttaactactgagtttatctcgctaacattattcaattacttttttaaaaacggcttggttttaaaacttcacaaggatacatgtctactaaagttgagataa

SEQ ID NO: 2986 - protein, 418 aa, Escherichia coli
MNKKIISNSIWMMSEKIISIFGLIFVTSFVAKYVGPTIFGDIALAMSIFQLVQIISQLGSDVLIFKRISRKVSSGVNLINVTLPLRVSIYLLFSLPVLLYSFIYNHHSGFYYVLAAFIACLLQALDVYAIYYDALLKSKVNTLINIVGLIISLLVRWLIAFFELNPLWLVIPIILAALIPFSIRYIVYMTNNASTKISPKYQKKYKIYLLKAGSTFVLSSVSVAIYTRLSLFILGFFYSSSAVGLFSVASTLATSWAFILNSIIVSTLPSIFSENNKEHALKQTAKLNIIVILISVPIVLGVYLLGGYFIDFFYGAKYHDAVEPLRILCISTVIAALGTVSARFIAKYSGYLYLSKKMLSVAIASLFLNLLCVYFGGVKGAAFATLTTEFISLTLFNYFFKNGLVLKLHKDTCLLKLR

SEQ ID NO: 2987 - DNA, 360 bp, Klebsiella pneumoniae
atgaacaaaaaaatattgatactgaccgccctattaatgtctcctgttgctgtttttgcggttgacaaaaccatgccgatgggcgatcaccattccatgtctccagcttctcaagagttgatgtctggtatgaaaagtatgcataacgacatgatggcaggagtgatgtcctctgatccagatgttgcctttgcaaaagggatgattgcccaccatcaaggtgccattcaaatgtctgaaacgcagcttaaatttggtaaggatcctgaaatgcgaaagctggcagaagatattatcaaagcccagcaaccagaaatcgaccagatgcaaaaatgggttaaaaaccatgaaaagccatag

SEQ ID NO: 2988 - protein, 119 aa, Klebsiella pneumoniae
MNKKILILTALLMSPVAVFAVDKTMPMGDHHSMSPASQELMSGMKSMHNDMMAGVMSSDPDVAFAKGMIAHHQGAIQMSETQLKFGKDPEMRKLAEDIIKAQQPEIDQMQKWVKNHEKP

SEQ ID NO: 2989 - DNA, 288 bp, Klebsiella oxytoca
atgagcgccagaaacttggcacaaacggcagaaaagagggggaaagagtgggtgaagaaagtcccgggcgagacgctgctgcgccatggcccgggcgttcccggcagaagggaattaaatctcggtaatggtcgtcgactgcggcagacgcgacttcggcagggtagcgttgaaatcttctacgctatggtggccgacccggaccaccaccaggctggtgtagccctgggctttcaggtcaaattcctcatcgaggatcgcaaaatcgaccccttcactggctggtga

SEQ ID NO: 2990 - protein, 95 aa, Klebsiella oxytoca
MSARNLAQTAEKRGKEWVKKVPGETLLRHGPGVPGRRELNLGNGRRLRQTRLRQGSVEIFYAMVADPDHHQAGVALGFQVKFLIEDRKIDPFTGW

SEQ ID NO: 2991 - DNA, 309 bp, Klebsiella pneumoniae
atgaaacgcaaaaacgcttcgttactcggtaacgtactcatggggttagggttggtggtgatggttgtgggggtaggttactccattctgaaccagcttccgcagcttaacctgccacagttctttgcgcatggcgcaatcctaagcatctttgttggcgcagtgctctggctggccggtgcccgtattggcggccacgagcaggtcagcgaccgctactggtgggtgcgcgccactacgataaacgctgccgtcgtaaccagcatcgtcacagctaaccgtagcatgatttcccgcatcggccgctga

SEQ ID NO: 2992 - protein, 102 aa, Klebsiella pneumoniae
MKRKNASLLGNVLMGLGLVVMVVGVGYSILNQLPQLNLPQFFAHGAILSIFVGAVLWLAGARIGGHEQVSDRYWWVRATTINAAVVTSIVTANRSMISRIGR

SEQ ID NO: 2993 - DNA, 882 bp, Klebsiella oxytoca
atgatatcagcttcaagcatatggttaaaagatgagggcataagtaaacaacgattcttgatacttttttttgcggttttttctttcatcgatgttgtaatgatcgcatccacccttcgctttggtttcgcggtggcattaatgttaagaggtgtagtgctttactcaacccaaaaaaaaggaaagggagcagtatatataatactatcctgcctgtgtcatgcatcaatgtacttagtagttgttgcatttatagcttcttgtttttataagatgtccaaaaagcaatgcattatattttctattattttttttgtaatgagcagtacactggtaccagttatcctatcacatgttaatcttggagttgtcaatgattacttcataaatggttatgtagatagtgattttgctaatgttactgatgatagtcatacattgttattacaattgtataaatatggtttattcgttgttttgacagttatttactttaaaaatgatggtgtcaatactaaatatgataatttcgttcggcatcttatcgctatttcattcgttatggctatatcaataactgcgttgaatcgatatttaatcggtatatctatacagtttgtaatgtttggtgcgtttgttattaatggtagttattggctaaggagtattattaaaccaatgattgttgttatattgcttttcaacattacttttatcaatatttatttggaaagacgtcaaatacaaatggcaagattatggactggactatatttacctcctgcagttttactatactataatatggaccagtttaataattatctttcagaattagactctgatggaaactgggttaaaaacaaactgggtggtaaataa

SEQ ID NO: 2994 - protein, 293 aa, Klebsiella oxytoca
MISASSIWLKDEGISKQRFLILFFAVFSFIDVVMIASTLRFGFAVALMLRGVVLYSTQKKGKGAVYIILSCLCHASMYLVVVAFIASCFYKMSKKQCIIFSIIFFVMSSTLVPVILSHVNLGVVNDYFINGYVDSDFANVTDDSHTLLLQLYKYGLFVVLTVIYFKNDGVNTKYDNFVRHLIAISFVMAISITALNRYLIGISIQFVMFGAFVINGSYWLRSIIKPMIVVILLFNITFINIYLERRQIQMARLWTGLYLPPAVLLYYNMDQFNNYLSELDSDGNWVKNKLGGK

SEQ ID NO: 2995 - DNA, 357 bp, Klebsiella pneumoniae
atggaaatcattgaaccacgccgtctatatcagcagcttgccgctgagctgaagacgcgcatcgaacaaggtgtctaccttgtaggggataagctgcccgccgagcgcttcatcgccgatgaaaaaaacgtcagccgcaccgtggttcgtgaagccattatcatgctggaagtggaagggtatgtcgaagtccgcaaagggtcgggtatccacgttatctccaaccatccgaaataccagcaggtggccgatgaaagccttgagttcgccaactatggcccctttgaactgctgcaggcgcggcagctaaggaaggtgcgaataagcaggtcatttcttcccaagctgactcgctga

SEQ ID NO: 2996 - protein, 118 aa, Klebsiella pneumoniae
MEIIEPRRLYQQLAAELKTRIEQGVYLVGDKLPAERFIADEKNVSRTVVREAIIMLEVEGYVEVRKGSGIHVISNHPKYQQVADESLEFANYGPFELLQARQLRKVRISRSFLPKLTR

SEQ ID NO: 2997 - DNA, 219 bp, Klebsiella pneumoniae
atgcataccctgttaactcgattcggtaccaagagtgccatcgcggctgcactcggcatcaccccggagggcgtcagcaacgctttcaggcgtggcaaggtgccaagcacctgggtggccaagctcaagcagcaaggtttgagccaatctgagctcgctgaattgcctctgactgacgaagggcgggcgattgtatcagcattcaccgggcaattataa

SEQ ID NO: 2998 - protein, 72 aa, Klebsiella pneumoniae
MHTLLTRFGTKSAIAAALGITPEGVSNAFRRGKVPSTWVAKLKQQGLSQSELAELPLTDEGRAIVSAFTGQL

SEQ ID NO: 2999 - DNA, 693 bp, Klebsiella pneumoniae
atggatgagaaacaaacaccaatggcgcgttatgaagccgacaaaatggcattctcgcagcgactcaatgccgctctcgatgaaatgggctggcccgttagaggccgaatagttcggcttaagcgcacgttgcgagaagatctgtctgaggtctcggtagggaaatggctgaaaggtgaggggctgccagaggtcaaacggctgggagagctctcgcgcatcaccggcaagagcgtgcagtggttgctgactggcaccgatacgagcgacggcaatgtcgaaccacagcctttccctgtctaccaggttcccctgatctcttgggtcagcgccggtgagttcaaagactgcggcgatatcccaaccctggaagaggcagaagagatcaccatcagcccagttcgcgtcagcacccgggcctatgccgtacgggtgaagggcgactccatggtggcccccatggggggcaagtcataccctgacggcaccatcatcatcgtggatcctgaggtggagcccgccccgggcaagaaggtgatcgcccgctacggcagcgacatgaccttcaaagagctggtgatggattccggttcctggtggttaaagcctctcaacccgcaataccccctgctgccggtcaatgaggatgtgcagatatgcgccgtgctagtctgctcggtgatggtggagtga

SEQ ID NO: 3000 - protein, 230 aa, Klebsiella pneumoniae
MDEKQTPMARYEADKMAFSQRLNAALDEMGWPVRGRIVRLKRTLREDLSEVSVGKWLKGEGLPEVKRLGELSRITGKSVQWLLTGTDTSDGNVEPQPFPVYQVPLISWVSAGEFKDCGDIPTLEEAEEITISPVRVSTRAYAVRVKGDSMVAPMGGKSYPDGTIIIVDPEVEPAPGKKVIARYGSDMTFKELVMDSGSWWLKPLNPQYPLLPVNEDVQICAVLVCSVMVE

SEQ ID NO: 3001 - DNA, 480 bp, Citrobacter freundii
atgaatcactgtccggatagatttgccttcatgcataagctcgaaggcgtcattgatttcatccagtgtcatcgtatgggttacaaatggctcaaggtcaatatcccccttcatggcatcctcgaccataccggggagctgagtgcggccttttactccgccaaacgcggaacctttccatacgcgcccggtgaccagctggaaaggacgggtggaaatctcctgtccggcccctgcgacaccaatgacaacggactgcccccacccacggtgagcactttccagcgctgcacgcatgacgttaacgttaccgatacattcaaaggtatggtcaataccccacttgttgatatccagcagaacatctttaatcggtttgtcataatcattcgggttaatgcagtcagtggccccgaactgacgggccaggtcaaattttgtcggattagtatcgatagcgaggcactgttgcaaagttag

SEQ ID NO: 3002 - protein, 159 aa, Citrobacter freundii
MNHCPDRFAFMHKLEGVIDFIQCHRMGYKWLKVNIPLHGILDHTGELSAAFYSAKRGTFPYAPGDQLERTGGNLLSGPCDTNDNGLPPPTVSTFQRCTHDVNVTDTFKGMVNTPLVDIQQNIFNRFVIIIRVNAVSGPELTGQVKFCRISIDSEALLQS

SEQ ID NO: 3003 - DNA, 210 bp, Klebsiella pneumoniae
atgcacccacgcgagttcattgccaagcacatcaaggcaacgctggagaaggaggaatttccccctcatgcggtctcgctgggggtgaaagaagccaccttctttttcgaccgaacacccagcttcgcaaaggggaaagtgttcgatgagtgcctcaaggcggcccgtgcagtagccagggtcgcgaagaaggcactgttgcaaagttag

SEQ ID NO: 3004 - protein, 69 aa, Klebsiella pneumoniae
MHPREFIAKHIKATLEKEEFPPHAVSLGVKEATFFFDRTPSFAKGKVFDECLKAARAVARVAKKALLQS

SEQ ID NO: 3005 - DNA, 720 bp, Klebsiella pneumoniae
atgaaagaacgcggaatgatttttaacggggagatggtgcgggccatcctcgacggtcggaagacgcagacacggcgaatcatcaagccgcagccagaggcgacattaagcggaagtttatccggtaagtggttaagcagacctcttaacggactgttgttgccgaaaattgaagatatcgcaatccattgtccgttcggtgtcgtcggtgatcgcatctgggtgcgcgagacgtttcaggggccactgttcgactacgacataatggatagctattgcaaagaccccactccgtttgagaagccagaattctgcgtttacaaggctgatggagtgccagcgccagagttttacgatgcagatgatgaactgcattgctgctggcgaccatctatccacatgccgcgctgggccagccgtatcatgctggagattaccgacgtgcgcgtggagcggctgaacagcatcaatgaacatgatgctatcgctgaaggattggcagaaataagcaaagactggcgtacctataaatatggcgttcccgatcgtgacggatacccaggcactgatgattgtggttggccgtggcacgagtgggagtgttatccaattagcgcttacagcaagctatgggaatccatctacggcgctgatagctggcaggctaacccatgggtatgggtgatcgagtttaagcgcgttgaaggcggtgcggcatga

SEQ ID NO: 3006 - protein, 239 aa, Klebsiella pneumoniae
MKERGMIFNGEMVRAILDGRKTQTRRIIKPQPEATLSGSLSGKWLSRPLNGLLLPKIEDIAIHCPFGVVGDRIWVRETFQGPLFDYDIMDSYCKDPTPFEKPEFCVYKADGVPAPEFYDADDELHCCWRPSIHMPRWASRIMLEITDVRVERLNSINEHDAIAEGLAEISKDWRTYKYGVPDRDGYPGTDDCGWPWHEWECYPISAYSKLWESIYGADSWQANPWVWVIEFKRVEGGAA

SEQ ID NO: 3007 - DNA, 990 bp, Citrobacter koseri
atgactatttcacctgatgagttaatggatagcttacaactgaaagaaaaagagttggatctaatcattggtgggccaccttgccaaggtttttcatctcataggataaaaaatgctggtgttaatgatccaagaaacgaattacttattcgctactatgattttgtaaaaatttttcagcctaagatgtttcttgttgaaaatgtgccaggtttgctttgggaaaaacataaagactatttaaacaactttaaaaggcttgccgctaatagtggatataatatcttgggtccattaaagttgaatgcaaaagattatggagttcctcaaaacagaaaccgggtatttatcttaggtctcagagatgatatttctatcagcgatggtgattggccaccttccccaactcatttcaaagataaaaaaccttattgggttaatgcttctgaaatctttgaaaaacctacaccttctattattgaaaaaattactgctgttttagggcaagatgtcgtacagaaattaaaatttaaaaatacgcttaaagaaaataaaagtgatccaaataatattcatatgaatcatgctgattatatgattgaaagatttagtttgacaccaattaatggcagtcgggaagatgttgattttagattgccttgtcattcgaatggctatgttggtcataaagatgtatatggtcggataaggctatcattacctggcccaacaataacgactggttgttttaatccttcaaagggccgtttcctacatccgtgggacaaccatggaattactgtaaggcaggcggctagatttcaaacattccccgatgattacattttttctggagggatcattagccaagggaaacaggtgggaaatgctgttcctgtaaatctggggaaaattcttctgaaatcttgtgttgaaataataatcaataactctcatagggatgataaaaatgcagatgagatctcttag

SEQ ID NO: 3008 - protein, 329 aa, Citrobacter koseri
MTISPDELMDSLQLKEKELDLIIGGPPCQGFSSHRIKNAGVNDPRNELLIRYYDFVKIFQPKMFLVENVPGLLWEKHKDYLNNFKRLAANSGYNILGPLKLNAKDYGVPQNRNRVFILGLRDDISISDGDWPPSPTHFKDKKPYWVNASEIFEKPTPSIIEKITAVLGQDVVQKLKFKNTLKENKSDPNNIHMNHADYMIERFSLTPINGSREDVDFRLPCHSNGYVGHKDVYGRIRLSLPGPTITTGCFNPSKGRFLHPWDNHGITVRQAARFQTFPDDYIFSGGIISQGKQVGNAVPVNLGKILLKSCVEIIINNSHRDDKNADEIS

SEQ ID NO: 3009 - DNA, 1746 bp, Citrobacter freundii
atggctataacaacttataattcccttgtgcagaaaactttttgtgataatgctattcgttcggtcgtaatgatagatgacgattttattacttattctgactctattaaagcacttaacagtgagatgaaactagacccagcaaaaattgattcctcaaagcgtgctgctactctcgaagaatattttcaagccaagaatatgatctgtgatattgataacggttcggtaaactttgatgttgaccgcatccgtaagtcagatttggttataatggactatcatttagataacagtgcaccagataaaactattacaattttaaaagaattaaaaaattcagatcatttgaatatgattgttatttatacgagagaggagctcaaaactgtttggatgcaaattgcttcttctctaagagggatcgaaaattgtaatgataaaatacttgaaacagaaaatgatgaattaattgaatactggcagagtgttattttacctgatttgattcacaaaggagaaagggcattaacgagggatgaaactgtactatatatccaaaatgactgcctatgtaagcgtattaagaaagcaatccgagatgatggaagccttacagagcaaaatgatattaatttcattgctaagatgatttctgaatatgcagtcgctgaaaatgccgtcattccagattatgtgacaaaaagtatggttgtaggggatactgccggtattaaatggattcaaagtggtaatatatttatcagtgtgttccataaggataaagatgatcatgaaagtgatggtgagagaatttggcaaacactaaatgaatcattaattgaatggaacccatcttactatcaaattatcaagtcagagattcaaaatactattgaagccgaagcactttctttcaataaccatttagctaatgatggttatggtcaagctggatggttgaatcaaatattaaattccgcttctgatgaaattaaaaggaaaaacattgagtttgtttttagtaatttatctgaagaactctatgaaagattgaagggaaataaatctttagtaggcttcattaatgatgtttttgaaacatatacaactgattttaaaagtagtggagaagcgaaatcattagagtattgttcaaaacaaatgaatttacctgcaaatgcaagctcatttaatgagatgtatcatgctttgaacatgaatctgtcttctaaaaattttgaagaaggacatatttcgacaggtacaattttcttcgatactgaatctgaaaaatggtatttatgtgtttctgctgcctgcgatcttgtgcctactcagggtaatgatccacatcataaaagattaagtcctcatcgtttaattaaggtgttagaacttttcaatgctaaccagaataaagcattacctaatgcagaacaatccaagtatatttatgtaattcataagaataccagaaagtatttatctatatttgaaggcgataaaactttaccagtagttgattatatggttgttttaaatcacggccataccgttccgggggaagagaaaaatatactttcagcggtattcttgagtagcatggatgacaacgtacaaaatgtaccagttaaactgaaattaaagtcccagcttcgaagtggttatgctgaacgataccaagctattgcgtcgcaatacagttctagaattggtgtagattatgtatctatgatgccttaa

SEQ ID NO: 3010 - protein, 581 aa, Citrobacter freundii
MAITTYNSLVQKTFCDNAIRSVVMIDDDFITYSDSIKALNSEMKLDPAKIDSSKRAATLEEYFQAKNMICDIDNGSVNFDVDRIRKSDLVIMDYHLDNSAPDKTITILKELKNSDHLNMIVIYTREELKTVWMQIASSLRGIENCNDKILETENDELIEYWQSVILPDLIHKGERALTRDETVLYIQNDCLCKRIKKAIRDDGSLTEQNDINFIAKMISEYAVAENAVIPDYVTKSMVVGDTAGIKWIQSGNIFISVFHKDKDDHESDGERIWQTLNESLIEWNPSYYQIIKSEIQNTIEAEALSFNNHLANDGYGQAGWLNQILNSASDEIKRKNIEFVFSNLSEELYERLKGNKSLVGFINDVFETYTTDFKSSGEAKSLEYCSKQMNLPANASSFNEMYHALNMNLSSKNFEEGHISTGTIFFDTESEKWYLCVSAACDLVPTQGNDPHHKRLSPHRLIKVLELFNANQNKALPNAEQSKYIYVIHKNTRKYLSIFEGDKTLPVVDYMVVLNHGHTVPGEEKNILSAVFLSSMDDNVQNVPVKLKLKSQLRSGYAERYQAIASQYSSRIGVDYVSMMP

SEQ ID NO: 3011 - DNA, 429 bp, Klebsiella pneumoniae
gtgctgcatccaggtccggcccggcatcacggtatcgcgataacgatccgcctggagagccagggccgccaacagctgctcaagcagggtctcagcggcatccagcgccccgcgcagctggagcaccagtccggtgtcgatggcgtcctggctggtagcgccccagtgaacgtagcgcgcagcctcgggatctcgcgcttttacctggaccgtcagctgtttcaccagcgggatggccagattaccggctcccactgccgcctcgcccagcgcggcaaaatcgatggcctcgtggcggcaggccgcctgcgggatggtgccgccggaagcggtcgggccaattgtggcggcggcctgcgcttgcgccagcgccgcttcaaaatccagcatgccctgcacccgctgcgcgtcgctgaaccagtcggttag

SEQ ID NO: 3012 - protein, 142 aa, Klebsiella pneumoniae
MLHPGPARHHGIAITIRLESQGRQQLLKQGLSGIQRPAQLEHQSGVDGVLAGSAPVNVARSLGISRFYLDRQLFHQRDGQITGSHCRLAQRGKIDGLVAAGRLRDGAAGSGRANCGGGLRLRQRRFKIQHALHPLRVAEPVG

SEQ ID NO: 3013 - DNA, 240 bp, Klebsiella pneumoniae
atgagagtatcgaaaacaaagatgaacgtatttgcctgcatttctcgccagaagcaagacagagatggattgcattttataatcaagttgaaacagaaatgcggttactcggatttctttcagactttaaagattatgcatctaaaatcgctgaaaatatggcaaggattgctgctttattacactattttaatggtgatgaaggggatgtatcacttaccgctgctgaagctgctatag

SEQ ID NO: 3014 - protein, 79 aa, Klebsiella pneumoniae
MRVSKTKMNVFACISRQKQDRDGLHFIIKLKQKCGYSDFFQTLKIMHLKSLKIWQGLLLYYTILMVMKGMYHLPLLKLL

SEQ ID NO: 3015 - DNA, 1161 bp, Klebsiella oxytoca
atgtttaaaaaacaaaattatgacaaggaagtgagaaaaataacagagcggagtaatgggaaatgcatcataaaaaattgcactaaaaaaaacatatattcacacattatttccaaatcaatatccattgataagattgccaagaacaatcatttaactgttttttctcctggccggcatggggatgataaaataccaagattcattcctgctggtgttaatgacaacccagcatttaatggtttttgtaaagatcatgacaatatgtttgagttaattgataattcagaaatagagagttttttgggggtgtatttacaaatttacagaacaataagtagtgaggtttattatttaaggttagggggtatattgcatccggatattgatattgatgcagcctctgatttaattttaaaaagcacaagagatgagttgaaaaaaacgcaaagtcaaatagatgaaaaaaggctcataaaaataatagaagataacaagcaggaacttattaaggcaaaaaaactagaaaattccaaattaaataaaaaaatattacaggtggtggaaattaaagaattgaattatcaaatttttgtttacttaacagactttcaaatacctatcgcaatcagcacattacatacatttccttgcgatggagatagtgaagataattcttattcgttttacattgtagtgccatacgaaaattcaaatgttattattggtgtaataggaggaacagctcaccctcaatttttcaacaaaataattgaagtggtcaattcatcttttagcgattctttttctgtattgaatttcgttgaaagcctagtgatatcatcacctgatgatagttttttctctccaacagtcatcgaggaaatgagcagtgaaaagcttctagtgttcacagatgattgtatgtgccttaatgaattccagaacagttctaagtatctatcagagtatgatatgtccatctttgataatgtaaggcgccaacttattgataaagtatctactaatacagatagcgaaaccctcaagcttgccaggatcccaacaagggatgattacgataaaagaattataaaaacgaaagagaaaatattccatgaaaatatcatattaaaaaaattaattccctctaaaggataa

SEQ ID NO: 3016 - protein, 386 aa, Klebsiella oxytoca
MFKKQNYDKEVRKITERSNGKCIIKNCTKKNIYSHIISKSISIDKIAKNNHLTVFSPGRHGDDKIPRFIPAGVNDNPAFNGFCKDHDNMFELIDNSEIESFLGVYLQIYRTISSEVYYLRLGGILHPDIDIDAASDLILKSTRDELKKTQSQIDEKRLIKIIEDNKQELIKAKKLENSKLNKKILQVVEIKELNYQIFVYLTDFQIPIAISTLHTFPCDGDSEDNSYSFYIVVPYENSNVIIGVIGGTAHPQFFNKIIEVVNSSFSDSFSVLNFVESLVISSPDDSFFSPTVIEEMSSEKLLVFTDDCMCLNEFQNSSKYLSEYDMSIFDNVRRQLIDKVSTNTDSETLKLARIPTRDDYDKRIIKTKEKIFHENIILKKLIPSKG

SEQ ID NO: 3017 - DNA, 243 bp, Klebsiella pneumoniae
atggcacagggcgcggtgaagaaaagcggcaaacgttcacaagcggtcagcgccaaaaaggaggccatcctggccgccgcgctggaggcattttcgcaatttggtattcacggtacgcggctggagcaggtggctgagcgcgcggggtatcgaaaaccaatctgctctattactacccttcgaaagaggcgctgtatgtggctgtcctgcagcagatcctcgccatctggctggcgccgctga

SEQ ID NO: 3018 - protein, 80 aa, Klebsiella pneumoniae
MAQGAVKKSGKRSQAVSAKKEAILAAALEAFSQFGIHGTRLEQVAERAGYRKPICSITTLRKRRCMWLSCSRSSPSGWRR

SEQ ID NO: 3019 - DNA, 1338 bp, Klebsiella oxytoca
atgtatgcggctgtcgagatagtaccggcagagttcgaagagggaaatccgaaaagtggtttgactcccatgcgcgattggatggccgatcgttcagatgcgattgtctgcgtcggtggcgcctggtgggatgtcaataaaacgaatgctggtgtgcccaatgaactagataccatgctggagcttggaaagcctggatttgtggccgcaggttttggcggcgcgattgctggctatctcaatgaagatccgtcgctattaagacgtctgaaaaacggactaagtcaggaagataacgaagtcattgcgcgttgcactaatgttgattcggttgtcgatctgattgtcgagcagctcaaaaatttgcccctctcacgaaggaatgtaactcaaggccgaaatttccgaattttggctttagacggtggcggactgagaggcacatttactgcagctgtgctagccaagtgggacgatatgctcaaagctggtggcggaaatggcatcatctctcatttcgatttagttgcaggtacatcgactggcgctatccttgccatcggtctagcccttggtctgaacccaagtgaaattctggctttttacgaagaaaagggccctaaaatttttcctaaggatcgaaagctgagacattggctcaaatccaagcatgattcaaccacattgcgacagctacttacagaggtgtacggtgaaaagacactggctgaagattcatgctgtcgtttggtcatacctacggtaagagcgaagcagggacaagcagaagcgatagtaacgcctcacagtccagatcgtactgcgtatcgcgatatctctgcagtcgatgcggccttggcttcgtcagcagcaccaacattcttcgacgagtcgacatgggaggggccaatcgccctcgaaacgttccttgacgggggagtttgggcaaacaatcctattttgcctgcacttgcggaagctgtcagatacctaaaaattccactggatcgtatcgatgtgctgagcattggaacactcagcagtgaaagcgattttactgaccagttggggaagggcaaagccggatgggcacctcatagcgctgacctgttttttgctgcacaggagcacggtgcactcgcacttgctgaaagtttcctaggacccactcgtcatttgcgtatcaaccaacaaacccctgccgaaatcaagcttgatgacagagaggcaattcaggaaatggctgcacgtgggaatgaagcaggaaaagaacactttgcagaagtgcgctcaaggttttttgatggtcggcatgcagatgaatgggtgcgtttttaa

SEQ ID NO: 3020 - protein, 445 aa, Klebsiella oxytoca
MYAAVEIVPAEFEEGNPKSGLTPMRDWMADRSDAIVCVGGAWWDVNKTNAGVPNELDTMLELGKPGFVAAGFGGAIAGYLNEDPSLLRRLKNGLSQEDNEVIARCTNVDSVVDLIVEQLKNLPLSRRNVTQGRNFRILALDGGGLRGTFTAAVLAKWDDMLKAGGGNGIISHFDLVAGTSTGAILAIGLALGLNPSEILAFYEEKGPKIFPKDRKLRHWLKSKHDSTTLRQLLTEVYGEKTLAEDSCCRLVIPTVRAKQGQAEAIVTPHSPDRTAYRDISAVDAALASSAAPTFFDESTWEGPIALETFLDGGVWANNPILPALAEAVRYLKIPLDRIDVLSIGTLSSESDFTDQLGKGKAGWAPHSADLFFAAQEHGALALAESFLGPTRHLRINQQTPAEIKLDDREAIQEMAARGNEAGKEHFAEVRSRFFDGRHADEWVRF

SEQ ID NO: 3021 - DNA, 1143 bp, Klebsiella oxytoca
atgcttcctatctatcagcttgctgttataggctccccttcagacgagcaactgcgcgatttggaggatgcggttaaaactgcagtggagatgtacgggctacgactcggtcaggagataagttgggaaatagctcctgatatgtttacaccaaatcagttgcgagcgagcgcggttgttttttttggaggagagggcatagaacacccaagtttaccgagcttgcttcgcagcggtactcctgtaattccaattgtatccgatctacgacatgtagctgcggagattcctgagctgctgcgaccgctgaactgtctggcctacgcaaatggtggtgctaagcgtgtctcgatagctcttcttgaatgcgctggattgcttccgaaacaacgaagggtcttcgtaagctaccgccgggatgaagccagagttgccgcgctccagatgttcgatgctctgtcagagcgccatttcgacgtattccttgacactcatagtattgcgccagcagaagattttcagaccatgttgtggcatagactctgcgattctgacgtgctgttgatgctagatactcctgactattttaatagtcgttggacatcagctgagtttgggagggctctcgcgaaaggtataagtgttcttcgagtcgcttggcctgaaacgaagcagtctcgtggattgggtactgcaagccttgctgagttagctgaaggcgagttggacggcggaacaggacatatcgagaattccgctatcgaccgcatttgtctacaacttgaggcggtgcgcagcaaaagtcatgctgtgaggactatcaacctagtcagcaatttgcgtattggaattgaggcaataggtggtgaagtcattggtatgggagtggggcgggaaatcaaagttcgtctgcccacaggacgaattatagtggtttacccgacggtcggggtcccgacgtcatcaaccatgcaccaagcctcaatgaactatccagatgaatcagttgctatactgtatgaccatgtggggctacatcctcagtggctgaatcatatggattggctcggctcgcacatccaggcaacgaagtgggtgaaagcatgcgaggtcggctggcagtttgcagattgggaggtttaa

SEQ ID NO: 3022 - protein, 380 aa, Klebsiella oxytoca
MLPIYQLAVIGSPSDEQLRDLEDAVKTAVEMYGLRLGQEISWEIAPDMFTPNQLRASAVVFFGGEGIEHPSLPSLLRSGTPVIPIVSDLRHVAAEIPELLRPLNCLAYANGGAKRVSIALLECAGLLPKQRRVFVSYRRDEARVAALQMFDALSERHFDVFLDTHSIAPAEDFQTMLWHRLCDSDVLLMLDTPDYFNSRWTSAEFGRALAKGISVLRVAWPETKQSRGLGTASLAELAEGELDGGTGHIENSAIDRICLQLEAVRSKSHAVRTINLVSNLRIGIEAIGGEVIGMGVGREIKVRLPTGRIIVVYPTVGVPTSSTMHQASMNYPDESVAILYDHVGLHPQWLNHMDWLGSHIQATKWVKACEVGWQFADWEV

SEQ ID NO: 3023 - DNA, 588 bp, Klebsiella oxytoca
gtggattctatttttctttcagcaagcgtcccggtcaatgggcgaggtgattattacgaaactgctgatccgttcctgattcagtgtgctgtacgtgagtttgccatcgcggtcgtaagaaaaatgaaaatcgtatggggggggcaccctgccataacacccatgatctggagcatttgcgaagatctgggcgtcgattacactcgctccgtagtattgtaccagagccgatttttcgaaggccagtatcctgaagaaaatgagcgattcgacaatgtcgtttacaccgatgcagtgcctgatgatctagccggcagcctacatcttatgcggcaggaaatgttgtctcgatgtgacttagttggcgcagtctttgtaggggggatggagggagttcaggttgagtatgagctatttaagcaatttcatcctgacgcaataattctaccggtcgccgcccctggaggcgcagcactgagactagcaagggatcatagctacttagatggaggccgtctgggagacgtggatttcgcatctttatttgatcgttatcttaataagatactgggctctcaatccgattga

SEQ ID NO: 3024 - protein, 195 aa, Klebsiella oxytoca
MDSIFLSASVPVNGRGDYYETADPFLIQCAVREFAIAVVRKMKIVWGGHPAITPMIWSICEDLGVDYTRSVVLYQSRFFEGQYPEENERFDNVVYTDAVPDDLAGSLHLMRQEMLSRCDLVGAVFVGGMEGVQVEYELFKQFHPDAIILPVAAPGGAALRLARDHSYLDGGRLGDVDFASLFDRYLNKILGSQSD

SEQ ID NO: 3025 - DNA, 450 bp, Citrobacter koseri
atggaaaacaacaacgagcgaagctctatggaaatcttcgaaaaaggtcaaaaaatcgcttttattgactcgttcagcaatgctgctttgtcttacgaatacgaacaggcgggcttcaccattaatttaatacaacgctcggttcttctctttaaccataatataaagaaaaacgtaacagccaagcagttgcgtaaaaataatataaagaaaaacgtaatgtcttcgacattgcataaaaatatgaacagcacatttatatatccatatagcaacatcagggaaatcaactactcgctgcctgattgcagatccgatgatgccgagatctgtattatgactgatgatgtattaaatccagtctggacgttcagggttccatcccacgcacattatatttgcgagcaatgggtggaagtatttaataaccatattttatttggtcaataa

SEQ ID NO: 3026 - protein, 149 aa, Citrobacter koseri
MENNNERSSMEIFEKGQKIAFIDSFSNAALSYEYEQAGFTINLIQRSVLLFNHNIKKNVTAKQLRKNNIKKNVMSSTLHKNMNSTFIYPYSNIREINYSLPDCRSDDAEICIMTDDVLNPVWTFRVPSHAHYICEQWVEVFNNHILFGQ

SEQ ID NO: 3027 - DNA, 588 bp, Citrobacter koseri
atgccggggctgagagtgaaaggaaaaaacgttattattgttcacggttatactgcatcaccggcagataactggtttccgtggttaaaaaaagaactggaattgcgtggtgccacagttgccgttcctgcgatgccggaaccgcattctcccgatccgcaaaaatggcagcaatgccttatcagcaacaatataacagcggatggaaatacaatttttgtcggacacagtcttggttgtattacggtgctgcgatatatcgccgaacatattccggaagggacaaaactgggtggttatattttagtctccggctttgattgcagtcaggaaacattacctgagctggaggcgcatgttcagtatcctctggattatactaagctgacagagatttctgataaacgaatttcagtcatatcttccgacgactgggtggtcagcccgcaggcatcgaaaacgctggcggagtcgttgcagactcaggttattgttgaaaataacgccggacattttctggacagggaaggatatactgagtttccggcgctgcttaatatattcagaactgtcttttctgtttcctga

SEQ ID NO: 3028 - protein, 195 aa, Citrobacter koseri
MPGLRVKGKNVIIVHGYTASPADNWFPWLKKELELRGATVAVPAMPEPHSPDPQKWQQCLISNNITADGNTIFVGHSLGCITVLRYIAEHIPEGTKLGGYILVSGFDCSQETLPELEAHVQYPLDYTKLTEISDKRISVISSDDWVVSPQASKTLAESLQTQVIVENNAGHFLDREGYTEFPALLNIFRTVFSVS

SEQ ID NO: 3029 - DNA, 222 bp, Citrobacter koseri
atgtttccggaataccgtgatttgatctcccatcttcgccaaaatagtcatcagtttcgcacgctgtttgataaacacaatcaactcgatcatgaaattgcccgtctggaaaaatcagacagaagcggctacagtgaggaagtggtggaactgaaaaaacagaaattacgcctgaaagaagaaatccaccagcttcttaaagatccgccggaagatgactga

SEQ ID NO: 3030 - protein, 73 aa, Citrobacter koseri
MFPEYRDLISHLRQNSHQFRTLFDKHNQLDHEIARLEKSDRSGYSEEVVELKKQKLRLKEEIHQLLKDPPEDD

SEQ ID NO: 3031 - DNA, 1338 bp, Citrobacter koseri
atggactctgtaatgtggatgatcggcacgctggttttcagtatcttgctgatcattatttcaattattaaatttaagtttcacccgtttttagcattgctgctcaccagcttttttgtcgggatcgccatgaatatggaaccgcaggatatggtcagcgccatcgaaaacgggattggcgggacactcggatttttggcggccattatcggactggggaccatactcggaaagatgatggaaatatccggcgctgctgagcgaatcgggatcacgctggaaaaatgccgctggttaagtcccgatgtcaccatgatattgatcggccttatttgtggtatcacactgtttgtcgaagtcggggttgtattactgatccctctggcgttttcgattgccaaaaaaacaaatacctcattattaaaactggcaattccgttatgtacggcgctgatggccgtacactgcattattccgccgcaccctgctgcgttatttgtcaccaatgaactcggcgcggatatcggaacggtgattgtggccggattagcggtgggactggttgcatcactgattggcggaccgctgttcctgaaattttttggggatcgtttaccgttcaaagttgtaccggccgcgtttgctgacctgaaagtgcgtgaagaaaaagacttaccttcattaggcgcggcgttatttacggttctgctgccgattgtgctcatgctgataaaaacaaccgctgatttaaacatgagcaaagatagcccgttattcacctttttacagtttatcggtaatccgataaccgccatgtttatcgccgcgtttgccgcttattacgtattgggtatccgccgtcatatgggaatgagcgtcctgctcagcaaaacggaagaaagctttagttcgattgcgaatatcttattgattatcggggcaggaggtgcatttaacggcatcctgaaaggcagcgggctgagtgattctctggcgctggtgctgtccggtatcgatatacatccgattttacttgcctggctggtggctatcattcttcatgccgcagtcggatcagcaactgtcgccatgatgggcgcgaccgcaatcgtggctcctctgatgccgctgtacccgcatatcagtcctgaaattatgacgctggctatcggctccggggcaatcggctgcaccattgtgactgattccttattctggctggtgaaacaatattgtaatgccacgctggcggaaacattccgttattacagtgtcgccacgctgattgcgtccgttgtcgcgctggccggcacctttgcactttcctatgtgatttaa

SEQ ID NO: 3032 - protein, 445 aa, Citrobacter koseri
MDSVMWMIGTLVFSILLIIISIIKFKFHPFLALLLTSFFVGIAMNMEPQDMVSAIENGIGGTLGFLAAIIGLGTILGKMMEISGAAERIGITLEKCRWLSPDVTMILIGLICGITLFVEVGVVLLIPLAFSIAKKTNTSLLKLAIPLCTALMAVHCIIPPHPAALFVTNELGADIGTVIVAGLAVGLVASLIGGPLFLKFFGDRLPFKVVPAAFADLKVREEKDLPSLGAALFTVLLPIVLMLIKTTADLNMSKDSPLFTFLQFIGNPITAMFIAAFAAYYVLGIRRHMGMSVLLSKTEESFSSIANILLIIGAGGAFNGILKGSGLSDSLALVLSGIDIHPILLAWLVAIILHAAVGSATVAMMGATAIVAPLMPLYPHISPEIMTLAIGSGAIGCTIVTDSLFWLVKQYCNATLAETFRYYSVATLIASVVALAGTFALSYVI

SEQ ID NO: 3033 - DNA, 1188 bp, Morganella morganii
atgaaaataaaattaatatcattagtaatcgccactaccatctcatcaccatctttttctgccaatgagtattggtatactgatgaccagaaaattaagctaagtgaaaaaaacatacaggcacatctgactgaaagagttggcaaacccgttcttcatattgaaaaaccggatagcaatggcgtatcccataatttctttgatgaattcagtgtaggtaaagaagggttgttcattaataataaaaacaaagctgatgtaatcattaatgaagtgatatctgattcacaatctgtattatcaggaaacattagagtcgtatttaataatgctgatttgattattgctaatcctaatggcattacctgtgatggatgcagtacaactaatgcccctaatactacactcattacgggtaaaattacggatagtgtaaataaaaaagatccgctcagctatcaaagttcagatggtaaaatagaaataatcaatacatctaacattaataataattataaaaaaaatgctgaaaagaacaaactatctctgatcgccaaccagataattattaagaacagcaccattgatatacctgatgtttttatcaaaacaacagaaacaaatgaatatatatcacacaaaacaggtacgtattatcatagccatacaccaggtatcttaacggaagaaactgtcgaagagcgcagaccttcgctattatacattgatgaatcatcctctattttaagtgataaactgaaaatagatgctcattccggccatgtagttaataatggaagtattaaatcatataaaaatgataccaatctgtcacatgtattatttgtcaatagtggtaatattacctcagtaatatctgatgtaacatctttttattccagcatgtataatcggggaaatatcactgctcaaaaactaaatatgtcatttaatgatactcatcatcattttgatacttctgaaaaagaatatattccggcaaaatttgcttttgttaatgacggtattatcaaaggatcattcgcaaaaattgattcacgcggagctgatcttaaaaacaatggtaacatcgatatgtgggggcgaactaatatcgctctccataatgaatatgatatggtcgagcataaattaatcaataatggcaccatctcaaatcaatactaa

SEQ ID NO: 3034 - protein, 395 aa, Morganella morganii
MKIKLISLVIATTISSPSFSANEYWYTDDQKIKLSEKNIQAHLTERVGKPVLHIEKPDSNGVSHNFFDEFSVGKEGLFINNKNKADVIINEVISDSQSVLSGNIRVVFNNADLIIANPNGITCDGCSTTNAPNTTLITGKITDSVNKKDPLSYQSSDGKIEIINTSNINNNYKKNAEKNKLSLIANQIIIKNSTIDIPDVFIKTTETNEYISHKTGTYYHSHTPGILTEETVEERRPSLLYIDESSSILSDKLKIDAHSGHVVNNGSIKSYKNDTNLSHVLFVNSGNITSVISDVTSFYSSMYNRGNITAQKLNMSFNDTHHHFDTSEKEYIPAKFAFVNDGIIKGSFAKIDSRGADLKNNGNIDMWGRTNIALHNEYDMVEHKLINNGTISNQY

SEQ ID NO: 3035 - DNA, 339 bp, Acinetobacter pittii
atggattacggcaaattcctctacgagaaaagcaaatcggctaaagagcagaagaagaaacaaaaagttattcaggttaaggaaatcaaattccgtcctggcacagatgaaggcgactatcaggtcaaactacgcaacctggttcgttttcttgaagatggcgataaagccaaaatcacactgcggttccgtggtcgtgaaatggcgcaccagcagattggtattgaagtgcttaaccgcatcaaagacgatctgagtgaattagcttccgtcgaatccttcccgtcgaagatcgaaggtcgccagatgatcatggtgctcgctcctaagaagaaatag

SEQ ID NO: 3036 - protein, 112 aa, Acinetobacter pittii
MDYGKFLYEKSKSAKEQKKKQKVIQVKEIKFRPGTDEGDYQVKLRNLVRFLEDGDKAKITLRFRGREMAHQQIGIEVLNRIKDDLSELASVESFPSKIEGRQMIMVLAPKKK

SEQ ID NO: 3037 - DNA, 345 bp, Citrobacter koseri
atgtctgtcagcaataagactgtttattctgtatgctccagattaaccctgatggttatgaagctgaccggccttgagcgggttattactgtcggccagtattttgagcgggcaacagataaatcactccttcagcgactgattgaagaaaacagagatctcagcacaccgttctcagcactggataaatcaaacaaggactgcaaaattgagctgattgaatatctgaatacagcaatccgtgagtacgctgcatccgaaataaaggaaaactacgctgcactgaaaaacggtaatctgctggttgtaaaaacattcaatacgattatgcaaaatcacgcttaa

SEQ ID NO: 3038 - protein, 114 aa, Citrobacter koseri
MSVSNKTVYSVCSRLTLMVMKLTGLERVITVGQYFERATDKSLLQRLIEENRDLSTPFSALDKSNKDCKIELIEYLNTAIREYAASEIKENYAALKNGNLLVVKTFNTIMQNHA

SEQ ID NO: 3039 - DNA, 219 bp, Morganella morganii
atgggagataccgggcggcgctgtctgaccgcccggtataaggaaaacagccttgtttatcacgctgtcatcctggcggattttaacgacaatacagtctgtataaacaatatgatagcctgcatagtgttaatcaatgacactcacctccagcgcggactcgcgataagagacggcgaaccgggtttgaacatttttttctgcccggcaaagtcatga

SEQ ID NO: 3040 - protein, 72 aa, Morganella morganii
MGDTGRRCLTARYKENSLVYHAVILADFNDNTVCINNMIACIVLINDTHLQRGLAIRDGEPGLNIFFCPAKS

SEQ ID NO: 3041 - DNA, 1467 bp, Citrobacter koseri
gtgatatcaacccgttcccgagtcattatccatctgagcagttttctgatagtgatttacagcctgacattattattaccgatgctggttgcgcttattgcgcaggagcagagttttttcgcgtttgccggtagtttcctgattttctttccggccgggttagtgtgctggtaccgcagtaaaaccaccggcctgcaattgcagacacgggatggctttctggttattgcggtattctggctgttattttctgttatcagcgccatgccgttctggctggatgatcatctgaatatggcttttgaagatgccttatttgaaggtgtttccggtattaccaccaccggcgcctcggtatttcacaatgtcaccggtttgccccgctccgttttatattaccgcgcccagcttaactttatcggcggtctgggggttattgtcctggcagtggcgatatttccgctgctgggtatcgggggaatgcgtttatatcagtccgaaatgccggggccgtttaaagatgagaaattaacaccccgcttagccagctccgcccgcaatttgtggttcacctatttattactgggattttgctgcacggttgcttttaaactggccggaatgacatggtttgatgccttatgccacgggctgtcgaccgtctctctaggcgggttttccacttacagcgaaagtatcggctattttaacagctccgcgattgaattagtggcgggggctttttcattattatccgccgtcaactttaccctttattttgtggcgctggcaaaacgcagcctgaagcccttattcagtaatacggaattgcgtttctattttgccgtggcggcattgattatcgggctggtcttttttgaagtgtggcgggcaaatatgtattcgtctgccgaagaatcctttgtccatgcttttttcctcaccagctccatgctgacggataacggtcttgccaccggtgattatgcacagtggccgtctcatattattgttctcttattatttgccagttttttcgggggttgtgtcggttccacctgcggcggaataaaagcggtccggtttttaattctttccaaacagagctggcgggaggtctattccctgatccacccgaaagcccaaaccctgatcaaagtcggtgataccgttgtgcagcaccggctgattaattccgtcctgagctttttcttcctttatgttatttgtacctgcttttttatctggtgtcttaatctgatggggtacgatttaatgacctcatttgccagtgtcgccgcctgtattaataatatggggctgggattcgggttaacagcacccgggttcggggagatctctccggcggcaaaatacctgctctgttttgccatgttattaggccgcctggagatatataccctgctggtgctgttatcggtcagtttctggcgtaactggccgtag

SEQ ID NO: 3042 - protein, 488 aa, Citrobacter koseri
MISTRSRVIIHLSSFLIVIYSLTLLLPMLVALIAQEQSFFAFAGSFLIFFPAGLVCWYRSKTTGLQLQTRDGFLVIAVFWLLFSVISAMPFWLDDHLNMAFEDALFEGVSGITTTGASVFHNVTGLPRSVLYYRAQLNFIGGLGVIVLAVAIFPLLGIGGMRLYQSEMPGPFKDEKLTPRLASSARNLWFTYLLLGFCCTVAFKLAGMTWFDALCHGLSTVSLGGFSTYSESIGYFNSSAIELVAGAFSLLSAVNFTLYFVALAKRSLKPLFSNTELRFYFAVAALIIGLVFFEVWRANMYSSAEESFVHAFFLTSSMLTDNGLATGDYAQWPSHIIVLLLFASFFGGCVGSTCGGIKAVRFLILSKQSWREVYSLIHPKAQTLIKVGDTVVQHRLINSVLSFFFLYVICTCFFIWCLNLMGYDLMTSFASVAACINNMGLGFGLTAPGFGEISPAAKYLLCFAMLLGRLEIYTLLVLLSVSFWRNWP

SEQ ID NO: 3043 - DNA, 240 bp, Morganella morganii
atgcaaatgatttttgggtatgttacagccctgatggccaggcccatttgctgggctatgaatcacaagcacgggcagaagcctctgccgataatactcatacagcacaatggttacttaatgcgtctgtatctgcaaccggcgaacaaatttggtatttatggcaatcggaaaacgacgataattgcagttttgaagaaaaaagtgcgcacacaaacgcgactgctcagcgttacttaa

SEQ ID NO: 3044 - protein, 79 aa, Morganella morganii
MQMIFGYVTALMARPICWAMNHKHGQKPLPIILIQHNGYLMRLYLQPANKFGIYGNRKTTIIAVLKKKVRTQTRLLSVT

SEQ ID NO: 3045 - DNA, 666 bp, Morganella morganii
gtgcaaattctattagtcgaagacgatttacaattaggcaaagcactgtgccggggactggaactggccggttttcgtgtgtgctggctgcgtttactggccgatgcccgtaagcggctgacagaacagcattttgacctgatgctgttggatctggggttaccggacggtgacgggtttgactctctggtggagtggcgcaacagcggggaacaaatcccgattattattatgaccgcccgcaatcagcgtgatcatctggtcaattccctcgattcaggggcggatgactttatttccaaaccggttgagctgccggaattaatttcccgcgttaaagcggtttcccgccgtattgccggtttttcctcacagttatggaaagtggataatatcacccttaacccgatgaaccatcaggtgacactgaatgacgagttattactgctctccggcaaagagtatcagctgttatatgaattaatgcgcaataccggtaatgtggtgcgcaagcatgagctggagcagcgtttattcggactggacgataaaatcgaaagtaattccctggaagtgcatatccataatctgcgccgcaaaatcggtaaagagaaagtgattaccgtccgcggaatcggctatctgctgaaaaaggacagcgaataa

SEQ ID NO: 3046 - protein, 221 aa, Morganella morganii
MQILLVEDDLQLGKALCRGLELAGFRVCWLRLLADARKRLTEQHFDLMLLDLGLPDGDGFDSLVEWRNSGEQIPIIIMTARNQRDHLVNSLDSGADDFISKPVELPELISRVKAVSRRIAGFSSQLWKVDNITLNPMNHQVTLNDELLLLSGKEYQLLYELMRNTGNVVRKHELEQRLFGLDDKIESNSLEVHIHNLRRKIGKEKVITVRGIGYLLKKDSE

SEQ ID NO: 3047 - DNA, 642 bp, Morganella morganii
atgtggaatgcaataattggtaatttagatgtaatcaagtctgctattggaatattaagtgttgttatgggggcttttttaactgcatttaaacttggatacagatatctgaatgtgaggaaagataagaaaataaagaaaaataaagagtatcttgatgagtacagtcaatttctaagtgaagatgataagaaatatataaagaaggatataagtgatatggttatgtcaaacgtctcacaggagaaaagcaggtcattcagagagttaaaaattctgctgtcaaaatatgatttaatgccggacatcagtatctggcttgtattaaaaagactaaagagatatatttgtattaaaaatgaagtattatcggttaacattgataattcatattatattaacagctggtttgaaaaaatattctcaattacattaattttgtggatctttatatttgttctggctgttttcctgagtgatggtgttgtttttgagacgtggaaatattattttttattagctatagtttttgttgccttagtcgtttccattagtctttttataaactcaccgggaaagaaaaaaataaaaaaaattgtcaaaacaattaatgatatgatttcagaaaaaataacacagtag

SEQ ID NO: 3048 - protein, 213 aa, Morganella morganii
MWNAIIGNLDVIKSAIGILSVVMGAFLTAFKLGYRYLNVRKDKKIKKNKEYLDEYSQFLSEDDKKYIKKDISDMVMSNVSQEKSRSFRELKILLSKYDLMPDISIWLVLKRLKRYICIKNEVLSVNIDNSYYINSWFEKIFSITLILWIFIFVLAVFLSDGVVFETWKYYFLLAIVFVALVVSISLFINSPGKKKIKKIVKTINDMISEKITQ

SEQ ID NO: 3049 - DNA, 510 bp, Citrobacter rodentium
atgggtctgtttgacaaactgaagtcgctggtttcggatgataaaaaagacagcggcacgattgacatcgtggcgccgctgtccggtgagattgtgaatatcgaagatgtgcctgacgttgttttcgctgaaaaaattgtcggcgatggtattgccatcaaaccggcagggaacacaatcgttgcccctgttgatggtacaatcggtaaaatttttgaaactaatcacgcgttctccattgaatcggacagcgggattgaactgtttgttcacttcgggatcgacactgtcgaactgaaaggtgaaggcttcaaacgtattgcggaagaaggccagcgcgtacaaaaaggcgacctggtacttgaattcgatctggcgcttctcgaagagaaagccaaatccaccctgaccccggtggttatctctaacatggacgaaatcaaagagatgaccaaaatgaccggccctgtcactgtcggcgaaaccgttgtcatcaaaatcaaaaaataa

SEQ ID NO: 3050 - protein, 169 aa, Citrobacter rodentium
MGLFDKLKSLVSDDKKDSGTIDIVAPLSGEIVNIEDVPDVVFAEKIVGDGIAIKPAGNTIVAPVDGTIGKIFETNHAFSIESDSGIELFVHFGIDTVELKGEGFKRIAEEGQRVQKGDLVLEFDLALLEEKAKSTLTPVVISNMDEIKEMTKMTGPVTVGETVVIKIKK

SEQ ID NO: 3051 - DNA, 759 bp, Citrobacter koseri
atgaaaaaaacgactattgcagccctgatcgctgcaaccgccgcgttttctgcgcaggctgaatatcagtggggatttgctaacgtcagcatgaactatctggactggaccccgcataccactcacaaaagcggcaacagcacgcacaaagatgactttgcgtatctggagcttgagggcggtgccggtttcagctggggtgagctttatggtttcttcgacctcgagaacgcgtttaacagtaaaaacgattccgatgccggtgataaccagcgttacaccttcaaaaccacggcgcgtatctacctcggtgataccggtttcaacgcctacggccatgtctacggtacttactctctgccgggtaacggcggtaacttccatgaagtgaacaccctgtatggtatcggttataacaccgaattcaacggcttatggttcaaaccatttgctgccctgcactatgttgatcaaacgttttacagcggcaacaacggctatgtcctcggctgggttgccggttatgactttaacctgtggaatgaaaaattcagcgtcaccaactggaacgaaatcgagcttaaccgcaacgatcgttacggcaacggcgggcgtgacggcgtcaacggcgcgctggccttatggtggacaccggttccgtcagtgacaaccggcattcagtaccgctatgcggataacaaactgggtgaggacttttaccagcaggctgtggtttacagcataaaatataacttctag

SEQ ID NO: 3052 - protein, 252 aa, Citrobacter koseri
MKKTTIAALIAATAAFSAQAEYQWGFANVSMNYLDWTPHTTHKSGNSTHKDDFAYLELEGGAGFSWGELYGFFDLENAFNSKNDSDAGDNQRYTFKTTARIYLGDTGFNAYGHVYGTYSLPGNGGNFHEVNTLYGIGYNTEFNGLWFKPFAALHYVDQTFYSGNNGYVLGWVAGYDFNLWNEKFSVTNWNEIELNRNDRYGNGGRDGVNGALALWWTPVPSVTTGIQYRYADNKLGEDFYQQAVVYSIKYNF

SEQ ID NO: 3053 - DNA, 603 bp, Citrobacter koseri
atgtctaattcatttatcgagttaattaaaaaacgcagaacaatttacagccttggtaataatctgcctgtttctcaggatcgtatcgccgcgctcatcaaagaagccgtgaaacacagcccgactgcgtttaactcacaatcatcccgcgtcgtggtactgtttggtgagaaccacaaaaaactgtggaatatcgtgaaagatacactgcgcgccattgttccggcagacgcatttgccgcgaccgaaggtaaaattgataatgccttcctgtccggtgccggtactgtgctgttctttgaagaccagtccgttgtcaaaggcttacaggaacaattcgcactgtatgcggataacttcccgatctggtctgaacaggccagcggtatcgcacagtttgccgtctggactgcactgtccgaagagaatatcggcgcatccctgcagcactacaacccggtgattgatgagcaggtcagcaaagcctggaatatcccggctgactggaaactgcgcgcacagttagtgttcggttccattgaacaggaagccggcgaaaaagcctttatggatgatgaaagccgcttcagaatcttcaactaa

SEQ ID NO: 3054 - protein, 200 aa, Citrobacter koseri
MSNSFIELIKKRRTIYSLGNNLPVSQDRIAALIKEAVKHSPTAFNSQSSRVVVLFGENHKKLWNIVKDTLRAIVPADAFAATEGKIDNAFLSGAGTVLFFEDQSVVKGLQEQFALYADNFPIWSEQASGIAQFAVWTALSEENIGASLQHYNPVIDEQVSKAWNIPADWKLRAQLVFGSIEQEAGEKAFMDDESRFRIFN

SEQ ID NO: 3055 - DNA, 1140 bp, Morganella morganii
atgacaaaatctgtatctgcaacactgatttctgccctgctggcgttttccgccccggggttttctgccgctgataatgtcgcagcggtggtggacagcactattaaaccgctgatggcacagcaggatattcccgggatggcggttgccgtatccgtaaagggcaagccctattatttcaactatggttttgccgatgttcaggcaaaacagccggtcactgaaaatacactatttgagctcggatctgtaagtaaaactttcacaggtgtgctgggtgcggtttctgtggcgaaaaaagagacggcgctgaatgatccggcggcaaaatatcagccggagctggctctgccgcagtggaaggggatcacgctgctggatctggccacctataccgcaggcgggctgccgttacaggtaccggatgcggtgaaaagccgtgcggatctgctgaatttctatcagcagtggcagccatcatggaaaccgggcgatatgcgtctgtatgcaaacagcagtatcggcctgtttggtgctctgaccgccaatgcggcggggatgccgtatgagcagttgctgaccgcgcggatcctggcaccgctgggattatctcacacctttattaccgtgccggaaagtgtgcaaagccggtatgcgtacggctataaaaacaaaaaaccggtccgcgtgtcgccgggacagcttgatgcggaatcttacggcgtgaaatccgcctcaaaagatatgctgcgctgggcggaaatgaatatggagccgtcacgggccggtaatgcggatctggaaatggcaatgtatctcgcccagacccgctactataaaaccgccgcgattaaccaggggctgggctgggaaatgtatgactggccgcagcagaaagatatgatcattaacggtgtgaccaacgaggtcgcattgcagccgcatccggtaacagacaaccaggttcagccgtataaccgtgcttcctgggtgcataaaacgggggcaacaactggtttcggcgcctatgtggcctttattccggaaaaacaggtggcgattgtgattctggcgaataaaaactacccgaataccgaaagagtcaaagctgcacaggctattttgagtgcactggaataa

SEQ ID NO: 3056 - protein, 379 aa, Morganella morganii
MTKSVSATLISALLAFSAPGFSAADNVAAVVDSTIKPLMAQQDIPGMAVAVSVKGKPYYFNYGFADVQAKQPVTENTLFELGSVSKTFTGVLGAVSVAKKETALNDPAAKYQPELALPQWKGITLLDLATYTAGGLPLQVPDAVKSRADLLNFYQQWQPSWKPGDMRLYANSSIGLFGALTANAAGMPYEQLLTARILAPLGLSHTFITVPESVQSRYAYGYKNKKPVRVSPGQLDAESYGVKSASKDMLRWAEMNMEPSRAGNADLEMAMYLAQTRYYKTAAINQGLGWEMYDWPQQKDMIINGVTNEVALQPHPVTDNQVQPYNRASWVHKTGATTGFGAYVAFIPEKQVAIVILANKNYPNTERVKAAQAILSALE

SEQ ID NO: 3057 - DNA, 876 bp, Morganella morganii
atggtcagacgttatctcccccttaacccgctgcgcgcctttgaggccgccgcccgtcatctcagttttacccgtgcggcgattgagctgaatgtcacccacgccgccgtcagccagcaggtcagggctctggaagaacaactcggctgtgtgctgtttacccgcgtctcgcgcgggctggtgctgacccatgaaggcgagggattactgccggtgctcaatgaggcgtttgaccggattgcggatactctggagtgtttttcgcacgggcagttccgtgagcgggtaaaagtcggtgcggtgggaacatttgccgcaggctggctgctgccgcgtctggccggattctatgacagccatccgcatattgatctgcatatctccacccataacaatcatgtggacccggcggcggaagggcatgattatacgatccgtttcggtaacggcgcatggcatgaatcagatgcggaactgattttcagcgcaccgcacgccccgctgtgctcaccggccattgcagaacagttacagcagccggatgatgttcaccgctttaccctgctgcgctcattccgccgggatgaatggagccgctggctggattgtgcgggtggcacaccgccttccccgtcacagccggtaatggtgtttgatacctcactggccatggcagaagcggcactactgggtgccggggtagcgattgcaccggtatgcatgttcagccgcctgttgcagtcaggcgcactggtacagccgtttgccgcagagatcaccctcggcggctactggctgacgcggttacagtcccgtacggaaaccccggccatgcagcaattcgcccgctggctgctgaatacggcggcggagtaa

SEQ ID NO: 3058 - protein, 291 aa, Morganella morganii
MVRRYLPLNPLRAFEAAARHLSFTRAAIELNVTHAAVSQQVRALEEQLGCVLFTRVSRGLVLTHEGEGLLPVLNEAFDRIADTLECFSHGQFRERVKVGAVGTFAAGWLLPRLAGFYDSHPHIDLHISTHNNHVDPAAEGHDYTIRFGNGAWHESDAELIFSAPHAPLCSPAIAEQLQQPDDVHRFTLLRSFRRDEWSRWLDCAGGTPPSPSQPVMVFDTSLAMAEAALLGAGVAIAPVCMFSRLLQSGALVQPFAAEITLGGYWLTRLQSRTETPAMQQFARWLLNTAAE

SEQ ID NO: 3059 - DNA, 321 bp, Morganella morganii
atgagtgcggcggatattatccgcgaacaggctgaacagcacggcattgcgcgggtaacggatgtctggctggaagtcggtgcactggcggatgttgaggagagtgcactgcatttctgttttgatatcgcctgccgtgataccgtggcgcagggctgcacactgcatattgatgttatcccggcacaggcatggtgctgggattgcagccgtgaggccgaaatcatgcagcacgccggatgctgtccgcactgcggcagtgaacggctgcgcatcagtgaaggtgatgatttgcgggtaaaaagcctggaaggtgagtga

SEQ ID NO: 3060 - protein, 106 aa, Morganella morganii
MSAADIIREQAEQHGIARVTDVWLEVGALADVEESALHFCFDIACRDTVAQGCTLHIDVIPAQAWCWDCSREAEIMQHAGCCPHCGSERLRISEGDDLRVKSLEGE

SEQ ID NO: 3061 - DNA, 363 bp, Citrobacter koseri
atgcttacatggctgacaggccgtcgtcatgaacaatttgcccggcgctggctggaacagcagggactgacatttgttgcgcagaatgtccgtttccgccggggcgaaattgatttaattatgcgggacagcggcacctgggtgtttaccgaggttcgctatcgccgcaatgcacactatggcggagcggctgccagtgtcacaaaaaccaaacagcgccgcttactttatgcggcttcctgctggttatctcagcaacagctgagtatgctgacctgtgactgccgttttgacatttgcgccataaccggtgaccatatcgactggctgaaaaatgcctttggtcacgccgacttttgttaa

SEQ ID NO: 3062 - protein, 120 aa, Citrobacter koseri
MLTWLTGRRHEQFARRWLEQQGLTFVAQNVRFRRGEIDLIMRDSGTWVFTEVRYRRNAHYGGAAASVTKTKQRRLLYAASCWLSQQQLSMLTCDCRFDICAITGDHIDWLKNAFGHADFC

SEQ ID NO: 3063 - DNA, 1473 bp, Citrobacter koseri
atggaaaacaataaaaaaatcattcgcggcggcacaatcatcacaatggatgatgccaccggcgatattatcaacggcgcgatactgatcgaaggcaaccggatcagtgcaatcagtgctgatatacaggcatttgatcaccacactgatgcgcaggtgattgatgcacaaggggcgattgtcacccccggtatgatcgatgcgcaccgccataactggatggcgctgttccgtggtgtatcagcggaagagtcattaccggcatttcttatcaataccttccatgcgatcggcgcaatgatgacggcagataatatgtacgccgctattctgaacggcaatatcagcgccctgaatgccggcacaacaaccgtttatgaagtgaatgactgcgttaactcaccggaacatgccgctaacgcggttgcggcgatgaaagccagcggtatccgtggcatctacggctatggtatgcaggtttatgattttaaacccgccggctttgcttccatggatgaacggcgcgattgtgcccgtgagatctcagaaactctgttccgtgaccaggatcgcctggctgccggtatgctgatttccgaccccggtacggtaccgtttgctgaatcggcaaaacaaatccgtctggcggataaactcggtctgaaacacgcctcacacaccggggccgccaaaacctcagttctgctgcgcggtctgcgtgagctggacgaccacggtctgttactgccgggacatatccacgctcacagtaacgggctgaccggtgaagactggaaacttatcgccaaaagcggcggtcatgtggcgagcacaccgtccagcgagttacagatggggatgggttttctgccttatcagccgtgtgcggagttcggtattccgttcgcactggggactgatttcatcggtgtgacaacggatgacctgtttacccagatgaatatggcgctgcagattgaacgggcactggcgaatgaaaaagtacatcagcgcgatactatgccgtttgaaattaccccgaccatccgtgaagccctgcactgggcaaccctcggcgcggcacaggtgctgggcatggaaaacgagatcggttcgctggttgccggtaaaaaagcggacatcattattatccgccacaaagacggttttgtggcaccgatccacgcggccggtagtgtggtgcagatgacgcacgccggtgatgtcgatactgtgctggcagatggtgtgatccgcaaacaaaacggtgtgctgaccggttttgatctcccggaagtggtccgtttatcccataacgctctggcgtcgctggaagtacgcatccgtgaccggaaaatcctcaatacgcaggaagtggaagcgttcttccgcctggctgagcggatggcatccttccatttcgctcaggcgtacagtgatgagttttttgcacaggctatgaaacaatcctga

SEQ ID NO: 3064 - protein, 490 aa, Citrobacter koseri
MENNKKIIRGGTIITMDDATGDIINGAILIEGNRISAISADIQAFDHHTDAQVIDAQGAIVTPGMIDAHRHNWMALFRGVSAEESLPAFLINTFHAIGAMMTADNMYAAILNGNISALNAGTTTVYEVNDCVNSPEHAANAVAAMKASGIRGIYGYGMQVYDFKPAGFASMDERRDCAREISETLFRDQDRLAAGMLISDPGTVPFAESAKQIRLADKLGLKHASHTGAAKTSVLLRGLRELDDHGLLLPGHIHAHSNGLTGEDWKLIAKSGGHVASTPSSELQMGMGFLPYQPCAEFGIPFALGTDFIGVTTDDLFTQMNMALQIERALANEKVHQRDTMPFEITPTIREALHWATLGAAQVLGMENEIGSLVAGKKADIIIIRHKDGFVAPIHAAGSVVQMTHAGDVDTVLADGVIRKQNGVLTGFDLPEVVRLSHNALASLEVRIRDRKILNTQEVEAFFRLAERMASFHFAQAYSDEFFAQAMKQS

SEQ ID NO: 3065 - DNA, 126 bp, Citrobacter koseri
atggcggcagccatcaggttaagcttgagaggttccgacaaaaaagaacgggctgaaaccgcgtattttgtacaaacgcacaaatcacagatcggtcagaataccaaaataaagctgaatcattga

SEQ ID NO: 3066 - protein, 41 aa, Citrobacter koseri
MAAAIRLSLRGSDKKERAETAYFVQTHKSQIGQNTKIKLNH

SEQ ID NO: 3067 - DNA, 396 bp, Morganella morganii
atgccggatttattatcttttcaccgtacagccatgatgctgctgcgccatatcgggcttgacgcccctcagcctgccaccgatcagcatacatttatgttaacaattgacagccggtattcattatctctggccgtcattgatgagacagactggtatctgtcagcaaataccggggaattaccacacattacgcaaaataatgaattgctgcggaaagtcctgaagctgaatacgttaacacagctttcggggcaaccggtgatttccctgaatgagaaaaatgagtgggtgatctggagtcgtctgtcactgaatggtacagaagatagtcatattattgagttatttgaatatattctgaaatccgcagattatttgtctgatcttcattaa

SEQ ID NO: 3068 - protein, 131 aa, Morganella morganii
MPDLLSFHRTAMMLLRHIGLDAPQPATDQHTFMLTIDSRYSLSLAVIDETDWYLSANTGELPHITQNNELLRKVLKLNTLTQLSGQPVISLNEKNEWVIWSRLSLNGTEDSHIIELFEYILKSADYLSDLH

SEQ ID NO: 3069 - DNA, 246 bp, Citrobacter koseri
atggaaaatatagtaccggataaatactacgatatcgctgatgagtacgcgctggaatcggaagagccggttgaagagcaggagtatgacggactggcgcactattttcagttactgatcacctgtctgacgaacaatgaagaaatcagtgaggaagcccagaaaaagatggcggctgaagccggtatcgataaacagcgtatcgatgatatcgctgaatttctgaaccgctggggtaatgattaa

SEQ ID NO: 3070 - protein, 81 aa, Citrobacter koseri
MENIVPDKYYDIADEYALESEEPVEEQEYDGLAHYFQLLITCLTNNEEISEEAQKKMAAEAGIDKQRIDDIAEFLNRWGND

SEQ ID NO: 3071 - DNA, 762 bp, Morganella morganii
gtgccgttattctcctggtttcatgacctgtttcagagcgcgctgttcagcagtgtgcggttatttgcggcgttcgcttttctgccgtttctgaatgataaatttattctcagccggagcacgcggggcattattgtttttcttatggcactgtgtctcagcggaaatgaacattacccggcggcagagttctctgtggtcagtctgctgagtgaaatcattaccggcacggtaatgggattggtttacagcacaccgttttttatttttgccgccttcggtgaatatattgataaccagcgcggagcgaatatcagtgataccgctgatccgacaacagggaccgatgcgtcaccgttttccacctttatgaatctgttttctgtctcgttttttttactcaataacggccttgtattactgatgacatccgttcaggacagtttccggttattaccgccgggcacattactgacggaaatacattatgtgccggtctttgactggctgacaaacagcctgtcactctctttgctgttttgtatgccggtactgattatcttatttatttctgaagtcagcctgggcattctggcgctgtacaattcacaactgaatccgttttccttatcactttcaataaaaagtattattgcctttctgctggcgctgctgctgtttcgcagcacaacaatgacggatgtgacagtgctgtttgatacttcccctctgactcactttttgagaggaaataatggctga

SEQ ID NO: 3072 - protein, 253 aa, Morganella morganii
MPLFSWFHDLFQSALFSSVRLFAAFAFLPFLNDKFILSRSTRGIIVFLMALCLSGNEHYPAAEFSVVSLLSEIITGTVMGLVYSTPFFIFAAFGEYIDNQRGANISDTADPTTGTDASPFSTFMNLFSVSFFLLNNGLVLLMTSVQDSFRLLPPGTLLTEIHYVPVFDWLTNSLSLSLLFCMPVLIILFISEVSLGILALYNSQLNPFSLSLSIKSIIAFLLALLLFRSTTMTDVTVLFDTSPLTHFLRGNNG

SEQ ID NO: 3073 - DNA, 399 bp, Morganella morganii
atgaaacaggcagattacttgaacagctcacacaatgaattacagcaactgatcgcgcatttcagtctgaaagagcgcagtgtccgggcggcactggcacagctgcaccagcgctaccggcaggaacaggaaaataaagataagctattgttgttaatcaaaggattagaacagcagatccttgagtttgaatgccgcggattattatcttacaccgcactgaatgaactcaggcgcaaacaggcaatctaccgtaaacagatcccggatgtccgtgccagagtggatgaatcatcccttcagctggcgcaaatctcggatgatattgctgagagtaataaaacaataaataatctgaaaaagaaacttattaagtttgaacaatataataaacaatga

SEQ ID NO: 3074 - protein, 132 aa, Morganella morganii
MKQADYLNSSHNELQQLIAHFSLKERSVRAALAQLHQRYRQEQENKDKLLLLIKGLEQQILEFECRGLLSYTALNELRRKQAIYRKQIPDVRARVDESSLQLAQISDDIAESNKTINNLKKKLIKFEQYNKQ

SEQ ID NO: 3075 - DNA, 411 bp, Citrobacter koseri
atggatcttgcaacactggttacagaaggaatgaagcttatcggacgcggcgatttggtgccggagacagcggctttggataatcattcaacaatatcattatcgctgggggaacagcaggtcattcatattgcggtggttgatgaatatccggttatctggatgccgttgcagactgatttaccggcattgcggccggaggtaaaaggcggtttgctggatatcctgacagaagaacccgcccctctgttttatccgggctcaccggcgctgcggcagacagataacggcgcggagctggtcgggtgtttcagtcacaatgctgtcagcggcgcggaaccttttgtgcaggcgctggatcagtttgtccgcctcagtcagcagtgtcacacactgatcctcagaggctga

SEQ ID NO: 3076 - protein, 136 aa, Citrobacter koseri
MDLATLVTEGMKLIGRGDLVPETAALDNHSTISLSLGEQQVIHIAVVDEYPVIWMPLQTDLPALRPEVKGGLLDILTEEPAPLFYPGSPALRQTDNGAELVGCFSHNAVSGAEPFVQALDQFVRLSQQCHTLILRG

SEQ ID NO: 3077 - DNA, 912 bp, Morganella morganii
atgcgaaagaagatcccgaaaacggatttactgatcaccttcgaagctgttgcgcagtatgagagctacacccgggcagcggaagagttatcactgacccagagcgcggttttccgtcagatagccgcgctggaagaatttctgaatgtgtcgctgtttcatcacgtccgcaaacgtattttcctcagtgatgccggaaagcattacctcgggctggtgcatgacacgctggataagctggaaaaagacacccaggatattatgtcctggcagtcatcacagcagctgtttgagctggcggtaacaccgaccttcagcacacactggctgatcccgaacctgcagagcttccgtgagaaacatccggaaatcgcattaagtatcagcgcattaaccacaccggcggactttaccagcctgaaatacgatgcggcaatcatgcgtgaggatttctgtaatccgtggccggattttgaatatctgtttgaggaagagctggtaccggtctgcagccgcatgctatggcgggatgacagtatcaaactcaccaccagccaggtgctggaagagtttactctgctgcatcagaccacccgcctcgatgcctggagtgactggttccagctctcgggcattcacaacccgaaaacccgggtcggtccgcgctttgatctgctttcgatgctgatctccgccatccgctcaaatctcggtgtggcgctgctgccgcgttttgccatccagaaagatctggaaaacggcgatctggtgatcccgtgcgacctgccgatgagcaccggcaaccgctttgttctcacctataaagaggacaagaaaggatcactcaacctgcggaaattcagtgactggatccacgagaaatcgcgggaaaaagaactgattctgtcttaa

SEQ ID NO: 3078 - protein, 303 aa, Morganella morganii
MRKKIPKTDLLITFEAVAQYESYTRAAEELSLTQSAVFRQIAALEEFLNVSLFHHVRKRIFLSDAGKHYLGLVHDTLDKLEKDTQDIMSWQSSQQLFELAVTPTFSTHWLIPNLQSFREKHPEIALSISALTTPADFTSLKYDAAIMREDFCNPWPDFEYLFEEELVPVCSRMLWRDDSIKLTTSQVLEEFTLLHQTTRLDAWSDWFQLSGIHNPKTRVGPRFDLLSMLISAIRSNLGVALLPRFAIQKDLENGDLVIPCDLPMSTGNRFVLTYKEDKKGSLNLRKFSDWIHEKSREKELILS

SEQ ID NO: 3079 - DNA, 591 bp, Citrobacter koseri
atgagcgacgaacgttatcaacaacggcaacagaaactgaaagagcatgtcgacgggcgcgttgccgcggctcagaagaccggcggggtcctgatggtcttcaccggtaacgggaaagggaaatccactgcggcctttggtaccgcgacacgcgccgccggacacggtatgaaagtgggcgtggtgcagtttatcaaaggccagtgggaatgcggcgagcgcaatgtgctggaaaaactgggggttgagttccatatcatggccacaggttttacctggaacacgcaggacaaagaaggtgataccaaagcggcacaggaagtatggcagttcggcaaagcgatgttacaggatccgtcctatgacctcgtggtgctggatgaactgacttacatggtgcgctacggctatatcgacctggatgagattatcagttacctgaaaaatcgccctgaaaaccagagcgtgattattaccggccggggatgccaccgcgatatcactgatctggcagacaccgtcagtgagctgcgtccggttaaacacgcgtttgacagtggtattcaggcacagaaaggtatcgactggtaa

SEQ ID NO: 3080 - protein, 196 aa, Citrobacter koseri
MSDERYQQRQQKLKEHVDGRVAAAQKTGGVLMVFTGNGKGKSTAAFGTATRAAGHGMKVGVVQFIKGQWECGERNVLEKLGVEFHIMATGFTWNTQDKEGDTKAAQEVWQFGKAMLQDPSYDLVVLDELTYMVRYGYIDLDEIISYLKNRPENQSVIITGRGCHRDITDLADTVSELRPVKHAFDSGIQAQKGIDW

SEQ ID NO: 3081 - DNA, 1659 bp, Citrobacter koseri
atgacaaataaaacttttgagtatcaggagccattcccgttatcggaagataaaacggactattatctgctgagcagggagcacgtttccacggcgacatttgaaggccgtgagatgcttaaggttgaacctgaagcgctgacgctgattgctcagcaggccgtgcatgatgcctcctatttcctccgtccggcacatcagaaacaggttgcacagattttaagcgaccctgaagccagcgaaaacgacaaatatgttgcgctgcaactgctgcgcaatgcggaaatctctgccaaaggggttctgccgaactgtcaggataccggcaccgcgactatcgtggcgaaaaaaggccagcaggtatggaccggcgtcaacgatgcggaatgcttatcccgtggtatttacaacacattccagcgtgaaaacctgcgttattcacagaacgcggcgctggatatgtacacggaagtgaataccggcaccaacttaccggcacagattgatatcctggccaccgaaggcgcggaatatcacttcctgtttatcaacaaaggcggcggctctgccaataaaaccgcgctgtatcaggaaaccaaggccattctggaacatgatcgcctgaaagcattcctgatcgacaaaatgaagtatctcggtaccactgcctgcccgccgtaccatattgcattctgtatcggcggcacctcaccggaaatgaacctgaaaacggtgaaactggcttccaccaaatattatgacaatctgccggataccggtaatgagctgggacgcgccttccgcgatcgtgagctggagcaggagctgctggaagccacccgtgagtttggtttcggtgcccagttcggcggtaaatatttcgcccatgatatccgtgtgatccgtctgccgcgtcacggcggttcctgcccgattggtctggcactgtcctgttcgtctgaccgtaacatcaaaggcaagatcaccaaagacgggatctggctggagaaactggaatacaatccggcaagttacattccggaatccatgcgtaaagagaatgaaagcgacatggtcagtatcgatctgaaccggccgatggcggaaatccttaaagagctgagcaagtatccggtctccacccgcgtctctctcagcggcccgctcatcattgcccgtgatatcgcgcatatgaaactgaaagagcgtctggacagcggacagggattaccgcagtatttcaaagatcatatggtgtactatgcgggtccggcgaaaaaaccggaagacctggtctccggctctctcggcccgaccaccggtaaccggatggatccgtatgtggacttgttccagtcgcagggcggcagtatgctgatgctggcaaaaggaaaccgcagtcaggcggtgaccgattcctgtaaagcacacggcggcttctatctgggcagtatcggcggttctgcggcgattctggctcaggaatatgtgaagagcctggatattctggaataccctgaactgggtatggaagcagtctggaaaatggaagtggaagggctcccggcctttatcctggtggatgacaaagggaataacttcttcgaacaggttcagacgaaaaaatgtgagaaatgcgtggcaggccagcctgcctga

SEQ ID NO: 3082 - protein, 552 aa, Citrobacter koseri
MTNKTFEYQEPFPLSEDKTDYYLLSREHVSTATFEGREMLKVEPEALTLIAQQAVHDASYFLRPAHQKQVAQILSDPEASENDKYVALQLLRNAEISAKGVLPNCQDTGTATIVAKKGQQVWTGVNDAECLSRGIYNTFQRENLRYSQNAALDMYTEVNTGTNLPAQIDILATEGAEYHFLFINKGGGSANKTALYQETKAILEHDRLKAFLIDKMKYLGTTACPPYHIAFCIGGTSPEMNLKTVKLASTKYYDNLPDTGNELGRAFRDRELEQELLEATREFGFGAQFGGKYFAHDIRVIRLPRHGGSCPIGLALSCSSDRNIKGKITKDGIWLEKLEYNPASYIPESMRKENESDMVSIDLNRPMAEILKELSKYPVSTRVSLSGPLIIARDIAHMKLKERLDSGQGLPQYFKDHMVYYAGPAKKPEDLVSGSLGPTTGNRMDPYVDLFQSQGGSMLMLAKGNRSQAVTDSCKAHGGFYLGSIGGSAAILAQEYVKSLDILEYPELGMEAVWKMEVEGLPAFILVDDKGNNFFEQVQTKKCEKCVAGQPA

SEQ ID NO: 3083 - DNA, 1299 bp, Citrobacter koseri
atgaagtcaagaagtttaacgacctggattgtggctgcgttatttatcggggtgattgtcggctttgcgctgaacaaactggccacacccgggtttaatcagcaatattctgctgatatctcagtggtgacagatattttcctgcgactcattaaaatgattatcgcgccgctgatcctctccacactggtggtgggtattgcaaaaatgggggatgcgcggacacttggccgggttttctccaaaacgttgtttttatttgtctgcgcttcctttatttccatcacactcgggctggtgattgttaacctgcttaaaccgggggcgggaattaactttgtggcaccggcggatacggtggtggacaatgtggcgaccgccgcgttttcggtgaaaaactttatcgcccatctgatcccgaccagtatcgttgatgctatggcccgcaatgagattttgcagattgttgttttctctatttttatggggatagcgctttccgctatcggtgagaaaggaaagccgattctgacactgctggagtccgtggtcagcctgatgctgaaactgaccggctatgtcatgctgttcgccccgctgacggtttttgccgccatttccggtatgatcgccgagcgcgggctggtggtgctgctggaagccggtatttttatgggtgaattctacctgacgctggcaacattatggctggtgttaatcggtctggcagttctgatcgtcggacgttgtattctgcggctgaccaaagggatcgccgaaccggcactgctggcatttaccacgtccagctctgaagcggctttcccgggcacgctgaagcagctcgagcagttcggggtctccaataaaatcgccagctttgtgctgccgattggttactcctttaacctcgtcggctctatggcgtactgttcttttgcggttatctttatcgcccaggcctgtaatattgagatttccatgggggatcagattacgatgctgctgatcctgatgctgacatccaaaggtatggccggtgtgccgcgtgcttcgctggtggtgattgccgccacactgacgcagtttaatatcccggaagccgggctaattttgctgatgggagtcgatccgttcctggatatgggccgctccgcaaccaacgtgatgagtaatgcgatgggcgcggcgattgtcgggcgctgggaaggcgagcattacggggaaggttgtcacggaaaaccgccggtaacggttgttgagatggcagaaccggagccgctgaaaaaagcaggctga

SEQ ID NO: 3084 - protein, 432 aa, Citrobacter koseri
MKSRSLTTWIVAALFIGVIVGFALNKLATPGFNQQYSADISVVTDIFLRLIKMIIAPLILSTLVVGIAKMGDARTLGRVFSKTLFLFVCASFISITLGLVIVNLLKPGAGINFVAPADTVVDNVATAAFSVKNFIAHLIPTSIVDAMARNEILQIVVFSIFMGIALSAIGEKGKPILTLLESVVSLMLKLTGYVMLFAPLTVFAAISGMIAERGLVVLLEAGIFMGEFYLTLATLWLVLIGLAVLIVGRCILRLTKGIAEPALLAFTTSSSEAAFPGTLKQLEQFGVSNKIASFVLPIGYSFNLVGSMAYCSFAVIFIAQACNIEISMGDQITMLLILMLTSKGMAGVPRASLVVIAATLTQFNIPEAGLILLMGVDPFLDMGRSATNVMSNAMGAAIVGRWEGEHYGEGCHGKPPVTVVEMAEPEPLKKAG

SEQ ID NO: 3085 - DNA, 894 bp, Citrobacter koseri
atgaaaaccgcaataaaactaagtgtattaggttctgccgtattattaatggccgcctgtgacagtctggatccggacagcacgaaaaatgaattctggtacagcaacccgactgacaccacactgacctttaaagtggatgacaaagaatacaccaccgaaccgggtaccgccgcgaaactgaaattatcaccgggtatgcacagcattgagaatgcgaaaggtgagaaacagaattttatggtgtatgacaataacagcggcggcattattaacccggataatcacgtctattatatgttgtctgaagtctatgcggtggaagggcagagcgatcgctttaaaccggctctgtatgatgtcaccattaacggccatgatttacagatgccggtgcgcagcagcaatgccaccctgattgaccacaatctgtttaattgcagttaccctgtcggtacagcgttcccggaagagattaccaccagtaaccgccagtctgtcggcaatattaaaaccaaatgttttgataaggcagaactggtcgcctatatcgcatcggattacggtgagaaattacaaccggttgcgccgggtgatgagctgaaagattccgtcaatatgactttcgattacaccattccggagccgcagtttaaagatgcggaaacacagaaacaggcgctgaaattaaccggcctgctgaagcagattaatgaatctgataatccggacattcacgacaagctgaataaagagatccaccagaccaccatggatctggtatccgcgtctgccgggtccgcatcatccaatacggtggcggaaaatgaatattacaacacatttatcacgcagaccggcaatttccgcgccttcggggttctgccgaaataa

SEQ ID NO: 3086 - protein, 297 aa, Citrobacter koseri
MKTAIKLSVLGSAVLLMAACDSLDPDSTKNEFWYSNPTDTTLTFKVDDKEYTTEPGTAAKLKLSPGMHSIENAKGEKQNFMVYDNNSGGIINPDNHVYYMLSEVYAVEGQSDRFKPALYDVTINGHDLQMPVRSSNATLIDHNLFNCSYPVGTAFPEEITTSNRQSVGNIKTKCFDKAELVAYIASDYGEKLQPVAPGDELKDSVNMTFDYTIPEPQFKDAETQKQALKLTGLLKQINESDNPDIHDKLNKEIHQTTMDLVSASAGSASSNTVAENEYYNTFITQTGNFRAFGVLPK

SEQ ID NO: 3087 - DNA, 942 bp, Citrobacter koseri
gtgactgctgttttacgccattgttttaccgccctgctgattatttttatttcattgcagacagctgctgccgggaaaaatatccccgctgaaataaacggccttaacggcacactgacactgccggaaaacagcacgccgaaaggtgtcatcctgtttattgccggttccggcccggtggatcgtgacggtaacagcccgggcagtcagaccgataatctgcggatgctgggcgatgccctgagtgatgccggttatatcacactgcggaccgacaaagccggaacaggtgccggtgcggcaaccgttaacccggcagatatcacctttgccggttatctgcgggattatcaggcgtggttcggttttctgcaaaagcgctatccggacaccccggtgtatctgctcggccacagtgaaggggcgttatttgccaccctgatggcgcaacagcataaaccggcggggattattctggtttcgcctgcgggatataccatcgatattatcctgaaaaaacaaatgcgtgctcagccattccccccggaggcgctgacctatatcaacgatgtgattgaccggctgaaagcagagaaaaccacggaaaatgtgccgccgtctctcaatattctgttcgccccggaattacagcgctattttatggtgtggatgcagtatgacccggcagaagagctggcaaaagtgaccgttccgggactgattattcagggaggtcatgactgtcaaatccctccggaaaacggcgaacggcatatccgtaccgcaccggataatcagtatgcggagatagcaaccatgaatcacgttctgaaagcgacccctgctgactgtgcggcggccatcggcagttacaataacccggcgctgccgctgcacccggaactggttcctgctattacccagtttttatccgcccgctga

SEQ ID NO: 3088 - protein, 313 aa, Citrobacter koseri
MTAVLRHCFTALLIIFISLQTAAAGKNIPAEINGLNGTLTLPENSTPKGVILFIAGSGPVDRDGNSPGSQTDNLRMLGDALSDAGYITLRTDKAGTGAGAATVNPADITFAGYLRDYQAWFGFLQKRYPDTPVYLLGHSEGALFATLMAQQHKPAGIILVSPAGYTIDIILKKQMRAQPFPPEALTYINDVIDRLKAEKTTENVPPSLNILFAPELQRYFMVWMQYDPAEELAKVTVPGLIIQGGHDCQIPPENGERHIRTAPDNQYAEIATMNHVLKATPADCAAAIGSYNNPALPLHPELVPAITQFLSAR

SEQ ID NO: 3089 - DNA, 510 bp, Citrobacter koseri
atggatgtcgtcagaacacttatcaccggcgctcttgataatatcaaccagcgtgagaagcgggacggaaaaccccgtctcagcagtcattttatccgcacctatccttatttatgtctggcgatggtggtgtcctatcttgttctgggtgttcttatttattatgcaccctacttcggcttttactggctgctcggtttcagtgccctgttcctggtaatggctgcggttctgctgtttgaagtcagaccggtttaccgctttacggatatcggcgtgctggatctgcgggtgtgctataacggcgaatggtttgtcagtgaagttgtgcccccggaaaccctggcggcgttacttgaccacccgcaggtcagtgatgcactgaaacaggagatccgccatatgacagaaacaaaaggtaccgtgtcattttatgatctgcatctgatggcgtacccggaagcgcatccggaaaaaccgcgctcccactggatgaaaggtgcggcttaa

SEQ ID NO: 3090 - protein, 169 aa, Citrobacter koseri
MDVVRTLITGALDNINQREKRDGKPRLSSHFIRTYPYLCLAMVVSYLVLGVLIYYAPYFGFYWLLGFSALFLVMAAVLLFEVRPVYRFTDIGVLDLRVCYNGEWFVSEVVPPETLAALLDHPQVSDALKQEIRHMTETKGTVSFYDLHLMAYPEAHPEKPRSHWMKGAA

SEQ ID NO: 3091 - DNA, 1596 bp, Citrobacter koseri
atgcaaaagatattacgtattgatgaaactgataatttaattgtggcactgaaggatttgcatgccggtgaagtgtatcagtggggtgatgaatcaatcactctggtcacggatgtgaaagccaaacacaagtttgccctggaagcagtgccggaaggcggtattgtctccatgtacggcaccgctgtcgggaaagcaacaaaaccaattgcccgcggggaagtaattaccgtggacaatattcgccattatgccgccccggtatcactggaggagagcggagactatgagtggcagatcccggatgtgtcggtctggaaagaccggacatttaaggggtatatccgtgatgatggccgggtaggtacggcaaattactggctgattttcccgctggtgttttgtgagaaccgcaatgtcaccaagctgacggatgcgctgaatgaggcgctgggctacaccaataacagcctgaaaagtttcgccttcgatctgaccgccggtgaacaggcgcagaccgcaaagcccaagctgttcccgcatattgagggggtacgctgtattacggtgaccagcggctgcggcggtgccacctctgacagtaaaaccatgtgtgatgtactggctgcgtatgcggatcatccgaatgtgatcggtattactgtgttcagcctgggatgtgaaaaagcgcagcgcaagatgttcaaagagtcgctggcggcgcgtaatccggcatttgataaaccggcgctctatttccggcagcaggaatggaacagcgaagaagagatgatgcagacggcgctgaaacaaacctatgagtgcatgaaagcagtgaagcctcagagccgtacggatgtgccgctgtcatatcttaagctcggcgtgaagtgcggggcatctgacgggttctcgggcatttccggtaatccggcgatggggctggtgtctgactggctggtgacactcggcggcgcttccggtctggctgaattcccggaactgtgtggtgcggaaggggatatggtaaaacgctgcatccgctttgaggataaaaagaaattcctcgatctgatgggacagtatgagaaaaccgcgaacttctttaataccactatcgcggataacccgagccccggaaatattgctgatggattaattaccgatgcgattaaatcaaccggtgcggcgaaaaaaggcggaaaatcgccgatcagtgcggtgtgtgactatgcggaaccgatgccggacagcggactgtctctggtctgcacaccgggaaatgatgtggatgcggtgaccggattggtggctgcgggctgtaacgttgttattttttccaccgggctgggaacaccgacaggaaaccctatcgtgccggtcgtcaagatttccaccaacagcgctatcgctcagcgtttgtcagatatgattgactacgactgcggtccggtgatagaaggtgtgccattgccggaaatcagtaaagggctgtttgagcgcgtgattgaaacggcaggcggggaatataaggtgaaagcagaccgtctggagcagttcgattttctgctgtggaaacggtcactggatttataa

SEQ ID NO: 3092 - protein, 531 aa, Citrobacter koseri
MQKILRIDETDNLIVALKDLHAGEVYQWGDESITLVTDVKAKHKFALEAVPEGGIVSMYGTAVGKATKPIARGEVITVDNIRHYAAPVSLEESGDYEWQIPDVSVWKDRTFKGYIRDDGRVGTANYWLIFPLVFCENRNVTKLTDALNEALGYTNNSLKSFAFDLTAGEQAQTAKPKLFPHIEGVRCITVTSGCGGATSDSKTMCDVLAAYADHPNVIGITVFSLGCEKAQRKMFKESLAARNPAFDKPALYFRQQEWNSEEEMMQTALKQTYECMKAVKPQSRTDVPLSYLKLGVKCGASDGFSGISGNPAMGLVSDWLVTLGGASGLAEFPELCGAEGDMVKRCIRFEDKKKFLDLMGQYEKTANFFNTTIADNPSPGNIADGLITDAIKSTGAAKKGGKSPISAVCDYAEPMPDSGLSLVCTPGNDVDAVTGLVAAGCNVVIFSTGLGTPTGNPIVPVVKISTNSAIAQRLSDMIDYDCGPVIEGVPLPEISKGLFERVIETAGGEYKVKADRLEQFDFLLWKRSLDL

SEQ ID NO: 3093 - DNA, 1287 bp, Citrobacter koseri
atggcgactatcacagcttatgacaatcctgctttaaattccgcgattcagaaatcgtggaggcgtttagtacccctgatgtttattttgtattttgtggcatttattgaccgtgtgaatgtgggctttgcgaaagatgccatgcaactggatatcggattatccgattccgcctttgcgctgggggcggggattttcttcgccgcctatgcgctgttcgggatcccggcaaacctgatcctcaataaaatcggtgcacaaaagtggctgagtattacaacggttatctggggtgtgttatctgcgatgaccgggtttgtgaccaacgagacgcaatttattgtgctgcgtttcctgctgggactgggtgaggcgggtttttatccgggaattttattactggcttccatctatttcccgaataaagtccggggctcggtgattggtatttttgtcctgggcgtgccgctggcgctgacactcggttcgccgttatccggcgcactgctggaattacacggctggatggggcgtccgggctggttctggatgtttgtgattgaaggtttaccggcggttgttatcgggatcttcgcctttttctggctggatgacagcccggagaaagcccgcttcctgacagcggaagagaagaaagccctgacagagcaactggccagtgagaatgcgaaaacagaaacgacgtctgtgctgtccgcactgaaaaatatcaaggtctggcacctggcgcttatctacggcaccatccagatctcggtctacgggctgatgtttttcctgccgtcgcaggtggcttccctgatgggacagagtctcgggtttaaagcgtctctggtggcggctattccgtgggcatgttcggcgttcggtgtgtattacatcccgcgtctggctgataaaaatccgtcccgccgtgtggctatttccgtgatgtgtatgctggcagcggcagttggtctggcattatccgcctttgccagtccggtctttgccatcgccgcgctgtgtctcagcgccgtcggttttctgtctgtacaaccggtgttctggacattcccgccgcagttactgagcggtcctgcgctggctgccggcatcgggttctgtaccaccatgggggcattctgttctttcctcgcaccgatcatccgtgtggaaatggataaactgatgaacagcaatacggcagggattatcacactcgcggtgatcactgtcggctgtgcactcctgattgctttactgaaaaagaacacacaaaaataa

SEQ ID NO: 3094 - protein, 428 aa, Citrobacter koseri
MATITAYDNPALNSAIQKSWRRLVPLMFILYFVAFIDRVNVGFAKDAMQLDIGLSDSAFALGAGIFFAAYALFGIPANLILNKIGAQKWLSITTVIWGVLSAMTGFVTNETQFIVLRFLLGLGEAGFYPGILLLASIYFPNKVRGSVIGIFVLGVPLALTLGSPLSGALLELHGWMGRPGWFWMFVIEGLPAVVIGIFAFFWLDDSPEKARFLTAEEKKALTEQLASENAKTETTSVLSALKNIKVWHLALIYGTIQISVYGLMFFLPSQVASLMGQSLGFKASLVAAIPWACSAFGVYYIPRLADKNPSRRVAISVMCMLAAAVGLALSAFASPVFAIAALCLSAVGFLSVQPVFWTFPPQLLSGPALAAGIGFCTTMGAFCSFLAPIIRVEMDKLMNSNTAGIITLAVITVGCALLIALLKKNTQK

SEQ ID NO: 3095 - DNA, 909 bp, Citrobacter koseri
atgaacaatgtgggtatggaaagccgttacatcacgccggctgtaacaatttttgatgacaaaggccggattgataccgaacaaaaccagcaggtgtatgactctctgaaggggcatgtctccggatttgtggttatgggcagtaccggcgagtttttttcactggatatggaaagctcaaaaacactgatcaggttatgcggcagttatgacaaagggggaatgaaagtgtatgccgggaccagccgcccggatgtgaatgagtccgccgcgctggcgaactatgctcatgagcagggtgtggacggggtcatgattatcagcccgtactatttcccgctggatgatgagggcgtttaccggttttacagcgcggtcgcggaaaaaacgtcagccaatatttttatctataacttcccggaacgtaccggttactcggtgtcaccggaggtgtgtctgcgtctggcggatcgctatccgaatattatcgggctgaaagatacgatccccgatacattacatacgtcgcagattattcagacggtaaaaaaagagatcccgcattttgaggtttatgccggttatgacaataacttcgcccatgttgtgctggcggggggaaatggctgtatcggcgggttatccaatattgtgcctgagtttttctcatcctggatggaggcatttgcacagggtgatatggctgccgtagctgcacatcagcgcaaagtggatcagctgatggccgtttacggcgtgcactcaccgtttatcccgacctttaaaaaagcattacagatgcggggcattattcagtcagactactgcacagcgccattcagcagcctgaatgcggagcagactgaacagctgatgcagatactggcggatgctgaaacagcacgctga

SEQ ID NO: 3096 - protein, 302 aa, Citrobacter koseri
MNNVGMESRYITPAVTIFDDKGRIDTEQNQQVYDSLKGHVSGFVVMGSTGEFFSLDMESSKTLIRLCGSYDKGGMKVYAGTSRPDVNESAALANYAHEQGVDGVMIISPYYFPLDDEGVYRFYSAVAEKTSANIFIYNFPERTGYSVSPEVCLRLADRYPNIIGLKDTIPDTLHTSQIIQTVKKEIPHFEVYAGYDNNFAHVVLAGGNGCIGGLSNIVPEFFSSWMEAFAQGDMAAVAAHQRKVDQLMAVYGVHSPFIPTFKKALQMRGIIQSDYCTAPFSSLNAEQTEQLMQILADAETAR

SEQ ID NO: 3097 - DNA, 678 bp, Citrobacter koseri
atgagtaatccggcaaactttaatggtcagcgtcctgttattaatcctgatgatgcactgatgctgttgatcgatcatcagagcggattgttccagactgtcggcgatatgccgatgactgaattacgcgccagagccgctgtactggcaaaaatggcaacactcgccaatatcccggtgatcaccaccgcctcagttccgcagggtccgaatggcccgctgatcccggaaattcatcagaatgcgccgcatgctcagtatattgcccgtaaaggtgaaattaatgcctgggataacccggagtttgtggctgcggtgaaagcatccggtaaaaagcagttaatcattgccggtaccattaccagcgtttgtatggcattcccggcgatcagcgccgtggctgacggttatcaggtgtttgcggtaattgatgcttccggtacctataccaagatggcacaggaaatcaccctggcgcgcgttgtccaggccggtgtggtaccgatggatactgcagctgtggcctctgaactgcaaaaaacctggaaccgtgcggatgcggcagaatgggcacaggcgtacacgcagattttcccggcctatcagttactgattgagagctataccaaagcgcaggacgttgtgaataacaacgagattttagattcacaacgctga

SEQ ID NO: 3098 - protein, 225 aa, Citrobacter koseri
MSNPANFNGQRPVINPDDALMLLIDHQSGLFQTVGDMPMTELRARAAVLAKMATLANIPVITTASVPQGPNGPLIPEIHQNAPHAQYIARKGEINAWDNPEFVAAVKASGKKQLIIAGTITSVCMAFPAISAVADGYQVFAVIDASGTYTKMAQEITLARVVQAGVVPMDTAAVASELQKTWNRADAAEWAQAYTQIFPAYQLLIESYTKAQDVVNNNEILDSQR

SEQ ID NO: 3099 - DNA, 552 bp, Citrobacter koseri
atggaaacattactgacacactggattacagaatacggctattgggcaacctttttcggtactatgattgaaggggaaaccgctgcatttttatccggtattgccgcacaccatcagttattatcctacccgaaagtgatgctggtggccgcactgggcggaattatcagtgacaatgttctgttttttaccggttattttgccggaaaccggatcctgccccgcattcataaacatgcggataaaatagcccgtctgcagcggataattcaccgccacgaaagcctgattattatcggaatacgtttcgcttacggattaagaactatcggccccgttattatcggagccgccggtattaatccgctgaaattttttgtgctgaatattctcggcggggcgatatggggaagcgttattgtctctgcggggtattttgtcagcgcagcaatccttgccctgccgctgcatacttaccttgcctggttccttatcctcgcagcggttgccggtctgtttgtgctgataagaaagcataaattcacgctgtaa

SEQ ID NO: 3100 - protein, 183 aa, Citrobacter koseri
METLLTHWITEYGYWATFFGTMIEGETAAFLSGIAAHHQLLSYPKVMLVAALGGIISDNVLFFTGYFAGNRILPRIHKHADKIARLQRIIHRHESLIIIGIRFAYGLRTIGPVIIGAAGINPLKFFVLNILGGAIWGSVIVSAGYFVSAAILALPLHTYLAWFLILAAVAGLFVLIRKHKFTL

SEQ ID NO: 3101 - DNA, 267 bp, Citrobacter koseri
atggcaagcggatgggcaagtgattctgctgttcaggagcagattgatgccacactggatgatgcggtcgcgcgggtgcgcagccagctggcgacaggggaaagcgcgctgttttgtgaagagtgcggtgacccgatcccgcaggcacggcgtgaagcaatacccggtgtgcagttgtgtgtgaattgccaggcagaagcagataaaaagcaggccgcattcagcggctataaccggcgcggcagtaaagacagtcagttgcgctga

SEQ ID NO: 3102 - protein, 88 aa, Citrobacter koseri
MASGWASDSAVQEQIDATLDDAVARVRSQLATGESALFCEECGDPIPQARREAIPGVQLCVNCQAEADKKQAAFSGYNRRGSKDSQLR

SEQ ID NO: 3103 - DNA, 405 bp, Citrobacter koseri
atgtatacttcccggcaggaaatttattcatggttaattaaaatgaaagaaaacgaaaaagcacaaatcaagcttctcagcgaccgtttagaccttacccgccaccagatggcaggtatgctgcagaagaacgaaacagaaaagtatgcagaacttgagaaagaaaaagccgcgctggaaactgaaattgcccgtctgaaggaacaacgaagcaagaaactcagcaaagaagcgcagaagctggtggatatgccgttcaaacgtcttatcactaagaaagagcaggctgatatcggcaagcttaagaaagctgtgcggggcctgatcattgtccatccgatgacggcattaggccgcgaaatggaactggacggtatgaccggtttttctaagactgatttctag

SEQ ID NO: 3104 - protein, 134 aa, Citrobacter koseri
MYTSRQEIYSWLIKMKENEKAQIKLLSDRLDLTRHQMAGMLQKNETEKYAELEKEKAALETEIARLKEQRSKKLSKEAQKLVDMPFKRLITKKEQADIGKLKKAVRGLIIVHPMTALGREMELDGMTGFSKTDF

SEQ ID NO: 3105 - DNA, 864 bp, Citrobacter koseri
atgaccaagatcctccgttatctcactgtgctgaccactctccttttatttgtgctgcctgcacaggcaacactgtacagctatattacccgctctgaaggtaaaccggcagatatcgattattactaccggattactgcctggactccgccgccggcaggcagcgtgcatccttgtgtgaaagtcggtctgacaaaaaaatgctacgccaatattaatcaccgccacacaaacgcagaccggggtggggtatcctcccgtaataacagcgaatttgaggggcgctgccggaatatgaacctgatgacactgccggatgccacagctgtttataactatatttataataactgttttggcggactgccgtttgaggggcagaccaatcacaaaggtgacgctatccgtaacgaatgtgtgaccctctttttaaccagcagcccgaccggtggtaacggttatatgtatccggattctgtctgcggcgtagctcccccgccgggcggaatttgcagttttacggctgactatccgagcgccattctcgatcatggccggataccggataatgaaattaacggcaatcaggccagccagtatctgagaatgaaatgcagcaaagatgccactgtccggatctactccgtgagtgatacggaatcccggctgagactgaaaaacaatctctacagcagactgacactgaacggctatccgctgaactcgtccggcggtggtgtaccggtttatgtacgcggggattatgaagcaaacgcactgctgaaaagcacactggaaaccaccgggccggtggaagccgggccttttatcggtaatatatccattattatgaccattgactga

SEQ ID NO: 3106 - protein, 287 aa, Citrobacter koseri
MTKILRYLTVLTTLLLFVLPAQATLYSYITRSEGKPADIDYYYRITAWTPPPAGSVHPCVKVGLTKKCYANINHRHTNADRGGVSSRNNSEFEGRCRNMNLMTLPDATAVYNYIYNNCFGGLPFEGQTNHKGDAIRNECVTLFLTSSPTGGNGYMYPDSVCGVAPPPGGICSFTADYPSAILDHGRIPDNEINGNQASQYLRMKCSKDATVRIYSVSDTESRLRLKNNLYSRLTLNGYPLNSSGGGVPVYVRGDYEANALLKSTLETTGPVEAGPFIGNISIIMTID

SEQ ID NO: 3107 - DNA, 477 bp, Citrobacter koseri
atgaaaaagatgacagaaatagccataatcctggttctggtggtgttctttaccgcgctcggcgatgcagtcggcgggtcaatgtacggccgtggcgagttcggacaggtgttcagcgatacactgctggcgatgacactgctgggcggtatgtccttcgcggcatacctgatcgcgatgatcccgccgttaggcaaactgccggtgatcttctgggtttccctgatcgccgccggtctgtgttcaccgctgttcccgtatgacaaagaaatgattgccatgaccggtaaagtctctatcgcggttatcagtaccacagtactggccttcgcgggtctttcactgggtaaagatatcgataaattcaaagcgatttcatggcgcattatcccggtgtcactggcggtattctccgggacattcttatttgccgcacttatcggccaactgacgctcacatggagtggcgttatctga

SEQ ID NO: 3108 - protein, 158 aa, Citrobacter koseri
MKKMTEIAIILVLVVFFTALGDAVGGSMYGRGEFGQVFSDTLLAMTLLGGMSFAAYLIAMIPPLGKLPVIFWVSLIAAGLCSPLFPYDKEMIAMTGKVSIAVISTTVLAFAGLSLGKDIDKFKAISWRIIPVSLAVFSGTFLFAALIGQLTLTWSGVI

SEQ ID NO: 3109 - DNA, 450 bp, Citrobacter koseri
atgtaccgaattggtcagttagcaaaacttgcagaagtgacaccggatacgatccgtttttatgaaaaacagggcatgatggatcatcagacccgaacggatggcggctatcgtttgtatactgagcaggatctgcaccggctgcgttttatccggtatgcaaaacaattagggtttacactggaagcgatcacggaactgttatcgatccgggttgatcctgaacatcacacctgccgtgaatcaaagcaaattgtggatgatcggctgaaagatgtggaaacgaagttagtcgaaatgcagcgaatgcgggattctctgaagatgctgagtgatgcctgttgcggaacggcacatgtcagttcacaatgcaccattctggagatcctggaacaaggtgcgacagagccctgtggctgttcacaaaaagagagtaaacataatcaatga

SEQ ID NO: 3110 - protein, 149 aa, Citrobacter koseri
MYRIGQLAKLAEVTPDTIRFYEKQGMMDHQTRTDGGYRLYTEQDLHRLRFIRYAKQLGFTLEAITELLSIRVDPEHHTCRESKQIVDDRLKDVETKLVEMQRMRDSLKMLSDACCGTAHVSSQCTILEILEQGATEPCGCSQKESKHNQ

SEQ ID NO: 3111 - DNA, 621 bp, Acinetobacter pittii
atggctagatatttgggtccgaagctcaagctgagccgtcgcgaaggaacagacctcttcctgaagtctggtgttcgcgcgattgacaccaagtgtaaattagatcaagcaccaggccagcacggcgcccgtaaaccgcgtctgtctgattatggtgttcagttacgtgaaaaacaaaaagttcgtcgtatgtacggcgtgctggaacgtcagttccgtaactactataaagaagcaactcgtctgaaaggcaacacaggtgaaaacctgctgtctctgctggaaggccgtttagacaacgttatttatcgtatgggctttggcgctacccgcgcagaagcacgtcagatcgtcagccacaaagctgtcatggtaaatggccgtgttgtaaacattgcttcttatcaggtttcccctaacgacgtaatcagcattcgtgaaaaagcgaaaaaacagtctcgtattaaggctgctttagagctggctgagcagcgtgaaaaaccaacttggttggaagttgatgctgcgaaaatggaaggtgtgttcaaacgtattcctgagcgtactgacctttctgctgatattaacgagcacctgatcgtcgagctttactctaagtaa

SEQ ID NO: 3112 - protein, 206 aa, Acinetobacter pittii
MARYLGPKLKLSRREGTDLFLKSGVRAIDTKCKLDQAPGQHGARKPRLSDYGVQLREKQKVRRMYGVLERQFRNYYKEATRLKGNTGENLLSLLEGRLDNVIYRMGFGATRAEARQIVSHKAVMVNGRVVNIASYQVSPNDVISIREKAKKQSRIKAALELAEQREKPTWLEVDAAKMEGVFKRIPERTDLSADINEHLIVELYSK

SEQ ID NO: 3113 - DNA, 357 bp, Escherichia coli
gtggcccgtatagcaggcattaacattcctgatcataaacatgctgttattgcattaactgcaattttcggcatcggcttaacccgttcacaggctatctgtaaagcaacgggtattgctgaagatgttaagatcagtgagctgtctgaagagcaaatcgaccaactgcgtgacgaagttgctaaatacgttgtagaaggtgacctgcgccgtgaagtgaccctcagcatcaaacgtcttatggacattggttgctatcgtggtttacgccatcgtcgtggtcttccggtacgcggtcagcgtacgaagactaacgcacgtacccgtaagggtccgcgtaagccgatcaagaaataa

SEQ ID NO: 3114 - protein, 118 aa, Escherichia coli
MARIAGINIPDHKHAVIALTAIFGIGLTRSQAICKATGIAEDVKISELSEEQIDQLRDEVAKYVVEGDLRREVTLSIKRLMDIGCYRGLRHRRGLPVRGQRTKTNARTRKGPRKPIKK

SEQ ID NO: 3115 - DNA, 501 bp, Morganella morganii
atgaatacaggcgaattacttaaaatcaaaaacatatctgaaatatccatagataagttaaaaagaatatcaattgaaagtgaagcctcgtcagattttttatttgaaggtataggagctatcggaacactaatgtttgaatcatcttgtaatgacggtgacgttttaaataaggatatcgtgggcaagcttggcctgcttattcaggaaacaatatctattgcactggcattagatgaaaacgcattccagtcatcacttgaatataaaaggcgaacagcccccctgcgcaatcaaaagccagatgaacatagaaatgaaattattggtgttattggcgatatcaacaacgctgaattatcactacagcaacttaaaaatgatttatacgaaaacgaaccagagaaagaaataatattcgcacagcttgatttagtggcatctaagttaagtggttcattagaccaactggaaaaaatgacaggaaacaatcatgactaa

SEQ ID NO: 3116 - protein, 166 aa, Morganella morganii
MNTGELLKIKNISEISIDKLKRISIESEASSDFLFEGIGAIGTLMFESSCNDGDVLNKDIVGKLGLLIQETISIALALDENAFQSSLEYKRRTAPLRNQKPDEHRNEIIGVIGDINNAELSLQQLKNDLYENEPEKEIIFAQLDLVASKLSGSLDQLEKMTGNNHD

SEQ ID NO: 3117 - DNA, 243 bp, Morganella morganii
atgtttgacatgcaaaaatataataaagtcaacaacaaaatcaataatattttagcagtagttggcacgcattattttcctaatagcactcaacgccacattgaagaaataaaacaactactactaaatatcaaatgcaatgttataaaaaaagaaactgatgttgaattattacaccactggatcgatggggtgttaaccattatcagtatcgagcagtttcagaataaggaagcatcatga

SEQ ID NO: 3118 - protein, 80 aa, Morganella morganii
MFDMQKYNKVNNKINNILAVVGTHYFPNSTQRHIEEIKQLLLNIKCNVIKKETDVELLHHWIDGVLTIISIEQFQNKEAS

SEQ ID NO: 3119 - DNA, 432 bp, Morganella morganii
atgtcaataataaaagaacggtgggctgaaattgaggaatcgttaaaggctgaccacgttatcattaaatttcagtatcagaatactgagattaccgttacccgtgtcagtgtaagtgaaggaagaacaaagttagccgtctggtttaacggaaaaattggtggtgcatggggtcttcctgacaacaaaaatttcaacccgctgtgtgcgttattctggcacaaacgcaccaaatcgctgtatccaccgaagcgaataagggagatgcagaaagctgtcggtaagcgggccgctaagagcgtgattcccaatcctgatgcgaaattcacttattacatgccgtatttcagcaaagcgtcggtgctggttcgccagttccggcgtatcgaaggactgacagtcgaagagccggaggaatgggtggtgctatga

SEQ ID NO: 3120 - protein, 143 aa, Morganella morganii
MSIIKERWAEIEESLKADHVIIKFQYQNTEITVTRVSVSEGRTKLAVWFNGKIGGAWGLPDNKNFNPLCALFWHKRTKSLYPPKRIREMQKAVGKRAAKSVIPNPDAKFTYYMPYFSKASVLVRQFRRIEGLTVEEPEEWVVL

SEQ ID NO: 3121 - DNA, 519 bp, Morganella morganii
atgagtaacaattcaactgacgcaatgaagcagcctgaatttgtgttcacggctcagccggtttgtttcgtgcgtgcagtcactccgttaacacctcagattgatatttcccgcgtccggacagatgaattctgtatgccggtatatgcagccatcagtgatgatgatatccaactgacggatggattcatcgcagagctgcaggctcagggcgtagataagctggctgattctattcgggatatctacgatgccctgacggaataccattgtgacggtggcattctcatgactctgagtggcgaaatcagccgctgccggtcatttgctgcaaaattgcgatccccttccgttcagttctgcgattgtgacaactgcacccgcactaccagcactaatgctttgtgtgaatcggtcatgaccggacatacaaacctgtgcgacagttgcagtgacaaactgcgcggcggttgcctgcctacctgttcggcttacagcaaggggaataatcatgcgtaa

SEQ ID NO: 3122 - protein, 172 aa, Morganella morganii
MSNNSTDAMKQPEFVFTAQPVCFVRAVTPLTPQIDISRVRTDEFCMPVYAAISDDDIQLTDGFIAELQAQGVDKLADSIRDIYDALTEYHCDGGILMTLSGEISRCRSFAAKLRSPSVQFCDCDNCTRTTSTNALCESVMTGHTNLCDSCSDKLRGGCLPTCSAYSKGNNHA

SEQ ID NO: 3123 - DNA, 1014 bp, Morganella morganii
atgaaaaccgccactgcgccgttaccaccgctgcgttcggtcaaggttctggaccagttgcgtgagcgcatacgctacttgcattacagcttaccaaccgaacaggcttatgtccactgggttcgtgccttcatccgtttccacggtgtgcgtcacccggcaaccttgggcagcagcgaagtcgaggcatttctgtcctggctggcgaacgagcgcaaggtttcggtctccacgcatcgtcaggcattggcggccttgctgttcttctacggcaaggtgctgtgcacggatctgccctggcttcaggagatcggaagacctcggccgtcgcggcgcttgccggtggtgctgaccccggatgaagtggttcgcatcctcggttttctggaaggcgagcatcgtttgttcgcccagcttctgtatggaacgggcatgcggatcagtgagggtttgcaactgcgggtcaaggatctggatttcgatcacggcacgatcatcgtgcgggagggcaagggctccaaggatcgggccttgatgttacccgagagcttggcacccagcctgcgcgagcagctgtcgcgtgcacgggcatggtggctgaaggaccaggccgagggccgcagcggcgttgcgcttcccgacgcccttgagcggaagtatccgcgcgccgggcattcctggccgtggttctgggtttttgcgcagcacacgcattcgaccgatccacggagcggtgtcgtgcgtcgccatcacatgtatgaccagacctttcagcgcgccttcaaacgtgccgtagaacaagcaggcatcacgaagcccgccacaccgcacaccctccgccactcgttcgcgacggccttgctccgcagcggttacgacattcgaaccgtgcaggatctgctcggccattccgacgtctctacgacgatgatttacacgcatgtgctgaaagttggcggtgccggagtgcgctcaccgcttgatgcgctgccgcccctcactagtgagaggtag

SEQ ID NO: 3124 - protein, 337 aa, Morganella morganii
MKTATAPLPPLRSVKVLDQLRERIRYLHYSLPTEQAYVHWVRAFIRFHGVRHPATLGSSEVEAFLSWLANERKVSVSTHRQALAALLFFYGKVLCTDLPWLQEIGRPRPSRRLPVVLTPDEVVRILGFLEGEHRLFAQLLYGTGMRISEGLQLRVKDLDFDHGTIIVREGKGSKDRALMLPESLAPSLREQLSRARAWWLKDQAEGRSGVALPDALERKYPRAGHSWPWFWVFAQHTHSTDPRSGVVRRHHMYDQTFQRAFKRAVEQAGITKPATPHTLRHSFATALLRSGYDIRTVQDLLGHSDVSTTMIYTHVLKVGGAGVRSPLDALPPLTSER

SEQ ID NO: 3125 - DNA, 585 bp, Salmonella enterica
atgccccgccccaagctcaagtccgatgacgaggtactcgaggccgccaccgtagtgctgaagcgttgcggtcccatagagttcacgctcagcggagtagcaaaggaggtggggctctcccgcgcagcgttaatccagcgcttcaccaaccgcgatacgctgctggtgaggatgatggagcgcggcgtcgagcaggtgcggcattacctgaatgcgataccgataggcgcagggccgcaagggctctgggaatttttgcaggtgctcgttcggagcatgaacactcgcaacgacttctcggtgaactatctcatctcctggtacgagctccaggtgccggagctacgcacgcttgcgatccagcggaaccgcgcggtggtggaggggatccgcaagcgactgcccccaggtgctcctgcggcagctgagttgctcctgcactcggtcatcgctggcgcgacgatgcagtgggccgtcgatccggatggtgagctagctgatcatgtgctggctcagatcgctgccatcctgtgtttaatgtttcccgaacacgacgatttccaactcctccaggcacatgcgtaa

SEQ ID NO: 3126 - protein, 194 aa, Salmonella enterica
MPRPKLKSDDEVLEAATVVLKRCGPIEFTLSGVAKEVGLSRAALIQRFTNRDTLLVRMMERGVEQVRHYLNAIPIGAGPQGLWEFLQVLVRSMNTRNDFSVNYLISWYELQVPELRTLAIQRNRAVVEGIRKRLPPGAPAAAELLLHSVIAGATMQWAVDPDGELADHVLAQIAAILCLMFPEHDDFQLLQAHA

SEQ ID NO: 3127 - DNA, 1239 bp, Citrobacter freundii
atgagcgaacgtcgatatagcccgctcgcgacgctgttcgcggcgacctttctcttccggatcggcaacgcggtggcggccctcgcgcttccatggttcgtcctgtctcatacaaagagcgcggcctgggcgggcgccacggccgctagcagcgtcatcgcgaccatcatcggcgcgtgggttggtggtggcctcgtcgatcggttcgggcgcgcgcccgtcgcattgatctcgggtgtggtgggcggcgtggccatggcgagcatcccactgctcgatgccgttggcgccctctcgaacactgggctgatcgcttgcgtggtgctcggtgccgcgttcgacgcacccggtatggccgcgcaggacagtgagctgcccaaactcggccacgtcgccgggctctccgttgagcgcgtctcgtcactgaaagcggtgatcgggaacgtcgcgattctaggtggcccggcccttgggggggccgcaatcggcctgcttggcgctgcgccaacgctcgggctgacggcgttctgctccgtccttgcaggtctgctcggcgcgtgggtgcttcccgcgcgtgccgctcggacgatgaccacgacggcgactctctccatgcgcgccggcgtcgcttttctctggagcgaacccctgctgcgccctctctttggtatagtgatgatcttcgtgggcatcgttggcgccaacggcagcgtcatcatgcctgcgctgtttgtagatgcaggacgccaagtagcagagctcgggctgttctcctcaatgatgggggctggtggtctccttggcattgccattcatgcgtcggtcggcgcccggatatcagcgcagaactggctggcggtggcattttgtggctctgcggtgggctcgcttctgctttcacagttgccaggcgtgccggtgctgatgttgttgggcgcgctcgtgggactgctgaccggctcagtctctcccattctcaacgctgccatctacaaccgcacgccgccagaacttctcggccgggtactcggcacggtctcggcggtgatgctgtcagcctcgcccatggttatgcttgcggccggcgcgtttgtcgaccttgctggtccgctccctggcctcgttgtatcggccgtgtttgcggggctcgtggctctactctcgctccgtcttcaatttgctacaatggcggcggcagccacagcctccgccccaacccatacagaaggtgaacactga

SEQ ID NO: 3128 - protein, 412 aa, Citrobacter freundii
MSERRYSPLATLFAATFLFRIGNAVAALALPWFVLSHTKSAAWAGATAASSVIATIIGAWVGGGLVDRFGRAPVALISGVVGGVAMASIPLLDAVGALSNTGLIACVVLGAAFDAPGMAAQDSELPKLGHVAGLSVERVSSLKAVIGNVAILGGPALGGAAIGLLGAAPTLGLTAFCSVLAGLLGAWVLPARAARTMTTTATLSMRAGVAFLWSEPLLRPLFGIVMIFVGIVGANGSVIMPALFVDAGRQVAELGLFSSMMGAGGLLGIAIHASVGARISAQNWLAVAFCGSAVGSLLLSQLPGVPVLMLLGALVGLLTGSVSPILNAAIYNRTPPELLGRVLGTVSAVMLSASPMVMLAAGAFVDLAGPLPGLVVSAVFAGLVALLSLRLQFATMAAAATASAPTHTEGEH

SEQ ID NO: 3129 - DNA, 906 bp, Citrobacter freundii
atgaccgtagtcacgaccgccgatacctcccaactgtacgcacttgcagcccgacatgggctcaagctccatggcccgctgactgtcaatgagcttgggctcgactataggatcgtgatcgccaccgtcgacgatggacgtcggtgggtgctgcgcatcccgcgccgagccgaggtaagcgcgaaggtcgaaccagaggcgcgggtgctggcaatgctcaagaatcgcctgccgttcgcggtgccggactggcgcgtggccaacgccgagctcgttgcctatcccatgctcgaagactcgactgcgatggtcatccagcctggttcgtccacgcccgactgggtcgtgccgcaggactcggaggtcttcgcggagagcttcgcgaccgcgctcgccgccctgcatgccgtccccatttccgccgccgtggatgcggggatgctcatccgtacaccgacgcaggcccgtcagaaggtggccgacgacgttgaccgcgtccgacgcgagttcgtggtgaacgacaagcgcctccaccggtggcagcgctggctcgacgacgattcgtcgtggccagatttctccgtggtggtgcatggcgatctctacgtgggccatgtgctcatcgacaacacggagcgcgtcagcgggatgatcgactggagcgaggcccgcgttgatgaccctgccatcgacatggccgcgcaccttatggtctttggtgaagaggggctcgcgaagctcctcctcacgtatgaagcggccggtggccgggtgtggccgcggctcgcccaccacatcgcggagcgccttgcgttcggggcggtcacctacgcactcttcgccctcgactcgggtaacgaagagtacctcgctgcggcgaaggcgcagctcgccgcagcggaatga

SEQ ID NO: 3130 - protein, 301 aa, Citrobacter freundii
MTVVTTADTSQLYALAARHGLKLHGPLTVNELGLDYRIVIATVDDGRRWVLRIPRRAEVSAKVEPEARVLAMLKNRLPFAVPDWRVANAELVAYPMLEDSTAMVIQPGSSTPDWVVPQDSEVFAESFATALAALHAVPISAAVDAGMLIRTPTQARQKVADDVDRVRREFVVNDKRLHRWQRWLDDDSSWPDFSVVVHGDLYVGHVLIDNTERVSGMIDWSEARVDDPAIDMAAHLMVFGEEGLAKLLLTYEAAGGRVWPRLAHHIAERLAFGAVTYALFALDSGNEEYLAAAKAQLAAAE

SEQ ID NO: 3131 - DNA, 1137 bp, Serratia marcescens
gtgtctcaactctcccagcttcgaagccccgccgccgtgcaggctgccatcgatgagttcgtgcaactgggccgcacgaaattcctggcgcgccacggctacggcaagtcccgcgacttcctggtacgtgatccgaagaccggcaccgattgcgattccaaggccatcgccggtgtggccttcggcaagcaatttcccgagcagggcccgctcactgctgacagcttctccggtggcgagacgaccgtcgttccggcgctgacgcggctcgggtttcgcatcattcgcatcggcgaagactggtccgaagaagaggtcctggccacggtcgaagactatttcgacatgctgcgtgccgaggcggctggggagccgtaccacaagtccgagcacaaccaggcactgcgccaactgctgaacggtcgcagcaagtcttcagtcgagctcaagcaccagaacattagcgccgtactcgatgccctgggcctgccctatatcaacggctacaagccacgcggcaacagccaactgctgctgcgtaaatccgtacacgcctacgttctggaacatcagcagacggtcggcgctcttgtcgatgccctggaggaggtaaaacttccgggtgacaaaacctaccgagcggctttggtagaaccacccgcccgtgaagtgcttgtgcgtaccccggcatctctacggcaacgcctaccgcgaaagttcgattatgccgctcgcgatgaagccaaccgcaagctgggccgggcaggggagcagtgggtgattggctacgaacagcaacgcctgaccgagctcggccacccagagctttttcagcggctggattgggtgtccgacacccagggagacggtgcggggttcgacatcctgtcgttcgaagaggacgcccatgagcgcttcatcgaggtgaaaaccaccaatggcggggtaggctcgtctttcttggtcagccacaacgaactcgaattctccaaggaggcgggcgatcaattccatctgtatcgcgtgttccagtttcgggacggtccgcgcctgttcacgctacccggcgacctcagccaacatgtgcatctcaagccgacggactaccgggcgagtttccggagtttggtggggtaa

SEQ ID NO: 3132 - protein, 378 aa, Serratia marcescens
MSQLSQLRSPAAVQAAIDEFVQLGRTKFLARHGYGKSRDFLVRDPKTGTDCDSKAIAGVAFGKQFPEQGPLTADSFSGGETTVVPALTRLGFRIIRIGEDWSEEEVLATVEDYFDMLRAEAAGEPYHKSEHNQALRQLLNGRSKSSVELKHQNISAVLDALGLPYINGYKPRGNSQLLLRKSVHAYVLEHQQTVGALVDALEEVKLPGDKTYRAALVEPPAREVLVRTPASLRQRLPRKFDYAARDEANRKLGRAGEQWVIGYEQQRLTELGHPELFQRLDWVSDTQGDGAGFDILSFEEDAHERFIEVKTTNGGVGSSFLVSHNELEFSKEAGDQFHLYRVFQFRDGPRLFTLPGDLSQHVHLKPTDYRASFRSLVG

SEQ ID NO: 3133 - DNA, 624 bp, Acinetobacter baumannii
atgtctagattagataaaagtaaagtgattaacagcgcattagagctgcttaatgaggtcggaatcgaaggtttaacaacccgtaaactcgcccagaagctaggtgtagagcagcctacattgtattggcatgtaaaaaataagcgggctttgctcgacgccttagccattgagatgttagataggcaccatactcacttttgccctttagaaggggaaagctggcaagattttttacgtaataacgctaaaagttttagatgtgctttactaagtcatcgcgatggagcaaaagtacatttaggtacacggcctacagaaaaacagtatgaaactctcgaaaatcaattagcctttttatgccaacaaggtttttcactagagaatgcattatatgcactcagcgctgtggggcattttactttaggttgcgtattggaagatcaagagcatcaagtcgctaaagaagaaagggaaacacctactactgatagtatgccgccattattacgacaagctatcgaattatttgatcaccaaggtgcagagccagccttcttattcggccttgaattgatcatatgcggattagaaaaacaacttaaatgtgaaagtgggtcttaa

SEQ ID NO: 3134 - protein, 207 aa, Acinetobacter baumannii
MSRLDKSKVINSALELLNEVGIEGLTTRKLAQKLGVEQPTLYWHVKNKRALLDALAIEMLDRHHTHFCPLEGESWQDFLRNNAKSFRCALLSHRDGAKVHLGTRPTEKQYETLENQLAFLCQQGFSLENALYALSAVGHFTLGCVLEDQEHQVAKEERETPTTDSMPPLLRQAIELFDHQGAEPAFLFGLELIICGLEKQLKCESGS

SEQ ID NO: 3135 - DNA, 624 bp, Morganella morganii
atgtctgacatttcacgagttaaaatactcagtgctttgatggatgggcgagcttggacggccactgagctaagttctgtggcgaatatatcagcttcaacggcgagcagtcatttatctaaattattagattgccagctaatcacagtagtagctcaaggcaagcatcgttattttcggctagcaggaaaagatattgctgaattgatggaaagtatgatggggatctccttaaaccatggcgtacatgccaaagtttccacgccagtgcatttacgaaaagcacgtacttgctatgatcatttagctggcgaagttgccgttaagatctatgattccctttgtcaacagcaatggatcactgaaaatggttcaatgatcacattaagtggtattcaatattttcatgaaatgggaattgacgttccttccaaacattcacgtaaaatctgttgtgcgtgtttagattggagtgaacgccgtttccatttaggtgggtacgttggagccgcattattttcgctttatgaatctaaagggtggttaactcgacatcttggttaccgtgaagttaccatcacggaaaaaggttatgctgcttttaagacccactttcacatttaa

SEQ ID NO: 3136 - protein, 207 aa, Morganella morganii
MSDISRVKILSALMDGRAWTATELSSVANISASTASSHLSKLLDCQLITVVAQGKHRYFRLAGKDIAELMESMMGISLNHGVHAKVSTPVHLRKARTCYDHLAGEVAVKIYDSLCQQQWITENGSMITLSGIQYFHEMGIDVPSKHSRKICCACLDWSERRFHLGGYVGAALFSLYESKGWLTRHLGYREVTITEKGYAAFKTHFHI

SEQ ID NO: 3137 - DNA, 498 bp, Morganella morganii
atggcaacgctgaaagagagacacgaaatgatcattcgcgcacttaacaatccggacagacctatgtcagctataagtggggataagctgcaattccttggggatactattggttgggatcagctggccagtgatactaaatatttaattgccgcgggtttagttgaccgtgacgccatccgttttggcatcgacggcggttacgtgtttatgaccgattcaatggcgctaactgcaaaaggttttgattacgccaacattgataccgtcggaagtgaagtaaacgcggttaccataaaaattcataagaatacgctcgagcaaattgaggccattattaacgctaccaatttgccggactcagaaaagaaaacgcttatgcagttattgaaggagaaaggcgcggaaagcgtagtaggtaaatgcgtggatatccttttctccaacgcaggggccgctactcacgttctctccgaacttgctaaaagtgttttttaa

SEQ ID NO: 3138 - protein, 165 aa, Morganella morganii
MATLKERHEMIIRALNNPDRPMSAISGDKLQFLGDTIGWDQLASDTKYLIAAGLVDRDAIRFGIDGGYVFMTDSMALTAKGFDYANIDTVGSEVNAVTIKIHKNTLEQIEAIINATNLPDSEKKTLMQLLKEKGAESVVGKCVDILFSNAGAATHVLSELAKSVF

SEQ ID NO: 3139 - DNA, 501 bp, Morganella morganii
atgcgaatagatagagaactacaaaattcggtattaaccgtactatccgaaaattaccccaattttacggatagagcgctatggcaccaactacaggagttagctggtaatgacgatgatactttggtggcaaatcttttatatcttgagagtcatggtttagttatcagtggtattaaatctggtatgactgattatgctatcagtatcaacgaattaaaaataactcacaggggcctggactttttgcttaatgatggcggattatctgcgatactgaatgtcgttacagtgaaatttcatgacgatacgattaaacaaattgcagactttattgaccagaacgttgagaatcctgaagataagcagaaatttttgaatcagctaaaacagcttcctgccgatgccacaaaacacattgtacttcagcttgtgagtaaagggttggggcagatcccgaatgcagttcagtggcttcaaacagtgctccatcttggataa

SEQ ID NO: 3140 - protein, 166 aa, Morganella morganii
MRIDRELQNSVLTVLSENYPNFTDRALWHQLQELAGNDDDTLVANLLYLESHGLVISGIKSGMTDYAISINELKITHRGLDFLLNDGGLSAILNVVTVKFHDDTIKQIADFIDQNVENPEDKQKFLNQLKQLPADATKHIVLQLVSKGLGQIPNAVQWLQTVLHLG

SEQ ID NO: 3141 - DNA, 597 bp, Morganella morganii
gtgaaattcgatacccgtgaaggatggcttcatgctgcgacacaagagatggcgtcaacatttaaggaacttggcgcgccactaccgccaaaaatccgaatcgctataggttttccatcggcgggtttgcgcggtcgcgctatcggcgagtgctgggataaaaattgctccgaagatggacactttgaaattttcatccggccagactacagcaaccatgaaaatttcactatacaagtactggcaacactggcgcatgaactgatccatgctgcgctggggatcgaggaaggccacggccccaatttcagacgagtatataaagccattggcttaatgggccgagcaaccgccacatatgcaggaccggatttcattaactggatgaatcgcataattcccaaaatcggagaaatcccccacggaataatacaatcagaacgtggcgtgtccacgcgcaagaaacagcagaggaatcgctatcataaatgcacttgccccgaatgcggctacaccgtgcgcactgctaaaaagtggatcgaaatggggctaccttgctgccctttccatggtgagatgctaaccgaaacagagtaa

SEQ ID NO: 3142 - protein, 198 aa, Morganella morganii
MKFDTREGWLHAATQEMASTFKELGAPLPPKIRIAIGFPSAGLRGRAIGECWDKNCSEDGHFEIFIRPDYSNHENFTIQVLATLAHELIHAALGIEEGHGPNFRRVYKAIGLMGRATATYAGPDFINWMNRIIPKIGEIPHGIIQSERGVSTRKKQQRNRYHKCTCPECGYTVRTAKKWIEMGLPCCPFHGEMLTETE

SEQ ID NO: 3143 - DNA, 276 bp, Citrobacter koseri
atgttaaaagtgattgctgaagattttatgcagccggatgccgttgagatcctgatgccgatgtatgaagaactggttgccgccacccgccgtgagccgctgtgtatcagttatgatctgtttgtcgatcagaaagacccggggcattttgtttttatcgaaacctggccggatcaggccggacggggaaaagcggagaaatttctcataactgctgccgcccggtacaaaggtggtcagctgttcatcaaacggaatattcagggctttcagtaa

SEQ ID NO: 3144 - protein, 91 aa, Citrobacter koseri
MLKVIAEDFMQPDAVEILMPMYEELVAATRREPLCISYDLFVDQKDPGHFVFIETWPDQAGRGKAEKFLITAAARYKGGQLFIKRNIQGFQ

SEQ ID NO: 3145 - DNA, 354 bp, Morganella morganii
atgaaaacagtaaaaacgagtgagctttcaggtcgggcgctggattgggctgtggctaaatatcaaaaaatcgaagattgcctagtgataacgcatgccagcaaaacaattgttctggatgatgttatttattctccatcgactaattgggcgcaatgtggcgcattcgttaaccagctatggatcgaaatgtcagtggaagaaatcgatggtgttgattattggtatgcatcaccgcctcatctggttggcgactatgcaacaggcagcacaccgcaggaagcaatttgccgtgctgtggccatggttgagttcggcgacacggtggaaatacctgaggagctgctggaatga

SEQ ID NO: 3146 - protein, 117 aa, Morganella morganii
MKTVKTSELSGRALDWAVAKYQKIEDCLVITHASKTIVLDDVIYSPSTNWAQCGAFVNQLWIEMSVEEIDGVDYWYASPPHLVGDYATGSTPQEAICRAVAMVEFGDTVEIPEELLE

SEQ ID NO: 3147 - DNA, 1653 bp, Morganella morganii
atgatttttaatgagtttcacacgaaaactttgtctatttttaatatactaaaagataaattctctgataccaacgactttgtaaaactaataatattttcattaggaaagaatcactatcttgataagatgattacaatacttgaaaatcaagaaagtaataatataacgagattaattactcaaataatgatttcatcaatttcaccagacctttcatctgataaaggaaaatatcgaagttttatcgagggtcagggatttggtttaatttcacatgtagaagatgctaatctagataatttcttaaaaaacatcaataaactcggtgtaatttatcatgatattcatccgccagtaactcaaaatgaaaaacacgcactatcttttttaactgaacacaaaatgtatccaatagataaaaatagctttccaattattgtttgtggattactaaataatgcagagttaactcatgataaagtaaatgaattaccatggaccttagtatgcaagcatcaattatcaagtataaaggagtatatagagaataacattgatgtttttgtaacagaaatatttatgaactcaaaagaaaataatgatgctataatttctatacttactcatccaaaactaagtgatgaacttaaggtatcaataataaaaaatatggaatttactgtggataacttagatgagttcccacgaaacattgaagtagaagataatgaatactcttattacgatctattttatctctatgaacatgtaataccagaatggaaaacattattagattatatcaatgaagaacaccatcctgatgtactaaacctatatcttgaaaataatgcacaatcactaagtgaaaaagagataagcgtacatgaaggggaactctatgaacttatttatataaatatcatatgcaataaccgacttagtgactctgcatacaatgcaattgtaaaaccgataaacataaatataaattactggaatgaaagactgagtttaattaacttcagccgattaattgaatccaataaagtagaactaaataaatctacgtttgattttgccataaaacactatattaacgatataaacaaagaaaactttgggccattaccattgtggttttctaaatttaaaaatcatttcattgataacaaagatgattacatccttaatgaacaaaatggaaataaccttgaaggaatattaacatccatttataactctgattacttcactttatcagaaaaggctttccttttacatagctattataattattatcaaccaacattcctagatgagttgaatttacccaatgatatcctacttgcattaatagagcaatctcatgacgacagctttaccattcttataataatacgattattaaaaaatagttattgtaagaaagaaaacattaagaccttaattgacaaactgaaagaaaaagagtttagaaaaatatttaggcacaaaaccacaacacttaacatcaataataaaaaagatgctgagctacttctacctgctttagaaaaagcttctctcataaaaaaatggtctctgaaagaagctggtaaatattacgtatactgttgttacgaagatgatgaaaatcttcttgattga

SEQ ID NO: 3148 - protein, 550 aa, Morganella morganii
MIFNEFHTKTLSIFNILKDKFSDTNDFVKLIIFSLGKNHYLDKMITILENQESNNITRLITQIMISSISPDLSSDKGKYRSFIEGQGFGLISHVEDANLDNFLKNINKLGVIYHDIHPPVTQNEKHALSFLTEHKMYPIDKNSFPIIVCGLLNNAELTHDKVNELPWTLVCKHQLSSIKEYIENNIDVFVTEIFMNSKENNDAIISILTHPKLSDELKVSIIKNMEFTVDNLDEFPRNIEVEDNEYSYYDLFYLYEHVIPEWKTLLDYINEEHHPDVLNLYLENNAQSLSEKEISVHEGELYELIYINIICNNRLSDSAYNAIVKPINININYWNERLSLINFSRLIESNKVELNKSTFDFAIKHYINDINKENFGPLPLWFSKFKNHFIDNKDDYILNEQNGNNLEGILTSIYNSDYFTLSEKAFLLHSYYNYYQPTFLDELNLPNDILLALIEQSHDDSFTILIIIRLLKNSYCKKENIKTLIDKLKEKEFRKIFRHKTTTLNINNKKDAELLLPALEKASLIKKWSLKEAGKYYVYCCYEDDENLLD

SEQ ID NO: 3149 - DNA, 735 bp, Morganella morganii
atgacgcggcgatacacaccagaacaagctgacaggatgcgtaaaagaagatactggttttacgttgatggtgagcgattcagcagtgcaggtgcagcgaacaaacacgtaggtgaacgcatctttcatgccacctggagagcgaacttaatcgcaaattcaggcggtgagtcgatgcaaattggcgagcgaacactccccgtccagagaggaaaatataccgttgtgcttgagcgacgtaaggatctctctgataaatccgtgcgtgattacgcagctgcacggaagaaactgcaatgcgctggttggacggacgatgaacttgacgaaatggatgatggcgagatttggcttgagtacaagagtgaacttgagcgggaaaagctcgacgtacctcattattccggtcataaaaaatatacccgagctgaagttaggcaagttcagggacgattcaggtgcgcagttctgaccaactgggaaaatcaatgcgcgatttctggtacacggcttgcgcttgaagcggcacatattatcagctacgcgagtgggggttcttcaagagtagaaaatggcgtctgccttgccgcagatttacacaagcttcttgatacaggccatatgcaaattgaaacgggctgggtcagactctccgatgaagcaaaagccgatccccgctatgcacatctcgaagggaagccgcttcgtaagccacttattaaggttacgttctaa

SEQ ID NO: 3150 - protein, 244 aa, Morganella morganii
MTRRYTPEQADRMRKRRYWFYVDGERFSSAGAANKHVGERIFHATWRANLIANSGGESMQIGERTLPVQRGKYTVVLERRKDLSDKSVRDYAAARKKLQCAGWTDDELDEMDDGEIWLEYKSELEREKLDVPHYSGHKKYTRAEVRQVQGRFRCAVLTNWENQCAISGTRLALEAAHIISYASGGSSRVENGVCLAADLHKLLDTGHMQIETGWVRLSDEAKADPRYAHLEGKPLRKPLIKVTF

SEQ ID NO: 3151 - DNA, 225 bp, Salmonella enterica
atgaagaagccgaaccaagacgacgagccgtttttcatcaccgaggagattgcggccgaaatgatcgccggcggctatgagttcgagctgccgcccattccttgcaccatccgcctacgcgacgtgctggagcgcatgaccgatgctgagctagcattgcagccgggcgagatcgccgaccaggagcgtgaacgctgccggcgcaagccgtgttcaacctcatga

SEQ ID NO: 3152 - protein, 74 aa, Salmonella enterica
MKKPNQDDEPFFITEEIAAEMIAGGYEFELPPIPCTIRLRDVLERMTDAELALQPGEIADQERERCRRKPCSTS

SEQ ID NO: 3153 - DNA, 738 bp, Salmonella enterica
atgcgcaggacgaagccagtagccgcgccgatggtggcgcgggtctatctgcgcgtcagcaccgacgcgcaggacttggaacgccaagaggcgatcactacggccgcgaaggccgccggctactacgtcgccggcatctaccgtgagaaggcatccggcgcacgcgccgaccggcctgagctgctgcgcatgatcggcgacctacagcccggcgaggtggtcattgccgagaagatcgaccgcatcagccgcctacctttgcccgaggccgagcgcctggtggcctcgatacaggccaaaggcgcacgcctggccgtccctggcgtggtcgatctatccgacctggcggccgaggcccagggcgtcgccaagatcgtgctggaagccgtgcagatcatgctttttcgcctggccttgcagatggcccgcgacgactacgaggacaggcgcgaacgccagcgccaaggcattgagttggcccgccaggccgggcggtacaagggccgccgtgctgatccgaagcgccgcgcccaagttgtcgcgctgcgcaagtccggctacagcatcaacaagaccgccgagctggccgggtacagtgcggcccaggtgaaacggatatgggccgaggtcagccaggccgaagcgaagcagcacggcgcgttcgtggaggacgcattgacggaagccgatgccctggccgctgtcggccaggatgagcgccaggaggaaagggcatga

SEQ ID NO: 3154 - protein, 245 aa, Salmonella enterica
MRRTKPVAAPMVARVYLRVSTDAQDLERQEAITTAAKAAGYYVAGIYREKASGARADRPELLRMIGDLQPGEVVIAEKIDRISRLPLPEAERLVASIQAKGARLAVPGVVDLSDLAAEAQGVAKIVLEAVQIMLFRLALQMARDDYEDRRERQRQGIELARQAGRYKGRRADPKRRAQVVALRKSGYSINKTAELAGYSAAQVKRIWAEVSQAEAKQHGAFVEDALTEADALAAVGQDERQEERA

SEQ ID NO: 3155 - DNA, 333 bp, Acinetobacter baumannii
atggaaacgataaatgctgtagccgccctggcggccatcgctcaagaatcgcgcctcgcggtgttccggcttctcgtccaggccggccccgccggcatggccgccggaaaaatcagcgaagcggccggcatcccgccgtcttcgctatccttccacctgaaagagctggcacacgccggcatggtcacgtcgcggcaagaaggccgatttgtgatctacgaggcgaacttttcgacggccactaacctggtggcctttctcacggaaaactgctgcggcggccaggtgtgcaacctgtcttgcaccacggaagccgggaaggtgttggcatga

SEQ ID NO: 3156 - protein, 110 aa, Acinetobacter baumannii
METINAVAALAAIAQESRLAVFRLLVQAGPAGMAAGKISEAAGIPPSSLSFHLKELAHAGMVTSRQEGRFVIYEANFSTATNLVAFLTENCCGGQVCNLSCTTEAGKVLA

SEQ ID NO: 3157 - DNA, 768 bp, Acinetobacter baumannii
atgagacttcgccatctttccgaccccgattctttgcccgctttggacaaatcctttgccatcgagcgcccggcgctcgggctggcacccgacgccccgccggtgcgtatcctgctgctgtatggctcgctgcgcgcccgctcgttctcacggctggccgtcgaggaagcggcccggctgctgcaattctttggcgcagaaacacgcatcttcgacccgtccgatttgccgttgcccgatcaagtgcaaagcgacgatcacccggccgtcaaggagctgcgcgccctgtccgagtggtcagagggacaagtctggtgcagcccggaacgccacggtcagattaccagtgtcatgaaggcgcagattgaccatctgccgcttgaaatggccggcatccggccgacccaaggccgcaccctggccgtgatgcaggtatccggcggctcgcagagcttcaacgccgtgaacaccttgcgtctgctcggccgctggatgcgaatgttcaccattccgaaccagtcgagtatcgccaaagcgttccaagagttcgacgcggcgggccgcatgaagccctcgccgtactacgaccgaatagccgatgtgatggaagaactggtgcgcttcacggcgctggtacggccgcaccgtgaagcactgacagaccgctattccgaacggaaagcggccggccacgtcatcgacgaggccaccgatctttcatccatcgccattgctccccagccactaccagaaagcgaaacatcatga

SEQ ID NO: 3158 - protein, 255 aa, Acinetobacter baumannii
MRLRHLSDPDSLPALDKSFAIERPALGLAPDAPPVRILLLYGSLRARSFSRLAVEEAARLLQFFGAETRIFDPSDLPLPDQVQSDDHPAVKELRALSEWSEGQVWCSPERHGQITSVMKAQIDHLPLEMAGIRPTQGRTLAVMQVSGGSQSFNAVNTLRLLGRWMRMFTIPNQSSIAKAFQEFDAAGRMKPSPYYDRIADVMEELVRFTALVRPHREALTDRYSERKAAGHVIDEATDLSSIAIAPQPLPESETS

SEQ ID NO: 3159 - DNA, 507 bp, Acinetobacter baumannii
atgaccgaaagaatctataacgtcctcatcctctgcaccggcaattcggcgcgcagcatcatggccgaagctctcatcaacacgatggggcaagggcgcttccgcgcctacagcgccggcagtcacccaaccggcaaggtcaatcccttcgccgtcgaaaaggtggagtcggtgaattacccgaccgagaatctgcgcagcaagagctgggacgagtacgccacgcccgacgcaccgaagatggacttcatcatcaccgtctgcgacaacgccgccggcgaaatgtgtccggtgtggcctggtcagccgatctcggcgcattggggatttgaagacccggccgccgtcgaaggcactgacgccgagaagcgccgggccttcgaacaaaccttccggcacatgatgaaccgcgtccgcctgttcgtgaatctgcctctcaaaatgcttgaccagacggccatcaagcgcgagctggcgaacatcggcaagaccgagcaggaagcatga

SEQ ID NO: 3160 - protein, 168 aa, Acinetobacter baumannii
MTERIYNVLILCTGNSARSIMAEALINTMGQGRFRAYSAGSHPTGKVNPFAVEKVESVNYPTENLRSKSWDEYATPDAPKMDFIITVCDNAAGEMCPVWPGQPISAHWGFEDPAAVEGTDAEKRRAFEQTFRHMMNRVRLFVNLPLKMLDQTAIKRELANIGKTEQEA

SEQ ID NO: 3161 - DNA, 1068 bp, Acinetobacter baumannii
atgagcgccggcgcacaggccatcgccgcgaagccgcgccaggccccgatgagcggcttcgagcgttacctgacgctgtgggtggccctgtgcatcgtcgccggtgttgcgctcggccagggccttcctgacgtgttccaggccataggccgcatggaagtggcccaggtcaatttgccggtgggcctgctgatttgggtaatgatcgtcccgatgctggtcaagatcgacttcggggcgctgcaccaggtcaaagagcattggcgcggcatcggcgtcacgctgttcgtgaattgggccgtcaagccattctcgatggccctgctggggtggctgttcatccgacaagtgttcgctccgttcctgccggccgatcaactggacagctacatcgcgggcttgatcttgctggccgccgcgccctgcacggcaatggtgttcgtgtggagccgccttaccaacggcgacccgcttttcacgctctcgcaagtggctctgaacgacgccatcatgatcgtggccttcgcgcccatcgtcggcctgctgctgggcatgtcctcgatctcggtgccttgggacacgctgctgatttcggtcgtgctctacatcatcgtgccggtgatcctggcgcagctcttgcggcggcatctgctcaagcaaggacaggccgcctttgaacgggccatgcagaagatcgggccgtggtcgatggccgcgctgctgctgacgttggttctactgttcgccttccagggcgaggccatcatccggcagccgttagtgatcgccatgctagccgtgccgatcttgattcaagtgttcttcaattccgggttagcctactggctgaacaagcgggcgggggaaaagcactctgtcgcctgtccttcggccctgatcggtgccagcaacttcttcgagctggccgtggcggccgccatcagcttgttcggtctgcactccggcgctgcattggcaaccgtggtcggcgtcctggtcgaagtgccggtgatgctgctggtcgtgcgcgtggtgaatcgctcgaagagctggtacgaacgaggttga

SEQ ID NO: 3162 - protein, 355 aa, Acinetobacter baumannii
MSAGAQAIAAKPRQAPMSGFERYLTLWVALCIVAGVALGQGLPDVFQAIGRMEVAQVNLPVGLLIWVMIVPMLVKIDFGALHQVKEHWRGIGVTLFVNWAVKPFSMALLGWLFIRQVFAPFLPADQLDSYIAGLILLAAAPCTAMVFVWSRLTNGDPLFTLSQVALNDAIMIVAFAPIVGLLLGMSSISVPWDTLLISVVLYIIVPVILAQLLRRHLLKQGQAAFERAMQKIGPWSMAALLLTLVLLFAFQGEAIIRQPLVIAMLAVPILIQVFFNSGLAYWLNKRAGEKHSVACPSALIGASNFFELAVAAAISLFGLHSGAALATVVGVLVEVPVMLLVVRVVNRSKSWYERG

SEQ ID NO: 3163 - DNA, 204 bp, Acinetobacter baumannii
atgacagacccaaagaacctagagaacaggctgcatgagaaggccgacccggcccgcgccgtttccactggtcgggtgcgctacacactggccgaactactggccgacgcggaagcatccggggcttacccgctgccgccggaggaacgcgaatggatggatgcgccgtctgtgggtcgggaatggccaaacagtgaagattga

SEQ ID NO: 3164 - protein, 67 aa, Acinetobacter baumannii
MTDPKNLENRLHEKADPARAVSTGRVRYTLAELLADAEASGAYPLPPEEREWMDAPSVGREWPNSED

SEQ ID NO: 3165 - DNA, 783 bp, Morganella morganii
atgagtcaaattacattagcaaacaataatgcagttgtcacgcaaagtcgctttacggttcctgaagtctactaccgtgatcagaaggtaatcactactgaatcactggcggtggggtacggagcggaagtaaaaaatattcaaaataactttatcagaaatgacggtcgctttgtcgagggtaagcattactttattgtgcagggtgatgaattaaaagagttaaagaacttaccatctttaagagggttagttgataaacgaacacctaaattaacactctggactgagcgcggagcatcacgacacgccaagatgctagaaaccgatcaggcatgggactacttcgagttactggaagaaacctactttaattcccgcagaaagaacgcagatctgataagtaaaaaagacctggccttgatggtgattcaggcggaggaagaaaaagaaattgcatacgcccagcgtgaccaggcgatagaaacaaaagcgtggattagccgccgccgtgaagctacagcaatggctacggcatcggcagctgtgcgtgaaaagaatgttctcgccgcgaaacttggtgcctgcaaaaaacacgctacggttttggcggttgagaatatgaccgaaacaaaattcaaatggcatccgctcaagaaatggtgcgccgacaatggagcagaggttttatctgtccctgatgagcgctacgggaaagcgaattcctatccggctgcggcatggaaagcggttcataatgtgaatattgcaaaattattctaa

SEQ ID NO: 3166 - protein, 260 aa, Morganella morganii
MSQITLANNNAVVTQSRFTVPEVYYRDQKVITTESLAVGYGAEVKNIQNNFIRNDGRFVEGKHYFIVQGDELKELKNLPSLRGLVDKRTPKLTLWTERGASRHAKMLETDQAWDYFELLEETYFNSRRKNADLISKKDLALMVIQAEEEKEIAYAQRDQAIETKAWISRRREATAMATASAAVREKNVLAAKLGACKKHATVLAVENMTETKFKWHPLKKWCADNGAEVLSVPDERYGKANSYPAAAWKAVHNVNIAKLF

SEQ ID NO: 3167 - DNA, 387 bp, Morganella morganii
atgtcaggacatccacacgctgaccttatggctaaggcagcagagatagcgaagacagataaagagtggtggcggcactttgagtttaaaaatactaccggtagctggatgggcatgacagaaaatactggattttatgattttgctgaataccgcctgaaacctcgcttcatcgacattaatggacatcaggttcctgagccggttcgggagcctctggaagacgaccaagattactggatagctgacattcgatatgcgccatctgtttttaattgggagaataatgacgctgactatcgctggcttgaacgcggcatcattcatctaaccaaagaagccgctgaatcccacagttcagccctgctctctttcacacagaagtaa

SEQ ID NO: 3168 - protein, 128 aa, Morganella morganii
MSGHPHADLMAKAAEIAKTDKEWWRHFEFKNTTGSWMGMTENTGFYDFAEYRLKPRFIDINGHQVPEPVREPLEDDQDYWIADIRYAPSVFNWENNDADYRWLERGIIHLTKEAAESHSSALLSFTQK

SEQ ID NO: 3169 - DNA, 597 bp, Enterobacter cloacae
atgttatggagcagcaacgatgttacgcagcagggcagtcgccctaaaacaaagttaggccgcatggacacaacgcaggtcacattgatacacaaaattctagctgcggcagatgagcgaaatctgccgctctggatcggtgggggctgggcgatcgatgcacggctagggcgtgtaacacgcaagcacgatgatattgatctgacgtttcccggcgagaggcgcggcgagctcgaggcaatagttgaaatgctcggcgggcgcgtcatggaggagttggactatggattcttagcggagatcggggatgagttacttgactgcgaacctgcttggtgggcagacgaagcgtatgaaatcgcggaggctccgcagggctcgtgcccagaggcggctgagggcgtcatcgccgggcggccagtccgttgtaacagctgggaggcgatcatctgggattacttttactatgccgatgaagtaccaccagtggactggcctacaaagcacatagagtcctacaggctcgcatgcacctcactcggggcggaaaaggttgaggtcttgcgtgccgctttcaggtcgcgatatgcggcctaa

SEQ ID NO: 3170 - protein, 198 aa, Enterobacter cloacae
MLWSSNDVTQQGSRPKTKLGRMDTTQVTLIHKILAAADERNLPLWIGGGWAIDARLGRVTRKHDDIDLTFPGERRGELEAIVEMLGGRVMEELDYGFLAEIGDELLDCEPAWWADEAYEIAEAPQGSCPEAAEGVIAGRPVRCNSWEAIIWDYFYYADEVPPVDWPTKHIESYRLACTSLGAEKVEVLRAAFRSRYAA

SEQ ID NO: 3171 - DNA, 207 bp, Morganella morganii
atgcatctagatgaagaggacgttgtaaaggtggtaatggaagtaggtagcgcagtatttcgactactggataatactgacaccataaccaaagaaatgattgttgatgaacttgagcgatatcataaagaggtcacgaacacgctacataaaggtgctttacgtgatgctgctcaggtagttagatgcatgggtaatattagatag

SEQ ID NO: 3172 - protein, 68 aa, Morganella morganii
MHLDEEDVVKVVMEVGSAVFRLLDNTDTITKEMIVDELERYHKEVTNTLHKGALRDAAQVVRCMGNIR

SEQ ID NO: 3173 - DNA, 348 bp, Citrobacter koseri
atgaaaaaattattattaggtactctggttatctccgcattattttccgtgacagccactgcggaaaataaaacagcacaggcttatgtcccggttgagttcagtgcaaagctggatggcaacgaatatcactttaaaccggaaacatcaccgcagcgtattgtctctctcagtcagatcaccaccgaaatgctgctggcgctggacttgggggaccgtatggtcggtaccgcttttctggaagagccgatttcgccaccggctgggcaaactcattctcaaaactggcactggaagccaataaaattgtgccggaaggggttgccgtttatgtgccggaatccatga

SEQ ID NO: 3174 - protein, 115 aa, Citrobacter koseri
MKKLLLGTLVISALFSVTATAENKTAQAYVPVEFSAKLDGNEYHFKPETSPQRIVSLSQITTEMLLALDLGDRMVGTAFLEEPISPPAGQTHSQNWHWKPIKLCRKGLPFMCRNP

SEQ ID NO: 3175 - DNA, 1086 bp, Morganella morganii
atggattttaatttacggcactgtgtcattcatgaattagtgaaagaaagtggtaagcaaaaagttgagaccgatcttaaaccagttctcccaagtgacgatgaacacgtatgtcaattggtagagtctttgactgatcttataggtaaaaaagataatcaagccgcgcgaggaactttcgattccaaggatataaagttcaaagtacctactgcatttaaggcgtattacgatagcactcttacaccaaaagactttcatgaattctcattaatttgtatgagtgagttgtctcgtcaagctaaagaaccaactaggattgccgcttctggtggagccatagtctttgcccactatactcacggacagtcagatttccttctgattactatggttaagcagaaggatgcacttcgtttggatgaaaatctaaaaccagtgggaacagtccaaattgacttatcaaaaattaatcaggctgcacgtattaattttaaaaagttttaccagtttgaagtacttcccgatgatgaaaagccgacttacttggcatttgtaagcccaaagataaatcaggatgcatctgggtattttgttgcggctctggggtgttcagatagtgttccctcagcaaaagctacagagtcagttcttaatggtgtaagaagttactttgatgcaaacgtagatattaaggcgtacaagaacgttgcttatgatgctgtcctgtatcatctaaaagagaaaaaaccaggagaaacggcttctttagcagagattgaacatattgtaagacaagcagtgccagcaaataaacatgctcacatagataatttagtcgagtatctaaatggcgaagaaatgggggttccattagagtttgctatcaacaaggccgtagtaaatagaagaactaaagtaagaactaaatctaatggatgggaactaagttttgaaaagcgtttttttggtgagcaggctggcgctgtaattcagtatttacgaaatgataaaaagttaataatatctcagttagatgacgatactatcaaaaaattagaagatgcacttaagaacgaagggtag

SEQ ID NO: 3176 - protein, 361 aa, Morganella morganii
MDFNLRHCVIHELVKESGKQKVETDLKPVLPSDDEHVCQLVESLTDLIGKKDNQAARGTFDSKDIKFKVPTAFKAYYDSTLTPKDFHEFSLICMSELSRQAKEPTRIAASGGAIVFAHYTHGQSDFLLITMVKQKDALRLDENLKPVGTVQIDLSKINQAARINFKKFYQFEVLPDDEKPTYLAFVSPKINQDASGYFVAALGCSDSVPSAKATESVLNGVRSYFDANVDIKAYKNVAYDAVLYHLKEKKPGETASLAEIEHIVRQAVPANKHAHIDNLVEYLNGEEMGVPLEFAINKAVVNRRTKVRTKSNGWELSFEKRFFGEQAGAVIQYLRNDKKLIISQLDDDTIKKLEDALKNEG

SEQ ID NO: 3177 - DNA, 1287 bp, Morganella morganii
atgtcctcaatatattttgaaaagctggttgaattttacagagggttggggaaacctcctgttgttaactgcgtatttgaatatagaggacaattaactaaccaattcgatatatttaaagaactgtgggataactacgatcaaagaattgcagattttgaattatccttcaattcggattcttacggtacctattatgaagaccctttccctgaagatttgactgcaactattgatattatacttgtagtatcattacctgctggtgattttagatttattgagtcattagaagattttttactcatagataataatttgaatactggggtatgcgttgaaaatgtttatcttataaaagaaaactatttatttggtgaagctggggaagtgaatgaaaaagtttccaaaacattaaagctttcactttttattacagaactttatgagttggcaaattataatgatcgtgtagaacatagcggcttacttaaattggtatttatcgatacaggaaatgcaaaaaagacctctccaattgttattgagcccaaaatagacattgaaagcatttcattccccatggttgatttgactatttttgatagtttaaaagaaaataattctgataatgctcatgttcaagagaaacaagctatgtttagggtatctattattgagattctaaaagaattggatgatagtacgaataaatttaatttcttgattgaacactgggagttattaaaagaaacatattatggaaattttgagtgctatttaactaatttctcatttttaaagcaaaaaaaagaggcagcggaaaattatatgactgtttcttcaaaaatatcaggaactctctcatctatatcaggtaaactatttggattgccaatttcatttgcggttgcgatgattattttaaaaacggggaaatttgaaagtatattagcattattaggagggattgtaacatctatattgattgtacttaccatttacgatcaaagaaaagttcttgaatctattcgagtatctatagatgccctttttagccacacaaagtctccgcgtagtggagaacttgcaagtctgatttccaagcataaagaaaatctctattctcaagctaataggctagataccgcaatggctttcttaatagtattttcttttttgccgattattatttctattggcgtgtatatatataagtttcatccatctgtaattgtatatattgatggtttcgttaatacctttatgatccagttacttagttaa

SEQ ID NO: 3178 - protein, 428 aa, Morganella morganii
MSSIYFEKLVEFYRGLGKPPVVNCVFEYRGQLTNQFDIFKELWDNYDQRIADFELSFNSDSYGTYYEDPFPEDLTATIDIILVVSLPAGDFRFIESLEDFLLIDNNLNTGVCVENVYLIKENYLFGEAGEVNEKVSKTLKLSLFITELYELANYNDRVEHSGLLKLVFIDTGNAKKTSPIVIEPKIDIESISFPMVDLTIFDSLKENNSDNAHVQEKQAMFRVSIIEILKELDDSTNKFNFLIEHWELLKETYYGNFECYLTNFSFLKQKKEAAENYMTVSSKISGTLSSISGKLFGLPISFAVAMIILKTGKFESILALLGGIVTSILIVLTIYDQRKVLESIRVSIDALFSHTKSPRSGELASLISKHKENLYSQANRLDTAMAFLIVFSFLPIIISIGVYIYKFHPSVIVYIDGFVNTFMIQLLS

SEQ ID NO: 3179 - DNA, 1782 bp, Morganella morganii
atggcagttttgtcgtatattgtgcatctcatagtattcttattgttctgctggtcagtgataaaacctccccaacagcctcttattacccttttattttactgctggacacattacatgtttgggacacctagtaaattacacgaatgcttaacggtaagcgatttatataaatttcttggttgtgatgaacaaagttttggcgatttcttatacgggcctacacttaagtaccgcacattcataatacctaagaaaggtggtggcgttcggaatattgttgctcctataaaaaagcttaagcagctacaaaataaaataaaaactgagttagagtcttactataaaccaaaggcctgtgtacatgggtttatttctgacaggaacgttgtttctaatgcccgacctcatatcagaaaagaatatgtactgaatatagatttagaaaatttctttggttcaataaatttcggaagagtgagtaagttatttcaaagtcaaccattaaatcttacgcactctgttgcaagtgtcctggctcatatgtgctgctataataaagtattacctcaaggtgctccaacctccccaattatatctaacatgatagcatttaagcttgatagacaattaaaagatctagccagtaaatctaactgtacatataccagatatgctgatgacattagtttttcttttactaaaagaaaaaaaaacctaccaacatctatagccttttttgatagtaaagataatttagttttaagtaaagtactgataaatacaattgagaataattggtttaaaataaacgaaaaaaaaaccagaattcaacaccggactcaaagacaatctgttactaatattacagtaaatgaaaaaataaatgttaataaaaaatttatacgccaaacatcttcaatgttgaacgcaatgattaaatatgggcccatagaagccgaacaagaatattttaaaaaatatcataaaggatatatagcaaaaagacaacatataaaaataaaagaaaaaccaggaaaattatttacccaaaaagtaaagggtcgaataaattatattaagttagtacgtggtgactcatgtgatatatggcgtaagctaatgtataaatataccatcgcaataggcaatccaaatgaaaaatataataaaagcctttgggatattatttcagaatcaacttatatcatttatgacatatcagatggaaatgatacacaaggcagtggttttttattaaaaaatattggcttaattacaaatcaacatgtgataagtggcattgaacaaaataacattgcagattacttgatgatttcatggctacctaacccaggtaaatcgtttatcaatttaaacttagcttggaaaaacactgaaaaagatttagcagttattacatccactgttatttttaatgatgcagttccactaatagcagaacctagccctgattactccgtaggagttgatatttttactattggataccctgcttatgatgcaagaagaaataatgcacccacaatcattaaagccaaaataacaggtcaatatacaagagaaggacagtctagaattgtgattgacgaagcaattgtccatggacatagtggtggagttgtcttaaatacggatggtcgagtgatcggtattgtagcaaatggaaatgcagaaggcgcgataagaaatacacctagtgcatttatccctatatcaacacttcttgaagaacacgaaaacagaacaagaactgaataa

SEQ ID NO: 3180 - protein, 593 aa, Morganella morganii
MAVLSYIVHLIVFLLFCWSVIKPPQQPLITLLFYCWTHYMFGTPSKLHECLTVSDLYKFLGCDEQSFGDFLYGPTLKYRTFIIPKKGGGVRNIVAPIKKLKQLQNKIKTELESYYKPKACVHGFISDRNVVSNARPHIRKEYVLNIDLENFFGSINFGRVSKLFQSQPLNLTHSVASVLAHMCCYNKVLPQGAPTSPIISNMIAFKLDRQLKDLASKSNCTYTRYADDISFSFTKRKKNLPTSIAFFDSKDNLVLSKVLINTIENNWFKINEKKTRIQHRTQRQSVTNITVNEKINVNKKFIRQTSSMLNAMIKYGPIEAEQEYFKKYHKGYIAKRQHIKIKEKPGKLFTQKVKGRINYIKLVRGDSCDIWRKLMYKYTIAIGNPNEKYNKSLWDIISESTYIIYDISDGNDTQGSGFLLKNIGLITNQHVISGIEQNNIADYLMISWLPNPGKSFINLNLAWKNTEKDLAVITSTVIFNDAVPLIAEPSPDYSVGVDIFTIGYPAYDARRNNAPTIIKAKITGQYTREGQSRIVIDEAIVHGHSGGVVLNTDGRVIGIVANGNAEGAIRNTPSAFIPISTLLEEHENRTRTE

SEQ ID NO: 3181 - DNA, 1680 bp, Morganella morganii
atgatggcctttggcggtgaaacaactgacaccgctcagcaaaagcctgaagggatagcgcccagcgaacctgtagctaataccgccccggctgaaaatgaaaccgaggagaagaagaaaaaaacaaacgaagaactggaaaacggcatacgctgggcaaccaacgataatgcagaaacgcccccaaaagaacgtatagacctggaagggttaattgcccggtttgggtacagagcagagaaagactatacggcgtatacgcttgatgggcaggatgcgttttacgattacggctcacatctgcgtatggctacccctgaagccagccagagtgacgagatgatcctggcggccgttcttaccgcggataagcaacatcatcgtggtattgaaatcaccggcagtgacgaatttaaagagcgagtgtttaaccttatcagtgaatacaacattgaggtgaaactgactaacccagaacaaagggttaaattgctcgaactcaaaaaagcaaatgaaacagcaaaagaaacggcaaaagaaaatgttgctgattcaaaagcgaataagcaggaaggggtaaacgaaaaggcaaattcatcagttcagcaaaatggaatgcgctgggaagaatcggcctctgtacaaccgaagaagcagaatgcatctgatactcaaaaggaagataaagctgcgggtgaatcctgggagaaaggcgttatcgtcgcgcatggacgtgctaagtatgagtggaaagatgatgaatccatgaactactttgtcaccctcaaaaatgaacatggagagaagacactctgggggaaagaccttgagagagcggttaaagatgctggtgtagacaccgaacgtcttgttacggtcagaaagctgggatttgtggatgttgaggtgaatgcacctgtccgtgatgaaagcaacaagatcgttcgttatgaaactatccagaccaaacgtaatgagtgggaagtaaaacctgtatacccacagccaacagcagggaatgaacaggcctataagccttctgaactggttccgtatgatgctgcaaccttccagaagctccgcacaacaattcagcagattaccggtgttgatctcagccgtgaggccgtgcctgaaaaagaactgtattggttcctgccgaatggtaagccagctcctgaaagcatgacaaaacccacaggctataaactccctcaagagtcaaaaaccgcgggtacacctttgctggtcgcaccgcataaaaaaggcgaacgacctgattattaccttgttgagtctcgtaaaggattcatgcaggggatcgcaaaggataaggaatctggcgagtaccatagcgtaattggtaaagtgaacaagcgtattgataaagatggaaactggaaaacgtatatgacactttcagcaatcaataaaaattctgaaagtggaattgttttgcacggatacggccatgttgatcagggaggtaaaaacctgctttacaaaaacacaattgcaaatgaaaaacagcctcagaatttacaaccggcctcagatgaggtaaaaaacaaaacagtaatgaagcagctttttcatccttctaatgctgcaaaaagaaaagatgatgaaaggagagaacagactcatgcaccagtcgcaaagtcagcgcctcggccataa

SEQ ID NO: 3182 - protein, 559 aa, Morganella morganii
MMAFGGETTDTAQQKPEGIAPSEPVANTAPAENETEEKKKKTNEELENGIRWATNDNAETPPKERIDLEGLIARFGYRAEKDYTAYTLDGQDAFYDYGSHLRMATPEASQSDEMILAAVLTADKQHHRGIEITGSDEFKERVFNLISEYNIEVKLTNPEQRVKLLELKKANETAKETAKENVADSKANKQEGVNEKANSSVQQNGMRWEESASVQPKKQNASDTQKEDKAAGESWEKGVIVAHGRAKYEWKDDESMNYFVTLKNEHGEKTLWGKDLERAVKDAGVDTERLVTVRKLGFVDVEVNAPVRDESNKIVRYETIQTKRNEWEVKPVYPQPTAGNEQAYKPSELVPYDAATFQKLRTTIQQITGVDLSREAVPEKELYWFLPNGKPAPESMTKPTGYKLPQESKTAGTPLLVAPHKKGERPDYYLVESRKGFMQGIAKDKESGEYHSVIGKVNKRIDKDGNWKTYMTLSAINKNSESGIVLHGYGHVDQGGKNLLYKNTIANEKQPQNLQPASDEVKNKTVMKQLFHPSNAAKRKDDERREQTHAPVAKSAPRP

SEQ ID NO: 3183 - DNA, 213 bp, Morganella morganii
atgagctcaaaaaatatgaaatcagctgaagactggctgcatactgtcagacgtttcatgaatgaagattcgcttgatacgtatgtagactcaaaacgtgatgttctacctgccacagaatttatgcgtttactaaccgcggcggaacaccgccgcgttgaaatacgaaccggcaagctattcgataaaatcccgaaaggactcttccggtag

SEQ ID NO: 3184 - protein, 70 aa, Morganella morganii
MSSKNMKSAEDWLHTVRRFMNEDSLDTYVDSKRDVLPATEFMRLLTAAEHRRVEIRTGKLFDKIPKGLFR

SEQ ID NO: 3185 - DNA, 174 bp, Morganella morganii
atgtcaacaaaagaaaccaaagaacgccacgtcgtgcaattgcgccttgataaagaattgtctgagcgcctagctatagccatgaaagaggatggcgacgataacaaatcgggatggatcaagcggcttcttcgtcgtgaacttgataagagaggcattgaatccaaaggctga

SEQ ID NO: 3186 - protein, 57 aa, Morganella morganii
MSTKETKERHVVQLRLDKELSERLAIAMKEDGDDNKSGWIKRLLRRELDKRGIESKG

SEQ ID NO: 3187 - DNA, 273 bp, Morganella morganii
atggctacaattaaattggctgatgtcgtgtcaaccaccactgctagcggtgataaggcagatatttctggaataaacccaacatcaacagactttcttgttggagttgtctttagtggggggagggggtatccagccatgtgggaccagtatggtacgattcgtgacaacagtaactcatggaatattgatatatcatcttcagacgagctaacggatttaagagatacaggattgtccctgttatctgaatcaattaagaaatttttatag

SEQ ID NO: 3188 - protein, 90 aa, Morganella morganii
MATIKLADVVSTTTASGDKADISGINPTSTDFLVGVVFSGGRGYPAMWDQYGTIRDNSNSWNIDISSSDELTDLRDTGLSLLSESIKKFL

SEQ ID NO: 3189 - DNA, 288 bp, Morganella morganii
atgcgttactcaaagatcaagacctactatcttataaagagcggacatggtcatcatgataatatggtgagatatgacatcattaccatcagcaaagacgaatacttaataagtgtcctttatggtaagcatggggaaccatcccgagttatagagtttaatttcaccagggaagagtatgaaaagcaacacggatgtaatggatgcatgatccattttaatgaccccgtttcatttgaagatgccttagatatgaagtgccaagagcatagagactcgctcgaataa

SEQ ID NO: 3190 - protein, 95 aa, Morganella morganii
MRYSKIKTYYLIKSGHGHHDNMVRYDIITISKDEYLISVLYGKHGEPSRVIEFNFTREEYEKQHGCNGCMIHFNDPVSFEDALDMKCQEHRDSLE

SEQ ID NO: 3191 - DNA, 990 bp, Morganella morganii
atgagtttccccaaatataaccaaactaattatcaagaaagattaggtgtaaatgctgtcgcagaagctatggcaaaaatggggcagatttggcgtgaaactttaatggctgacgttggaattgatggccagattgagtatgttagtcctgagggggttgctacgggaaggatgatcgctgttcaaataaagtctgggccttccttttttaaggaaagcaacggaaattggtttttccacccagaagagaaacaccgattttactgggaaagattcccgttgcctgtactcataattattcacaatcccgatacaaatttaagttattggcaagatgctcgccaagtgttaagagttgccaagccaacagatgtaaagggtattactatacccaaaacaaatattttacaatctacaagtgctaaaacactatttgaaggatttgcagtcatagatcaagccttcatgtcggtcgaagatgttcttgactatttgattaagactaaaagtaaaaatgcctcatttccggtctcatatttaaatctcttctgcactgggctaactaatatctgtcgctctttatattttagtatggatgtagcagtgactgtagcagaaatagagttgaaaaatcagaactctccttttggagtcggagtaggcgattcagaacataactttttatttgattatataaagttcattgtacaccaacatatagcagatgttgatttttctgactgcatgattgactggtatgatcgtaaaatgcagccatcttttatggcacctctgacgtcaagagggaaaaaattggtacagctcattcatgaattagaatctaggttaaagtcggaaggaaaaatagaagatactggatatttacacgctgcacaggagggttttgtgcaattactatttaccccaagcgagatacaacgaattaaatttacaaacaaaattcaacatgagtacttgaaaaatacctaa

SEQ ID NO: 3192 - protein, 329 aa, Morganella morganii
MSFPKYNQTNYQERLGVNAVAEAMAKMGQIWRETLMADVGIDGQIEYVSPEGVATGRMIAVQIKSGPSFFKESNGNWFFHPEEKHRFYWERFPLPVLIIIHNPDTNLSYWQDARQVLRVAKPTDVKGITIPKTNILQSTSAKTLFEGFAVIDQAFMSVEDVLDYLIKTKSKNASFPVSYLNLFCTGLTNICRSLYFSMDVAVTVAEIELKNQNSPFGVGVGDSEHNFLFDYIKFIVHQHIADVDFSDCMIDWYDRKMQPSFMAPLTSRGKKLVQLIHELESRLKSEGKIEDTGYLHAAQEGFVQLLFTPSEIQRIKFTNKIQHEYLKNT

SEQ ID NO: 3193 - DNA, 1326 bp, Morganella morganii
atggaatttaatgaacataccggtgttatggaagacaaatacgttgcaattggcctggaatggttgagtcagatacagggtgataaaaataaattccagtcacgtctgcaacgcgcacagtataattatattagcgtgaccagcgatgctgttttttttggcgataattttgacatcaacctttatggtaaggatattgtcgcgagtttcttcgctcaggcgaagtccttacttgataacagtagggcttacgacatcagtatagcatctcatataatcccttgggttaagcaacttggcagaaactgccatctcattaataacattccgggcgctcgagaacgagctaaacgcatgttagatgaagaaaaggttcatcctgatgcagccttgtttgaattagttattgccggtaactatgctgataaagggtatcaggtggaatttatacctgagcagaaggggatagcaaaaacaccagacctcaagtacctagataataaaggccaagagttttacattgaatgtaaaagactacaaaaaggtaagtatgagattagtgagagaaagtttcataacgaattgataaatcttacaggagcattaagtatccttgggagttttaacttttggttagatattacctacaagtctgagttgaaagacattccagctaactatatttatgagcatctcaaaaaatttaataatcactattatacatggagtgatgcctatgggcggggggtcatgagacctattagtctttacaaactgcatgaaagtattctgaaaaatggttccataatgttcaataccaagtttgcacggctgatgaagggggcggcattgcgtgatgaatatttcaatatatacgcacatgcaaaaccagataagcgtgaccaccgattcattgagtttgtggagcaagcatccttggtgacctggcggtgcataaaccaaaaatcatttgagagtcgttcgaaacatgtcacttcactgctgaaaacaatcgacgatcagcttctaacatatggtccggggattgctcacatcgcaattgatgtcgatatccaaggagatgttgctgacaaacgtcgtcaaaaaaatgatgaagctatcgcccgctttacgccccgttccaatctttgcagaacgatggttcattatatggtgcctagaattgatgaagattctgcttggatggtggatgaaacatttgatgaaaggctgaactaccgtcccgagcttaatttaacgccccagattgctgtttttacggactcccaaattttagacaatgatctgccaggatggcgtcagtag

SEQ ID NO: 3194 - protein, 441 aa, Morganella morganii
MEFNEHTGVMEDKYVAIGLEWLSQIQGDKNKFQSRLQRAQYNYISVTSDAVFFGDNFDINLYGKDIVASFFAQAKSLLDNSRAYDISIASHIIPWVKQLGRNCHLINNIPGARERAKRMLDEEKVHPDAALFELVIAGNYADKGYQVEFIPEQKGIAKTPDLKYLDNKGQEFYIECKRLQKGKYEISERKFHNELINLTGALSILGSFNFWLDITYKSELKDIPANYIYEHLKKFNNHYYTWSDAYGRGVMRPISLYKLHESILKNGSIMFNTKFARLMKGAALRDEYFNIYAHAKPDKRDHRFIEFVEQASLVTWRCINQKSFESRSKHVTSLLKTIDDQLLTYGPGIAHIAIDVDIQGDVADKRRQKNDEAIARFTPRSNLCRTMVHYMVPRIDEDSAWMVDETFDERLNYRPELNLTPQIAVFTDSQILDNDLPGWRQ

SEQ ID NO: 3195 - DNA, 306 bp, Morganella morganii
atgacaaatgatacatcaccaaatcaatatgtttcacgcttattaaataaaaatgaagacgatagactaaatgaactcaagattattctttccgagttagatataggtatcaggctaaggaaaataacgcaacaccaaaaacatgagatcattcatgaaataaagcgagccattgcggatgaaagaaacatttctttcgatgaaaaaaacgatcaatctgatgctattagtcgagggagtgctagtgccagcaatgatgacttggtggatttaatagcaatgcttaatagaggaagaattcaatga

SEQ ID NO: 3196 - protein, 101 aa, Morganella morganii
MTNDTSPNQYVSRLLNKNEDDRLNELKIILSELDIGIRLRKITQHQKHEIIHEIKRAIADERNISFDEKNDQSDAISRGSASASNDDLVDLIAMLNRGRIQ

SEQ ID NO: 3197 - DNA, 507 bp, Morganella morganii
atgagtgatagttattataatatgtattcattggccgtgtctagtgctgcattacttctctcattgtatacatttttcaaatcaagaaaagatgttaagtttgcgcaagagaatgcaagtgaagcattgaaattgcaatatggtgcaattgaacttcaaattcgaactggcataactaacgcaagaaatacaataaataatttgacaccaatcttgacaccatacttagcaaaaaaacaagcaggctcattgagcgctgaagagtcttattctcttgatttattatataaaacttatgattcttgcattgaagacctccttaaccaatatgatgaagcatgtaagaaatatattgatggtaaaattgacagagaaatgttcaaagaaatatacattcatgaaataaaaaatataacatcaagccaagatctttcttcctattataatttagaaacaacgaagtacacatctaccttaaaggtgcgtgatgaatggatacctgattga

SEQ ID NO: 3198 - protein, 168 aa, Morganella morganii
MSDSYYNMYSLAVSSAALLLSLYTFFKSRKDVKFAQENASEALKLQYGAIELQIRTGITNARNTINNLTPILTPYLAKKQAGSLSAEESYSLDLLYKTYDSCIEDLLNQYDEACKKYIDGKIDREMFKEIYIHEIKNITSSQDLSSYYNLETTKYTSTLKVRDEWIPD

SEQ ID NO: 3199 - DNA, 1752 bp, Morganella morganii
atgaaagattttcgttacttcctaaaggaaagttatatcaatagcagggctttagttattggtataaataaatataaaaatgtccctcctcttgcgtatgcagttaatgatgcatcagaaataaagagtttactcatcaatgaattcgatttcaaagaggaaaacatatcgtttcttcttgatgaaaatgctaccaaagaaaatatattaagagcattttccagacttacaagggatgatattgaactggatgagaggattttcattttttatgctgggcatggtgaaacacgaactggaatttatggcgaagtagggtttctcgtacctcatgacgcaatcactgatgatttatccacctttatacgctgggatgaacttaccaaaaatgcagagttgataagagcgaagcatatacttttcgttatggatgcctgttatggtggactggcattaacacggggaataggtccaggcagtacgcgcttcttaaatgatatgatgctacggtattccagacaagttctgacagccggtaaagccgatgaaactgtctcagattctggtgggcctttgccaaatcattcagtattcaccggacatctaattgaaggtttaaaaggaaaagcattaaccgaaaacggtgtattaaccgccaatggtttgatgacttatgtttacaataaagtatcaaatgataagtcttcaaatcaaagtccgcattatggctatattgatggtgatggggattttatttttaaatctccttcttggtcccatgacaatttagaggaaacaacggataatgataggttgatttcggttccctattttcagacggaattttctcctttaaacgctgaagataaaataagaaaaacaaaaaaattactggcaaatgattcatcctctatcgagctacatgattttgtgattgatgaagttaaaagttttctatctgaaaccagtgaggattttttctcagtaaatggtcagtttactaaagaagaacttcttgagaggatttctaaatatgaaagtatatctaaaactataatcctaataatttcttgtgtctcatattgggctcgaacaatccatattccattattaagtaaagcattagctcgttcaactgaccgactggaaagagggaatggtttaactgtatggttaaatctacgatggtatcccttaataatgcagttttatgcattagggatagcagcatttgaaaataaaaaatatgatgtactatttagtgttttttttataaaattagactcgtcactttcaaacaatggtaaacagctatattttgctgaagccatttcgaatgccattctggaattggctcaacaaggtgtatttaagcaactccctggatttgaaaggcattttgtaccaatgagtgagcatctctataccatcttgcaaccattaattgatgatactctatttattgggaagaattacgaaaatgtttttgataattttgaatgtttcttagcacttgtcatcgcagatctgcatcagcagcaagagcgaactccatggggacctgtaggccgttttggttggaaagaaagaaatttgtacaattccccattatctaatatgattaaggaagccaaagagcaaggtgttaactgggctccattaaaaagtggcttctttggaggggatatttccagattctctttagttgctgatgaatatttaaaaggaatatcaaaattaagttggtattaa

SEQ ID NO: 3200 - protein, 583 aa, Morganella morganii
MKDFRYFLKESYINSRALVIGINKYKNVPPLAYAVNDASEIKSLLINEFDFKEENISFLLDENATKENILRAFSRLTRDDIELDERIFIFYAGHGETRTGIYGEVGFLVPHDAITDDLSTFIRWDELTKNAELIRAKHILFVMDACYGGLALTRGIGPGSTRFLNDMMLRYSRQVLTAGKADETVSDSGGPLPNHSVFTGHLIEGLKGKALTENGVLTANGLMTYVYNKVSNDKSSNQSPHYGYIDGDGDFIFKSPSWSHDNLEETTDNDRLISVPYFQTEFSPLNAEDKIRKTKKLLANDSSSIELHDFVIDEVKSFLSETSEDFFSVNGQFTKEELLERISKYESISKTIILIISCVSYWARTIHIPLLSKALARSTDRLERGNGLTVWLNLRWYPLIMQFYALGIAAFENKKYDVLFSVFFIKLDSSLSNNGKQLYFAEAISNAILELAQQGVFKQLPGFERHFVPMSEHLYTILQPLIDDTLFIGKNYENVFDNFECFLALVIADLHQQQERTPWGPVGRFGWKERNLYNSPLSNMIKEAKEQGVNWAPLKSGFFGGDISRFSLVADEYLKGISKLSWY

SEQ ID NO: 3201 - DNA, 504 bp, Morganella morganii
atgtttgattggattagtctatctgtgaattcagttgttgcgttaattacgggtagtcttgctgcaattattacttcacgaattgccatgaataaattttacaaagaaaaatggtgggaaaggaagagtcagtcgtacaatacgttaattgatgcattaatagaaatggaatccatttacaaaaaggcgtcaaggcactttgaaattgtttatcaaattgaaaggtcagataatgaaattataccgaatattaattttgagtggagtcggtatgatgaattaagtattgttattcgccgaatttatatactgtcgccaatatctttaagcaaaaaagcaaaagaacttttagaagaatattttacaaaatcagaatcacttgaatactcagtacataaagaggggttccacaattttatcgcatatggtcaactaagtgaggcaataaattcaattattaatcctattatagatgacgcaaggaaagagctaaggtttaattaa

SEQ ID NO: 3202 - protein, 167 aa, Morganella morganii
MFDWISLSVNSVVALITGSLAAIITSRIAMNKFYKEKWWERKSQSYNTLIDALIEMESIYKKASRHFEIVYQIERSDNEIIPNINFEWSRYDELSIVIRRIYILSPISLSKKAKELLEEYFTKSESLEYSVHKEGFHNFIAYGQLSEAINSIINPIIDDARKELRFN

SEQ ID NO: 3203 - DNA, 264 bp, Morganella morganii
atgaatttggaattcaagaaaattaaccctcgaatcggggccgcctattacattgttaagtggggtgatattcagatcggaaccatcactcgcgatatgtgcggcaaaggcatggtaattaataataacttaccaggatttaagacaattaaaaataaattcatcgacatagaatctgcatttgattattacgttggactggtcactctgtttgctaaaaaggtcggggtgcaggaagccgtcaacgagctaaaggaatcctga

SEQ ID NO: 3204 - protein, 87 aa, Morganella morganii
MNLEFKKINPRIGAAYYIVKWGDIQIGTITRDMCGKGMVINNNLPGFKTIKNKFIDIESAFDYYVGLVTLFAKKVGVQEAVNELKES

SEQ ID NO: 3205 - DNA, 360 bp, Morganella morganii
atggaacatacgattaaagtttataaaaactcaccggagcatggtgattacctcaaggcgcgctttccagacggttcacacggtaacagtacgtttgaatatgcgggtcatcggtggggttatcggtacacatcatttgacgataaaggtgattatgacctgctctatcgctttgatgatgaaccaggcgtgcaatcatttacagttaatgatgcaacgctgcgggattattttgcagccaaagcaatgcaggcatgggtatctcaaatacctccggaaatgatggaagatatgatgagcaggtggactgagaactcatatgagatggcagacgtaatgctcagagcaagggagaaataa

SEQ ID NO: 3206 - protein, 119 aa, Morganella morganii
MEHTIKVYKNSPEHGDYLKARFPDGSHGNSTFEYAGHRWGYRYTSFDDKGDYDLLYRFDDEPGVQSFTVNDATLRDYFAAKAMQAWVSQIPPEMMEDMMSRWTENSYEMADVMLRAREK

SEQ ID NO: 3207 - DNA, 321 bp, Morganella morganii
atgaaatttaagggtacgcctgggccgtggactatcactgatagtggcggctcaataatggatagtgaccaatttattatcgctacctgtagccggttagccgtcttgtgcagatggcatgaaaaaggatttgagcactttagcgacgaaggtgccagtaaggatattggaacaattgccgcgaaggcgaacgctaatttaatagcggcagcgccgggaatgctaggattcctgttggaaattaaaggtgcttattacctgtcagataaacatcaatctgaattaaatagcatcatcaaaaaagcacttggccgagaatag

SEQ ID NO: 3208 - protein, 106 aa, Morganella morganii
MKFKGTPGPWTITDSGGSIMDSDQFIIATCSRLAVLCRWHEKGFEHFSDEGASKDIGTIAAKANANLIAAAPGMLGFLLEIKGAYYLSDKHQSELNSIIKKALGRE

SEQ ID NO: 3209 - DNA, 1065 bp, Morganella morganii
atgataaccattaagaataacagaatttcttttgtagagaagcatctttttgagcctaaaattgaaacatttgatggaataatagagcgttatcgtgactaccacatcgaattgtttttacatgtagtcagcgattcatcttgtagatatgagaaaggtgtgggttcggcacgagtactgagagatatagctgggctatctgctaaagaaagatttttgagcctgttggaaaacaaagaactgaccgctaacccaaaaggtttttatgccaataaaataaaaaatggagaagtattccctcaggaaatcaagtccgttagttttgcacattgcacgcaggaagaagtagctaagcattttgaagcgcgaaattcagagtatgggatcatcttctatcacgactttcttcaatctttggggatgatacctgtaaggtatattaatgaagaaaaaaaagagtcaattcgccagctagttttcaatgagcctttcgcattagaagcttacggaaaaacgtatgatatgcgctgggaaaatgagtggcgtatcaataaaaatgtttcttttgagccgaacgatattgcctttataattgtaccagatggagaatatgatgaatttgttaacttaatagtttacaaggactttgaatatttagctctcccagcctctgtatttacaaatcccttcaagttttttctaattgctaatagtatggagcatcacgcttgggatcaaattaggatatgtggtgattggaaagtggattttgatatgttccctgatttcactgcggctgaggaaaaaaagtttttaagtatatgtggtttacatgtggattgccttgcaaaggcagagatacaagatgtatatgaaaatagatatatctcgaaatttatcaatttcgcgtcgtgtttagatgttggatttttgaataaaacatcattcaaagatatagccctggttaatcaaaatgctggagagccttatcaaactcatagagatctcatgatgcactgttacacggaaaggtttaatatccaacgtgatcgcataagtctgtag

SEQ ID NO: 3210 - protein, 354 aa, Morganella morganii
MITIKNNRISFVEKHLFEPKIETFDGIIERYRDYHIELFLHVVSDSSCRYEKGVGSARVLRDIAGLSAKERFLSLLENKELTANPKGFYANKIKNGEVFPQEIKSVSFAHCTQEEVAKHFEARNSEYGIIFYHDFLQSLGMIPVRYINEEKKESIRQLVFNEPFALEAYGKTYDMRWENEWRINKNVSFEPNDIAFIIVPDGEYDEFVNLIVYKDFEYLALPASVFTNPFKFFLIANSMEHHAWDQIRICGDWKVDFDMFPDFTAAEEKKFLSICGLHVDCLAKAEIQDVYENRYISKFINFASCLDVGFLNKTSFKDIALVNQNAGEPYQTHRDLMMHCYTERFNIQRDRISL

SEQ ID NO: 3211 - DNA, 1992 bp, Morganella morganii
atggcaaagcagattattcaaggtacaactgaaatcaacagctcgggtatcaagaatcattttgtgtcagttgaacctgtacaggcgatattggaactcgtatggaatggatttgatgctggcgctaagaatattaacatcaacatagtttatgaccattttaatacagtaaaaaacttgaccattcttgatgatggtgacgggataaactttactgatttaggcagcaactttaatcgatttaacgattcattaaaaaaaacaagcattgatcaacacggttctaaaggtcgagggcgtttatcatttcataagctttgtcatcaagctaactggtatactaaatatcaaggtagaaatgcttgtattaaaattaatgatgacgatattaaggtatatgaagctcaaattgatatcaatgctgaagagcaaaacagtttattgaatgtaatggataaggggacgtgtgttgaattaacattattacattcaagccttccagatagaaataaattaatttctattctgtccaatgagttttgttgtaaattggcattagatgatgaaaggaagatttttttaaatggtgctgaaattgatatccctgaacacgaaataaaagagatctcttttgagattgagaataatgattttatggtgaaaggaatacgctgggataaaaaaccggcgactgaaaaatcatttatttatttaactgatagttcagggaaaattgtccacaaagaatcgacaacattcaataaaaaaagagactttcatttaagcgtgtttgtttcatctatttgggctgatactttcagtgctaatggcgatgatattttctccacagctaaaagcaatcctgattcaaaagtatggaaatatttagttaaaaatattttgaagttctcaagatatatatatgatgatttccttagagtgcaggttgaaaaagccatacaaaaacttgaggaggatggtgcatttcctacatacaatgaatacgatataacatatgctaactggaaaagaaataatatcaagcaggttgtgagaagtatttatattgctgatcctcagtttttggtatcactgaatataaagcagaaaaaggtaatcatcagacttcttgataagatgcttgtgtcaaaccaaaatgaagatttatttgatatccttgaaagtgttttagatttaagtgatagtgatctttctagatttgcatcacaattgaaaaaaacaaaattagaaaatattataagttcaattgaggaattacaaagaaggcgttttgcagttgagaagttaaagctaataatgaatgagcattataaagaagttctagaaacgcctgacttacaaaaaatcattgaaaataatacatggttatttggtgaaagatacgaaactataggtgcggaggaagatacttttactaagattgcaaaatcattgagggatagcgtttactccattaataacatagatgcacaagatgtagaaaatggagaggatattgtaggtgccaagagacaaactgatttattcttagcgagaaggataccaaccttcgactctaatggtaataagattttcagatgcataattattgaaattaaaaggccaagtatagccctaaatgttaagcatttacgtcaactagaggattatgctgcgattattaaacggcaccctgagttttctagccaaaatttgcattttgaattaattcttataggtagaaaaatttctagtcaagatatagagattcctactcgcttgtcaaattatgctggccgtggtgatgttggtttagtatctgatgatgcaaatatgaagcgttatgttaagaattggtacacaatatttgatacttttgaattgacaaatagtttcatgcttgaaaaattacaaatggaaagagatgtaattgaaaataaatccagggaggagcttgttaaggaattacaagaagatagtgttgatgtttaa

SEQ ID NO: 3212 - protein, 663 aa, Morganella morganii
MAKQIIQGTTEINSSGIKNHFVSVEPVQAILELVWNGFDAGAKNININIVYDHFNTVKNLTILDDGDGINFTDLGSNFNRFNDSLKKTSIDQHGSKGRGRLSFHKLCHQANWYTKYQGRNACIKINDDDIKVYEAQIDINAEEQNSLLNVMDKGTCVELTLLHSSLPDRNKLISILSNEFCCKLALDDERKIFLNGAEIDIPEHEIKEISFEIENNDFMVKGIRWDKKPATEKSFIYLTDSSGKIVHKESTTFNKKRDFHLSVFVSSIWADTFSANGDDIFSTAKSNPDSKVWKYLVKNILKFSRYIYDDFLRVQVEKAIQKLEEDGAFPTYNEYDITYANWKRNNIKQVVRSIYIADPQFLVSLNIKQKKVIIRLLDKMLVSNQNEDLFDILESVLDLSDSDLSRFASQLKKTKLENIISSIEELQRRRFAVEKLKLIMNEHYKEVLETPDLQKIIENNTWLFGERYETIGAEEDTFTKIAKSLRDSVYSINNIDAQDVENGEDIVGAKRQTDLFLARRIPTFDSNGNKIFRCIIIEIKRPSIALNVKHLRQLEDYAAIIKRHPEFSSQNLHFELILIGRKISSQDIEIPTRLSNYAGRGDVGLVSDDANMKRYVKNWYTIFDTFELTNSFMLEKLQMERDVIENKSREELVKELQEDSVDV

SEQ ID NO: 3213 - DNA, 1500 bp, Morganella morganii
atgaatattctttcatacacagataaagaactaagtgaaaaaaatttctatctttcttgtctgcttgttttttttatttatacattcccattgattatatcagatatttattatctggatgatcttggaagggcaatagatgggcacggatgggatcatgatgctcgatatttaacaaatatcatatattcagcattaacattcggtgggttggtgataaacatatctccatacccattgattatatctctattattcttttcattatcatcagtttatttgacaagaatattttccataaagaggaacatagtttctgtactattttgttcgttacttatgacaagtccgttttatatagagaatctatcttataaattcgattctttatctatgtctataagtatatttttatgtgtgtacgcaatatatttaacatcaatatgtaatataaaatctctactgctatcagccatcatattatcggcagtgatgtttttatatgaaccaagtttagggatattcataacgctttcaatatcactattcattagcaactcactgtttcaaacaaaaaaggtttcattatataaagtaactacacatcaagtaatctctgtttgcctagcattattttcatggaaaataggtagtaaaattttagactacccagtaagacagacaatatactcatcacctgataggttctccgcatttaaagaaaagctatctatattcttagataacatgaatgttgttttcagtgatagattcatggtcgcgtactctttactattattgctttcgtttatatcaatacttacacttgttgctaaattaataaaagaaagtaatattagaacatatgctccaataatcaccgtaattattatatcattgccagtattcattataatgattcagggtttttcattttttgctatgcggaaaacagacccttttggttatgctccacgcgtgtttattgggtttggcgcatcgatgttagccatagctgtttttttaatgaaatctgatttcatatcacaaaaaataaagctcatagcatttttaatgccatttatatattccctaacgctaatgtctacttactgcaattcatttggctctcagatgaggattcttgacattatttctgccaatttatcaagagacttggttgataatgacctcgttggtaaaaacatggttatctctggaaaaatgccaaactccaatgagttgaacttctcaggaaaggaaaacccaataatatttaagttagttcaaacaccaatgcataatgagtggagctggggatataggcaattaataactttatatagtcttccagcactataccctagtgaagatgaaatgaacatttcaaataaagaaaaatgctcatttaatgtagtcagtaaaaacatatactatactattttagtgcctaaaaatggtaacttttttgttttagatttcgataggaattgtaagtaa

SEQ ID NO: 3214 - protein, 499 aa, Morganella morganii
MNILSYTDKELSEKNFYLSCLLVFFIYTFPLIISDIYYLDDLGRAIDGHGWDHDARYLTNIIYSALTFGGLVINISPYPLIISLLFFSLSSVYLTRIFSIKRNIVSVLFCSLLMTSPFYIENLSYKFDSLSMSISIFLCVYAIYLTSICNIKSLLLSAIILSAVMFLYEPSLGIFITLSISLFISNSLFQTKKVSLYKVTTHQVISVCLALFSWKIGSKILDYPVRQTIYSSPDRFSAFKEKLSIFLDNMNVVFSDRFMVAYSLLLLLSFISILTLVAKLIKESNIRTYAPIITVIIISLPVFIIMIQGFSFFAMRKTDPFGYAPRVFIGFGASMLAIAVFLMKSDFISQKIKLIAFLMPFIYSLTLMSTYCNSFGSQMRILDIISANLSRDLVDNDLVGKNMVISGKMPNSNELNFSGKENPIIFKLVQTPMHNEWSWGYRQLITLYSLPALYPSEDEMNISNKEKCSFNVVSKNIYYTILVPKNGNFFVLDFDRNCK

SEQ ID NO: 3215 - DNA, 156 bp, Klebsiella oxytoca
atgaatacgattagtataacggaaatcgtgttgagtgtgcttcttgcgggcgctttggggccggttttattacgtcgaaaaaaaggtctgctgttactgttgttgattctggtctgcacgatacttttgcttcatggtgtcactacgatttactga

SEQ ID NO: 3216 - protein, 51 aa, Klebsiella oxytoca
MNTISITEIVLSVLLAGALGPVLLRRKKGLLLLLLILVCTILLLHGVTTIY

SEQ ID NO: 3217 - DNA, 291 bp, Enterobacter roggenkampii
atgcgaccgtctgttgtgcttgacatgaagcgaagcgcagtgcgtgaagcggtaggccgctttcgcgccgcgaacccgcgcgtcttcggctcggtgctgcatggcaccgaccgggatggcagcgacctcgacctgttggtcgatgcgctgcccggtgccacgttgttggacttgggcgatttggaagaagaactgaaatcgctgctcggcgttgacgtcgatctgctgactcccggcgacctgccgccgaagttccgggccaaggtgctcgcggaggcgcaaccgatatga

SEQ ID NO: 3218 - protein, 96 aa, Enterobacter roggenkampii
MRPSVVLDMKRSAVREAVGRFRAANPRVFGSVLHGTDRDGSDLDLLVDALPGATLLDLGDLEEELKSLLGVDVDLLTPGDLPPKFRAKVLAEAQPI

SEQ ID NO: 3219 - DNA, 402 bp, Enterobacter roggenkampii
atgagcgagaaccgcctgcccgattacctcgaccacattcagcaggccgcaaccgatgcgcgcagcttcgtggaagggatggccaaggacgacttcttggccgacaagcgcacccagcaggccgtcatcatgagcctgatcgtcatcggcgaggcggccacaaaggtgatggatggctacgtcgagttcacccaggcgcatgccgacgtgccgtggcgcagcatgcgcaatatgcgtaatcgcatggctcacggctatttcgacatcaacctcgatgtggtgtgggagacggtacaggaatggctgccggcgttgctccagcaattgcccgccgtgcgtcaggatgccgacgatgaagaccgtaacgacaactgtgaaagagggatctccgatgactgttga

SEQ ID NO: 3220 - protein, 133 aa, Enterobacter roggenkampii
MSENRLPDYLDHIQQAATDARSFVEGMAKDDFLADKRTQQAVIMSLIVIGEAATKVMDGYVEFTQAHADVPWRSMRNMRNRMAHGYFDINLDVVWETVQEWLPALLQQLPAVRQDADDEDRNDNCERGISDDC

SEQ ID NO: 3221 - DNA, 510 bp, Citrobacter koseri
atgatattggccggtgccggtacagaaaacctctgccccttcagattcatcgttggtctcgtaatggccatcagggtaaatctgaacgattggcgacgattttttataatatccactgccgtctacgatatacatattggatgtcaacacccttaccgattcccatgcagaaccagtataccgatgtatcgccatgtgcgtcgcgccgtagttgggaaggactatcctttgtccaatatctccggaatacctggtggttataacgcttccaaatctgtctcctatgacagaagggggattttgactgttctggtcaaatctatacataccattaggcaaattggtgttagtgaaatttgtcatatacggaggatagtccgcgtatactgccccccatccggttgcctgctgaatccaggagcgagtcgcaactacgccggtgtcatatggtatcgtcacaatgtgctggttttcgccgttagcctgccgatacacaatgctaagcattga

SEQ ID NO: 3222 - protein, 169 aa, Citrobacter koseri
MILAGAGTENLCPFRFIVGLVMAIRVNLNDWRRFFIISTAVYDIHIGCQHPYRFPCRTSIPMYRHVRRAVVGKDYPLSNISGIPGGYNASKSVSYDRRGILTVLVKSIHTIRQIGVSEICHIRRIVRVYCPPSGCLLNPGASRNYAGVIWYRHNVLVFAVSLPIHNAKH

SEQ ID NO: 3223 - DNA, 660 bp, Morganella morganii
atgaaaaaaatagctaaagatattcaggatgaaattatttcggttgttaaggaaaagttcaataataatggttttttttgtaataaacaaaggttttttgaaaggggaagtgaagatggtaatataaatgtgtatgaaataattctttctaaaaaaaaggatttttattcattacatcttcgtttgtcattaaaaaatttaatcttgatgaaaggggttaatgaaattcttagaaaggttttaaatgaccctgaatatatttaccctagctcgtggggtgagattgaaatcaaaaaatccaacgagctgatgttatcaaatgatactatttcaatggttaccgattggcgtatttttaaaggtgataaatccctggaggaatttaataatgttttttctatttggatgtgtgcttttaaatgtctttcggaaattaaagatttacatgcacagcttttaaaaagtattgattatgcgttagattggtttactttggttggatctgatgagtggattattaataatagtttatatccatcgttatatctccttaaaatgatgggggataaagataagcttaatgaaaaatataattatgttttgtctttatcaagaaataaaaaagaagtggaactttatttcaaatatttgactttatga

SEQ ID NO: 3224 - protein, 219 aa, Morganella morganii
MKKIAKDIQDEIISVVKEKFNNNGFFCNKQRFFERGSEDGNINVYEIILSKKKDFYSLHLRLSLKNLILMKGVNEILRKVLNDPEYIYPSSWGEIEIKKSNELMLSNDTISMVTDWRIFKGDKSLEEFNNVFSIWMCAFKCLSEIKDLHAQLLKSIDYALDWFTLVGSDEWIINNSLYPSLYLLKMMGDKDKLNEKYNYVLSLSRNKKEVELYFKYLTL

SEQ ID NO: 3225 - DNA, 171 bp, Morganella morganii
atgctccgtatcaacgtactttttgacagaaaactcaaagacactttacctgccggtatttttaacgcacttcgtggtgagatcgaaaaacgcattcctcaaaaatatcaggtgtctgatatccggatcgcctggggattgatctcttccctttcttcagtaccggtataa

SEQ ID NO: 3226 - protein, 56 aa, Morganella morganii
MLRINVLFDRKLKDTLPAGIFNALRGEIEKRIPQKYQVSDIRIAWGLISSLSSVPV

SEQ ID NO: 3227 - DNA, 288 bp, Morganella morganii
atgatgaaaaataaagataactatgtaaatacctgtgtgggtcgtaagatcagggcaacaagagaatctgtcggaatgacagaaagccagctggctcaactcacaggactcagccaacaacagatatcgcgctatgagtccgggaaaacatcaatgaccatagatacggttgtgatgattgctcatgcgcttgatatttccttaagtaaactcttatctgattatcttcctgcctcagaagaagataactcagtaattctggtaatccctcacgataaaaacagatag

SEQ ID NO: 3228 - protein, 95 aa, Morganella morganii
MMKNKDNYVNTCVGRKIRATRESVGMTESQLAQLTGLSQQQISRYESGKTSMTIDTVVMIAHALDISLSKLLSDYLPASEEDNSVILVIPHDKNR

SEQ ID NO: 3229 - DNA, 321 bp, Morganella morganii
atgactgagagcggacagaaactcgtaatatatgccatggtatttattaacaataccctgaccatttcaaccgaagacagggaagatttctggcttgaaatatcccccgctatcggatggatactgtttcaaaaactacgtaatgaagctgagttttcagctaccggagcactgtttgcagccactgaattgcgtcaggcacatgacttaatcccttacccaagagttcaagcacgatgtgttttgtggcgtcagcgggaagctcttttaagcgctgcaaatagcctttcctttcttctggatcgggaacattccgggtaa

SEQ ID NO: 3230 - protein, 106 aa, Morganella morganii
MTESGQKLVIYAMVFINNTLTISTEDREDFWLEISPAIGWILFQKLRNEAEFSATGALFAATELRQAHDLIPYPRVQARCVLWRQREALLSAANSLSFLLDREHSG

SEQ ID NO: 3231 - DNA, 492 bp, Morganella morganii
atggctgacttcaacagagagttacaattggatatattgaaatgcttggtagatagctatccagatccatttaattcaaattacggatcttctttaattgttaactcttcaaatgaagatctaataaaaaatatttcttacctcaatgaagaggaattaattactggtggaatagattacgctttaagtggccctatattgacattaggtacagcaagagctaccaaaaacgctataaatttgcttagcgaagatggaagcatctcagcatcacttaaggttgttactgtcaaattccacgatgatacacttgccgcactccgtgaatttattacccggaatgttcccgatccagaagaaaggaaaggctatttgcagcgcttaaaagagcttcccgctgacgccacaaaacacatcgtgcttgaactcttgggtaagggattaagtcatgtgcctgacgcaattcagtggctgcaaacagtgctccggtag

SEQ ID NO: 3232 - protein, 163 aa, Morganella morganii
MADFNRELQLDILKCLVDSYPDPFNSNYGSSLIVNSSNEDLIKNISYLNEEELITGGIDYALSGPILTLGTARATKNAINLLSEDGSISASLKVVTVKFHDDTLAALREFITRNVPDPEERKGYLQRLKELPADATKHIVLELLGKGLSHVPDAIQWLQTVLR

SEQ ID NO: 3233 - DNA, 831 bp, Morganella morganii
atgaaagtattatataaaataattcgtattttttctttaatgatcttaatcgtgatcattctaggttatttaactattgagtataaaatatatgacaaaaataaaaatggcattgatattatcgcccatgcaggaggggaaatacatggaaatacatacactaattctcttgaggcactaaataaatcatactctgatggtgccagaatttttgaacttgacatcagccaaaccaaagatggtgcttacgttgcggtacatgattgggatggttggaaaaaaatgacttcttacacaggtgatttaccgccaatcttatcagattttaaaaaatataaaatacatgataagtattcaggattagactttgaagatattaataaatggttttcaactcatgaagatgcaattttagtcactgataaaattaatgttccatcagatatagttaatttatttgttgataaaaaaagattacgaatggaacttttttctaaagaagcaatcattgatgcatcacatatatttgatggaggaatggctagtttttatatactgacagatactaatgataactatttcaacaaaatagcactagtatctgcaatgtattttattaaggaaaacaaaatagaatatattgtttcaagtgcaccgatttcatataaagaaaaatttcatctcaagctactaagagcgttcggggttaatgtttacatgtacctatctggctcaaacgaagaaataaaaagtaaagtcacaacttacagaaattatattgatggtgtttactacaacgaaatccctcaggattctaatagtttgaaataa

SEQ ID NO: 3234 - protein, 276 aa, Morganella morganii
MKVLYKIIRIFSLMILIVIILGYLTIEYKIYDKNKNGIDIIAHAGGEIHGNTYTNSLEALNKSYSDGARIFELDISQTKDGAYVAVHDWDGWKKMTSYTGDLPPILSDFKKYKIHDKYSGLDFEDINKWFSTHEDAILVTDKINVPSDIVNLFVDKKRLRMELFSKEAIIDASHIFDGGMASFYILTDTNDNYFNKIALVSAMYFIKENKIEYIVSSAPISYKEKFHLKLLRAFGVNVYMYLSGSNEEIKSKVTTYRNYIDGVYYNEIPQDSNSLK

SEQ ID NO: 3235 - DNA, 147 bp, Morganella morganii
atggaagtatcaactgataaatcaggcaatccagtagttatcatctacactccgtttattaccagaggtaaaaaacggtgctacaaaaaagatggcggcaaatatcgcttagagatccctctgagtaagtacaagccacgtcaatag

SEQ ID NO: 3236 - protein, 48 aa, Morganella morganii
MEVSTDKSGNPVVIIYTPFITRGKKRCYKKDGGKYRLEIPLSKYKPRQ

SEQ ID NO: 3237 - DNA, 567 bp, Morganella morganii
atggctaagcctcgatttttagctaataaagtgtcccctctatcttctgagttaatatgggatcttgcatctacagtcagaaaaggcgcatgtgatgcgatggagatcaaatcggcgcgtattgatgtggtatcagctttagagtttctgcataacaacgaaactattactatgattatcgttgagccacatgagatgccatccgagtatgccgtcgcatcaccaacaaccatggagttatatatcagggaagatacctactgcaacgcagctaatggggttccgagagatagatttacactcgcccatgagttgggccatcttatcctgcatcaaaatgcacctcagcaatacgcatctgcccgctcgatcatatcaaaccatcattatacagaggatgctgaatggcaggctaatgagtttgcagcgatgttcctaatcgatagaacaaataagccagcaatacaaaccccacggctaatagccgaaacattcggagtgagctttgaggttgctggtattgtatggaggaaactccatgatggaggttatatgcagaggaactaa

SEQ ID NO: 3238 - protein, 188 aa, Morganella morganii
MAKPRFLANKVSPLSSELIWDLASTVRKGACDAMEIKSARIDVVSALEFLHNNETITMIIVEPHEMPSEYAVASPTTMELYIREDTYCNAANGVPRDRFTLAHELGHLILHQNAPQQYASARSIISNHHYTEDAEWQANEFAAMFLIDRTNKPAIQTPRLIAETFGVSFEVAGIVWRKLHDGGYMQRN

SEQ ID NO: 3239 - DNA, 351 bp, Morganella morganii
atgagtgtgacaccgttaggtaggctgttaaggaatatccgtaaaagcacacatgaactgctcaaagacatggcttcagcactcgacataagcgttgctcaattatcagccatagagttaggcaaacgcggtatgtcgccagatgttgccgaaaagctacttgctgcgtatgacgtccctgtaaatagagagcagctatccattctgattgattcatctcagcaggtttataaagaggattttaaagatgctaccgaaaaacaacgcgatgcctttgtattatttgcaaggaaatacaaagaattacctgaaacagaattgaataccatcttggaaaaattacaaaaataa

SEQ ID NO: 3240 - protein, 116 aa, Morganella morganii
MSVTPLGRLLRNIRKSTHELLKDMASALDISVAQLSAIELGKRGMSPDVAEKLLAAYDVPVNREQLSILIDSSQQVYKEDFKDATEKQRDAFVLFARKYKELPETELNTILEKLQK

SEQ ID NO: 3241 - DNA, 540 bp, Morganella morganii
ttgtttgccgttttcggtttcctgagattgcagttttgctgtcaggcgctgtttttccgcatcccgctgagccagctgtttttccagctccgtcagcttctgcgtgatttttgccataccagcatttttatcctgcaacagcgcgagatttttctctgcctgagcattatcggatttcagcccggtaatctgcttttccagtgccgctttttctgccgccagtgctgccaggtcttttttcagcgcgtcgctctgtttgctgttttcaccggtcagcgcgaggattttgtcattcagctgctgtttttccgcatcccgctgagccagctgtttttccagttccgtcagcttctgcgtgatttttgccatatcggcatttttgctttccagcagcgcgagatttttatctgccagcgctttttctttattcagcgccgcaatctgtttttcaagatcggctttttcggctgtcagagccgtgacctgaccttccgcctgaccaaaacgggccaggttttcgcttatctgctgattgagtga

SEQ ID NO: 3242 - protein, 179 aa, Morganella morganii
MFAVFGFLRLQFCCQALFFRIPLSQLFFQLRQLLRDFCHTSIFILQQREIFLCLSIIGFQPGNLLFQCRFFCRQCCQVFFQRVALFAVFTGQREDFVIQLLFFRIPLSQLFFQFRQLLRDFCHIGIFAFQQREIFICQRFFFIQRRNLFFKIGFFGCQSRDLTFRLTKTGQVFAYLLIE

SEQ ID NO: 3243 - DNA, 459 bp, Morganella morganii
atggctgcaaaagcgaaaaacggagtgattggttgcggtccacacataccctggtccgcgaaaggagagcagctactctttaaagccttgacgtacaaccagtggcttttggtgggccgcaagacgttcgaatctatgggagcactccctaataggaaatacgcggtcgttactcgctcagcctggacggccgataatgacaacgtaatagtattcccgtcgatcgaagaggccatgtacgggctggctgaactcaccgatcacgttatagtgtctggtggcggggagatttacagagaaacattgcccatggcctctacgctccatatatcgacgattgatattgagccggaaggagatgttttctttccgaatattcccaataccttcgaagttgtttttgagcaacactttagctcaaacattaactattgctatcaaatttggcaaaagggttaa

SEQ ID NO: 3244 - protein, 152 aa, Morganella morganii
MAAKAKNGVIGCGPHIPWSAKGEQLLFKALTYNQWLLVGRKTFESMGALPNRKYAVVTRSAWTADNDNVIVFPSIEEAMYGLAELTDHVIVSGGGEIYRETLPMASTLHISTIDIEPEGDVFFPNIPNTFEVVFEQHFSSNINYCYQIWQKG

SEQ ID NO: 3245 - DNA, 867 bp, Morganella morganii
atgaaaaagatacttaagtgggttggcattatttttattatcatcatcgtgattggcgttattgctggtaaggatgacaagaaagaggcggcaactgatagcaacccgcagccatccgaggtagcgggtgacgaaccttctgtcgcagttaataaaaacaatgagagcaaggcatcatcaataagtttaaccgaagatgagatttcagctgtaaaagctctaattagagatgatgtgacgaataattttgatggtgggaaaagtgcatatgattacgggtacatgctagtaaccgcaaaagaattattcagagtgtactctgctaacgaagctcgtggcgacaagacatacaaagggaagaaaataattatatcgggcgttgttgatagcatatcgtcatcaataggcgatataccggtggttagcttgaaaacgggtgaaatgtttcaaacagtgagcgtgaactttgcaagaaaatatcgtgacaccgccatcgaactgaataaaaaccaaaaagtatcatttgcttgtgttggcgggactgtagtgcttgggatgccgtctgttcgtgattgcgtgcctttaaatgtagcaatagatgaaatcgttgatgataaaatgaaggatgtcgaaaatgcgttgagaaatcacagaacaacggacgataagaatgctttgagtatggttgttttagccaaagcggcgagcaaggctacggataactttaaatcatgcaaacctgatgatattaactgcatatctggcaaggcaaaatcaatacctaaagcaaaaggtgggtttgatgctttgatgaaggagtcggcggaggaaatgggtattacgctaccacctaaaggtgaaaaataa

SEQ ID NO: 3246 - protein, 288 aa, Morganella morganii
MKKILKWVGIIFIIIIVIGVIAGKDDKKEAATDSNPQPSEVAGDEPSVAVNKNNESKASSISLTEDEISAVKALIRDDVTNNFDGGKSAYDYGYMLVTAKELFRVYSANEARGDKTYKGKKIIISGVVDSISSSIGDIPVVSLKTGEMFQTVSVNFARKYRDTAIELNKNQKVSFACVGGTVVLGMPSVRDCVPLNVAIDEIVDDKMKDVENALRNHRTTDDKNALSMVVLAKAASKATDNFKSCKPDDINCISGKAKSIPKAKGGFDALMKESAEEMGITLPPKGEK

SEQ ID NO: 3247 - DNA, 498 bp, Morganella morganii
atgagtaacaattcaactgacgcaatgaagcagcctgaatttgtgttcacggctcaaccggtttgttttgttcgtcaggtcactccgttaacgcctcaggttgatatttcccgcgtccggacagatgaattctgtatgccggtatatgcagccatcagtgatgatgatatccggctgacggatggatacattgcagagctgcaggctcagggtgtggataagctggctgattctattcagggtacctacgatgccctgacgaaataccattctgctggtggcattatcatgactctgcttggcgaaatcagccgatgccggtcatttgctgcaaaattgcgatccccttccgttcagttctgcgattgtgacaactgcacccgcactaccggcacgaatgctttgtgtgaatcggtcatgaccgggcatacaaacctgtgtgataactgccgaaacaagctgaacgatggcggtctgcgtcagggagaatcatcatga

SEQ ID NO: 3248 - protein, 165 aa, Morganella morganii
MSNNSTDAMKQPEFVFTAQPVCFVRQVTPLTPQVDISRVRTDEFCMPVYAAISDDDIRLTDGYIAELQAQGVDKLADSIQGTYDALTKYHSAGGIIMTLLGEISRCRSFAAKLRSPSVQFCDCDNCTRTTGTNALCESVMTGHTNLCDNCRNKLNDGGLRQGESS

SEQ ID NO: 3249 - DNA, 1857 bp, Morganella morganii
atggtttattcgataaaacacggcattgtcaaacaggacgggtgtccaatcgatcccgaattgctttttagacttggcaaatttgtagcggaggatagagacagcgaaactactttggtcatatcaaaacgtccagctgaactgaaattccggttcagccatgaaccatcgccttcattcagattgtttttcagggaggcagagcttactcctgatcaggtgaattctttggtggaatacggttattttattgctgatagcaaacgggtgtattttgtcagtgacagacttaaggatttctccgtatctgcctgcaacaagctgtcactccccggattgctcaaactacttcgcaaactatacagtgatggacttattgacgctcttccatcatcccttgtagagaagctcagggcacagcagcagaaaatatcactccacgataaactctttgtcagggaactctacccctaccagaatgaaggggttgcatggctgaccttctgtgcatccaacggtgtgggtaccatccttgccgacgatatgggtctgggtaagactgctcaagtgattgccctgtgctgcgatgttctcgaacacaatcctgaaggtaggatccttattgttgttcccaatcctctgctagccaactggatcagagaattttctttttttgctccttcactcagaccttttctccattatgggcagaacaggagcggtctcagttcagatctttccgagcacaatataattgttactccctataccgtattgagttccgatatttcgatgctggaagaaatcctgtttgaccttgtactttatgatgaagccagtatgctgaaaaatcctcggtcgggaagatctcttgcagcaagacgtcttgattctgttgcttccgttgcaatgtcgggaactcctgtcgagaactgccttcttgacgtctgggctctctgtgacctggttttccccggttttctcggaaacgagcaggatttcagatctcgttatgtccatcgcgaactgtccaaaacactcaatacggatctacacgggcttgaaaacagtctccgacagataaccctgcgacgtatgaaaaaagatgtcctgacacagctgcctgaaaaaatggatattcacagagctgttaccgcaggagacaaggaacgaaatacctatgaatccatcattgaggagatgcagctggatgcggcaaacggaggaagaggtatgctacccctgatcaacaaactacagcagtttactgcacatccggctcttctagatccgagcataccccatgatgtcaaatccctatgcctccacagcgccaaattcgaactactgatgatggaactggacggcatagaacaatccggagaaaaagtcatcatctttgccacattccagaaggcactcgatctgctaggtgctgcagttagggaacgttatggcatcaccccaggagtgattgacggacggactccaaatgaacaacggcagccgctgattgacagattttccaaatcgtctggattcgatctgctgctgttgcaccctaaaacagccggtatggggctaaatatcaccgctgccaccaatgtaatccactattgccgacagtggaatccggcccttgaagcacaggctacggcaagagcctggagaaatggacagaaatctgtggttagtgtttattacatgtattacgcggatactgtcgaagaaatgatcgatgaacggatacgaatgaaacagaagcttagcgagcaggttgttgcagtggccgattataaagaaacagacaaacagctgatgctggaatatttggaatcgataaaaaatgacagataa

SEQ ID NO: 3250 - protein, 618 aa, Morganella morganii
MVYSIKHGIVKQDGCPIDPELLFRLGKFVAEDRDSETTLVISKRPAELKFRFSHEPSPSFRLFFREAELTPDQVNSLVEYGYFIADSKRVYFVSDRLKDFSVSACNKLSLPGLLKLLRKLYSDGLIDALPSSLVEKLRAQQQKISLHDKLFVRELYPYQNEGVAWLTFCASNGVGTILADDMGLGKTAQVIALCCDVLEHNPEGRILIVVPNPLLANWIREFSFFAPSLRPFLHYGQNRSGLSSDLSEHNIIVTPYTVLSSDISMLEEILFDLVLYDEASMLKNPRSGRSLAARRLDSVASVAMSGTPVENCLLDVWALCDLVFPGFLGNEQDFRSRYVHRELSKTLNTDLHGLENSLRQITLRRMKKDVLTQLPEKMDIHRAVTAGDKERNTYESIIEEMQLDAANGGRGMLPLINKLQQFTAHPALLDPSIPHDVKSLCLHSAKFELLMMELDGIEQSGEKVIIFATFQKALDLLGAAVRERYGITPGVIDGRTPNEQRQPLIDRFSKSSGFDLLLLHPKTAGMGLNITAATNVIHYCRQWNPALEAQATARAWRNGQKSVVSVYYMYYADTVEEMIDERIRMKQKLSEQVVAVADYKETDKQLMLEYLESIKNDR

SEQ ID NO: 3251 - DNA, 336 bp, Morganella morganii
atgaccagaaaagcacacatttttaaaatactgccggagtactttgaaaaagttcggacaggggaaaagaaagctgaattcagacgcgctgatgacagagtctttaatattagcgacgtagttttgttacgtgaaatagaaccatcaatcggatttagctccaacacaatgaaacctttctgtcgtgggactaaatatacgggacgtgcattaatttgtgatatcaccgatataacgatggttaattctgtttatccggaactaaaagaattgcctgatttcgtcatgctttctatttccgttacgcatttcagtgaggatacaatatcatggtag

SEQ ID NO: 3252 - protein, 111 aa, Morganella morganii
MTRKAHIFKILPEYFEKVRTGEKKAEFRRADDRVFNISDVVLLREIEPSIGFSSNTMKPFCRGTKYTGRALICDITDITMVNSVYPELKELPDFVMLSISVTHFSEDTISW

SEQ ID NO: 3253 - DNA, 723 bp, Morganella morganii
atgaatgccaaattgaacaagttcatgcaagtggcgtttaataactccagcgccaatgaagccgcgcaggcattaaaaatgctggccggtgcgatgcaagagcagggcgtaaacccagccagcctactgcaaataaagagcgactccgccagcagcgagttgctagcagagttacgtcgtgagctttccattctcaaaatagattacaacggtatggtagaccgctataactcggttgtacgcgctcataaggctcgcggcgagaagattgcagccctagagctgttattatccgaaaatagtattgcagcggcgcggagagacgcagagccacagcaggaagaatctgctgtatcgaacgggtctattgctgatcaaatccgcaaaatgaaaagtggcactgcggatctggttcaccacccgaaagcaaaggccactcgacgcctgtctgatgatttggctgcacagaatgagcagtttaaagggcactggaactaccaagagcccacccagagcagcaagtatggcgatgcacattatagctataactacggtgataccctgcatatgtggatcagtaaatcggaaaccagcgatgggttttcagtaagtctcgctacgtttggcccgcgtggaggcagaaaggacagtaattataaatcttttagcgacgaggcttcattgatggactggttactcaaagcatggggggtgttgaagtga

SEQ ID NO: 3254 - protein, 240 aa, Morganella morganii
MNAKLNKFMQVAFNNSSANEAAQALKMLAGAMQEQGVNPASLLQIKSDSASSELLAELRRELSILKIDYNGMVDRYNSVVRAHKARGEKIAALELLLSENSIAAARRDAEPQQEESAVSNGSIADQIRKMKSGTADLVHHPKAKATRRLSDDLAAQNEQFKGHWNYQEPTQSSKYGDAHYSYNYGDTLHMWISKSETSDGFSVSLATFGPRGGRKDSNYKSFSDEASLMDWLLKAWGVLK

SEQ ID NO: 3255 - DNA, 624 bp, Morganella morganii
atgctatcagaaaataaaaaaaataatgcagccgcaaataataatttctacaaaattataaattggaatatacatgttaagctctttaggctttactttaaaaatatctgtgagcaagctaaaaaagatggattttttgaagctctttatgtttcacaagatgataataatagacaaatacaattattctcaggacaacatccaataagaacacacacaaaaactcataatacccctggtcaaaaaataaacatagaacatggggctgctttagttctatcacaatcagatcttggtgatgtagcaattatactctatccttatacttctgagaatttaactcgtatccaaccaaatattatttggagtatatattcagatccaaccaagattacagattcagtccttaaagctgcaactcaagatttctttcgttatattcgagtatctagtgctattttttcagaaagtaaactagaccaatatcgtatacaatacttagagctaaagagtaaaaaatacacagaaaacaaaagcctagctaaattcatatattctgattggttatggaaattgcttggcggaattagctcaattataaccatatatgcaatatttaagtaa

SEQ ID NO: 3256 - protein, 207 aa, Morganella morganii
MLSENKKNNAAANNNFYKIINWNIHVKLFRLYFKNICEQAKKDGFFEALYVSQDDNNRQIQLFSGQHPIRTHTKTHNTPGQKINIEHGAALVLSQSDLGDVAIILYPYTSENLTRIQPNIIWSIYSDPTKITDSVLKAATQDFFRYIRVSSAIFSESKLDQYRIQYLELKSKKYTENKSLAKFIYSDWLWKLLGGISSIITIYAIFK

SEQ ID NO: 3257 - DNA, 960 bp, Morganella morganii
atgaagctatatgtaataggtaatggctttgatgttcatcatggccttgacactaggtatacatcttttgggctttatctcaaaaataactactgggaaacttatgagctattgctcgactattacgggtttgctgacttagacccagattttccaacaacaatgtcagaccctttatggtctgaatttgaaacgagtatgtcactgcttgataaagattcagttttggaagcaaacatggatgcaatgccaaactattcttcagatgactttcgagacagagaccgatacacgcttgaaattgagatggagcgaatacttggccttctaaccactgaactgtataaagcattcaaagagttcattttggctgtacagtttcctcagtttgatcacagccgatcagtaaacattgatagagacgctgtttacctcacattcaactacacagatacgctttctcaatactacgcaatccccgataagaacgtgctattcattcacgggaaagccgatgaacatattgatgagttaattctcggtcatggtgttgatcctgaaaatttcaaagagaaacctgccgaaccaccatcaggattgagtgatgaagatttagaacgttggatggaatatcaatctgatcaatatgactactcattcgagcgtggtaaggatgcggtcaatcagtatttctcagcaactttcaagggaacagaccagatcataaaaaacaatgaagacttctttgcaaagctcggcaatattgatgaagtatatgttctcggtcactcattagctgacgtagatttaccctacttcaagaagttggagcaatcagtcagacctgatgctaaatgggttgtaactttttatgaccctgatgatgagaaagtacacggtgaaactctaacaggacttggaatagccaacgttgcagttgtcagaatggaacagatctaa

SEQ ID NO: 3258 - protein, 319 aa, Morganella morganii
MKLYVIGNGFDVHHGLDTRYTSFGLYLKNNYWETYELLLDYYGFADLDPDFPTTMSDPLWSEFETSMSLLDKDSVLEANMDAMPNYSSDDFRDRDRYTLEIEMERILGLLTTELYKAFKEFILAVQFPQFDHSRSVNIDRDAVYLTFNYTDTLSQYYAIPDKNVLFIHGKADEHIDELILGHGVDPENFKEKPAEPPSGLSDEDLERWMEYQSDQYDYSFERGKDAVNQYFSATFKGTDQIIKNNEDFFAKLGNIDEVYVLGHSLADVDLPYFKKLEQSVRPDAKWVVTFYDPDDEKVHGETLTGLGIANVAVVRMEQI

SEQ ID NO: 3259 - DNA, 501 bp, Salmonella enterica
atgctaatcatcttcagtggtttgccgggaagtgggaagagcacgatcgctcaggctttggcaaagcagttaaacgctttttacttacgaatcgacacaattgagcaagccatactcaaagccgaagaagatgactgtaaaatgggccctgctggttattttgtcgcatactcactcgccagggataatttgcaattgggagcaacagtaatcacggactcagtgaacccactggcgttaacccgtgatgcctatcgaaaaatcgctttatcggcaagaacccgctttttagaaatagagattgtatgctccgatgagatcgaacatcgtaagcgagtagaaaccagagtgtctgaagtagaaggattaaccctgccagactggaaatatgtcacagatttgacttatgaaccatggcacagagaacacctcattttagacacatgcaatttatccagcgatgaatgtgtcttgcggatcatcgacgttctttcccaatga

SEQ ID NO: 3260 - protein, 166 aa, Salmonella enterica
MLIIFSGLPGSGKSTIAQALAKQLNAFYLRIDTIEQAILKAEEDDCKMGPAGYFVAYSLARDNLQLGATVITDSVNPLALTRDAYRKIALSARTRFLEIEIVCSDEIEHRKRVETRVSEVEGLTLPDWKYVTDLTYEPWHREHLILDTCNLSSDECVLRIIDVLSQ

SEQ ID NO: 3261 - DNA, 435 bp, Citrobacter freundii
atgaaaaaagaccttttactggaacctcgcaatctcgctgcggctgtaagagcgcgtcttgatgagattgaaggtttgttagacaagggtattagtaggcaagaaattgctcaacttcttgatagtgaatacagcttttctgtgactgtgaaagcgttagatatggctttgtaccgggcaagattgaaacgcaaaaaaggtggattgcacaatccagaaagtacggtaaatactggatcgcacaatccaaaagagcaggagaaagcggaaccggtggaaactggattgcacaatccagagccagaaaaattagttgaggatatgggcgggaacaaagaatttttatccgataccgattttaaaaaaattggtgatgaggcaaagaaagtcgcaacctcattcaaaggtagcgtaggtaataagaaaggtttctaa

SEQ ID NO: 3262 - protein, 144 aa, Citrobacter freundii
MKKDLLLEPRNLAAAVRARLDEIEGLLDKGISRQEIAQLLDSEYSFSVTVKALDMALYRARLKRKKGGLHNPESTVNTGSHNPKEQEKAEPVETGLHNPEPEKLVEDMGGNKEFLSDTDFKKIGDEAKKVATSFKGSVGNKKGF

SEQ ID NO: 3263 - DNA, 429 bp, Morganella morganii
atgacggagttcttcgacacgggcctgctgctgggccagcagccgctcgcgcaagatcgtcggcggtgtgggtggcatgccgccgtcgaatgggctttcccggcgcagatgggcgatgtgggcggcgcggatcatgatcttggacggcacacaaccgacgttgacgcaggtgccgccgatggtgccgcgctcaatcagcgtgacctgcgcgccttgctcgacggccttcagtgctgccgccatcgcggctccaccgctaccaatgacgacgacctgcaacgggcgttcgttgccactgggcttatcagcggcccctatccagccgcgcatcttgtcgagcaggccggcgcggttgtccgtcggtggcgcatcggcaagcgttgcctcgtagcccagtccggccacggcggtagtcagcgcatccgatga

SEQ ID NO: 3264 - protein, 142 aa, Morganella morganii
MTEFFDTGLLLGQQPLAQDRRRCGWHAAVEWAFPAQMGDVGGADHDLGRHTTDVDAGAADGAALNQRDLRALLDGLQCCRHRGSTATNDDDLQRAFVATGLISGPYPAAHLVEQAGAVVRRWRIGKRCLVAQSGHGGSQRIR

SEQ ID NO: 3265 - DNA, 237 bp, Morganella morganii
atgaacaaccccgagcgcttgccgtccgagacgcacaaaccgatcaccggctacctgtggggcggactggctgtgctgacttgcccctgccacctgcccatcctcgctgtcgtgctggccggcacaaccgccggtgctttcctcggcgagcattgggtcatcgcggcgctcggtttgaccggcctgttccttctgtccctgtcgcgggcgttgcgggcattcagggaaagagaatga

SEQ ID NO: 3266 - protein, 78 aa, Morganella morganii
MNNPERLPSETHKPITGYLWGGLAVLTCPCHLPILAVVLAGTTAGAFLGEHWVIAALGLTGLFLLSLSRALRAFRERE

SEQ ID NO: 3267 - DNA, 798 bp, Morganella morganii
atgagtgaaaaagtgcccgccgagatttcggtgcaactatcacaagcactcaacgtcatcgggcgccacttggagtcgacgttgctggccgtgcatttgtacggctccgcactggatggcggattgaaaccgtacagtgatattgatttgctggtgactgtagctgcaccgctcaatgatgccgtgcggcaagccctgctcgtcgatctcttggaggtttcagcttcccctggccaaaacaaggcactccgcgccttggaagtgaccatcgtcgtgcacagtgacatcgtaccttggcgttatccggccaggcgggaactgcagttcggagagtggcagcgcaaagacatccttgcgggcatcttcgagcccgccacaaccgattctgacttggcgattctgctaacaaaggcaaagcaacatagcgtcgtcttggcaggttcagcagcgaaggatctcttcagctcagtcccagaaagcgatctattcaaggcactggccgatactctgaagctatggaactcgccgccagattgggcgggcgatgagcggaatgtagtgcttactttgtctcgtatctggtacaccgcagcaaccggcaagatcgcgccaaaggatgttgctgccacttgggcaatggcacgcttgccagctcaacatcagcccatcctgttgaatgccaagcgggcttatcttgggcaagaagaagattatttgcccgctcgtgcggatcaggtggcggcgctcattaaattcgtgaagtatgaagcagttaaactgcttggtgccagccaatga

SEQ ID NO: 3268 - protein, 265 aa, Morganella morganii
MSEKVPAEISVQLSQALNVIGRHLESTLLAVHLYGSALDGGLKPYSDIDLLVTVAAPLNDAVRQALLVDLLEVSASPGQNKALRALEVTIVVHSDIVPWRYPARRELQFGEWQRKDILAGIFEPATTDSDLAILLTKAKQHSVVLAGSAAKDLFSSVPESDLFKALADTLKLWNSPPDWAGDERNVVLTLSRIWYTAATGKIAPKDVAATWAMARLPAQHQPILLNAKRAYLGQEEDYLPARADQVAALIKFVKYEAVKLLGASQ

SEQ ID NO: 3269 - DNA, 1152 bp, Morganella morganii
atgtatggctacccaataactgaagaagagtatttcattctatatgatgaaagtaataatgatagattaattaggatcgaaaatggcaagttaaatacggagatacatacagataagaaatataaacctatttttatcctcggaggagtggcgtataggaaaaataaaaacgtgaattttgaatcattaaggaaagtcctcaatcttcaggataacattatagaaatgaaattcacacatattgctagaggttcatttgatggagttttgcactctattaatttaaaaaaatttttaacttgggttttggaaagtgatttatatattcattattcagcattgaacactctttattggtcatctgtagatattattgatgatatatatttgttcttaagggacagaggtattagggtgggatttaaaaatgctttcaatccattttatgacgatagcgacatgcggcttaatattgattatcttaaaaatgctctctacacatacattcaaattgataaggatatttttttatctttcttatcttcttataactacccagatatcccagaaggaagtgaaggtaaatttattagaggcttatataaaataataagaaataaagttgacttcatgcggcgagattcaggtgactcgatagaatttcattggctagcatcactattagatgtactgaaaaaatgtaaggatatgtctgatttaactttaacaaaaaataatcaaccaaatattttaatcaagagttttgctgatttttattttaataggctggtttcttttccaaaatcagaacatctatttgatgaggaaataactattgcagatgaactaaatagatttgtgaatacatcaaagcaaggggaggttgggaattacagctttaaaaaatcagaatattatccaatacaagtagctgatgttgttgctggtttgttcaggtcaatttttatttttctggatgataatagctttgatgaaattaaggagttcaaaagaaatattaatgttagacaaaaagaatgcttagacctcttgaaattagtaattaacaaatcagataatgagtctcaaggttttttttttagaattgtaccgccagcaataaatgagaaaaatagaatattattcgaataa

SEQ ID NO: 3270 - protein, 383 aa, Morganella morganii
MYGYPITEEEYFILYDESNNDRLIRIENGKLNTEIHTDKKYKPIFILGGVAYRKNKNVNFESLRKVLNLQDNIIEMKFTHIARGSFDGVLHSINLKKFLTWVLESDLYIHYSALNTLYWSSVDIIDDIYLFLRDRGIRVGFKNAFNPFYDDSDMRLNIDYLKNALYTYIQIDKDIFLSFLSSYNYPDIPEGSEGKFIRGLYKIIRNKVDFMRRDSGDSIEFHWLASLLDVLKKCKDMSDLTLTKNNQPNILIKSFADFYFNRLVSFPKSEHLFDEEITIADELNRFVNTSKQGEVGNYSFKKSEYYPIQVADVVAGLFRSIFIFLDDNSFDEIKEFKRNINVRQKECLDLLKLVINKSDNESQGFFFRIVPPAINEKNRILFE

SEQ ID NO: 3271 - DNA, 372 bp, Morganella morganii
atgaccaatactagccctacacccaaatacagctctattcatctgaccatacccgccgacttgaaagagcaatttctgttagaatgtaaacaagctgacgttgatgcaggtgaattaaggtgcttttcaaaaaatccacccagcattataaatgtgctatatgagacagcagcgaagcttgagatggctaaaaaatttataaggatattaaaaatgtttggtcaacaacgtaacgttagaattgaagtttatactgacaaaaagattgtcgatttaagaggttattcagaagaagaagccatacgcttaatcgaagcaagcgactcaattcgtattgctcatacagaagataatgaagaacaaaaaaagtaa

SEQ ID NO: 3272 - protein, 123 aa, Morganella morganii
MTNTSPTPKYSSIHLTIPADLKEQFLLECKQADVDAGELRCFSKNPPSIINVLYETAAKLEMAKKFIRILKMFGQQRNVRIEVYTDKKIVDLRGYSEEEAIRLIEASDSIRIAHTEDNEEQKK

SEQ ID NO: 3273 - DNA, 663 bp, Morganella morganii
atgaaaatagaaactctaaaaaaaataaaacccaataacattacagatgaaatttattcagaaatatctaaattaggtttgtcaaataagttaataaaaaaatgcagctctttattaataatgcaattagattatatcattaaaaataatttagagaatgtatttaaaatcatacatgaaataaatagtatggaaaatgatgataaatcctctagaactaagcctgaaacaccgtttagaaaaaatcatttaaaagggttgtatcataagcactatgaaggaacagggcttgaaagcctagaggttaatattagaaaccacttgaaaaaaaataacatacaaactgatttcggaatctggcttaaggattatttaaaaaaaaacaaagaaaaaaacacatttcttgatgatatggattttttaaatatatcaagaaaattttccgaagcaattatatatgatagttttaataaaaaagcttccagtaaaacgttaactggtcattggataatttatgcgaaaaataataacaataattattatctatgtatttcaagacattctaactctataagtgatgatttagttataagaaataaaatagatgaaacatgtataagtcagttcccattccttaaagatatactatctattcatagttaa

SEQ ID NO: 3274 - protein, 220 aa, Morganella morganii
MKIETLKKIKPNNITDEIYSEISKLGLSNKLIKKCSSLLIMQLDYIIKNNLENVFKIIHEINSMENDDKSSRTKPETPFRKNHLKGLYHKHYEGTGLESLEVNIRNHLKKNNIQTDFGIWLKDYLKKNKEKNTFLDDMDFLNISRKFSEAIIYDSFNKKASSKTLTGHWIIYAKNNNNNYYLCISRHSNSISDDLVIRNKIDETCISQFPFLKDILSIHS

SEQ ID NO: 3275 - DNA, 864 bp, Morganella morganii
atggttgaacgcatcaaaagtcctatagttggggcttttgtattttcttggttattttttaattggaaaattattttaatattattatttagtgatagcaaagtagaagataaaatagacgttatgtctaaatatataacactagagtcatttttatatcctgctattttttcagttgtttatagcttggctattcctgttatttcagtagttgttgaatggtgccttaaaaaagtatcaataaattctatagcattagcatatgctaaaaaaaatattgggttgatagagaaaaaagatagtgagaaattaagagctgatgctgatattgcatatgaacgtcaaaaaacgggagctgaaaaagaaatacaggagatgcgggagagtatcactgcatcaaaagaaagagaaggcatcctcgttaaggaaaaagaagatgccataagtgaaatgaataaagtattgaaagatatgaagtcaataagaaaagagtcggagttattatttatagaactaggtgaagtaaagaaagaaaatggcattttaaaagaacaaattaaagagaaaaacaattatcttgagagtgtcgaaaatatgaggttaataaatggtgagtattctaatgtgtattctgcaagttataaaaatgatataattgatgctattggcgttgatgggagcgtaaatatggctgattttatgaatgatgtctatttaaaagataaggttatgtcaattccaaatataaaagagattattccatcaaataaatcaaatgtaataaaacatataactttcaaacaatttcttgatgccctcaactttgagcaattaagtagctttagaaataccgtgcttttttaa

SEQ ID NO: 3276 - protein, 287 aa, Morganella morganii
MVERIKSPIVGAFVFSWLFFNWKIILILLFSDSKVEDKIDVMSKYITLESFLYPAIFSVVYSLAIPVISVVVEWCLKKVSINSIALAYAKKNIGLIEKKDSEKLRADADIAYERQKTGAEKEIQEMRESITASKEREGILVKEKEDAISEMNKVLKDMKSIRKESELLFIELGEVKKENGILKEQIKEKNNYLESVENMRLINGEYSNVYSASYKNDIIDAIGVDGSVNMADFMNDVYLKDKVMSIPNIKEIIPSNKSNVIKHITFKQFLDALNFEQLSSFRNTVLF

SEQ ID NO: 3277 - DNA, 819 bp, Morganella morganii
atgagtaaaaattattactttaactttataaaaaaaattatagtatttttgattactatcgctttatttactcccttaatattattttttataaaatttaatattgatgatttggattcgatagatagatttggtttatttggttcatatcttagtggggcaaccagcctcttgctaatgatattaactgcaatatctatatatgtactttataaaaccttcacattaacaaaaaaatataacgaaaaacaaattgaatttagtaacacacaaataaaaatatctaattttactcttttagttgatttgttatccgaaagaataggattaacaaaaataaaatatgaggaatctgatgacaatcttgggttaacagactatttcatatccctaatatcattatcaaaagaaaaccatgcatacatgaaagataaagatgatagtaggtacgctatttctaactatagtaaattgttaagtttgttcttagaaaacaatgaagtagttttatctgatgaattcatattaaaaatgatgcttgcatcaaaaaatagcaattattttaaatatatagtaaatgaattctcaccaataattaaaatcatcatagatataatcatgagtaataatactaataaagaattaaaggatatttttttgattatgttgaaaaacaaagttcacaatgacattattttatggggcgttatttatagttcatcagatatagaaaaaatatgcagctatttaggcactatatttactattcctaaagcaataggtttagaattgaagcgatatatggaaagtgatgactaa

SEQ ID NO: 3278 - protein, 272 aa, Morganella morganii
MSKNYYFNFIKKIIVFLITIALFTPLILFFIKFNIDDLDSIDRFGLFGSYLSGATSLLLMILTAISIYVLYKTFTLTKKYNEKQIEFSNTQIKISNFTLLVDLLSERIGLTKIKYEESDDNLGLTDYFISLISLSKENHAYMKDKDDSRYAISNYSKLLSLFLENNEVVLSDEFILKMMLASKNSNYFKYIVNEFSPIIKIIIDIIMSNNTNKELKDIFLIMLKNKVHNDIILWGVIYSSSDIEKICSYLGTIFTIPKAIGLELKRYMESDD

SEQ ID NO: 3279 - DNA, 1092 bp, Morganella morganii
atgaaattatctatcgacatttctgaacttattcagttaggaagaaaaatgttgccggaaggcgttgattttttccttgacgaaacgcctgtagtttttgatccaattgatatcgaactttctgcaggtaaagaagttagaattgaagatcttgatcccggcagtggtcttatttcctaccaagggagacaggttcttttgtatattagagaccataccggacgttatgatgcggctattgaagatggagagaaagggaagcgatttcatattgcctggtgtagaacattagatgacatgcgccaaaaaaatcgatttgaacggtatcatgcaacaaatcgtgttgatggcttatttgaaattgatgatgggctcggtcggagccaagatgtcgctcttaaagtttgtatgaactgcctagaacgccttaattacaaaggaagtatagataaacaacagaaaagagtaatatttaaatcattttctttgaatgaatttttttcagattatagtacctgctttcgccatatgcctaaaggaatctatgataaattaaatagcggctatgtagaaaattggaaggatatatccagaactactcgagaacaagctaactacaaatgtaatgattgtggtgtgaatttaatgtccatgaaaagtctatgcgatgttcaccacaaaaatggtattaaatatgataactcagctgaaaatctactcgtcttgtgtaaagattgccatcgaaagcaacctttgcacgaaggaatatttgtcactcaggctgacatggcaatcattcaacgcttacgttcccaacaagggcttttgaaggctgaatcctggaaggatatttacgatctgacagatccatcgattcatggtgatataaacattatgcaacacaaaggatacccgccaccagttccgggattagacttacaaaacgcggagcatgaaattattgctaccgtagaagctgcctggccggtttcaaaaattgcagtaaatttaacaccggtaaaagtcgatggttggaaagtattctccgtgggagaactcgttaaagaaatacaatctggggttattttctaa

SEQ ID NO: 3280 - protein, 363 aa, Morganella morganii
MKLSIDISELIQLGRKMLPEGVDFFLDETPVVFDPIDIELSAGKEVRIEDLDPGSGLISYQGRQVLLYIRDHTGRYDAAIEDGEKGKRFHIAWCRTLDDMRQKNRFERYHATNRVDGLFEIDDGLGRSQDVALKVCMNCLERLNYKGSIDKQQKRVIFKSFSLNEFFSDYSTCFRHMPKGIYDKLNSGYVENWKDISRTTREQANYKCNDCGVNLMSMKSLCDVHHKNGIKYDNSAENLLVLCKDCHRKQPLHEGIFVTQADMAIIQRLRSQQGLLKAESWKDIYDLTDPSIHGDINIMQHKGYPPPVPGLDLQNAEHEIIATVEAAWPVSKIAVNLTPVKVDGWKVFSVGELVKEIQSGVIF

SEQ ID NO: 3281 - DNA, 708 bp, Morganella morganii
atggataaaatccttggcaagcaggcccctaaaaaagatcaagataatgaacattgggtttcaatgtcagatttaatggcaggtctgatgatggtatttatgtttatttctatcgcctacatgcactatgtgcgtattgaaaaagaaaaaattaaagaagtggctgtcgcctatgaaaatgctcaacttcaactctataatgcactagaaactgagtttacaaaggatttgccagcttgggatgctgaaattgacaaacaaactcttgaggtccgttttaaatcacccgatgtcttatttggtttaggtagcacagagcttaagccaaaatttaaacagatccttgataatttcttccctcgctaccttaaagttcttgataactaccaggaacatattactgaagtacgtattgagggacatacaagtactgactggactggagcgtccaattctgacatggcctattttaataacatggaactctcgcaagggcgaacacgagcagtactgcagtatgtctatggtttaaaagaaagcgcagcacaccagaagtgggtaaaaagtaaatttgctgccgttggatattcttccgcacaccctattcttgataaatctggtaaagaagatcccaatcgctctcgccgagtaacatttaaagttgtaacaaatgccgagttgcagattagaaaaataattcaggagtaa

SEQ ID NO: 3282 - protein, 235 aa, Morganella morganii
MDKILGKQAPKKDQDNEHWVSMSDLMAGLMMVFMFISIAYMHYVRIEKEKIKEVAVAYENAQLQLYNALETEFTKDLPAWDAEIDKQTLEVRFKSPDVLFGLGSTELKPKFKQILDNFFPRYLKVLDNYQEHITEVRIEGHTSTDWTGASNSDMAYFNNMELSQGRTRAVLQYVYGLKESAAHQKWVKSKFAAVGYSSAHPILDKSGKEDPNRSRRVTFKVVTNAELQIRKIIQE

SEQ ID NO: 3283 - DNA, 3354 bp, Morganella morganii
gtgaaaactccagttaacccacttttgcgatggctcaatgcgttttttagcagtcgttcattacccggagctgatgggagggcgctgtatgcttaccgttgtcatgatgcagagtatgaaagtttggctgctcttcttcgtgcccatgttccacgtaactaccccaaaaccatattcatttcttacagtgatgttttgttcagcatatacgccgctgagtttatccgccgtaaccatactgcaggacatccaagatgggacgttattttagaatcgattggctggaaggtaccttacgcacatcggcaaaagctggtaaatgatgggattcgttactggaaaagaaaggtgagaagtctgggtcaagcatcgggttatctgcatactctggcttgcgaaggcggtttgcccatccggatgattgaaaatgaaagtggctatttaataacctatttcaaacgagtttatcaggcactacgtgggcaatcgtcaaggcgtcctgcggaaataatcgcacaagaactgggcgacactattcctgcgacaatgcaaaatgaactcgtctatgaaatagctggtgaattttgcgagacacttcatacgttactcaatgagcatcccactcatggtcaggaccccgtttcctcactacgcaaacaatatcctgactggcatcttcaacttccgttggtactcccggaagagaatgcctcagagattgtaagacgattactttctcaatcttcagagccccgtatatcaagcaatgtgctggttgaaaggatatgggttgatgttgatgacagttggtattgcgatgcccggtttcgatttccggccacaatgcgtactgaacagttaatatccctgtttgaaagcaatattcagccggaacagacacgactcatcatttctgcaaaatggagaaatggtggggcccggttggcaatgctaagccgttatgaacagcaagattggcgagtagagttattacccttcgctatgcaaaaactctctggggcagatgcgatgaccgaaatatcgttgtcgctccatgaagggccgattctgctaggtcacgtaattcccaaagggggttatgagcttaccgaagatttaccatgggtttttgaagcgatgaatgagagcgagtcgcagttaaaacttgtcggcatgggctctgttagttccaggcaaaactctctttttatttcgctaccgacaaatagtcatttggatattagtggagaaggtgagtttgatatcccgaggttgctgaaaaatagtgaacgtagcttaactaaaataagcggagtattcagcgttgttttacatgatggcgcagtttgtacgattcgcacgcagcaactttatgattctgcgattgagtattatataaaaccgacagagatcgatctggtaaaatctgattatcctgtccatcgtgcttggccaaagatcggctggaaaaaggatatgcagcatggcattgtcccagagaacgaacttttttggcgatccattcgttcaggtaacaactcctggttttctgtcgcatcagtaatgccgaaagggcagatagaagtcaggcgaatagtcaatggtgaggttttatttagcggtaaagttgtgattttgccagcagatttcgatattcaaattattcccgagactgctcagcaaggagttattgtactctctggtataacggatgcaagggttgataaatattcaaacaatgaaaaagtaacacttaaatcagattatttgcaaaacgagtgtgttattgattgtaattcatcacagatgctagagagcaccatcaatttacgagtatcctggaaagatggttctaatcttaaattgttattacctaagcccgttagcggtggacggtttgtaagtaatgatggttctgttcattttgacggtgttgcatctatagcacatttgcatggcgtggacgctgagctgttaacaatatcttgtgccgggaaaggatatcttaatatcgagttgttggatgaaaacccgatgtctgaaaaatttcattatttacatgcggatattccattgttatctggccgtaatgaaaaattgcaacagatttcactttatgagaattataatctgctgaacgccatgcttgtatgtgcatggaaaaatgatagtacattacgtgttgatttttactctgacagatttggtaaggacaaaacaacactcaatattaaacgctacgatggccgttttattgagggtgatgaaagattgctggttgatataaaagattctattgtttttccttaccataaaatagacgacatggttgttgaagccatttctcttaatactcctgacttatgcacagtcctgctgaaaaaagatgagtctggttatgatttctcgacgttgaataatcaaggtggcccatggttaattgtgggtaaaattgatggtgcaattcgtattgcaccagtgattaaatggatgctacctacattacagacagatgatttatttctaaatgctatatgcaacgcatcgccagaacaacgcaaggaatattgtaatgcgctgtttttggaaatgaaaaataatcctttgcaaaactcttgttatttgttggttgagtacattaaaaaatataagttgaataatagcttgcctttgctggaactggatttatttagagaaatttcgagtaattattacgtggttgttcagttgttaatatcatcatgtctttctggggatagtgatgctatttatgatatacaggaggaattacccttctcatggggatggattcctgtttcaatatggaaagatgtctttgaacagtgttggtattctctggaaaaacagattaatgataaggcatttgcattaaatatactacagccatttattgcatttataaatcatcaagcgcatatcgatcgtcgattagttcccatcgctaatatgttgcttacacatagtgagatattacctgcaggttgcactgtattgccatctgtaagccgcgagcagtttaatgatgccaaacagatgttattaagaaacccagatagttttggacgtgtcagcattttttctaaagagctttgggatagtgctattactccagaccttaaatctgtttttaataaattttggatcgaaaacacatatcacactcgttttgaaaaacgttttaatttgatgttagtcgcggcgctgctttcccaaagaaacaataaacttatgcatcagctaactgcactttttgaatttcactatcagcaagccccgcagcaattgggggttatctatcagtattattttgaacaagcaggagtatgtcattga

SEQ ID NO: 3284 - protein, 1117 aa, Morganella morganii
MKTPVNPLLRWLNAFFSSRSLPGADGRALYAYRCHDAEYESLAALLRAHVPRNYPKTIFISYSDVLFSIYAAEFIRRNHTAGHPRWDVILESIGWKVPYAHRQKLVNDGIRYWKRKVRSLGQASGYLHTLACEGGLPIRMIENESGYLITYFKRVYQALRGQSSRRPAEIIAQELGDTIPATMQNELVYEIAGEFCETLHTLLNEHPTHGQDPVSSLRKQYPDWHLQLPLVLPEENASEIVRRLLSQSSEPRISSNVLVERIWVDVDDSWYCDARFRFPATMRTEQLISLFESNIQPEQTRLIISAKWRNGGARLAMLSRYEQQDWRVELLPFAMQKLSGADAMTEISLSLHEGPILLGHVIPKGGYELTEDLPWVFEAMNESESQLKLVGMGSVSSRQNSLFISLPTNSHLDISGEGEFDIPRLLKNSERSLTKISGVFSVVLHDGAVCTIRTQQLYDSAIEYYIKPTEIDLVKSDYPVHRAWPKIGWKKDMQHGIVPENELFWRSIRSGNNSWFSVASVMPKGQIEVRRIVNGEVLFSGKVVILPADFDIQIIPETAQQGVIVLSGITDARVDKYSNNEKVTLKSDYLQNECVIDCNSSQMLESTINLRVSWKDGSNLKLLLPKPVSGGRFVSNDGSVHFDGVASIAHLHGVDAELLTISCAGKGYLNIELLDENPMSEKFHYLHADIPLLSGRNEKLQQISLYENYNLLNAMLVCAWKNDSTLRVDFYSDRFGKDKTTLNIKRYDGRFIEGDERLLVDIKDSIVFPYHKIDDMVVEAISLNTPDLCTVLLKKDESGYDFSTLNNQGGPWLIVGKIDGAIRIAPVIKWMLPTLQTDDLFLNAICNASPEQRKEYCNALFLEMKNNPLQNSCYLLVEYIKKYKLNNSLPLLELDLFREISSNYYVVVQLLISSCLSGDSDAIYDIQEELPFSWGWIPVSIWKDVFEQCWYSLEKQINDKAFALNILQPFIAFINHQAHIDRRLVPIANMLLTHSEILPAGCTVLPSVSREQFNDAKQMLLRNPDSFGRVSIFSKELWDSAITPDLKSVFNKFWIENTYHTRFEKRFNLMLVAALLSQRNNKLMHQLTALFEFHYQQAPQQLGVIYQYYFEQAGVCH

SEQ ID NO: 3285 - DNA, 1074 bp, Morganella morganii
atgaaccacgaaataacaaaaaatgaaagtgatacaattttcattatgaaatcaataggaataattgctgttgttgttgggcactatgatggtatattatttaacctagcacacgcatattattatcatatgccattgttttttttcctatccggtattttcataagggataatgttaactatcgcaaattagctattaatacgctaaaaacaatcaagtacatcatcattacatatttaataattggtatcctagctgtgtatttatctggtaggtttggattttatctcggccaaccatttaaaagcgatatattaagtaccttgcagttaatttataatcgaaatttccataacaacactctgttccttgttgcgtggtttttatttgcatattcaatatccatgatatcatcatccttaataatatcaataacaaacaacataaagaatattataacaaaatctgtttttttaatttcaatagcgatagctcttggttatatatctgtaaatgttttagctccagaatataaagagacaaaaaaacaattaattaatttagcatcgcaagtttgtttctcttcaatgtttatgattataggaaataaaacatggcgcatgatgatgaaaattaaaagtaaagttatagttacaatctctttaattgtaataattatattatatagattcttcattaatggaaatattgggatagcgtggagtcactatcctgcagggctaataccatcattggtaatagctatttcctcaatatttttcatcttgatagtttcatcattcttatgtaaaacgaaagttaaaaatattgcaatgatgccaggcatttactcaaagcacattatgtcataccacctttttattttcgttattcttgatattatcgtttacaaattagggtattgggatatatcaaaaacaacagcccttaatcactacctatcttcatcaagtcagtttatttatccggttatctccgttactgcacctgtaatcatctgcgtgattttaaaaaaaataataaaaactaatagtaatattaccccgcaataa

SEQ ID NO: 3286 - protein, 357 aa, Morganella morganii
MNHEITKNESDTIFIMKSIGIIAVVVGHYDGILFNLAHAYYYHMPLFFFLSGIFIRDNVNYRKLAINTLKTIKYIIITYLIIGILAVYLSGRFGFYLGQPFKSDILSTLQLIYNRNFHNNTLFLVAWFLFAYSISMISSSLIISITNNIKNIITKSVFLISIAIALGYISVNVLAPEYKETKKQLINLASQVCFSSMFMIIGNKTWRMMMKIKSKVIVTISLIVIIILYRFFINGNIGIAWSHYPAGLIPSLVIAISSIFFILIVSSFLCKTKVKNIAMMPGIYSKHIMSYHLFIFVILDIIVYKLGYWDISKTTALNHYLSSSSQFIYPVISVTAPVIICVILKKIIKTNSNITPQ

SEQ ID NO: 3287 - DNA, 735 bp, Morganella morganii
atggatatatcttctgttgttaaaagtatggattggggattaacggtagcggttttatcgttggtgtttactggtatcgttagctttataactatcagatatacgaaaaaatcgttagattatacgaaagagtcagtacaaattgcagatgcttcattaaaagctgctagagaatcaattaatacttcagttgagatatatgaaaaacaaaagaaagatgatttaataaaaagagaaaaagaagatggtttgaagttattttcaataaaaaccatgattatggaggaaataaaagatgaatttttacattttgttagggttaataaaatattaaaagatattgttgattgtaatagtgactttaatgttaatgtactcaatatttctggtattactttagtggaatacgaaagtcctgatagtgagccatattctggaatatacaaagaaccaagttatgatatatgtaaaaattttttactggatacattaatccttgatcctattgtagctaaaaaaataattaatcttaatgaatcatcatatatatacaaatcgtccatgtcattaattatgagtgggttatcagataataaaaaaaatgaaattaaatatttattaagcaatattattgatagggtggctgattataagaaaagcatggaggaattatatgaatcatgctcagatgacactactaaagcactgtctctatacgaaaatagtgtgatttaa

SEQ ID NO: 3288 - protein, 244 aa, Morganella morganii
MDISSVVKSMDWGLTVAVLSLVFTGIVSFITIRYTKKSLDYTKESVQIADASLKAARESINTSVEIYEKQKKDDLIKREKEDGLKLFSIKTMIMEEIKDEFLHFVRVNKILKDIVDCNSDFNVNVLNISGITLVEYESPDSEPYSGIYKEPSYDICKNFLLDTLILDPIVAKKIINLNESSYIYKSSMSLIMSGLSDNKKNEIKYLLSNIIDRVADYKKSMEELYESCSDDTTKALSLYENSVI

SEQ ID NO: 3289 - DNA, 918 bp, Citrobacter koseri
atgattaatgcaaatcgtccgataatgaatctcgacctcgatctgcttagaacgtttgttgctgtagcagatttgaatacttttgcagccgctgcggccgctgtatgtcgaactcaatctgcagtcagtcagcagatgcaacgtttagagcaattagtcggcagagaactctttgcccgtcatggtcgtaataaactgttaacagagcatggcttacaattattaggctatgcacgtcaaattctccgtgctaatgatgatgcaactgcttcattaacatatagcgatgctgaaggtgagttacgtattggtgcatctgatgattccgtcgatacactactaccatttttgttaaatcgtattgcatcagtatatccacgtttagcggttgatgtgcgtattaagcgttctcaatttattgagactatgcttgataaccacgaaatcgacttagcattaaccactgcacgtattggacatcatccacgcacagcgttacgtacagcgcctgttttgtggcattgtgcccctgatttccaattacaaatgaatgagcctattcctttagtagtcatggacgaaactaacccattccgtcagttggcaacaaatacactagatgacgcaggtattcaatggcgtattgcgtatgaagcggcttctttatctgcggttcgtgctgctgtaaatgccgaagtggggatcacagctcgtccattagaaatgcaaaatgctgatttacgtatattaggcgaaagcgaagggttacctcgtttgcctgagactcagtactggttatatcgtaattttgatgagcaaaacgaagctgtattaacggtattcaatgccatcgaaaataagaaaacgccttatactgtcacttcagttgaagaagcgcattctttagatttagagtaa

SEQ ID NO: 3290 - protein, 305 aa, Citrobacter koseri
MINANRPIMNLDLDLLRTFVAVADLNTFAAAAAAVCRTQSAVSQQMQRLEQLVGRELFARHGRNKLLTEHGLQLLGYARQILRANDDATASLTYSDAEGELRIGASDDSVDTLLPFLLNRIASVYPRLAVDVRIKRSQFIETMLDNHEIDLALTTARIGHHPRTALRTAPVLWHCAPDFQLQMNEPIPLVVMDETNPFRQLATNTLDDAGIQWRIAYEAASLSAVRAAVNAEVGITARPLEMQNADLRILGESEGLPRLPETQYWLYRNFDEQNEAVLTVFNAIENKKTPYTVTSVEEAHSLDLE

SEQ ID NO: 3291 - DNA, 405 bp, Morganella morganii
atggctaaaatagcgcggggtgaacgtaataataacccaggtaatatacgccatggtgcaaaatggcaaggattagcaagcacgcaaacagataaagatttttgtcaatttatttcaccagaatatggcatcagagcaatttataaattaattcaaacctatcaaaataaatatggtttaaatacaattaaatctattatttatcgctatgcaccacctaatgagaataatacattaggttatattgagcgcgtatcaaaagaaatagggattgaaagtaataaacctattgatacccaaataaaaaatgtttgtatatctttatctatagccattattaatattgaactgggttatcaaccctatgccaaaaaagtatttgaagatgcttggttgttattatga

SEQ ID NO: 3292 - protein, 134 aa, Morganella morganii
MAKIARGERNNNPGNIRHGAKWQGLASTQTDKDFCQFISPEYGIRAIYKLIQTYQNKYGLNTIKSIIYRYAPPNENNTLGYIERVSKEIGIESNKPIDTQIKNVCISLSIAIINIELGYQPYAKKVFEDAWLLL

SEQ ID NO: 3293 - DNA, 321 bp, Morganella morganii
atgcaagaaataccattacaagccattcctaatcaacgattttctgtagcaatagccggtgtgaattggcaattaacgcttaaagtggctaatcaaaccatgttttgtgatatcgagcgagaaggtgaaatacttattacaggaatgcgccttgttgctaatacaccgataattccttatcgctatttaaatcagggaattaatttaatgtttttaacagagcatgatgcattaccttggtatgaggaatttaccaagacgcaatcattagtgtattggagtgaggaagatggatcttcgacgaataaggctcggaattga

SEQ ID NO: 3294 - protein, 106 aa, Morganella morganii
MQEIPLQAIPNQRFSVAIAGVNWQLTLKVANQTMFCDIEREGEILITGMRLVANTPIIPYRYLNQGINLMFLTEHDALPWYEEFTKTQSLVYWSEEDGSSTNKARN

SEQ ID NO: 3295 - DNA, 753 bp, Morganella morganii
atgctattacgagtagataacgtcagcaaatattattatcaaaaaggggcgcgcttttttaaagaaaaagtgactattctcgatgcgctctcttttaatatacaaaagggtgaagctttcgggttagttggagaaagtggcagtggaaaaagtacccttgcacggttaatcagtggcttagaattacctgatcaaggggctatttatttaaatgataagccagtgacgaaacgatgttatcgacaaggtgtaataagtattgtgtttcaggatcatatcgcttcagtcaatccgacttttacagtgggtgaaatgattgctgaacctattaaactgattaatccgactctccgtcataacgagttagaaacaattattttttcttttttagagaaggtgcaattacctaaaagttgttatcagcgttatatttttgaattgtctggtgggcaagctcaacgagtttgcttatgtcgtgcgttagcatcttacccacaactaattattttagatgaggcaataagctctctcgatatacctacacaagttgaaatattggatttattaaaattattaaaagaggaactccaattatcctatctttttattagtcatgatattcaaacagtgacttatttttgcgataaagtcatgtttattttacaaggtcaacaaattgaattatgcgagataaataaattaagtactgttactcatccttatgctaaaaaattaattcaatctgttatttaa

SEQ ID NO: 3296 - protein, 250 aa, Morganella morganii
MLLRVDNVSKYYYQKGARFFKEKVTILDALSFNIQKGEAFGLVGESGSGKSTLARLISGLELPDQGAIYLNDKPVTKRCYRQGVISIVFQDHIASVNPTFTVGEMIAEPIKLINPTLRHNELETIIFSFLEKVQLPKSCYQRYIFELSGGQAQRVCLCRALASYPQLIILDEAISSLDIPTQVEILDLLKLLKEELQLSYLFISHDIQTVTYFCDKVMFILQGQQIELCEINKLSTVTHPYAKKLIQSVI

SEQ ID NO: 3297 - DNA, 849 bp, Morganella morganii
atgatgcactcattaaaagcgcaagctgaaatacgcatggtatatgaaaaccaattatttaatggtaagaattttcatgtgtttatttataacaaaacagaaagcgtcagtgggttgcatcagcatgattattatgaatttactattgttttaacagggcgctattatcaagaaattaacggtaaaaaggtgttattagagcgtggtgattttgtctttattcctattggctcgcatcatcaaagtttttatgactttggtgtaactcgtattttaaatgtaggaataagcaaagctttttttgataaacattatcttcctttattgcccgcttattttattgcttctcaagtttatgcattaaaaaatgagtttctttcttatattgaatccgtgattagctcattaaatttcagacatacagaatttaatgaatttattgaaattgtcacctttaatgtggtgaatagattacgacattatagagatgatggtattgaagatgatattcccttatggctaaaagacgccattgatggaatgcatgataaaagccaatttggggagaatgcattggcaaatatggtgcaattatctggaaaatcgcaagagtatttaactcgagcaactcgccgttattatgataaaacgccgatgcaaattattcatgatattcgaattaattttgctaaaaaacaattagaaatcacgaattactccgttaccgatattgcttttgatgcaggttatagtagcccgagcttatttattaagacttttaagaagataacatcgctgacaccaaatagttatagaaagaatttatacagtattaaagagactaactaa

SEQ ID NO: 3298 - protein, 282 aa, Morganella morganii
MMHSLKAQAEIRMVYENQLFNGKNFHVFIYNKTESVSGLHQHDYYEFTIVLTGRYYQEINGKKVLLERGDFVFIPIGSHHQSFYDFGVTRILNVGISKAFFDKHYLPLLPAYFIASQVYALKNEFLSYIESVISSLNFRHTEFNEFIEIVTFNVVNRLRHYRDDGIEDDIPLWLKDAIDGMHDKSQFGENALANMVQLSGKSQEYLTRATRRYYDKTPMQIIHDIRINFAKKQLEITNYSVTDIAFDAGYSSPSLFIKTFKKITSLTPNSYRKNLYSIKETN

SEQ ID NO: 3299 - DNA, 1470 bp, Escherichia coli
atgacagcagagctattagtgaatgtgactccctctgaaacccgagtggcctatatcagcgggggcatactacaagagatccacgttgaaagagaagccaaacgaggtcttgtcggaaacatctacaaaggtcgggtaagtcgtgtattacctgggatgcaagctgcatttattgacattgggcttgagaaagccgcttttttacatgcttctgatattatgcctcacacggaatgtatcgcgggtgaagagcagaaaaaatttaatgttcgtgatattgcgcaacttgtacatcaaggtcaggacttgattgtacaagtggtgaaagatcctctaggtacaaaaggggcacgtcttacaacagatatcacattaccatcacgttacttggtgtttatgccgggggcttctcatgtgggtgtttcacaacgtattgaaagtgaagaagaacgtgagcgcttaaaacgcttggtagaagagtattgtgatgaaaatggtgggtttattattcgcactgccgctgaaggtgtcggcgaacatgaaataaaacaagatgctgcttttttaaagcgcctatggaataaaatcattgagcgtaaaaaaagaaataaaacgcgcattcaaatttatggtgagctcgctttagcacaacgtattttacgtgattttgcaggggctgaattagatagcattcgggttgactctaaattaacttatcatcaattacaggagtttattggtgaatatattcctgaattaaccgctaaacttgaattacaccaaggtaatcaacctattttcgatctttacggggttgaaagtgaaattcagcgcgcgttagagcgaaaggtcgagttaaaatcaggaggctatctgattatcgaccaaaccgaagcaatgacaacgattgatatcaatacgggcgcttttgttggtcatcgtaatttagaagagacgatttttaataccaatgttgaggcgagtcaggcgatagcgcggcaactgagattacgtaatttaggcggcattatcattattgattttattgatatgagtaatgaagatcatcgccgtagagtattagcttccttagaacaagcattgagcaaagatcgcgtgaaaacgaccatcaatggtttttcacaattaggtttggttgagatgacacgtaaacgaacccgtgaaagtctcgagcatgtactttgtgatgactgtcctacttgccaaggccgtggtacagtaaaatcagttgaaacggtatgttatgaaatattacgagaaattgttcgtgttcataaaaccatagacgcagatcgctttttggtttatgccgcccccgctgttgtggaagcactaaaaggtgatgaatcacatgctttagccgaagtggaaatttttgttgggaagcaagtcaaagtgcaaactgagctactctatagtcaggagcagtttgatgtggtgatgatgtaa

SEQ ID NO: 3300 - protein, 489 aa, Escherichia coli
MTAELLVNVTPSETRVAYISGGILQEIHVEREAKRGLVGNIYKGRVSRVLPGMQAAFIDIGLEKAAFLHASDIMPHTECIAGEEQKKFNVRDIAQLVHQGQDLIVQVVKDPLGTKGARLTTDITLPSRYLVFMPGASHVGVSQRIESEEERERLKRLVEEYCDENGGFIIRTAAEGVGEHEIKQDAAFLKRLWNKIIERKKRNKTRIQIYGELALAQRILRDFAGAELDSIRVDSKLTYHQLQEFIGEYIPELTAKLELHQGNQPIFDLYGVESEIQRALERKVELKSGGYLIIDQTEAMTTIDINTGAFVGHRNLEETIFNTNVEASQAIARQLRLRNLGGIIIIDFIDMSNEDHRRRVLASLEQALSKDRVKTTINGFSQLGLVEMTRKRTRESLEHVLCDDCPTCQGRGTVKSVETVCYEILREIVRVHKTIDADRFLVYAAPAVVEALKGDESHALAEVEIFVGKQVKVQTELLYSQEQFDVVMM

SEQ ID NO: 3301 - DNA, 861 bp, Escherichia coli
atgaaaaaagttaatgtcgcacttttgcagctttgtagcggaaaaaatataaaaaataatctggcgcaaatagagcaacagattaagcaactccccgattcagtcaagcttgtattaacgcctgaaaatgcattacttttctccagcgcaaaagattatcataaacatgctgaaattcaggggaaaggaccattacaagatgcgattgctaatatggcgcagcgctataaggtgtggatcttagtgggttcaatgccattgattagccgagattctcctgagcagatcaccagtagtagtttagtttttgatgatgaaggggtgatccgcgctcgttatgacaaaattcatatgtttgatgtgaacattgatgatgaacaaggcgaatataatgaatcagccatttatcaacgtggtgaacgcttgactgtagtggatacacctgtgggtaaattaggtttaacgatttgttatgatttacgttttcccggtcttttccaagcattaagagaaaaaggtgctgaaattatttctgtaccggcagcctttactcgtttaacgggtaaagcgcactgggagccattgttacgcgcgcgggctattgaaaatcagtgtattattttggcaccggctcaagtcggtacccatgatgctcgtcgcacatggggtcatacaatggctgtggatggttgggggaaagtattgaaaaagaaccctgatgcggtcagtgccctaacgctcaatattcgagtcgatagtttagaaggtatgcgtgaacagatacgggttgtgaaacataatcgctttcgcccgaaactgacacacttaataaaaaaagttaaggataaaaaagaattatga

SEQ ID NO: 3302 - protein, 286 aa, Escherichia coli
MKKVNVALLQLCSGKNIKNNLAQIEQQIKQLPDSVKLVLTPENALLFSSAKDYHKHAEIQGKGPLQDAIANMAQRYKVWILVGSMPLISRDSPEQITSSSLVFDDEGVIRARYDKIHMFDVNIDDEQGEYNESAIYQRGERLTVVDTPVGKLGLTICYDLRFPGLFQALREKGAEIISVPAAFTRLTGKAHWEPLLRARAIENQCIILAPAQVGTHDARRTWGHTMAVDGWGKVLKKNPDAVSALTLNIRVDSLEGMREQIRVVKHNRFRPKLTHLIKKVKDKKEL

SEQ ID NO: 3303 - DNA, 513 bp, Serratia marcescens
atggagatactccattcaatgcttgacacattaagtcatgtttctcctatcgctttattttttactattaccctactcactgcgggaaaatctactattggtatttcatcctttttacctcccgcatcgttaatgctgatcttaatatttggggtttgcttgcccttccattcgcctattttactttggttagcaactagtttaggtgccttattaggatctatagcgagttatcagttaggacgttccatttattatttccctcgcttaaataaatgggttacccgctatcaaacaaagatcttacgtatacaacaactgttaaaaaataaagcattctttattctttttatttcacgctttttagctgtgtttcgctaccttacgccttttagcgcaggtttattaaaactccccatttatggtatttatctaacaagtgctgtttcagccttagtgtggtcaggagtatttattttaatagccaatggcgtaatctccatctcattataa

SEQ ID NO: 3304 - protein, 170 aa, Serratia marcescens
MEILHSMLDTLSHVSPIALFFTITLLTAGKSTIGISSFLPPASLMLILIFGVCLPFHSPILLWLATSLGALLGSIASYQLGRSIYYFPRLNKWVTRYQTKILRIQQLLKNKAFFILFISRFLAVFRYLTPFSAGLLKLPIYGIYLTSAVSALVWSGVFILIANGVISISL

SEQ ID NO: 3305 - DNA, 342 bp, Proteus mirabilis
atggccttttttttattacttattgttagtttgctaacctgtattggccaagtttgtcagaaacaagcagtggtgagttggcaaaataattcaaccactaaagccagaaagacgattttctggcttattactgccatcgctatgctaggctttggcatgttattttggttacgtttactgcaaatcctcccacttagtattgcttatccgatgttgagtattaactttattgtcgtcactttgataggccaatttatctataaagagacggttaatgtgaaacattgggttggtattgcctcgattatgttaggtattgtgttaatgagtatgcagtcatga

SEQ ID NO: 3306 - protein, 113 aa, Proteus mirabilis
MAFFLLLIVSLLTCIGQVCQKQAVVSWQNNSTTKARKTIFWLITAIAMLGFGMLFWLRLLQILPLSIAYPMLSINFIVVTLIGQFIYKETVNVKHWVGIASIMLGIVLMSMQS

SEQ ID NO: 3307 - DNA, 1662 bp, Proteus mirabilis
atgttgaataaccgggcgagtaaaatcggggccatcctcttggctcttttttttgttcttacctacttatttccattgaacagccggttattatggcaacctgatgaaacacgttatgcggaaattagccgtgaaatggtggtgagcgggaactggattgttccccatatgcttgatatccgctattttgaaaaaccagtagcaggttactggattaataatattagccagttaatatttggccacaccaattttgccgtacgctttggttcagttatttctatcctattaagtgcgctacttatttatttattagcacggatgatgtggcgtaatcgtcaagtcgcttttgtggctagcttaatttatttatccatgtttttggtgtttagcgtcggaacttatagcgtacttgatccgatgttagcgctttgggttactgcaagtatggtgtgttgtttttgggcgttgaaagcaaccacggtaaaaacgcgtatactggcatggataacgctaggtttagcttgtggtatggcctttatgaccaaaggctttttggcattagctatccctgttatcgtgatgatccctgtaaccctttaccaaaaacagttcactcggatgttactctatggtgtgcttgctgttttaagtgcggcgttaattagcttgccgtgggttttagcggtggcgaaggctgagcctgattattggcactatttcttttgggttgagcatatccagcgtttttctggtgatgatgctcagcatagttctcctttctggtattacatccctataattttactgggtgttattccttggcttggattattaccaggggcactaactagtgcatggaagaagcgccgtaagcgtcctgaactctttttcttactatgttggtttgtagtacctttcctattttttagtatcgcgaaaggtaaattacctacttacatgttgccatttatgggaccgttggcgatgctaatggccaaatacggtgtagactgtgctagaaaatttaaaatgaaagcactgcgcattaatggctatattaatatttttattggtgttgctgctgttgttgcgatattaattattcaattggtttcttctaaacctatctatatgccttatgaatggtccaaatgggtattagcgattgtcgctttctcattatggggcatcattggttatctctgctctacattaaatggtaaacattggctatgggcagcctcttgctctttaggggtaagcttatgtattgggcaagccattcccaatagctctattgatggcaaattaccacaagagtttattcgccaaaatatcgataccctcaatgcgagcaaatatatagtcagtaacagcgttggtgtgggggctggattagcttgggaattgcaacgtagcgatatctacctttatgagagaacaggggaattaacctatggaatcgaatatccagattctcaacatagattactaaaacctgaaagttttgagcaatggttagaaaatgccagaaaagaaggtaatgtctctgtggtgatcacttataaagatccgaagaaactggcacagatgccacgacctgaagagttagtgacgaatcgtcgtatggctattttgacctatgagaaacgtaagtaa

SEQ ID NO: 3308 - protein, 553 aa, Proteus mirabilis
MLNNRASKIGAILLALFFVLTYLFPLNSRLLWQPDETRYAEISREMVVSGNWIVPHMLDIRYFEKPVAGYWINNISQLIFGHTNFAVRFGSVISILLSALLIYLLARMMWRNRQVAFVASLIYLSMFLVFSVGTYSVLDPMLALWVTASMVCCFWALKATTVKTRILAWITLGLACGMAFMTKGFLALAIPVIVMIPVTLYQKQFTRMLLYGVLAVLSAALISLPWVLAVAKAEPDYWHYFFWVEHIQRFSGDDAQHSSPFWYYIPIILLGVIPWLGLLPGALTSAWKKRRKRPELFFLLCWFVVPFLFFSIAKGKLPTYMLPFMGPLAMLMAKYGVDCARKFKMKALRINGYINIFIGVAAVVAILIIQLVSSKPIYMPYEWSKWVLAIVAFSLWGIIGYLCSTLNGKHWLWAASCSLGVSLCIGQAIPNSSIDGKLPQEFIRQNIDTLNASKYIVSNSVGVGAGLAWELQRSDIYLYERTGELTYGIEYPDSQHRLLKPESFEQWLENARKEGNVSVVITYKDPKKLAQMPRPEELVTNRRMAILTYEKRK

SEQ ID NO: 3309 - DNA, 567 bp, Proteus vulgaris
atgacagccgaaggacatttacttttttctgttgcaacactcgtcttagcacagaaattagaaataacccccgttcttgctcaaggtgattggtttcacatgatccctgctgtcttattaggttcactactaccagatttagatcatccaggctctatattaggacgcctctttcggataatctcattaccgctatcaaaactctgtggtcatcgtggcttcacacatagcctactcgccttttgtggtttagccattttatgggaaacacaagttgcgccttatatcacgatttcggctgatttttttcacgcccttttgctaggttacttaagtcacctactggcagatatgctaacaccatcaggtgtaccttttttatggccactaaaaatgcgttttgccttaccgattttagcgaaaaaaaatagcaaaaaaggagaacgatttatttctgtcatcatcttagttggtgcactatttctgcccccacacctaactttttctcttcccacacaaataaatcactggttacaaatgtaccacgataaacgtacacctttttaa

SEQ ID NO: 3310 - protein, 188 aa, Proteus vulgaris
MTAEGHLLFSVATLVLAQKLEITPVLAQGDWFHMIPAVLLGSLLPDLDHPGSILGRLFRIISLPLSKLCGHRGFTHSLLAFCGLAILWETQVAPYITISADFFHALLLGYLSHLLADMLTPSGVPFLWPLKMRFALPILAKKNSKKGERFISVIILVGALFLPPHLTFSLPTQINHWLQMYHDKRTPF

SEQ ID NO: 3311 - DNA, 780 bp, Escherichia coli
atggctttgaatggtaaagtaattttagttacaggtgctgctcagggaattggtcgtggtatcgcattacgtcttgctaaagagggtgccgatattgctctggttgacttaaaagcagataaattatccgatgtagcaaaagaaattgaagcgttagggcgtaaagtgacgacctttgctgcagatattagcaaccgtgatgaagtctttgcggcagttgaacatgctgaaaaaaccttaggcggttttgatgttatgatcaataacgcaggtattgcacaggtgaaacctcttgcagatgtgaccccggaagatatggatcggatcttcaaaattaacgttaatggtgtgatgtggggtattcaggccgcttctgagaaatttaaagcattaggccataaagggaagattattaatgcatcttctattgctgggcacgatggttttgccatgttaggggtttattctgccactaaatttgcagtacgtgcattaacacaagcggcagctaaagagtatgcgagcgcaggcatcactgttaatgcttattgcccgggcattgtcggcaccgatatgtgggttgagattgacgagcgttttgctgaaattactggagcaccaaaaggtgagacctataaaaaatatgtggacggtattgctctaggtcgtgctcaaactcctgatgacgtagctgcgttagtttccttcttggcaagtgatgattccgactatattacgggccaagctatcttaacagatggcggtattgtctatcgttaa

SEQ ID NO: 3312 - protein, 259 aa, Escherichia coli
MALNGKVILVTGAAQGIGRGIALRLAKEGADIALVDLKADKLSDVAKEIEALGRKVTTFAADISNRDEVFAAVEHAEKTLGGFDVMINNAGIAQVKPLADVTPEDMDRIFKINVNGVMWGIQAASEKFKALGHKGKIINASSIAGHDGFAMLGVYSATKFAVRALTQAAAKEYASAGITVNAYCPGIVGTDMWVEIDERFAEITGAPKGETYKKYVDGIALGRAQTPDDVAALVSFLASDDSDYITGQAILTDGGIVYR

SEQ ID NO: 3313 - DNA, 1488 bp, Morganella morganii
atgtcagaacaacaaacagataccgcaaaatcgggtgcggtacgcactttgcgtcgagaattaaaggcgcgacatttagcgatgatcgctattggtggttcaattggtacagggctttttgtcgcatcaggtgcaactgttgctcaagcagggccagggggagcattactctcttacgcattaataggacttatggtctatttccttatgaccagccttggagagttagcggcatttatgcctgtttccggatctttttcaacctatggctctaaatatgttgatgaaggatttggtttcgcactaggctggaactactggtacaactgggctgtgacgattgcagttgacttagtcgccgcgcagctcgtgatgctgtattggttccctgatgtggatggttggatttggagtgcgttatttttagccgttattttcttgcttaactatatttctgtaaagggatttggtgaagcggaatattggttttcattaattaaagtatcgaccgtgattatttttattgcggtgggtattgcgatgatcaccggtattatgaaaggtgctgaaaatgcaggttggcacaactgggaaatcggcgatgcgccttttgctggtggttttgctgccatgataggggtagcgatgattgttgggttctctttccaaggaactgaacttatcggtatcgcagcgggggagtcgaaagatcctgcgaaaaatattcctaaagcagtacgtaaagttttttggcgtattttactattttatatcctagctatcttaattatcagtttaatcattccttatactgatcctaacttgctacgtaatgatgtgggtgacatcagtgtgagtccgtttacactggtatttaaaaatgcagggttactttcagctgccgctatcatgaacgcagttattttaacggcggtgctttcggcagggaactccggtatgtatgcatctacgcgtatgttatttaccttagcaagagaaggtaaagcgccgaaattttttggtaaattatccaaaaacggtgttccacgtaatgcactttatgcaacaacagtggttgcgggtttatgctttttaagctcaatgtatggtaaccaaacggtttatttatggttattaaatacatcaggtatgacaggatttattgcttggttaggtattgcaatcagtcattaccgttttcgtcggggttatgtagcacaaggtcgtgatctgaatgaattgccatatcgttcaggcttcttccctgtaggacctatttttgcctttattctctgtttaattattacattaggtcaaaactatcaggcatttttagaagatactattgactggtatggtgttgtggcaacctatattgggatcccattattcctgctgatttggtttacttataaaatagtgaagaaaacacgttttattcgttacagtgaaatgcagtttcctgagcatattgaaaacaaaaaatag

SEQ ID NO: 3314 - protein, 495 aa, Morganella morganii
MSEQQTDTAKSGAVRTLRRELKARHLAMIAIGGSIGTGLFVASGATVAQAGPGGALLSYALIGLMVYFLMTSLGELAAFMPVSGSFSTYGSKYVDEGFGFALGWNYWYNWAVTIAVDLVAAQLVMLYWFPDVDGWIWSALFLAVIFLLNYISVKGFGEAEYWFSLIKVSTVIIFIAVGIAMITGIMKGAENAGWHNWEIGDAPFAGGFAAMIGVAMIVGFSFQGTELIGIAAGESKDPAKNIPKAVRKVFWRILLFYILAILIISLIIPYTDPNLLRNDVGDISVSPFTLVFKNAGLLSAAAIMNAVILTAVLSAGNSGMYASTRMLFTLAREGKAPKFFGKLSKNGVPRNALYATTVVAGLCFLSSMYGNQTVYLWLLNTSGMTGFIAWLGIAISHYRFRRGYVAQGRDLNELPYRSGFFPVGPIFAFILCLIITLGQNYQAFLEDTIDWYGVVATYIGIPLFLLIWFTYKIVKKTRFIRYSEMQFPEHIENKK

SEQ ID NO: 3315 - DNA, 813 bp, Morganella morganii
gtgcaaaatggtattcacctgtcagaaaaaatattaaatgcatttcctactcgagccttaacattatctccattaaaaggggatggcggtttattccgtaccttatttttagtgattgcaatgttagggatgacagtatttagtgcttatcaaattcctaatattgtttatgattatcaaattagtaaaaaccccgtgtttattgatgccgatgttgatggctcttgccgttcaaaactatttgttttaaccaattgtagtgttgacttacgctataaaggtaacgaggtttcacgaaattttacttttcttgattttggcaataaagatatattggttgagccagtagcagatgaaaacgatctgactaaaatgaccgtcgatgtggcaattgataatatttggttacgcttaattagtgcattagtttttactgcattatttgctttttgcgtgatctttttcatttatcgtcaaatgatcagcaataaagtcaaaaaagcattgctttcagtaggcaccaaacctttaaaattaacggctatccccgctaaggtcgttgtgagtaataaacaatttattgctacttataaaaccaatgttgccggaaaagagacttcaattacttattcaggtaataagaaaacgccacccattacattagaaatggaaggcaaaacttatgttttggcggtgtacgagccacaacaaaatattccttatgtattagatgttcctttagctcgaattcaagcaacagaagaagaaaaacaacgttttcatgaggcattaatagaggaaggtattctctaa

SEQ ID NO: 3316 - protein, 270 aa, Morganella morganii
MQNGIHLSEKILNAFPTRALTLSPLKGDGGLFRTLFLVIAMLGMTVFSAYQIPNIVYDYQISKNPVFIDADVDGSCRSKLFVLTNCSVDLRYKGNEVSRNFTFLDFGNKDILVEPVADENDLTKMTVDVAIDNIWLRLISALVFTALFAFCVIFFIYRQMISNKVKKALLSVGTKPLKLTAIPAKVVVSNKQFIATYKTNVAGKETSITYSGNKKTPPITLEMEGKTYVLAVYEPQQNIPYVLDVPLARIQATEEEKQRFHEALIEEGIL

SEQ ID NO: 3317 - DNA, 2274 bp, Morganella morganii
atgacaattcgcaatcacacattaggtttcccacgtattggcttaaatagagagctaaaaaaggcacaagagagctattgggctggtgatctttctcaggcagaacttctggcagttggtaaagaattacgcgctcgtcattggcaacagcaagctaatgcaggagtcgaattattacccgttggcgattttgcttggtacgaccaagtcttgggtactagtctcctattaggcaatataccgccacgccatcgtaatgaagatggtcgcctagatcttgatactctatttcgagtggcgagaggcagagcaccaacgggtaaacctgcggccgcctcagaaatgacaaaatggtttaatactaactatcactatatcgtgccagaatttcagcaaggacaatcatttacactggcgtggcaacagctactggatgaagtcgatgaggctttagcattaggtcataatgtgaaaccggtacttttggggccgatcacctacttatggttaggaaaagttaaaggacctgagtttgatagattgtcactgttagacgctattttacctgtttatcagcaagtattgagtcagttacagcaaaaaggtatcgaatgggtacaaattgatgagcctgcactggttcttgatttacccattgagtggcaaaatgcttatcaagttgcttatcaagcattgactggacaggttaaactattattgactacctattttgatggtattactcatcatcttgatattattaaaaacttaccggtaaatgggctacatattgatctatgtgcaggacaggacgcattgcaagttatacaccaagcattgcctaaagactgggtgttatcgttaggggtcattaatggtcgcaacgtctggaaagcggatctaactacccgttatcaacaagtagttgcattaaaaggtaagcgtccattatggattggcacatcatgctctttgttgcatagtccaattgatttaagtgcggagactaagcttgatgatgaagtgaaaagctggtttgcctttgcggtgcaaaaatgtgcagaagtggcgttactcgcaaaagcattaaatgcaccagaaggtgaatatgacgaacaacttgcccaatacagtgcccccattcgtcaacgtgaacattctagtcgtgtacataatgcaaaagtggccgcacgcttgcaggcgattaatgcacaagacagtgaaagaacatcgccttatcaacaacgagctaaagtgcaacgcgctcggtttaatctccctctatggccaacgacaaccataggttcattcccacaaactaccgagatccgcacagtacgtttagactttaaaaaagggcgtattgataccactgcttatcgcactaatattagcgagcatattaagcaagccatagatgaacaagagcgcttagggcttgatgtgttggttcatggtgaagctgagcgtaatgacatggttgaatattttggcgagcattttgaaggttatgtctttactcaaaatggctgggtacaaagctacggctcccgctgcgtaaaaccgccggtgatcattggtgatattagccgtcctgcaccgattacggtagattgggcgacttatgctcaatcattaaccgataagccagttaagggtatgttaactgggccggtgactattttatgttggtctttcccgcgtgaggatgtcagccgtgaaactatcgctaaacaaattgcgttagcgttacgtgatgaggtggatgatttacaaaaagccggtatcggtattattcagatagatgagcctgcattacgcgaaggattaccgttacgtcgtgatgagtggcaagcatacctagattgggctgttgatgcctttaagctcagtgcagctatcgctgatgatgagacacaaattcatacacatatgtgttattgcgagtttaatgacattatggaggcgattgccgcattggatgcggatgtgatcaccattgaaacatcacgctcagatatggagttattagaagcctttgaacattttgattatccaaatgaaattggtcctggggtatacgatattcattcgcctaatgtaccgaatgtagaatggattgtaggattgttaagaaaagcgcaatcgcgtatccctgcggaacgtttatgggtaaatccagattgtggtttaaaaacgcgggggtggagtgaaacccgtgcagcattggcaaatatggttgaagcggctagatatttacgccagaacgtataa

SEQ ID NO: 3318 - protein, 757 aa, Morganella morganii
MTIRNHTLGFPRIGLNRELKKAQESYWAGDLSQAELLAVGKELRARHWQQQANAGVELLPVGDFAWYDQVLGTSLLLGNIPPRHRNEDGRLDLDTLFRVARGRAPTGKPAAASEMTKWFNTNYHYIVPEFQQGQSFTLAWQQLLDEVDEALALGHNVKPVLLGPITYLWLGKVKGPEFDRLSLLDAILPVYQQVLSQLQQKGIEWVQIDEPALVLDLPIEWQNAYQVAYQALTGQVKLLLTTYFDGITHHLDIIKNLPVNGLHIDLCAGQDALQVIHQALPKDWVLSLGVINGRNVWKADLTTRYQQVVALKGKRPLWIGTSCSLLHSPIDLSAETKLDDEVKSWFAFAVQKCAEVALLAKALNAPEGEYDEQLAQYSAPIRQREHSSRVHNAKVAARLQAINAQDSERTSPYQQRAKVQRARFNLPLWPTTTIGSFPQTTEIRTVRLDFKKGRIDTTAYRTNISEHIKQAIDEQERLGLDVLVHGEAERNDMVEYFGEHFEGYVFTQNGWVQSYGSRCVKPPVIIGDISRPAPITVDWATYAQSLTDKPVKGMLTGPVTILCWSFPREDVSRETIAKQIALALRDEVDDLQKAGIGIIQIDEPALREGLPLRRDEWQAYLDWAVDAFKLSAAIADDETQIHTHMCYCEFNDIMEAIAALDADVITIETSRSDMELLEAFEHFDYPNEIGPGVYDIHSPNVPNVEWIVGLLRKAQSRIPAERLWVNPDCGLKTRGWSETRAALANMVEAARYLRQNV

SEQ ID NO: 3319 - DNA, 1350 bp, Morganella morganii
atgagccagaacaataattctcatttatggtcgcagtttattcgtcaattacgtgaaggtgttaagccagcagtaggttgcactgagccgatttcattggcattagctgcggcaaaagcaaccgcattattagctgagcctgttgttggtattgaagcgtgggtttcgcctaatttaatgaaaaacggaatgggcgtaacagtaccaggaacgggaatggcgggattacccatcgcggctgcattaggggcgacagggggcaatccggatgctggccttgaagtattacttacagcatcaccacaagctatcgctcaggctaaggcattggttgctgaaggaaaagtgacggttggcgtgaaaacgccatgtagtgatgtactctactccgaagcaaaagtatatggtcagtcaggttatgccattgtcagtattgctaaagagcatacccatgttgtgcgctgtgagtgtaatggcaaagttgtttttgaggatgataaaacgagtttgactcatgccggggatagcgtagaagaaaagccttttgcgacggtttgtgctgaagatatttatcgctttgcactcaatgtacctatagatcaagtcgcctttatgcttgatgcggcttatctaaatggtgctttatcagaagaagggctaaaaaatagttatggattggcgatagggcggacgctggtttcacagcaagagaatggcttattaggtaaggatttactgagtgaaatcatgataagaacgtctgccgcttcagatgcacgtatggggggcgctgtattacctgctatgagtaactcaggctccggtaatcaaggcattgctgcaacattgccggtaatggtagttgctgaatttattcaagcagatgacgaaactttattacgggcattagttttatcgcacttaatggcgatttatgttcatagccatttcccacctctgtctgcattgtgtgcggcaaccactgcatcaatgggggcggctgcgggtatggcatggctactgactaaagacttcaccactgtaagtatgtcaatcaacagtatgattggtgatattagtggcattatctgtgatggcgcctcaaatagctgtgcgatgaaagtatcaagtagtgcggcgagtgcgtataaagccgttttgatggcgatgcaaaatcaaagtgtagcgggtactgacgggattgtcagtgatgatgttgatagttcaattgcgaatctctgcgcattagccagtcgtgcaatgcaacatacagatattcaaattattgagatcatggaagaaaaagcacgccgtaatgccggggaaaagcagcaagctgtcaatgcataa

SEQ ID NO: 3320 - protein, 449 aa, Morganella morganii
MSQNNNSHLWSQFIRQLREGVKPAVGCTEPISLALAAAKATALLAEPVVGIEAWVSPNLMKNGMGVTVPGTGMAGLPIAAALGATGGNPDAGLEVLLTASPQAIAQAKALVAEGKVTVGVKTPCSDVLYSEAKVYGQSGYAIVSIAKEHTHVVRCECNGKVVFEDDKTSLTHAGDSVEEKPFATVCAEDIYRFALNVPIDQVAFMLDAAYLNGALSEEGLKNSYGLAIGRTLVSQQENGLLGKDLLSEIMIRTSAASDARMGGAVLPAMSNSGSGNQGIAATLPVMVVAEFIQADDETLLRALVLSHLMAIYVHSHFPPLSALCAATTASMGAAAGMAWLLTKDFTTVSMSINSMIGDISGIICDGASNSCAMKVSSSAASAYKAVLMAMQNQSVAGTDGIVSDDVDSSIANLCALASRAMQHTDIQIIEIMEEKARRNAGEKQQAVNA

SEQ ID NO: 3321 - DNA, 984 bp, Morganella morganii
atggctaaacgcattcagtttgcagctcatggtaatgccgatgtactcgagctaacttcatttacccccgcccctctaggcgataacgaagtacaggttgccaataaagccattggcattaattatattgatacttatgtgcgtagcggattatatccagtagagcatttcccaagtggcttaggaactgaagctgccggtgttgtgattaaaacaggcgctcatgttacttcacttaaagaaggggatagagttgtatatgcacaatctccattaggcgcctacagcgatacgcataatgtaccagaaaataaagtagctcgcctgcctgataatatctcttttgaacaagccgccgcctcttttttgaaaggattaacggtttattatctattcaatgaaacatacaaattacgtgcaggggaaacctttttattccatgcagcggctggtggcgtcggactaattgccagccaatgggcgaaagcgattggcgctaaaatgattggtaccgcaggcagtgatgagaaagtggctaaagctaaggccgcaggtgcatggaaagtgattaactatcaaactgaatctattgttgaacgtgtccttgcgctcaccaataaccaaaaagtacccgttgtgtatgattctgttggcaaagcaacttggttggattcgttgcactgtttgcaacgccgaggcttaatggtcagttttggtaacgcttctggtgcggtaacaggggttgatttaggtattcttaataaattgggttcactttatgttactcgtccttctatttccggctacattacgacgcgcgaagagttagatgcagcaagtgaagcactatttacgttaattggtcgtggtaaaattgatgtcagtgtgccagataatcagaaatttgcattagctgatgctaaagccgcacaccgttatcttgaaagtcgtcaatctcaaggttcaagtctattgatcccatag

SEQ ID NO: 3322 - protein, 327 aa, Morganella morganii
MAKRIQFAAHGNADVLELTSFTPAPLGDNEVQVANKAIGINYIDTYVRSGLYPVEHFPSGLGTEAAGVVIKTGAHVTSLKEGDRVVYAQSPLGAYSDTHNVPENKVARLPDNISFEQAAASFLKGLTVYYLFNETYKLRAGETFLFHAAAGGVGLIASQWAKAIGAKMIGTAGSDEKVAKAKAAGAWKVINYQTESIVERVLALTNNQKVPVVYDSVGKATWLDSLHCLQRRGLMVSFGNASGAVTGVDLGILNKLGSLYVTRPSISGYITTREELDAASEALFTLIGRGKIDVSVPDNQKFALADAKAAHRYLESRQSQGSSLLIP

SEQ ID NO: 3323 - DNA, 465 bp, Proteus mirabilis
atgataaccataagaaaagctgtactttctgatgttgagcagattaataccctgtatggctatttatttgctgagatggcgaaattacagccagaaagattaaaaccgggtaaacaagatgaagcatttattattaatggcattaaaaatgataaatttcatctgttagtggctgagttagaacagaaaattgtcggttttactattgcccaaatacaagagacaccgctatttaactgtttagtacagcgtaaatatgcctatatttttgatattgttgttgacccttctgttcgtggacaaggggcaggggcattgttgctaaatgccatgaaggcgtgggctaaacaacaaaaaatgacccacctagagctttcagtattggctgaaaatgccgatgctaaacgtttttatcagcgagaagggttaaaagaagtcagtaccgtgatgggtattgctttgtaa

SEQ ID NO: 3324 - protein, 154 aa, Proteus mirabilis
MITIRKAVLSDVEQINTLYGYLFAEMAKLQPERLKPGKQDEAFIINGIKNDKFHLLVAELEQKIVGFTIAQIQETPLFNCLVQRKYAYIFDIVVDPSVRGQGAGALLLNAMKAWAKQQKMTHLELSVLAENADAKRFYQREGLKEVSTVMGIAL

SEQ ID NO: 3325 - DNA, 1119 bp, Proteus mirabilis
ttgaattatcaatttatcacgacaaacacagcactagaagatgtctgtaaagcagcgtctgaggtatcacaaattgcattagatacagagtttgtccgtatacgcacctattacccacatttggggcttatccaaatgtacgatggtaaacagatctctcttattgatcccctgaccattactgagtggactccttttgttgaattattaactaatcccacagtacttaaatatttgcatgctggaagtgaagatcttgaagtgttttctcatcaatttggttgtgttccgacacccatgatagacacccaagtcgtggccgcttttctgggctatcccatttcttgtggttttgccaccttagttgagaaatatgaacatattgctctcgataaaagtgaatcacgaacagattggctggcgcgcccattaaccgaaaaacagtgccaatatgcgagtggtgatgtgttttatttgttacctctagctaagaaattaattgcacaggcacaagaagccggttatatggacgctattgttgatgagtgtgaaatgatagccgagcgtcgccaagagaccgtatcaccagagcttgcctatcgcgatattggtaatgcatggcaattacgaggtcaacaattagcatgcttaaaaatgttggcagaatggcgtttaaatcaagctagagcccgtgatatggcattaaactttgttgtaagggaagagcatttatggtcagtagcacgctatttaccgacctctcttgctgaattagatgcgctttctctatcggggcaagaaattcgttgtcatggccgccgcttgttggattttgttgctaaagccaaacagatcaaagatgaagattgtcctgagcctattggcaatttaattgaacaacctaactataaaaaagcctttaaagcaataaaaacggtgatccaagaggtaagtgaaggacagcgttataaccccgagttattagcctcaagaagacaaataaaccaattgcttaatattcactggaaaattaaaacaggggagcctgaattgctttcacgctggcgtaaagcattattagcagaaaaaattactgcaattttggcgcaatatccttaa

SEQ ID NO: 3326 - protein, 372 aa, Proteus mirabilis
MNYQFITTNTALEDVCKAASEVSQIALDTEFVRIRTYYPHLGLIQMYDGKQISLIDPLTITEWTPFVELLTNPTVLKYLHAGSEDLEVFSHQFGCVPTPMIDTQVVAAFLGYPISCGFATLVEKYEHIALDKSESRTDWLARPLTEKQCQYASGDVFYLLPLAKKLIAQAQEAGYMDAIVDECEMIAERRQETVSPELAYRDIGNAWQLRGQQLACLKMLAEWRLNQARARDMALNFVVREEHLWSVARYLPTSLAELDALSLSGQEIRCHGRRLLDFVAKAKQIKDEDCPEPIGNLIEQPNYKKAFKAIKTVIQEVSEGQRYNPELLASRRQINQLLNIHWKIKTGEPELLSRWRKALLAEKITAILAQYP

SEQ ID NO: 3327 - DNA, 702 bp, Serratia marcescens
atgtcaaacacgcccattgagttaaaaggcagtaattttaccctctcggtacttcatttaaatgatggatcaccgaaggttattcgtcaggctatttcagataaaattgcccaagcgcctcaatttctgaaaaatgcgcctgttgttatcaatgtctctgctatcgcagatcaaacgattgattttaaaaaactgaggcgaatagtagaagatgctggcttacgtgttgtgggaattagtggtagtcatgacgctcaacaaaaagaagcgataattgccgcacagttacctattctaaacgaaggtaaaataactaagccagcagctcaggcaaataacgataaaacgaatgaagtaccgataaatgtacgacaaaaaaccaaaatcattcatacaccagtgcgttcagggcaacgtatttacgcaccaaatagcgatttagtcgtgttaagcaatgtcagtgctggcgctgaattaatcgcagacggtaatgtgcatatttatggtgtattgcgtggacgggttcttgccggtgcatcaggcgaccaagagagccatattttttgtacacatttatctgcagaactagtttccattgctggtcaatattggctaagcgaccaaattcctacagattttgttggcaaatcagtccaacttagtttgcaagagaatgaattaacaatcgagaacttaatttag

SEQ ID NO: 3328 - protein, 233 aa, Serratia marcescens
MSNTPIELKGSNFTLSVLHLNDGSPKVIRQAISDKIAQAPQFLKNAPVVINVSAIADQTIDFKKLRRIVEDAGLRVVGISGSHDAQQKEAIIAAQLPILNEGKITKPAAQANNDKTNEVPINVRQKTKIIHTPVRSGQRIYAPNSDLVVLSNVSAGAELIADGNVHIYGVLRGRVLAGASGDQESHIFCTHLSAELVSIAGQYWLSDQIPTDFVGKSVQLSLQENELTIENLI

SEQ ID NO: 3329 - DNA, 1128 bp, Proteus mirabilis
atgttcaaatattcgttcatcgcggtgattgtttctactgttttgctatctgcttgtgcagatagccatcagaagagtgcagaaaaaaaacctgtaacaagtgaaattgccgatattacgacatcagcaccggctcgctggaaacagattgatgttgcctcacttgaacaggcttttccaaaacagtcacggacacctgcacaatttcctgcttatgtagatgctttaaaacaaaaagcggctgaattgggttataaacctgaaactatcaattttgccttttcggaaattcactttattgacagagtggtgaagtcagaccgtaatcagccagaaaagaaaattactttagatgtgtatttacctcgagtggtgacgaaaggacgtatcgcagaaggggcgaaactttatcaagctaaccaacaaaccctagcgcagatcagcaatcaatatggtgtgcctgcaaattatattgttgccttatggggattagaaagtggttttggtcgagtacaagggaaagaagatgttatctcagcactggccacattagcttttgaaggtcgccgtgaggctttgtttagtcgccaattaatggccgcacttgagataatcgaaaatggacatttacctgtaggccagcgtttaaaaggctcttgggcaggcgcaatggggcagacacagtttatgccatcttcatttttgacttacgctgctgatggcaatggtgatggcaacattgatatatggaatagccgtgaagatgcgtttgcttcagccgctaattatttagcaaccgagggatggcaacgcgatctcccttggggggaacaagtcagtttacctgctaattttaatcaacagttggaaggtataaaaacagagcaacaaaaaacggtcgcacaatggaaggcgctaggggtgcaattacctgctaatagccaattaagtgatgatatgaaggtatggctgataattcctgatgatgatttacatagaagctatttagtcacccaaaatttccgtactatcatgcattggaatagctcttacttttttgctttgagcattgtgacgatggctgatggcgttgccaataaaataaatacactgccaactcaacactaa

SEQ ID NO: 3330 - protein, 375 aa, Proteus mirabilis
MFKYSFIAVIVSTVLLSACADSHQKSAEKKPVTSEIADITTSAPARWKQIDVASLEQAFPKQSRTPAQFPAYVDALKQKAAELGYKPETINFAFSEIHFIDRVVKSDRNQPEKKITLDVYLPRVVTKGRIAEGAKLYQANQQTLAQISNQYGVPANYIVALWGLESGFGRVQGKEDVISALATLAFEGRREALFSRQLMAALEIIENGHLPVGQRLKGSWAGAMGQTQFMPSSFLTYAADGNGDGNIDIWNSREDAFASAANYLATEGWQRDLPWGEQVSLPANFNQQLEGIKTEQQKTVAQWKALGVQLPANSQLSDDMKVWLIIPDDDLHRSYLVTQNFRTIMHWNSSYFFALSIVTMADGVANKINTLPTQH

SEQ ID NO: 3331 - DNA, 657 bp, Serratia marcescens
atgtatcaacatagagattgggaaggttcgttgcttgattttcctgtcaataaagtgatttgtgtgggcagtaattatgcaaaccacataaaagagatgggctcggtgcgctctgaagagccggttatctttattaaaccagaaacggcgatgtgtgatattcgccaacctattgcgatccccaaagaaatgggggcagtgcatcatgaaatagagttagcggtattaattggtcagccactgaaacaagccaatgaagatagggttgatcgagctattgctggttttggtgttggtttagatctcactttacgtgatttacaaagtcaattaaaaaaagcgggacaaccttgggagaaaagtaaagcgtttgatggttcagcgcctttgtcgggatttattccggtgaactcttttggtgatccccaaaatgttgacttaatgttgaaagttaatggtgaaattcgtcagcaaggcaacagtcgtgatatgctaacgcctgttttaccccttatcagttatatgtcgcgcttttttacccttcgcccaggtgatgtcattttaacgggaacaccagaaggtgtcggtcccttagcatcgggtgatatgttggtattaagtgtcaatgaacatcagctgaccacacgggttatttaa

SEQ ID NO: 3332 - protein, 218 aa, Serratia marcescens
MYQHRDWEGSLLDFPVNKVICVGSNYANHIKEMGSVRSEEPVIFIKPETAMCDIRQPIAIPKEMGAVHHEIELAVLIGQPLKQANEDRVDRAIAGFGVGLDLTLRDLQSQLKKAGQPWEKSKAFDGSAPLSGFIPVNSFGDPQNVDLMLKVNGEIRQQGNSRDMLTPVLPLISYMSRFFTLRPGDVILTGTPEGVGPLASGDMLVLSVNEHQLTTRVI

SEQ ID NO: 3333 - DNA, 1200 bp, Serratia marcescens
atgaaattacattttatctatcgctataatgcattaacttatcaaggaaaatggctaagtggcaacgttgtcgctcaatctaaacatgaagttattgatcaacttattcaacaacaaaaattaccagtaaaaattcgcctatatagggtaataatctttcaaaatagtgataaacaataccgcattcaacttcttgaacagttagcgttattacttcattcaggcttagcacttttgcccgcattaacactgcttaaagaagaatgtcgttatttacattggcaatgtgttttaaatgatattatttttcacctaaatcaaggaggcgcgctgtctaaacagttaagtcgttatccactctattttcctgctaatttaacccattttatttatattggtgaagagagtggtaagcttgatgaagttctcttattacaaacaacacaattaaaaaaccagcgggatttaataaaaaaaataataaaagcttttcagtatcctctattcttattattaacattaatcgttattacaatatctatgttgatctatgttttacctgaatatcaatctttatacagtgcatttaatactgagctaccgatgctaacattaaccttaattagatgttctcaatggttttctcaatatagtttaattatcctgctgtttatattaataatttcttatagctattacactattaaacaccatagtgctaaatttcgcgacattgaacaacgatgttggcttaatcttccttacttgggggtcttattaagatatcaccagctacatattatttttcagataatgacgattacacaacaagctggattaccactgttacaggggttaaaaattattacagagcaattaacgcattcactgtatcaacgagcactcactgatatgatagcgcatattactcaaggcaaatcacttagctcatttatgcgacataatcctctattcccgccaatctgttatcaattgatctcttcagcagaaaattctggacaactacagtttttttgccagcaacttacccactggttttatcatcaattagaagaacgccttgatagtgtaaaaacatggcttgagcctattttaatgacactgatcgcattgattactggcacgcttattattgcgatgtatcttccggtgttacaactaggtgataccatacattga

SEQ ID NO: 3334 - protein, 399 aa, Serratia marcescens
MKLHFIYRYNALTYQGKWLSGNVVAQSKHEVIDQLIQQQKLPVKIRLYRVIIFQNSDKQYRIQLLEQLALLLHSGLALLPALTLLKEECRYLHWQCVLNDIIFHLNQGGALSKQLSRYPLYFPANLTHFIYIGEESGKLDEVLLLQTTQLKNQRDLIKKIIKAFQYPLFLLLTLIVITISMLIYVLPEYQSLYSAFNTELPMLTLTLIRCSQWFSQYSLIILLFILIISYSYYTIKHHSAKFRDIEQRCWLNLPYLGVLLRYHQLHIIFQIMTITQQAGLPLLQGLKIITEQLTHSLYQRALTDMIAHITQGKSLSSFMRHNPLFPPICYQLISSAENSGQLQFFCQQLTHWFYHQLEERLDSVKTWLEPILMTLIALITGTLIIAMYLPVLQLGDTIH

SEQ ID NO: 3335 - DNA, 1080 bp, Escherichia coli
atgagtacacctttcaaactgaaaccgttagtggcgggcgttcttttaactctatctttaagtacaatcgcacaagcagcaagcgataaagtagtgattgcccatcgtggtgccagcggttatttacctgaacacaccttacctgccaaagcactcgcctatgcacaaggtgccgattatctagaacaagatctggtgatgacaaaagataaccaactggttgtcttgcatgatcactatctcgatcgtgtcaccgatgttgctgaacgctatccagacagagcaagaaaagatggccgttactatgctatcgattttactcttgatgagatcaaaggactaaaatttaccgaaggtttcgatattgttaacggtaaaaaagtccaaagttatccaaatcgtttcccaatgggaaaatccgattttcgaatccacactttccaagaagaaattgagtttatccaaggcttaaacaaatcaacaggacaagatattggtatttatcctgagatcaaagcaccttggtttcatgaacaagaagggaaagacattactaaaaaagttctcgaagtcttaaaacagtatggctatacccaaaagagcgataatgtttatctacaatcctttgatcctaacgatctaaaacgcattaaaacagaattgatgccacaaatggggatggatttaaaactggttcagttaatcgcttacaccgattggaatgagacatatgaaaaacaaccagatggcacatggacaaactacagttatgactggatgtttaaacctggcgccatgaaagaaattgcgacttatgctgatggcattggccctgattatcatatgttagtagaagaagactcgacaccagataaaatcaccttaaccggtatggccgccgatgctcatgccaacaagttaaccattcatccatttacggtacgagtggataaactacctaaatatgccaaagatggcgatcagctttatgacattatttataaccaagcgggtgccgaaggggtatttactgatttccctgatttaggggttaagttcttacaaaaacaagctaaataa

SEQ ID NO: 3336 - protein, 359 aa, Escherichia coli
MSTPFKLKPLVAGVLLTLSLSTIAQAASDKVVIAHRGASGYLPEHTLPAKALAYAQGADYLEQDLVMTKDNQLVVLHDHYLDRVTDVAERYPDRARKDGRYYAIDFTLDEIKGLKFTEGFDIVNGKKVQSYPNRFPMGKSDFRIHTFQEEIEFIQGLNKSTGQDIGIYPEIKAPWFHEQEGKDITKKVLEVLKQYGYTQKSDNVYLQSFDPNDLKRIKTELMPQMGMDLKLVQLIAYTDWNETYEKQPDGTWTNYSYDWMFKPGAMKEIATYADGIGPDYHMLVEEDSTPDKITLTGMAADAHANKLTIHPFTVRVDKLPKYAKDGDQLYDIIYNQAGAEGVFTDFPDLGVKFLQKQAK

SEQ ID NO: 3337 - DNA, 459 bp, Proteus mirabilis
gtgataacgacacagggaacaataaaggagcaacagggtgtcatcggtctgatggctgcagtaggttttatggtgataagtttatcgttactgacaagttttgcttatcattatcgtcaatgtcaattaatggtgatgcaagagttacaagcaaagcagacctttttattcgctggatctgcgttgtcatggggaatgaccttaacatgggatttatcgccttctcgtctttaccaatggcaatgtcgtacttttactgctgagcctaatatgaaaagctgtttctctttgagaggaaagacaagcgctttactactcggagaggctaaaagtcatagcggagataagatatctcattatcaatggattaatctggtgggtaaggaaaaactgcatattgaagcccaaccgaatggttggctagactactgtccactagttaaagaaggctgtatttga

SEQ ID NO: 3338 - protein, 152 aa, Proteus mirabilis
MITTQGTIKEQQGVIGLMAAVGFMVISLSLLTSFAYHYRQCQLMVMQELQAKQTFLFAGSALSWGMTLTWDLSPSRLYQWQCRTFTAEPNMKSCFSLRGKTSALLLGEAKSHSGDKISHYQWINLVGKEKLHIEAQPNGWLDYCPLVKEGCI

SEQ ID NO: 3339 - DNA, 1692 bp, Morganella morganii
atgttaaaacgaattaaaatctctcaaggtttaatgtgtgtcctgactctgttttgtattattcaggtaatatctggagtacaaagcattcacgatgcctaccaaactcaaaacaaattaaaacaaatctcatacagtttcgaccagttacgcactatggataacacctacgcggcgttaaatactttacgtactgatattattgcgcaggcgtttagttatattgctaatccacaggtggaagatgccaatattactacattcatgcaaacgatggatacacgtaaggcagaggtggatacgttgatgaatgaatatgtcgaactatctgcacaaactggatttgatcagcaacgcatggcagagatcaaacaactttatcaaaaaagtcgttatgacttagatcttcttgtgcaatatttaaatgaacgtaataccaatgcaattcgtttgatcttaaaaagtccagccaacgataacttcactaattcattatatgaagcaacggatttcattactgatgacgttgttaatccgtcagtgattgaagcagaagataactatcacgagatgctatggatagcctccctattcatgggtatattcctgatatttacgacattagtgctcttttggatccgtaaacatattattgtacgcattaaccaaatgattgaatatcaagaggcgattgctagtggagatttaattagtcgcattgaccatgatattacaggccgcaatgaaatagaccaacttatgttgggtttacaacaaatgcgagcgcgcttaaaagaaatggttagcgctatccgtaacagtagtacaacgatttatagtggtgttcaagaaattgccgcaggtaataacgatttatcaagtcgtaccgaagagcaagccagtgctttagaagaaacggcttccagtatggaacagcttaccgcaacagtcagaaataataccgaaagcgcacgtgaagtcactcagttagtcatgagcacagcagatattgccgttcaaggtggtgagcatagcaataagatggtgatgaccatgacagacattgccgatcgttcgcaaaaaattggtgagatcaccgcagtgattgatgatatcgcttttcaaaccaatatattagctctcaatgccgcagtagaagcagccagagccggtgagcaaggacgcggtttttctgtggtagccagtgaggtacgtaatttggcgcaacgtagtgcggaggcggcaaaagagataaaagaactcattgaatcaactattttacgagtaaaacagggtaatgatcttgttgaacaagtcagcttatctatgggagagatcgtcacatcagttaaccatgtatcaggctcgatgaaagagattttagcagcatcagaagagcaaactcgtggcattgctcagattagccttgcagttaatgaaatggataaagcgacacaacaaaatgccgcgatggtggaacaatctacagctgcttcagcaacactaagtgaacaagcctcaatgttagatatgattgtaaataccttcaaggtagaacaaatcgcggttacatcaccacgatcaccaacattctcggctaagccagctgaaccggaaataacaaaaacagcaacaacatccacaataaaatcccatcatcatgaagccgatgacaattgggaaagtttttaa

SEQ ID NO: 3340 - protein, 563 aa, Morganella morganii
MLKRIKISQGLMCVLTLFCIIQVISGVQSIHDAYQTQNKLKQISYSFDQLRTMDNTYAALNTLRTDIIAQAFSYIANPQVEDANITTFMQTMDTRKAEVDTLMNEYVELSAQTGFDQQRMAEIKQLYQKSRYDLDLLVQYLNERNTNAIRLILKSPANDNFTNSLYEATDFITDDVVNPSVIEAEDNYHEMLWIASLFMGIFLIFTTLVLFWIRKHIIVRINQMIEYQEAIASGDLISRIDHDITGRNEIDQLMLGLQQMRARLKEMVSAIRNSSTTIYSGVQEIAAGNNDLSSRTEEQASALEETASSMEQLTATVRNNTESAREVTQLVMSTADIAVQGGEHSNKMVMTMTDIADRSQKIGEITAVIDDIAFQTNILALNAAVEAARAGEQGRGFSVVASEVRNLAQRSAEAAKEIKELIESTILRVKQGNDLVEQVSLSMGEIVTSVNHVSGSMKEILAASEEQTRGIAQISLAVNEMDKATQQNAAMVEQSTAASATLSEQASMLDMIVNTFKVEQIAVTSPRSPTFSAKPAEPEITKTATTSTIKSHHHEADDNWESF

SEQ ID NO: 3341 - DNA, 1479 bp, Morganella morganii
atggataaacccgctaaagtcggtttattacaacagcctaaaccattctttatgattttctttgtggaattatgggaacgttttggttactacggcgtacaaggtattcttgccgtttattttgttagtaaactcggattctctcaagaacaagcttttattacttttggtgcattctccgcattagtttatgggcttatttctattggtggttatgttggtgaccatctattaggtactaaacgaaccattgttttaggggctatcgtattggctatcggttattttatgaccggcatgtcaattatgtatcctaatttaatcttttatgctttagccactatcgcagtaggtaacggtttatttaaagcaaacccagcaagcctattagctaaatgctataaacctaaagatccccgtcttgatggtgcatttacactattttatatgtcgattaatgttggttcattaatctccttatctattgcccccgttcttgccgatcgctacggctatgcactgacttataatatttgtggtatcggcttaataatggccatattggtctattttttctgccgtaaaatggtcgtgaatattggttctgagccagatcacctgccaatgaatttcaacaaactgctattagttattgcaggctctgtcgctatggtctttatttgtgcatggttgttgcacaatgtgatgattgctaacatcgttttaatcagcttgtctattgttgtggttatcatttattttcgtgaagcctttaaacaaaaagacagagtggcacgtaataaaatgtatgttgcatttgttctgatgttagaagctgttattttctatattctctacgctcagatgccaacctcacttaacttctttgctatccataatgttcaccataccctgttaggctttgatattaacccggtgagtttccaagcattaaatccattttggatcattattgccagccctatcttagcaatggcttatagccattttggcgcgaaaggcaaagatttatccatgccggcaaaatttaccacaggtatgcttttatgctcattaggcttcctaaccgctgccgcttcaggtatgtggtttgctgatgctcaaggcttaacatcaccttggtttgttgtactgatttatctcttccaaagtctaggggaattgatgatcagtgcattaggcttagcgatgattgccgcttttgtaccgcaatatatgatgggctttattttaggtatgtggttcttaacacaagcgacggcttacctgttaggaggccatgtagcaacctttaccgccccacctgaaggtattaccgatccactacaaacactgcctatttatactgatgtgtttggcaaaatcggtatcgttaccttagtggttggcttgattatgtgggcaacagtacctttactaaaccgcatgatgaaagaagagagtaaaatgattaagtaa

SEQ ID NO: 3342 - protein, 492 aa, Morganella morganii
MDKPAKVGLLQQPKPFFMIFFVELWERFGYYGVQGILAVYFVSKLGFSQEQAFITFGAFSALVYGLISIGGYVGDHLLGTKRTIVLGAIVLAIGYFMTGMSIMYPNLIFYALATIAVGNGLFKANPASLLAKCYKPKDPRLDGAFTLFYMSINVGSLISLSIAPVLADRYGYALTYNICGIGLIMAILVYFFCRKMVVNIGSEPDHLPMNFNKLLLVIAGSVAMVFICAWLLHNVMIANIVLISLSIVVVIIYFREAFKQKDRVARNKMYVAFVLMLEAVIFYILYAQMPTSLNFFAIHNVHHTLLGFDINPVSFQALNPFWIIIASPILAMAYSHFGAKGKDLSMPAKFTTGMLLCSLGFLTAAASGMWFADAQGLTSPWFVVLIYLFQSLGELMISALGLAMIAAFVPQYMMGFILGMWFLTQATAYLLGGHVATFTAPPEGITDPLQTLPIYTDVFGKIGIVTLVVGLIMWATVPLLNRMMKEESKMIK

SEQ ID NO: 3343 - DNA, 192 bp, Morganella morganii
atgatcttgctgatttctttgctgtgtgaatttaaagccgtaacgctacctcgcattagccaagagatcaatctttctttgttacaacctgttaactttatctcaaaaagtcgtgagacaaccttatcgctggttgttattattcctaataagtcaagaaaagcgataggtaaatcagggggtttagcctag

SEQ ID NO: 3344 - protein, 63 aa, Morganella morganii
MILLISLLCEFKAVTLPRISQEINLSLLQPVNFISKSRETTLSLVVIIPNKSRKAIGKSGGLA

SEQ ID NO: 3345 - DNA, 1278 bp, Morganella morganii
atgacacagtcactgctgtctgatattgatatactattaattgatgatgatgaggatattctcgaatcttatcgtcatttgcttaatcttgccggaatggttgccagagtgactgattcgccagaaaaagcattgagtctgctgacaccagaatatgaaggtgcggtagtgttagatatttacatgcctgcgatgaatggcatggaagtcttagcgcgtattcaacaaattgatcctcgtattccggtgattatgatcaccggccacggtgatataccccttgctgtagaggccgttaaaaaaggcgcttatgattttattgaaaagcccattaatccaccgctatttttagagttagttgctaaagcgcataaagagcgaaaatcacttctttcacttagaaaaacgatgatcaccaccactcaagagcgtttagttggcgatagtgcacaaattaccgccattagacagcaagtacagcaaattgctgatattgataaagacttaatgattgaaggtgagatggggacagggcgacatctacttgctcagttattacatgaattaagtcctcacagcgataaagcggtgactacggtagattgtcaaaatttagtagatattaagccactgattgctcaaatagagcaagaggaggtcggcacacttattttacgctccccttatgatttaccttctggtgcacaacgttggttaagtgcttacctattagatatggaaaggcagggtaagcgtcaatttagaacgatcgcgattttagaaaataatacccagcaattagtcactgaagggcgattgatacctgagttctattactacttttcgcaaataactttttctttgccaccattaagcgcaagacgcccagatattattcctctatttagagcctttttacggcaaagtgctcagcggcttgggatcgccgtaccaaaaattgatcgtaattatctcgatatattaaaacgttatgattggcctggaaacattcgtgagctacggaatgtcgctgaactctatgctgttggtattgtgaaaatggttgatagtgagcaacatcgtgccattatcccccctgaagggcctttagataacttagttgatgattatgagcgtcgcttaattgaagatgcactctatttatttgctggccgtgtgagcgatgtggctgattatttaggtatcccacgtaaaaaactctatttacgcatgaaaaagcatgaactggataaagagagttataaacctaaggtttga

SEQ ID NO: 3346 - protein, 425 aa, Morganella morganii
MTQSLLSDIDILLIDDDEDILESYRHLLNLAGMVARVTDSPEKALSLLTPEYEGAVVLDIYMPAMNGMEVLARIQQIDPRIPVIMITGHGDIPLAVEAVKKGAYDFIEKPINPPLFLELVAKAHKERKSLLSLRKTMITTTQERLVGDSAQITAIRQQVQQIADIDKDLMIEGEMGTGRHLLAQLLHELSPHSDKAVTTVDCQNLVDIKPLIAQIEQEEVGTLILRSPYDLPSGAQRWLSAYLLDMERQGKRQFRTIAILENNTQQLVTEGRLIPEFYYYFSQITFSLPPLSARRPDIIPLFRAFLRQSAQRLGIAVPKIDRNYLDILKRYDWPGNIRELRNVAELYAVGIVKMVDSEQHRAIIPPEGPLDNLVDDYERRLIEDALYLFAGRVSDVADYLGIPRKKLYLRMKKHELDKESYKPKV

SEQ ID NO: 3347 - DNA, 1275 bp, Morganella morganii
atgaaacttgagacactttctgttcacgctggttattcacctgatccaaccaccaaagctgttgcggtgcctatttaccaaaccacctcttatgcatttgatgatacgcaacatggtgctgatctatttgacttaaaagtacctggcaatatctacacgcgtatcatgaacccaaccaatgatgtattggaacaacgcgttgccgccttagaaggagggattgcagcagttgctgtggcatcgggtatggccgcgattacttatgctatccagaccattgcacaagtgggcgataacattgtgtcggttgcgaaactctatggtggtacatataacttaatggcacatacttttccccgtatcggtatcgaagcgcgttttgccccccatgatgatctgctggcacttgaagcgttaattgatgagaaaaccaaagcggtattttgtgaatctatcactaatccaagtggtaatattgttgatattcaagctctcgccactgtggctcatcgtcatggtgtccctttaattgttgataatacggtagcaacgccttacctatgtcgcccttttgagcatggtgctgatattattattcactcactcactaaatatattggtggtcatggtaactctattggtgggatcgtcgttgattcaggtaaatttccttgggctgaacataaagatcgttttgaaatcctcaatacaccggatgtctcttatcatggggttaattatgttgagcactttggtgcggctgcttatattgcgcgatgccgtgttgctccattgcgtggaacaggagccgccctttcgccatttaacgccttcttaattcttcaaggtctagaaacattagcgttacgtatggagcgtcatactgaaaatgcgcaaaaagttgctgaatatttgcaaaatcatcctcaagttgtctgggttaaatatgcaggtttaaccagccacccagagcatgatttagcagtacgttatatgtcaggtaaacctgctggtattctctcttttggtatcaaaggtggtgctgaagcgggtgcgaaatttatcgatgcattgaaattgattgtacgtcttgtcaatattggtgatgctaaatccttggcttgtcatcctgcatcaaccactcatcgccaactcaatgatgaagagctagaacgcgcgggggtttcgcgtgatttaattcgactttcaattggtattgaacatatagacgatattatcgctgatctagaacaagcattaaacgccagtttttaa

SEQ ID NO: 3348 - protein, 424 aa, Morganella morganii
MKLETLSVHAGYSPDPTTKAVAVPIYQTTSYAFDDTQHGADLFDLKVPGNIYTRIMNPTNDVLEQRVAALEGGIAAVAVASGMAAITYAIQTIAQVGDNIVSVAKLYGGTYNLMAHTFPRIGIEARFAPHDDLLALEALIDEKTKAVFCESITNPSGNIVDIQALATVAHRHGVPLIVDNTVATPYLCRPFEHGADIIIHSLTKYIGGHGNSIGGIVVDSGKFPWAEHKDRFEILNTPDVSYHGVNYVEHFGAAAYIARCRVAPLRGTGAALSPFNAFLILQGLETLALRMERHTENAQKVAEYLQNHPQVVWVKYAGLTSHPEHDLAVRYMSGKPAGILSFGIKGGAEAGAKFIDALKLIVRLVNIGDAKSLACHPASTTHRQLNDEELERAGVSRDLIRLSIGIEHIDDIIADLEQALNASF

SEQ ID NO: 3349 - DNA, 1761 bp, Serratia marcescens
atgattactataaaaaaaacgcacctgctgttacttaccacacttttttcacctgcactctatgccgcctatgagccagcggttgaagcacaacaaggtatggtggtctcttcacaacatttagcctcacaagtaggaaaagatattttgcaaaaaggagggaatgccattgatgcagctgttgctgttggctatgcacaagctgtggtaaatgcttgttgtggaaatattggcggtggtggttttatgactatacaccttgctgatggcaccaatacctttattaattttcgagaaacggcgcctacggcagcatctaaaaatatgtatttagataaagacggtaacttgattaaagaggcaagcctatacggctatcttgcctcaggggtgccgggtacagtgaaaggacttgatgcagcattagaaaaatatggcactctttcacgccaagaagtgatggctcccgctattaaactagccagagaaggctatattttaacccgtgctgatactgacgtattagacaccaccacagagcgatttaaacaagatcctgaatcagcaaaaattttcttaaagcctgatggaacaccatggcagcctggcgatcgcctcattcaaacagacttagccaatacacttgaacttatcgccaaccaaggtgctgatgctttctatcaaggggaaatccctaaaaaagtagaacaagcttcaaaacagcataatgggttattaaccaaagaagattttgcgaacttcactattaccgaaacacctcccattacctgtacttatcgaggttatgaatttatctctgctcctcctcccagttcagggggcgtcactatttgccaaacactgaatattttagaaggctacgatctgaaatcgatgggttttaactctgccgaatatgttcacacgctcacagaagctatgcgtcatgcttatatggatagaaacacctttcttggcgatccgcaatttataaacaatccaacagaaaagttattaagtaaagcctacgccgcagagcttcgccaacaaattacaccgaataaagccaccccatcagaaaaggtacaacccggtattgcacctcatgaaagccctgaaaccacgcattattcggtgattgataaagatggtaatgccgtttcaaccacttacaccatcaatggtcgttttggtgctgtcgttatcgccccggggactggctttttcctcaataatgagatggatgattttacaactaaagttggcgaaaaaaatctttatggcttagtacaaggtgaacgaaatagtattgccccattaaaacgtccactgtcctcaatgagtccaaccattgtgactaaagatggcaaaccctttcttgtattaggctcaccgggaggctctcgtattatctcaatcaccttacaaacggcacttaatattattgagtttggtatgtccccccaagaagccgtcaatagccctcgaattcatcatcaatggctacctgatgaggtttattatgaacaacgaggattatcaaaagataccttagaaaaactttctgccatgggatataaaatggtcgaacaaacgccatggggcgcggctgaattgattatggtcggccttccaggagaacaaggagtgatccctgcttcgtcaggtaatgattctgctgtttcaggggcgatacgcgaaggttatctttatggttcaaatgatgttcgacgtccagcaggtaaagccgtgggctactaa

SEQ ID NO: 3350 - protein, 586 aa, Serratia marcescens
MITIKKTHLLLLTTLFSPALYAAYEPAVEAQQGMVVSSQHLASQVGKDILQKGGNAIDAAVAVGYAQAVVNACCGNIGGGGFMTIHLADGTNTFINFRETAPTAASKNMYLDKDGNLIKEASLYGYLASGVPGTVKGLDAALEKYGTLSRQEVMAPAIKLAREGYILTRADTDVLDTTTERFKQDPESAKIFLKPDGTPWQPGDRLIQTDLANTLELIANQGADAFYQGEIPKKVEQASKQHNGLLTKEDFANFTITETPPITCTYRGYEFISAPPPSSGGVTICQTLNILEGYDLKSMGFNSAEYVHTLTEAMRHAYMDRNTFLGDPQFINNPTEKLLSKAYAAELRQQITPNKATPSEKVQPGIAPHESPETTHYSVIDKDGNAVSTTYTINGRFGAVVIAPGTGFFLNNEMDDFTTKVGEKNLYGLVQGERNSIAPLKRPLSSMSPTIVTKDGKPFLVLGSPGGSRIISITLQTALNIIEFGMSPQEAVNSPRIHHQWLPDEVYYEQRGLSKDTLEKLSAMGYKMVEQTPWGAAELIMVGLPGEQGVIPASSGNDSAVSGAIREGYLYGSNDVRRPAGKAVGY

SEQ ID NO: 3351 - DNA, 3726 bp, Proteus mirabilis
atgaaaatcttaagtctgcgctttaaaaacattaactcactcaaaggcgaatggaaaattaactttgatcaagagccttttgttagcaatggactatttgccattacaggcccgacaggtgcgggtaaaaccacgctcttagatgcaattagtttagccttatatcacagaacgccacgcttagataaagtaacccaatctcaaaatgaattaatgactcgtcacactgcagaatgtttagctgaagtggaatttgaagttaaaggggttgcctatcgggcattttgggaacaacgtcgtgctaattataaagaagagggaaacttacaagccccacaggctgagttagcaaaaattaatcgtttaggcggtgaagataaagttttagccaataaaattagccaagtaaaagaaaaaataatctcgatcaccggattagatttcgatcgcttcactaaatccatgttgttatcacaagggcaatttgctgcatttctcaacgctgatgacaaatctcgtgcagagctacttgaagagcttactggtacagatatctatcgccatatttcacaaacaatttttaaacattggcgcgaagaagagcaggctttaaatacgctaaaacaacaagctcaaatgatggcattattggatgcaacaacacgccaagagctattaacacaacaagccaatattcaagcacaagtaacaaggttacaaaaagaacaacaggaataccaagttgctaagcaatggcaagaaaaagcgctagaaattcagcagcaacaacaatcagcccaagcgggactctatgaggctcaacaggcattaattattgctcaacccgatattcaacgcttagaaaaaaatgagccagcagaaaaaattcgccctctttatgatgaaaaaaatcgtcgtcttacagagcaaaactatttagcaacacagttaacaagcttaaaaacagaaaaacaggctattgaacaacaaagcctacctatcaataaaaaattggcagactttcatgaacaattaaaaacgcatcatgagaaaaaacagcacactttacagttaattcgtgagaaggtactgcctttagataatcaattggtgctgttacaacaagaaattagtactaataaccaacacaagcataaattagaaaaaatatgcgctgaatatctgcaacattctcagttagccgagaaaaaattaatcaccacacaacaacaagttaatcaattaaataacgacttaacacaacacgcctatcatgcacaacttgcggaaaatctacccttatggcaacactattttcagcaatataatgaaatatcaaaccaatatcttgccaaccaaaaacgagaaacagcagagcagggaaaagtcataagtttggaaaaagcattacaacaagctacccaaacattagccacccaacaagagcaacttaatttacagcaacagcaactacaatcttatcaaacacaattggaagcgcgtcaaaaagcagacaaacccgatgaaataaaaccgcgattacaacaaattaatctgcaaaaaaatgcattggcaaaaattataaatttacacactcaattacaacgtaatggcaaagagcagcaacattatcaaactacattgagtgaaaatcagcaaaaaatagcggctctaacccaaacgattgcagaaaatgatctggcactaaaagagaaagcacaacatcttaaagatttaaatgacaactatcttttgctacaaaaagtcgccgaatatgagcaagagcgtgcacgtttactgaaagataaaccttgtcctctatgtggctcaacacagcatccttatgtagaaacctatcatgacatcaaaccagatgagacaaagctacgtttagaagcattacaacagcaggtgcattcactcaccatcaccttagccgaacagcgaacccaacgggtaaactatggctcacaaaatagcaccttgagtgacaatatcgctcagttaacccaagagaatagcgtactgacccaacagtggcagacgttagcacaagcacaccatttaccgttagttgatgatgcagataacttactgacattagaacaatcattaaatcagcaagagcttattctcacagaaaaacttgacagttatcagcaattagaagcccaaacacatcaaaagaatacgcattttctcaatgcaaaagagcaatttaatcaacaacaacaatcggttaagcaacagcaaaatgatttagattatttgcaaaaaacaatcaaaacctatcagcaacaaagcgagcacttgcaccaacagcaacaacaattagcacaacatattcagtcagcgattgaaaaacaaggctatacactccctgaatttgagcagttcacgccatggttggcggctcgtcaacaagagcaccagcaatatcaaagtcagttaaaagagcttcagctattacaacaaagcctacgtgaacagcaagtgacgcaaaatgaaaaaaaacgttatttagcagaaaaacaggctgaacttgaggcgctattagcaaaattaagccaacaacagcaccaacaaacacaatggcaggatcaacgacaagccttatttggttcacaatctgtagagcaggtacgtagtgaacttgataaacatagccaatttttacaaacccagattgagcaatatactcaagaaaaaaaccaactcgaaaaccgacttaatcaattaattggccaatatcaagagagtgaaaaagccctacaacgagcaataacacaagcacaacaagccactgaacactatcaacacgcgttaaaagagagtctttttgccgatgaaaatgactttttagcctctctattatcggtagaggaaaggacacgtctgcaagagcagcaaaaacagcgacttgataaacttttacaagaaaaaacgcgccttgagacccaagaaaaagcctatcaacaacatttattacaacaaccattactctcaacccaatgtactgctgagcaatgtaatatccatttagacgacttagcaaagcaacataacgcattgcaagaaacactatttagtctgcaaatacaattacgccaagatgatgaaaaacggatagagcaacaaacactattagcgcaaatagccaaacagcaagcgcattatgatgattggagttatttaaatgagttagttggctctgcatctggtgataaatttagtcgctttgcccaagggttaaccctcgaccatcttatctatctggctaatcgtcgcttagaaaaactacatggtcgttactttttacaacgcaaaacgacaggtagccttgaattacagattgccgatacatggcaagcagatgctctacgcgatacacgtacactttctggtggagaaagttttttagtcagcttatcccttgccttagcgttatctgatttagtcagtaataagacgcaaattgagtcactctttttagatgaaggctttggcactctcgatcctgatacactagatattgctttagatgccttagatagccttaatgcttctggcaaaattattggtgtgatcagtcatgttgaagcgatgaaagagcgtattccggtacaaataaaagtgaaaaaagcggggggtttaggaataagtcagctagcaccagagtttagatatggtaataagagcaatgaaaatcaatcagttaaagactag

SEQ ID NO: 3352 - protein, 1241 aa, Proteus mirabilis
MKILSLRFKNINSLKGEWKINFDQEPFVSNGLFAITGPTGAGKTTLLDAISLALYHRTPRLDKVTQSQNELMTRHTAECLAEVEFEVKGVAYRAFWEQRRANYKEEGNLQAPQAELAKINRLGGEDKVLANKISQVKEKIISITGLDFDRFTKSMLLSQGQFAAFLNADDKSRAELLEELTGTDIYRHISQTIFKHWREEEQALNTLKQQAQMMALLDATTRQELLTQQANIQAQVTRLQKEQQEYQVAKQWQEKALEIQQQQQSAQAGLYEAQQALIIAQPDIQRLEKNEPAEKIRPLYDEKNRRLTEQNYLATQLTSLKTEKQAIEQQSLPINKKLADFHEQLKTHHEKKQHTLQLIREKVLPLDNQLVLLQQEISTNNQHKHKLEKICAEYLQHSQLAEKKLITTQQQVNQLNNDLTQHAYHAQLAENLPLWQHYFQQYNEISNQYLANQKRETAEQGKVISLEKALQQATQTLATQQEQLNLQQQQLQSYQTQLEARQKADKPDEIKPRLQQINLQKNALAKIINLHTQLQRNGKEQQHYQTTLSENQQKIAALTQTIAENDLALKEKAQHLKDLNDNYLLLQKVAEYEQERARLLKDKPCPLCGSTQHPYVETYHDIKPDETKLRLEALQQQVHSLTITLAEQRTQRVNYGSQNSTLSDNIAQLTQENSVLTQQWQTLAQAHHLPLVDDADNLLTLEQSLNQQELILTEKLDSYQQLEAQTHQKNTHFLNAKEQFNQQQQSVKQQQNDLDYLQKTIKTYQQQSEHLHQQQQQLAQHIQSAIEKQGYTLPEFEQFTPWLAARQQEHQQYQSQLKELQLLQQSLREQQVTQNEKKRYLAEKQAELEALLAKLSQQQHQQTQWQDQRQALFGSQSVEQVRSELDKHSQFLQTQIEQYTQEKNQLENRLNQLIGQYQESEKALQRAITQAQQATEHYQHALKESLFADENDFLASLLSVEERTRLQEQQKQRLDKLLQEKTRLETQEKAYQQHLLQQPLLSTQCTAEQCNIHLDDLAKQHNALQETLFSLQIQLRQDDEKRIEQQTLLAQIAKQQAHYDDWSYLNELVGSASGDKFSRFAQGLTLDHLIYLANRRLEKLHGRYFLQRKTTGSLELQIADTWQADALRDTRTLSGGESFLVSLSLALALSDLVSNKTQIESLFLDEGFGTLDPDTLDIALDALDSLNASGKIIGVISHVEAMKERIPVQIKVKKAGGLGISQLAPEFRYGNKSNENQSVKD

SEQ ID NO: 3353 - DNA, 300 bp, Morganella morganii
atgagtattgaacgcacaaatccacttatcccaatcacggccatttctcagcgtaaccttaatgaaggtgcccaagaagcacgaaaaaccggtaatacgcaaacaaaagcaatggcgggtgatacttctgtgaaactaagtgaagcacagaaaaaattagttcaacctagcaatcaagacatcaatgtcgagaaagttgcccgtttaaaagcagcgattgccgatggaacattaacaatggacagcagcaaaattgcggaagcacttttccgagaagctgctgaaagcataactaaataa

SEQ ID NO: 3354 - protein, 99 aa, Morganella morganii
MSIERTNPLIPITAISQRNLNEGAQEARKTGNTQTKAMAGDTSVKLSEAQKKLVQPSNQDINVEKVARLKAAIADGTLTMDSSKIAEALFREAAESITK

SEQ ID NO: 3355 - DNA, 639 bp, Escherichia coli
atgaatcaagctaaacgtatagaaattttaactaggttgcgggataacaatccgcatcctactactgagttaagatttaactccccgtttgaattattgatctccgtgttactctctgcacaagccaccgatgttagtgttaataaggcaacagcaaaactttatcctgttgccaatacacctcaagcaatgctggaattaggtgttgaggggatcaaatcctatattaagaccattggcctatttaatacaaaagctgagaatgtgattaaaacctgccaaatattggtagataaacatcatggccaagttcctgaaaatagagaagctttagaggcattacccggtgtcggtcgtaaaacagcgaatgtcgtacttaacaccgcttttggttggccgaccattgctgttgatacccatatctttcgcgtgtgtaatcgcactaaatttgcaccgggaaaaaatgttaatgaagtggaacaaaaactgctaaaagtggtaccggcagaatttaaagtcgattgccaccattggcttatcctgcatggtcgttatacctgtattgccagaaaaccacggtgtggctcttgtattattgaagatctctgtgagtataccgaaaaaacagatccacaataa

SEQ ID NO: 3356 - protein, 212 aa, Escherichia coli
MNQAKRIEILTRLRDNNPHPTTELRFNSPFELLISVLLSAQATDVSVNKATAKLYPVANTPQAMLELGVEGIKSYIKTIGLFNTKAENVIKTCQILVDKHHGQVPENREALEALPGVGRKTANVVLNTAFGWPTIAVDTHIFRVCNRTKFAPGKNVNEVEQKLLKVVPAEFKVDCHHWLILHGRYTCIARKPRCGSCIIEDLCEYTEKTDPQ

SEQ ID NO: 3357 - DNA, 522 bp, Proteus mirabilis
atgtcttctcaagttggtctcaatacctcatcccctcgtatcgctattgtgatgggttcgaaaagtgactgggcgacaatgtgtcatgccgcagaagtcctagacgcgttacaacttccttaccatgttgaaattgtttccgcacaccgaacaccggataaattatttcgtttcgcagaacaggccaaagagaatggttttgacgtgattattgcgggtgctggcggtgctgcacatttaccggggatgttggcagccaaaaccttagttcctgtattaggggttcctgtacaaagtgctgcattaagtggtgttgatagcctttattctattgtacaaatgccgaaaggtattcccgttggcacactggctattggtaaagcgggggctgctaatgccgcgctacttgccgcacaaattttagcattacactctgctgatatttttaatgcattaacacaatggcgagcaacacaaacacaagaagtccttaatcaccctgatccaagggaggcgctatga

SEQ ID NO: 3358 - protein, 173 aa, Proteus mirabilis
MSSQVGLNTSSPRIAIVMGSKSDWATMCHAAEVLDALQLPYHVEIVSAHRTPDKLFRFAEQAKENGFDVIIAGAGGAAHLPGMLAAKTLVPVLGVPVQSAALSGVDSLYSIVQMPKGIPVGTLAIGKAGAANAALLAAQILALHSADIFNALTQWRATQTQEVLNHPDPREAL

SEQ ID NO: 3359 - DNA, 279 bp, Morganella morganii
atggctcaagcactagtagaaaacagtgaacgagtgtcaattcgtatcactacagaagataaatcactgctggttcgtgctgctagtttggaaaatacaaacttaacagagtttgtacttcgtaatattgtacctgtagctcggcaagttattgaaaataatgagcgtttaaaattatcagaaaaagacacattacgtgttatggaacttttagataatccaccaaagcctaatgctaaactacttgcagcggcttttgctctaccggacaatgcatga

SEQ ID NO: 3360 - protein, 92 aa, Morganella morganii
MAQALVENSERVSIRITTEDKSLLVRAASLENTNLTEFVLRNIVPVARQVIENNERLKLSEKDTLRVMELLDNPPKPNAKLLAAAFALPDNA

SEQ ID NO: 3361 - DNA, 648 bp, Morganella morganii
atgcaaaaaccaatcctttcttgtcttttgattatgggttttttaggtagtgctatgtctgttttggcacatggacatcatcatgaaaaagtacgcacacaagcacaaatagatgctgcgaatgggatttttgaggacaaggacgttctcaatcgctcattaagcgattgggatggcgtatggcaatctgttgaaccctatctgcgtagtggcgaattagatatcgttttgcaaaagaaagcggagacgaagcaagataaaacagtagaacaatatcgagcttactatacacaaggctataaaaccgatgttgatatgattggtattgagaataatatcgtagagtttcatcgtggtgataaagtcgatagctgtgaatatcactatgatggttatcgtattttacattatcaatcgggtaaaaaaggtgttcgctatctgtttagatgtgatgatgccaacagccaagctccacggtttattcagtttagcgatcatattatcgcaccagaaaaagcacagcattttcatctatatatgggaaatagttcacaagatgaattacttaaagagctaactaattggccaacctattacccttattcaatgaaaggggaagatattgttcatgaaatgctttatcactaa

SEQ ID NO: 3362 - protein, 215 aa, Morganella morganii
MQKPILSCLLIMGFLGSAMSVLAHGHHHEKVRTQAQIDAANGIFEDKDVLNRSLSDWDGVWQSVEPYLRSGELDIVLQKKAETKQDKTVEQYRAYYTQGYKTDVDMIGIENNIVEFHRGDKVDSCEYHYDGYRILHYQSGKKGVRYLFRCDDANSQAPRFIQFSDHIIAPEKAQHFHLYMGNSSQDELLKELTNWPTYYPYSMKGEDIVHEMLYH

SEQ ID NO: 3363 - DNA, 1815 bp, Morganella morganii
atgagcaatcaacccccattattatcaatgcttccattaacacaggagcaattgaataaattacaggatgtgacgaaagacttaactccagcccaatttgcttggctttctggctatttttgggggcaattcaatcagcattcatccactaaagatgaactggtaagtgtacaaagtcaggttccccaacaagaaaccatcaccgtgatatcagcatcacaaactggcaatgcacgtcgtttagctgaacaattacgcgataaattggttggtaatcaacttaatgttgagctctatagtgcgagtgaatataaatttaagcagatccacaaaacgacaaccttaattattattacctcaacacagggggaaggtgaacctcctgaagaagccatcgcattttataaatatttgcactctaaaaaagccgcgccaatgaagcaaacggcttatgctgtactgagtctcggcgatagtagctatgaacatttttgccaagcaggtaaagattttgatcatcaactggcgcaacttggcgcgaccagtctattagaaagattagatgcagatgttgattatcaagctgacgctgataaatggataactcagctgactgatattttaaaaatacgtgtacctgagcaaaacactcaagtattgcaacaaacacaatcaggaacaaccgacagtgtcgataccgcacgctaccatcgtgatgcaccttttagtgccactttattaactaatcagaagatcaccggtcgacattcagataaagatatccgtcatattgaaatcagtctagcaggctctgaattgcaatatcttcccggagatgcactaggagtatggtttaagaattcggaagaaaaagtggatgagcttattaccctattatggttaacgggggatgagcaggtaaatgttaaatcacaaacattaacgttaaaagaagcattattgcatcatgttgaattaactcaaaatagtgcaccaattattaaagcgtatgcccaattatcccgccacgaagagttattatcgctggtggctgataaaagcaaacttcagcaatatgcgcaaacctacccaattaatgaaatggtacgtcaatatagtgcgcaacctaatgctcaagagtttattgatatattgcgcccattaactccacgtctttactccatcgcttcatcacaacaagaagttgatgatgaagttcatcttaccttaggtgttgttcgttataacgtcgatcagcgtgcttatacaggaggtgcctcagggttcttagctgatcaacttcaagaaggcgatacagtaaacgtttttattgaacgtaatgatcattttcgtttacctgaagataatcaagtccctgtgattatgattggcccggggacggggattgcgccttttagagggtttatgcaacaacgtgaaagtgaaggtgcgacggggaaaaactggctcttttttggtaatcctcactttgtagaagatttcctttatcaagtggaatggcaacgttatgtcaaaagcgggttgttaacacgtattgatttagcatggtcgcgtgatcaagccgataaaatttatgtgcaagataaattacgggagcaaggtcaggaaatttggcaatggttacagcaaggtgcttatctctacgtttgtggtgatgcatcaagaatggctaaagatgttgaacaaacattgttagaaatagtaatgacccatggcaataaaaatattgaacaagcagatgattatttaagtgagctacgtttagcacgtcgttatcagagggatgtttattaa

SEQ ID NO: 3364 - protein, 604 aa, Morganella morganii
MSNQPPLLSMLPLTQEQLNKLQDVTKDLTPAQFAWLSGYFWGQFNQHSSTKDELVSVQSQVPQQETITVISASQTGNARRLAEQLRDKLVGNQLNVELYSASEYKFKQIHKTTTLIIITSTQGEGEPPEEAIAFYKYLHSKKAAPMKQTAYAVLSLGDSSYEHFCQAGKDFDHQLAQLGATSLLERLDADVDYQADADKWITQLTDILKIRVPEQNTQVLQQTQSGTTDSVDTARYHRDAPFSATLLTNQKITGRHSDKDIRHIEISLAGSELQYLPGDALGVWFKNSEEKVDELITLLWLTGDEQVNVKSQTLTLKEALLHHVELTQNSAPIIKAYAQLSRHEELLSLVADKSKLQQYAQTYPINEMVRQYSAQPNAQEFIDILRPLTPRLYSIASSQQEVDDEVHLTLGVVRYNVDQRAYTGGASGFLADQLQEGDTVNVFIERNDHFRLPEDNQVPVIMIGPGTGIAPFRGFMQQRESEGATGKNWLFFGNPHFVEDFLYQVEWQRYVKSGLLTRIDLAWSRDQADKIYVQDKLREQGQEIWQWLQQGAYLYVCGDASRMAKDVEQTLLEIVMTHGNKNIEQADDYLSELRLARRYQRDVY

SEQ ID NO: 3365 - DNA, 1578 bp, Citrobacter koseri
atgacagcaaatatccataatcatcgcattcttatccttgatttcggttcgcaatatacacaacttattgctcgccgtattcgcgaaatcggcgtttattgtgaactctgggcatgggatgttacagaagaacaaattcgtcaatttaaccccaatggtattattctgtctggtggccctgaaagtactacagaagacaatagcccacgcgctccggaatacgtctttaatgcgggagtgccggtattaggtatctgctatggcatgcaaactatgtctatgcaattaggcggtgatgttgaagtctcaggtgagcgtgaatttggttattcacaagttgagatccgcgaaacctgcgaactgttccgtgatattcaagactccgtaagtgaagatggcaaacctttattagatgtatggatgagccacggtgataaagttacggctattcccgctgattttgtcactattgctagcactgaaacttgcccatttgcgattatggcaaatgaagagaagcgtttctatggtgtacagttccacccagaagttacccatacccatcaaggtttagccattttaaaacgctttgtgttagatatctgtggttgtgacgcattatggacatccgcggcgattattgaagatactgttgctcgtttaaaacaacaaattggcgacgatcacgttattctcgcgctatcgggtggtgtagactcttctgttaccgcattattattaaatcgtgccattggtaaacgcttaacctgtgtatttgttgataatggcttattacgccttaacgaagccgaacaagttatggcgatgtttaaaggcaaatttgacctcaatattatccatgttgaagctgaagatcgtttcttaactgcgttaaaaggtgaaaacgatccggagaaaaaacgcaaaattatcggtcataccttcattgaaatctttgatgaagaagcggttaaattaccgcaagtcaaatggctagcacaaggcacaatctatcctgatgtgattgaatcagccgcatctgcaacaggtaaagcgcatgtgatcaaatcacaccataacgtaggtggcttacctgaagatatgaagttaggtttagtggagccattaaaagaactatttaaagatgaagtgcgtaaaatcggacttgagttaggtttaccttacgacatgctataccgtcatccattcccaggaccaggtttaggggtgcgcgtattgggtgaaatcaagaaagagtattgtgatttactacgtcgtgctgacgctatctttattgaagagctacataaagccgatttatacaataaagtcagccaagcatttacagtattcctacctgtccgttcagtgggtgttatgggcgatggccgtaaatacgactgggtagtttcattacgtgctgtagaaaccgtagactttatgactgcacattgggcacacctaccttacgatttcttaggccgtgtttctaatcgcattatcaatgaagtaaatggtatttctcgcgtggtttatgatatcagcggaaaaccaccagcaacgattgagtgggaataa

SEQ ID NO: 3366 - protein, 525 aa, Citrobacter koseri
MTANIHNHRILILDFGSQYTQLIARRIREIGVYCELWAWDVTEEQIRQFNPNGIILSGGPESTTEDNSPRAPEYVFNAGVPVLGICYGMQTMSMQLGGDVEVSGEREFGYSQVEIRETCELFRDIQDSVSEDGKPLLDVWMSHGDKVTAIPADFVTIASTETCPFAIMANEEKRFYGVQFHPEVTHTHQGLAILKRFVLDICGCDALWTSAAIIEDTVARLKQQIGDDHVILALSGGVDSSVTALLLNRAIGKRLTCVFVDNGLLRLNEAEQVMAMFKGKFDLNIIHVEAEDRFLTALKGENDPEKKRKIIGHTFIEIFDEEAVKLPQVKWLAQGTIYPDVIESAASATGKAHVIKSHHNVGGLPEDMKLGLVEPLKELFKDEVRKIGLELGLPYDMLYRHPFPGPGLGVRVLGEIKKEYCDLLRRADAIFIEELHKADLYNKVSQAFTVFLPVRSVGVMGDGRKYDWVVSLRAVETVDFMTAHWAHLPYDFLGRVSNRIINEVNGISRVVYDISGKPPATIEWE

SEQ ID NO: 3367 - DNA, 258 bp, Citrobacter koseri
atgtaccagcaagaagttactattacagcaccaaacggcttacatactcgtcctgcagcacagttagtaaaagaggctaaaactttctcttctgatattagtcttatttctggtggtaaatcagccagcgcgaagagcttattcaaattacaaactttaggattaacccaaggtactgtagtcactatttctgctgaaggcgaagatgaaaaacaagcagtagaacatttagttaagttaatggctgagttagagtaa

SEQ ID NO: 3368 - protein, 85 aa, Citrobacter koseri
MYQQEVTITAPNGLHTRPAAQLVKEAKTFSSDISLISGGKSASAKSLFKLQTLGLTQGTVVTISAEGEDEKQAVEHLVKLMAELE

SEQ ID NO: 3369 - DNA, 1029 bp, Morganella morganii
atgatttcatccgtttcgcaaattcaagaagtgatagcgatcccccaagaatacttttggttaccttgggcagttcaatatttcttttttatcggcattgcgtgttgcgcaacactttatgcatgctggcaatgttggaaagggcgtacaggtaatcctcgtttagaagctgttgcggtttttattgccgttacggcggggatcaccgcccctttagcattaaccgctgatctccatcaaaccgcacgtgtttggcatttttatgcttatccaacgccttggtcgtggatggcatggggatcactattactgccactcttctctgcatttagtattttgtactttattgccatggtcgtgcgtttagtgtggaaacgtgaatataagttaacgcgttgggttgctttagcctgcgccttaacctcgataggtttattgctctataccggccgtgaagcttctattttaaaagcaagaccggtgctttatacctactggctgccgatattactgttttttagtgccatgcaagtattgcctacgctattagcattaggtacgcgacgagagcctgtgtatcagcgtgaactggctatgtggtttatcggatctttaatgttacttgctgtatgtacaggtttttggattgcgggggatactatttcaggacaagctattaggcaacaattggcaatgggaagtttaggctggtggagtgcgataggggttattgccttatggatagtgtctgttgctatgggcggtttaatggcaaaacaggcacgctcagtggcatttattaccgtaatggcttttatttcaatgggattggcgtgggtattacgttggctaatgttaatgggaagccaatatattcccaaatataacattattaccaatccttatcagttcccgctgggtaatgatggattattagcgattgttggaacatttgggctttggatagcgttaaccattatattcagagaaagtattcgttgggttgtcaggagagtacagcatggctaa

SEQ ID NO: 3370 - protein, 342 aa, Morganella morganii
MISSVSQIQEVIAIPQEYFWLPWAVQYFFFIGIACCATLYACWQCWKGRTGNPRLEAVAVFIAVTAGITAPLALTADLHQTARVWHFYAYPTPWSWMAWGSLLLPLFSAFSILYFIAMVVRLVWKREYKLTRWVALACALTSIGLLLYTGREASILKARPVLYTYWLPILLFFSAMQVLPTLLALGTRREPVYQRELAMWFIGSLMLLAVCTGFWIAGDTISGQAIRQQLAMGSLGWWSAIGVIALWIVSVAMGGLMAKQARSVAFITVMAFISMGLAWVLRWLMLMGSQYIPKYNIITNPYQFPLGNDGLLAIVGTFGLWIALTIIFRESIRWVVRRVQHG

SEQ ID NO: 3371 - DNA, 510 bp, Serratia marcescens
atgactgcaaaccctaatgcaacacaaaatattattatcagagccattgaaaaaagagataacgccggcattgcacgcgttattcgagaagtttccgccgagcatggcttaacagcggataaaggatttgcagtagctgatccgattttagataccttattcgaagtttatcatcaacctcgcagcgcttactgggtggtagaaatggatggcgaaattgttggtggtggtggtgtcgcacctcttgcaggtggcgatggggagacttgtgaattacagaaaatgtatctctcttctaagttacgaggaaaaggaattgcgaaaaaaattgttcagcaatctcttgagtttggtaagcaacaaggctttagtcgctgctacttagaaactactgatattttaaaagcagcaattggtctatatgaaaaattaggctttgagtttattgataaagcattaggtaatacaggccacagcgactgtgaaattcgtatgctgaaatcactttga

SEQ ID NO: 3372 - protein, 169 aa, Serratia marcescens
MTANPNATQNIIIRAIEKRDNAGIARVIREVSAEHGLTADKGFAVADPILDTLFEVYHQPRSAYWVVEMDGEIVGGGGVAPLAGGDGETCELQKMYLSSKLRGKGIAKKIVQQSLEFGKQQGFSRCYLETTDILKAAIGLYEKLGFEFIDKALGNTGHSDCEIRMLKSL

SEQ ID NO: 3373 - DNA, 207 bp, Morganella morganii
atgaagatcttcaatcgctataacccagaaaaaattgctctctacgttaagacgttatttcgtggacggttttatatcaaaggaatgggcgcatttgagttcgattacggtaaaattttattgccgaaaataaaagataagctgcattttaatgtgatgagtgaagttaaccagcaggtggttttactcaaagctgaaatgggctaa

SEQ ID NO: 3374 - protein, 68 aa, Morganella morganii
MKIFNRYNPEKIALYVKTLFRGRFYIKGMGAFEFDYGKILLPKIKDKLHFNVMSEVNQQVVLLKAEMG

SEQ ID NO: 3375 - DNA, 585 bp, Proteus mirabilis
atggtttcattacgcaaggatcagacagtctctctcagtaaacaagcccctgcactgagtcacctaatgtttggtttaggctgggatcctattaagaaaaagggatttctcggtggactctttggtggtaataattcgatagatttagatgcaagttgtgtattactcgatgtaaatggtaaacaaatcgatactatttggtttcgtaaactaaaatcaacttgtcagtccgttattcactcaggagataacttaacaggagagggtgatggtgatgatgaaactatttttgttgatttaaatcgtcttccttcattggttgaatatttggttttcactgtcaatagtttccgtgggcagacctttaatgaagttgaaaatgcgttttgtcgagttgtcgataaaacaaccaataaagagcttgctcattacaaattaacggaacaaggcgctcatactgggatcgtgattgccgctttacaacgtaatcacggacaatgggatttcacggcttttggctcaccttgtaaagggcttgtcattgacgagatgatgccagatattttggcgacggtggtgcgataa

SEQ ID NO: 3376 - protein, 194 aa, Proteus mirabilis
MVSLRKDQTVSLSKQAPALSHLMFGLGWDPIKKKGFLGGLFGGNNSIDLDASCVLLDVNGKQIDTIWFRKLKSTCQSVIHSGDNLTGEGDGDDETIFVDLNRLPSLVEYLVFTVNSFRGQTFNEVENAFCRVVDKTTNKELAHYKLTEQGAHTGIVIAALQRNHGQWDFTAFGSPCKGLVIDEMMPDILATVVR

SEQ ID NO: 3377 - DNA, 723 bp, Escherichia coli
gtgagtgatttgtataccgccgaaggcgtgatggacaaaaatagcctctgggagcgatatgtccctttggttcgccatgaagcattacgattacaggtcaagttacctgcgagtgttgaattggatgatcttttgcaagcaggggggattggcctactgaatgccgttgagcgttatgactcaatgcaaggtgccgcctttactacttatgctgtgcaacgtattcgaggctctatgttagatgagctacgaagtcgtgattgggcgccccgtagtgtgcgccgtaatgcaagagaagtgacacaatccattcatcagttagagcaggatctaggacgaccaccatcagaacaggaagttgctgatcatttgcagattgagttagcagaataccggcagatcctattggatacaaataacagccagttgttctcttatgacgaatggcatgaaatttacggtgaaagctgtgaaccgtctcaagacgaagatcacgatgacaatcctttacaaatgttattggaaagtgatattcgccaaagagtcatagacgcgatagaattgcttcccgaaagggaaaaaatggttcttaccctgtattatcaggaagaacttaatttgaaagaaataggcgcagtgcttaatgtcggggaatcccgcgtaagtcagctacacagccaagcaatcaaaaggctgcgagcacgcttaaacccagagaaatag

SEQ ID NO: 3378 - protein, 240 aa, Escherichia coli
MSDLYTAEGVMDKNSLWERYVPLVRHEALRLQVKLPASVELDDLLQAGGIGLLNAVERYDSMQGAAFTTYAVQRIRGSMLDELRSRDWAPRSVRRNAREVTQSIHQLEQDLGRPPSEQEVADHLQIELAEYRQILLDTNNSQLFSYDEWHEIYGESCEPSQDEDHDDNPLQMLLESDIRQRVIDAIELLPEREKMVLTLYYQEELNLKEIGAVLNVGESRVSQLHSQAIKRLRARLNPEK

SEQ ID NO: 3379 - DNA, 369 bp, Morganella morganii
atgacaaacaatgttgaaactttttctctaaatgatactgcttggcaaggcattgtgctgactgatagtgcagcgaaacatatttgccaattagtggagaaaaaccctgaaagtcagggactttccttaagtattaagccatcaggttgtacgggctatggttatgttattgagcttgcagcaggccccacagaggacgatcttgtctatgaacataatggcgccaagttatttgttgcattaaaagccatgccattcattgatggtttagttgttgattatgtccgtgaaggacttaatcagatgtttaaatttaataatcccaaagctcagaacgtctgcggatgtggtgagagctttggggtataa

SEQ ID NO: 3380 - protein, 122 aa, Morganella morganii
MTNNVETFSLNDTAWQGIVLTDSAAKHICQLVEKNPESQGLSLSIKPSGCTGYGYVIELAAGPTEDDLVYEHNGAKLFVALKAMPFIDGLVVDYVREGLNQMFKFNNPKAQNVCGCGESFGV

SEQ ID NO: 3381 - DNA, 399 bp, Morganella morganii
atgagcttatatttatctagtgaaatgatctcttatgatatggatctaaatagaaacgaaggtgaagaaagtaaaattcaagctaaatttattcatggctctaattttacaatggcattttggacatttaaaactaatgccattattcctgaacataaacatgaacatgaaactgccacatccatactaaaaggctctttgaaactgacggtaaataaccgcattgtttatttacatgctggcgactcttttattattccctcatgggccgttcatcacgcaattgctttagagccttctgaggttattgatgtctatacccccgttagagaagactatgttgcaaggcaaaatggcgtcattaaaacctatttagaaacatctcaaccccaaggataa

SEQ ID NO: 3382 - protein, 132 aa, Morganella morganii
MSLYLSSEMISYDMDLNRNEGEESKIQAKFIHGSNFTMAFWTFKTNAIIPEHKHEHETATSILKGSLKLTVNNRIVYLHAGDSFIIPSWAVHHAIALEPSEVIDVYTPVREDYVARQNGVIKTYLETSQPQG

SEQ ID NO: 3383 - DNA, 531 bp, Acinetobacter pittii
gtgatcgatgatgatggctaccgcccgaatgtggggattgtaatttgtaatcggcaagggcaagtgctttgggcccgtcgctatggacaacattcatggcaatttcctcaagggggaattaatcctggagaatcaccagaacaagccatgtatcgtgagttgttcgaagaagttggattaagtcgtaaggatgttaaaatccttgcctccacgcgtaactggttacgttacaagttacctaagcgtttggtgcgttgggacacaaaacctgtttgtattggacaaaaacagcgttggttccttttgcagttaacaagtaacgacaaggacattaatgttcagcagagcaaaacgccagagtttgatggttggcgttgggttagctattggtatcctgttcgtcaagtcgtctcttttaagcgagatgtatatcgtcgcgtgatgaaagagttcgcaccagtagttatgccattacaagaacaagtgtctatgtctcgtccttcctatggatatcgccgtaaaaggtattag

SEQ ID NO: 3384 - protein, 176 aa, Acinetobacter pittii
MIDDDGYRPNVGIVICNRQGQVLWARRYGQHSWQFPQGGINPGESPEQAMYRELFEEVGLSRKDVKILASTRNWLRYKLPKRLVRWDTKPVCIGQKQRWFLLQLTSNDKDINVQQSKTPEFDGWRWVSYWYPVRQVVSFKRDVYRRVMKEFAPVVMPLQEQVSMSRPSYGYRRKRY

SEQ ID NO: 3385 - DNA, 615 bp, Proteus vulgaris
atgagaaataaaccgtttatgagaatgcttaagctcataccggcgtttattgtcgtagctacgttatcagcctgtagttcacaaaacgcgtcttcacgcttagctaattcaacaactgccccacttaataaatcttcaagcacatctatttcccaagcatctcaagatgaatttgaatcattggtgaagaatctcgatataaaatctaagatacttgaccaatatgcagactggaaaggtgttgcataccgcttaggtggcaatacaaaaagtggtattgattgttccgcttttgtccaaagaacttttcgtgatcaatttggtgtcgaattacctcgttcaacctccgatcagcaatttgccggtaccaaagttaatcgttcaaccttaaaagcgggtgacttagtactgtttaagactggtcgcactatgcgccatattggtatttatatcggtaatgataagtttgttcacgcatcaaccagcagtggtgttatcgtttctgaaatgtccaatgtctattggaaaaaccgtttctatacagcacgtcggatcattgataataatacaacaacaagtcttgctgataactattctcaagcgtcattaagataa

SEQ ID NO: 3386 - protein, 204 aa, Proteus vulgaris
MRNKPFMRMLKLIPAFIVVATLSACSSQNASSRLANSTTAPLNKSSSTSISQASQDEFESLVKNLDIKSKILDQYADWKGVAYRLGGNTKSGIDCSAFVQRTFRDQFGVELPRSTSDQQFAGTKVNRSTLKAGDLVLFKTGRTMRHIGIYIGNDKFVHASTSSGVIVSEMSNVYWKNRFYTARRIIDNNTTTSLADNYSQASLR

SEQ ID NO: 3387 - DNA, 348 bp, Morganella morganii
gtggaaaatgtacaactttcggtggttcataagctgccgctgagttatcggtggctagcaggctttacaggaacaagggtagaaattctacctgagaatgatgctagtagacaaaataccttgattggcttaaaactgctaagtcatgatggtatgactttagatgaggcaatacagaacttacaaaagtatctgaataatctcaatattgaaaatgtgattattgagtgggatggcgtaccttgtttatttttacatagtgatgatgagtgcgcagcactttgttgcttaaaaaatgctggggttgcaattgctgagccatttccaacagactactcttatctgtag

SEQ ID NO: 3388 - protein, 115 aa, Morganella morganii
MENVQLSVVHKLPLSYRWLAGFTGTRVEILPENDASRQNTLIGLKLLSHDGMTLDEAIQNLQKYLNNLNIENVIIEWDGVPCLFLHSDDECAALCCLKNAGVAIAEPFPTDYSYL

SEQ ID NO: 3389 - DNA, 333 bp, Escherichia coli
atgagtcatccaaatacttctccttcaggcgcaagccacggcagcatgaagtcctatctgattggctttattctgtccgttatcctcaccgtgatcccattttggatggtgatggaaggaacagctacaacctcaactatcttatggacagtcgttggtatggccgtcgtacagattgttgttcatttagtctgtttcttacatatgaacacgtcctcagaagagcgctggaacgttatcgcattcctattcaccttgttgattatcggcattgttgtgattggctcactgtggattatgtacaacctgaacatcaatatgatgatggattaa

SEQ ID NO: 3390 - protein, 110 aa, Escherichia coli
MSHPNTSPSGASHGSMKSYLIGFILSVILTVIPFWMVMEGTATTSTILWTVVGMAVVQIVVHLVCFLHMNTSSEERWNVIAFLFTLLIIGIVVIGSLWIMYNLNINMMMD

SEQ ID NO: 3391 - DNA, 459 bp, Escherichia coli
atgcctaatattaaacctttttcattattcccaactttatctgacaatctactttcaaaccgttttgatcagatagatcgcctgtttagtcagttaacaggcagtaaaccaatttcatcaccgactcagacttataatctgaaacagattgatgataaccattatgaactaacagtgagtgtgcctggatatcaagaagatgacttatcggtttcattgaaaggaagtcgcttattgattgaagggaaaaaagaagaaaaattagaagaagacaatgataaatggatccaccgaggtatatctcaagggcagtttacattgcagtttgacctcggtaaaaatgtcaaaatagaaaaagccgatttatcaagtggacttctgaccattgctattgagtatgagttacctgaagaagaaaaacggcaaacaatagcgatagaaaataaagataaaagctaa

SEQ ID NO: 3392 - protein, 152 aa, Escherichia coli
MPNIKPFSLFPTLSDNLLSNRFDQIDRLFSQLTGSKPISSPTQTYNLKQIDDNHYELTVSVPGYQEDDLSVSLKGSRLLIEGKKEEKLEEDNDKWIHRGISQGQFTLQFDLGKNVKIEKADLSSGLLTIAIEYELPEEEKRQTIAIENKDKS

SEQ ID NO: 3393 - DNA, 609 bp, Morganella morganii
atgaatatagcaagtcttcttgaacaaattgcagataaaggttggtgtgtatgggatgatttccttacaccagaggcggttaaacaattgcgtgcttgttttggtaatgatgcacaacaagcacgtataggacgtcatgaaaacctattagcagaaaccacgatacgcagtgataaaattcgttggctagagccgcaaatgggagagccagttcaacattatcttatgcagatggaaagcattcaacgagcagttaatcgtgagttctttttagggctgtttgaatatgaagctcatttcgcttgttatgaaaaaggtgctttctataaaaaacatcttgatgcatttaaagaaaatgtcacaagacgtttaacgacagtgttatatcttaatgatgaatggacaccacaagacggtggagagctagttatctatgatctggatgataatcaattagcgacagtcgcccctcaaggtggtcgtttagtggtttttctttcagaacaatttccacatgaagtattacctactcataaagaaaggatcagtattgcagggtggtttcgagttaatggtgtcagagataattttctcgatatcgccagctaa

SEQ ID NO: 3394 - protein, 202 aa, Morganella morganii
MNIASLLEQIADKGWCVWDDFLTPEAVKQLRACFGNDAQQARIGRHENLLAETTIRSDKIRWLEPQMGEPVQHYLMQMESIQRAVNREFFLGLFEYEAHFACYEKGAFYKKHLDAFKENVTRRLTTVLYLNDEWTPQDGGELVIYDLDDNQLATVAPQGGRLVVFLSEQFPHEVLPTHKERISIAGWFRVNGVRDNFLDIAS

SEQ ID NO: 3395 - DNA, 216 bp, Proteus mirabilis
atgatagaatatattagaaacatacaacaacatagtattattccattagataaaggtgttgaatgtgaagttaaattgactagttttgaacaagtaataccttactttgcaactcctgatgatgataaactagaaagatggaaaaagtatcgttatcaactaactaaagtcaatgttgaagatgaaaatttagaatggccatcaaagcctgagtaa

SEQ ID NO: 3396 - protein, 71 aa, Proteus mirabilis
MIEYIRNIQQHSIIPLDKGVECEVKLTSFEQVIPYFATPDDDKLERWKKYRYQLTKVNVEDENLEWPSKPE

SEQ ID NO: 3397 - DNA, 579 bp, Proteus mirabilis
atgttacgcagcagggcagtcgccctaaaacaaaggttaggccgcatggacacaacgcaggtcacattgatacacaaaattctagctgcggcagatgagcgaaatctgccgctctggatcggtgggggctgggcgatcgatgcacggctagggcgtgtaacacgcaagcacgatgatattgatctgacgtttcccggcgagaggcgcggcgagctcgaggcaatagttgaaatgctcggcgggcgcgtcatggaggagttggactatggattcttagcggagatcggggatgagttacttgactgcgaacctgcttggtgggcagacgaagcgtatgaaatcgcggaggctccgcagggctcgtgcccagaggcggctgagggcgtcatcgccgggcggccagtccgttgtaacagctgggaggcgatcatctgggattacttttactatgccgatgaagtaccaccagtggactggcctacaaagcacatagagtcctacaggctcgcatgcacctcactcggggcggaaaaggttgaggtcttgcgtgccgctttcaggtcgcgatatgcggcctaa

SEQ ID NO: 3398 - protein, 192 aa, Proteus mirabilis
MLRSRAVALKQRLGRMDTTQVTLIHKILAAADERNLPLWIGGGWAIDARLGRVTRKHDDIDLTFPGERRGELEAIVEMLGGRVMEELDYGFLAEIGDELLDCEPAWWADEAYEIAEAPQGSCPEAAEGVIAGRPVRCNSWEAIIWDYFYYADEVPPVDWPTKHIESYRLACTSLGAEKVEVLRAAFRSRYAA

SEQ ID NO: 3399 - DNA, 990 bp, Proteus mirabilis
atggctactgcggaacaactaaaagcgcttttaaagagtcacgctgaacgtgacgatcagcgtttttactctgttgcccttcaggttgcagccaaagaagctcgacaggggcataataagcttgcgagcgatattaaaaatcttgttgagaaatctcagcgttctaccaataagctgggtctagcatcgtctagaactataccttttgcgcaacagaatcaaagtgagttaaaaggtctattagagctcacgccacacagtgttcgtcttaatgagcttgttctttctgatgacatacaagaacgtatggagaaggtgatattagaacaacgtcagaaggacaaactcagtcagtttggtttgcagccgcgtagaaaacttctttttactggttctcctggaactggtaagacaatgtctgcatctatgttggcaacagagttaaaattacctctttatacaatcgtcctagataatcttattacacgttttatgggagagactgctgcaaagttgcgtttgatctttgatcatataaggcaaacaagagctgtttatctttttgacgaatttgatgctataggaactcaacgaggtgcacccaatgatgttggggaaattcgtagggtgttaaactcatttttgttatttgtagagcaagatgcatcagagagtattattgttgcagctacaaaccatccagagctactagatcaagcactttatagaagatttgatgacatcattaagtttgaaaaaccaaaatttgatcaaatatgccttcttattcaaaatcgtctatcacttttcgatactgatgattttgattgggggatggttgctgaagctgcaaatggtttgagctctgctgagattacccgatcttgtgaagacgcagctaaagaagctgttttgaattttaatgcaaaaataacaagtgaaacactgttaaaggccttttctagaaggcagtcaggtaataacaaataa

SEQ ID NO: 3400 - protein, 329 aa, Proteus mirabilis
MATAEQLKALLKSHAERDDQRFYSVALQVAAKEARQGHNKLASDIKNLVEKSQRSTNKLGLASSRTIPFAQQNQSELKGLLELTPHSVRLNELVLSDDIQERMEKVILEQRQKDKLSQFGLQPRRKLLFTGSPGTGKTMSASMLATELKLPLYTIVLDNLITRFMGETAAKLRLIFDHIRQTRAVYLFDEFDAIGTQRGAPNDVGEIRRVLNSFLLFVEQDASESIIVAATNHPELLDQALYRRFDDIIKFEKPKFDQICLLIQNRLSLFDTDDFDWGMVAEAANGLSSAEITRSCEDAAKEAVLNFNAKITSETLLKAFSRRQSGNNK

SEQ ID NO: 3401 - DNA, 2544 bp, Proteus mirabilis
atggtttctaaaaggaagcatttagatgtagctaggtttttcattgaggaaaattttaagtctaaaagaaccggtcgaaacccaggagttcctggacgaaatagaaaccaacatggaagtcacttaagagatcaatatcagaatttaattgatgcttatgaccaaaaaagagaacatgaagttgatactataacggatgattcaggaatatatgttgaaattattagtgtagatgggtgtaagcttccgttagatagtttggataacagagattttaaactctgttcttgtcaaatgcgggaaaataaagagttcgctttagtcttcatacctgaagatcggcgagatactttccttaaaaaaatacagcagtatttagatcctcaaaaagacggaaaaccaaataaggatggagtatcttttcctcgaaaccatgcattaatagatagtatttctgagattaggcttgcaagcttagagtcattttggacagacccaccagaactttttcccacggaccgagacaacgatgtttggtgggagttatggttgaaaaaaaatgcaattgatggtgttgaaaatatagcagcttctcttgcagaaagagtaaatggtcgtttaggaaatacatccatatcatttttcaattcatttgttgttcttattaaatcttcagttcgtaatttagaaaaagcaccagaattgatttcaaatttagaagaaattcgaaaagctaaggacacacctgttccaatacttagttcttcaccaaaggaacaacaagagtggctgcagagcatttctgatcgagtttctttttcagagaatataacaactagtgtatcaattctggatactggcgttaattataataacatgctgttaagtaaagtgtgttgtgatgattttgcagtttcttgggatcctgattggcctaaatacgatcaatatcaaccactagcaccgtttaatgagcatggttcgttgcaagcaggactagcagcatttgggaatttgatggatgtcgtattggaaaatagcgccattcaactgtcacatgttattgagtcagcaagaattttacctccgcaaggcaacaatgatcccttgctatatggggctataacggtaggaacagcatacaaacttgaagtagataggcctgatttaaatagagtatatagtcttgctgttacttctgatcatgagagagaaagtggcagaccttcttcatggtctgcagaaattgatcaattcacttctggtatgcaagatggaaagcggagactttttgttatttctgccggtaacaacttagatattcgtcctgaccaagactactgggatcaagtaaatctcgcgcagatagaagatccagctcaagcatggaatgctattacagttggggcatatacagaaatgacaacaaatgatgatccctattttgaaggttggtcgccgtttgcgatggagggagatgttgctccatcaagtcgttcttcagtgaattgggcatggagaaagcaagcaccatttaaacctgatgtggttgctgaaggtggaaatcggcttttgtcaccagataggaaggaagttagtaatgaagatacggttggattattaacaacatcaggaagaaccacaggtcaggtttttgagcggggaagtgatacaagcgctgcatgtgctttagtttctcggtgtgcggcccagttaacagccgaatatccagaattttggcctgaaactatccgaggcttaataatccattctgcggagtggactccacgaatgatggagcgatttgggctactaagtgctgtgcatagtcctaaagtggcaaaagaaaccttgctacgtacagttggatatggtgttacaaatatcgataaagctagatacagtgctgatcatgcacttactttgatcgctgagggggagattcaaccatttataaaacctcaaaatgctagtgcatcatccgatcctaaattaaatcaaatgaagctttatcagttaccttggcctttgactgagttgcaaaacttaccgccagagttagaggttaaattaaaagttacgttatcgtatttcatagagcctaaccccggaagacgaggatatcgtacaagatatagctatcaatctcatggtttaaggtttgaaacaatcagaccagggcagtcacttgagaacttccgtgcttacattaatggtttagcaaatatggatgattatgatgggccagagggtgacagtgatgggtggttcttaggagatcaattgagaacaagaggctcagttcattcagatgaatggactggtagtgctcaagatctagctgacatgcacaccatagctgtttttcctgtaggcggatggtggaagtataaaactgcggaagatcggtgggaaaatagagtgcggtttagccttcttgttagtatcgaagttccggatgaaaatgttgatatttactctgtaatagaaaatcagattcaagtagcaatagaaaatcaggttgaaatagaaattacaacttga

SEQ ID NO: 3402 - protein, 847 aa, Proteus mirabilis
MVSKRKHLDVARFFIEENFKSKRTGRNPGVPGRNRNQHGSHLRDQYQNLIDAYDQKREHEVDTITDDSGIYVEIISVDGCKLPLDSLDNRDFKLCSCQMRENKEFALVFIPEDRRDTFLKKIQQYLDPQKDGKPNKDGVSFPRNHALIDSISEIRLASLESFWTDPPELFPTDRDNDVWWELWLKKNAIDGVENIAASLAERVNGRLGNTSISFFNSFVVLIKSSVRNLEKAPELISNLEEIRKAKDTPVPILSSSPKEQQEWLQSISDRVSFSENITTSVSILDTGVNYNNMLLSKVCCDDFAVSWDPDWPKYDQYQPLAPFNEHGSLQAGLAAFGNLMDVVLENSAIQLSHVIESARILPPQGNNDPLLYGAITVGTAYKLEVDRPDLNRVYSLAVTSDHERESGRPSSWSAEIDQFTSGMQDGKRRLFVISAGNNLDIRPDQDYWDQVNLAQIEDPAQAWNAITVGAYTEMTTNDDPYFEGWSPFAMEGDVAPSSRSSVNWAWRKQAPFKPDVVAEGGNRLLSPDRKEVSNEDTVGLLTTSGRTTGQVFERGSDTSAACALVSRCAAQLTAEYPEFWPETIRGLIIHSAEWTPRMMERFGLLSAVHSPKVAKETLLRTVGYGVTNIDKARYSADHALTLIAEGEIQPFIKPQNASASSDPKLNQMKLYQLPWPLTELQNLPPELEVKLKVTLSYFIEPNPGRRGYRTRYSYQSHGLRFETIRPGQSLENFRAYINGLANMDDYDGPEGDSDGWFLGDQLRTRGSVHSDEWTGSAQDLADMHTIAVFPVGGWWKYKTAEDRWENRVRFSLLVSIEVPDENVDIYSVIENQIQVAIENQVEIEITT

SEQ ID NO: 3403 - DNA, 270 bp, Proteus mirabilis
atgttgggacaaactcaaaaagaaatccatcaattcgacgtatgtggccgcgtgtattaccgcgaggtcaattacaccgggaaagaaggcgagttggtggctgaaacggtggaggccttatcccatgacgaggcggaaaccgtgtttcaaaacaatctggttgaacatgctcgtgagtccaacctgaccgtggaccgcgtcgaaattacgttcactatcgatctgacgattgctgaaagtgatagcgatgaaccgttcttggttcattaa

SEQ ID NO: 3404 - protein, 89 aa, Proteus mirabilis
MLGQTQKEIHQFDVCGRVYYREVNYTGKEGELVAETVEALSHDEAETVFQNNLVEHARESNLTVDRVEITFTIDLTIAESDSDEPFLVH

SEQ ID NO: 3405 - DNA, 438 bp, Proteus mirabilis
atgactaaatgtgatcatgttaatattgaaaacatgaagaaagctgttcaagcattggaccgcgcaattgatgctgatattgatgaacaggtcgttcaagcacttgaatcggaagatgttattgatattggtgtcattgttgataaaaacggaaatcctggcattggtaatggcttgccgtttgatgtctacacctgtaaggatgatgctacgttggtcgctgcggcgctaaatgaggtagatgctttcctgctgtcgcttactgataacccagcccagcaggaacgtcgttctgattatcaggttcaacaagacacaatcctcgctcttgttaacaattttaccgatgttgatttggagaatgtaccaagcttagtggtaggtaatatccaagaagctaaacgggggcttgaggacgctatacaacgtttgtcgtaa

SEQ ID NO: 3406 - protein, 145 aa, Proteus mirabilis
MTKCDHVNIENMKKAVQALDRAIDADIDEQVVQALESEDVIDIGVIVDKNGNPGIGNGLPFDVYTCKDDATLVAAALNEVDAFLLSLTDNPAQQERRSDYQVQQDTILALVNNFTDVDLENVPSLVVGNIQEAKRGLEDAIQRLS

SEQ ID NO: 3407 - DNA, 2586 bp, Proteus mirabilis
atggccttcaagacaccttttaccggaccatctgttccagaaacaccagacaagcttttcagagaactaacccgtaggaagtttccagatgtgttacctcatcagtctgccatgatgaaggattacgcagcgaaggccgtaaacatgacggatgtggcgctacaactacccactggaagcggaaaaaccctcgttggtctgctgatagcagaatggcggcgccgtaaattcaaagaaagggtagtttatctatgcccgaccaaacaattagtttaccaagttgctgaacaagcaaacgataagtatggcctgtctgtggccacttttgttggcaagcagagggacttctcacctgctgacaaagccgactacctccaagctgaaaagatagctataacaacatactctagcctgttcaatacgaatccatttttcgatcaagcagatattatatttgtcgacgatgcccatgccagcgaaaattatatagcatcccactggacgttgcgcatagcccgcctagatgatagatacaagccccttcaccaagccttatgtaacgtgttctcgcctcacttaacgcccacagatttgtcacggcttcgaggtgtttgggaagatgtaatagatcgctcgtgggtagagaagcttgctacacccactttgactcaactcacgccacaaattgtcgaaatattagatgcacacacacaaggtactgatctcgcctatccttggtcactgatccgaggacatctagatgcatgtcatatatacctatcctcccaagaaatcctgattcgcccacttttacctccaacgttctcacatccagcgtttgaaaatgcaaaacagcgtatttatatgtcagctacgttaggtgctggaggagatcttgaacgtttggcaggtagaaaatcgataacacgtctaccggctccggacggatgggacactcaaggtgtgggtcgtcggtttttcatctttccagaaatgtcactcacgccccagcaaactgtagccttgagaaaagaattgatgcaacgagctggtcgaagtgttgtcctcgtaccaagtgatagagatgctgagatgatcgcttcagaagttactcagaatcttaagtatcctgtttttcacgcgagtgacatcgaagaatcaaaggcttcgtttgtaaattctgaacaagcagttgctgtcgtcgcaaaccgttatgatggaattgactttgcgggggatgaatgccgcttgctctttattgaggggcttcctaaagcgatgaacattcaggagagatttctcatgacgagaatggctgcaaacgctctctataatgaacgaattcagacccgtgtagtacaagcaatcggtcgctgtactcgctctttagaagactactcagctgttgttgtatcaggagaggagctgcctgattacctcgcagatcttcgtcgccgccttttttttcatccagaacttcaggccgagataacctttggcgctcaccaatcaaaggacacaggacttgcagatctggtggagaacttcgagattttccttgaaaatgatcgaagttgggaattagtaaatagacaaatcctagatgaacgtgatcgagctcagcagcaatttctgcccgctatccaagaacttgaagaagctgttggtgccgaaatcgactatcagactgctctttggcggcatgactactatagcgccatagctgcagctgacagagttctaggcactttgaaagcgccagatcttcgtggttatcgagctctatggaattatcttgctggttcggcttgctatctagcagcacaagctggcaacacaaccatggcagcaaaatcaagacagtattatcaagacgctcacaaatgcgctccaaacattccctggctgacagcctttgcccgcaaagaagtcggagatgcagtaactattcaagtagatgacattgcgttgcaacgccaagtagaaaacatcgcctcagagctgacacgtctgggtgctactcatgaccgtgattttgctaaattagaacagtcaattctcagcggactacaacatcatgaaacctttgagcaagctcaaaaagaactcggaacactgataggatttaatgcaggaaaaatagaaagtgaaggctctccagatccttggtggatagcagaatctcaatgtatcgtatttgaagactatgtaaacacaactgatggcacattgagtgttacaaaagcgaggcaagcaacatctcacccagactggatgcgggcaaatgttaaggaatctgcggagtgcgagtttctgactgttctagtcacacctgcaaccaagatcagtgctgccgcggttgttcatgcctcgggactactctactggagacttgaagatttccgattattcgcaactcatgctttacagataatccgtcaacttcgaacaaccttcttcgagcaaggagacttagtctggcaagctgaggccgctgaaatacttaagcaacagggaatggactttgcctctatcaaaagggtagttactgccacccccgttaccaagtgcatgcaggcaatctag

SEQ ID NO: 3408 - protein, 861 aa, Proteus mirabilis
MAFKTPFTGPSVPETPDKLFRELTRRKFPDVLPHQSAMMKDYAAKAVNMTDVALQLPTGSGKTLVGLLIAEWRRRKFKERVVYLCPTKQLVYQVAEQANDKYGLSVATFVGKQRDFSPADKADYLQAEKIAITTYSSLFNTNPFFDQADIIFVDDAHASENYIASHWTLRIARLDDRYKPLHQALCNVFSPHLTPTDLSRLRGVWEDVIDRSWVEKLATPTLTQLTPQIVEILDAHTQGTDLAYPWSLIRGHLDACHIYLSSQEILIRPLLPPTFSHPAFENAKQRIYMSATLGAGGDLERLAGRKSITRLPAPDGWDTQGVGRRFFIFPEMSLTPQQTVALRKELMQRAGRSVVLVPSDRDAEMIASEVTQNLKYPVFHASDIEESKASFVNSEQAVAVVANRYDGIDFAGDECRLLFIEGLPKAMNIQERFLMTRMAANALYNERIQTRVVQAIGRCTRSLEDYSAVVVSGEELPDYLADLRRRLFFHPELQAEITFGAHQSKDTGLADLVENFEIFLENDRSWELVNRQILDERDRAQQQFLPAIQELEEAVGAEIDYQTALWRHDYYSAIAAADRVLGTLKAPDLRGYRALWNYLAGSACYLAAQAGNTTMAAKSRQYYQDAHKCAPNIPWLTAFARKEVGDAVTIQVDDIALQRQVENIASELTRLGATHDRDFAKLEQSILSGLQHHETFEQAQKELGTLIGFNAGKIESEGSPDPWWIAESQCIVFEDYVNTTDGTLSVTKARQATSHPDWMRANVKESAECEFLTVLVTPATKISAAAVVHASGLLYWRLEDFRLFATHALQIIRQLRTTFFEQGDLVWQAEAAEILKQQGMDFASIKRVVTATPVTKCMQAI

SEQ ID NO: 3409 - DNA, 261 bp, Proteus mirabilis
atgaaacgtatattttggtgggttttagtactgacaactttgttcgttgcatacaaatttgctggaagcggagggcttattttgtccttaattccattaactattcttatcgccatttttgcgaatagacatcccagagacgcgggttcacaaggtgtcaattttcaggaatcggttaactttgatgaccaggaagacgttattcttaccattcctgatgcttcggatacagggtctgactggcggggaataccttattga

SEQ ID NO: 3410 - protein, 86 aa, Proteus mirabilis
MKRIFWWVLVLTTLFVAYKFAGSGGLILSLIPLTILIAIFANRHPRDAGSQGVNFQESVNFDDQEDVILTIPDASDTGSDWRGIPY

SEQ ID NO: 3411 - DNA, 261 bp, Proteus mirabilis
atggatcagaagaacagtatcagtgattacaccgaagcagagtttttagattttgtaacaaaaatctattttgctgagggagctaccgaagaagatgacgataagttgattgatgagtttcgacgcttaaccgagcaccctgatggctctgatctgatttattatcctcgaagtgatagagaagacagcccagaaggaatagtgaaagaagtaaaggaatggcgagccaaaaatggtaagccaggctttaaacaaggttaa

SEQ ID NO: 3412 - protein, 86 aa, Proteus mirabilis
MDQKNSISDYTEAEFLDFVTKIYFAEGATEEDDDKLIDEFRRLTEHPDGSDLIYYPRSDREDSPEGIVKEVKEWRAKNGKPGFKQG

SEQ ID NO: 3413 - DNA, 618 bp, Proteus mirabilis
atgccaataagtcttatcagcactgatacctcgcggccaataactgttactcagcatgagcaagtcaaattatgcaagtctgagtctaaagataagctgtcatcagcgttctcaagtattaaaaatactactaacgagcttgagataaataaatctatagccgtaaaaatgaaagagatttatgatctcaagatagtcatgtgtcagattcaaacagttgcaacaaaacacggtgaaaatgctaccctacgcattaaagatggtcatatcaaatacggtgaaggtagtaattttttaaaaaatatgttacacagcagccgttaccagactgagcgtgaagacctagctcatttgtttcttaacgctaaagagggatctgtaactgctgggatggcaataaaaccatttcaacacctacatgataaaactattagagaagtagaagagttattaaataaacagcttccaactgttctcctagatcctaataatccgacccctgataatccagggcgaaaactcacaataattaagtatgacaattttgaaaaacaagtgtttgagaattttagtgggggcaataagttgctaaagcaatttaatcatctattcaattaa

SEQ ID NO: 3414 - protein, 205 aa, Proteus mirabilis
MPISLISTDTSRPITVTQHEQVKLCKSESKDKLSSAFSSIKNTTNELEINKSIAVKMKEIYDLKIVMCQIQTVATKHGENATLRIKDGHIKYGEGSNFLKNMLHSSRYQTEREDLAHLFLNAKEGSVTAGMAIKPFQHLHDKTIREVEELLNKQLPTVLLDPNNPTPDNPGRKLTIIKYDNFEKQVFENFSGGNKLLKQFNHLFN

SEQ ID NO: 3415 - DNA, 252 bp, Proteus mirabilis
ttgaattcgacttcaccggaagcacagcaagcgtataatctgttggaattttatactaaagcatttaaaaacttcggttataccgatgaagaagcacgtactcgtgcaggagtctatgtcggttctatttatgtatttggaggaatgtctgctattgcgaattctggggcttttgttaaacagtttgggaaagatgttgctaagccaaatgtagttccaccgaaaggtaaccaaaaacttgtggtgaattaa

SEQ ID NO: 3416 - protein, 83 aa, Proteus mirabilis
MNSTSPEAQQAYNLLEFYTKAFKNFGYTDEEARTRAGVYVGSIYVFGGMSAIANSGAFVKQFGKDVAKPNVVPPKGNQKLVVN

SEQ ID NO: 3417 - DNA, 240 bp, Shigella flexneri
atgacccctttccgctataactccgatctcaccagcggctcgctacaaacccgagagtgtcgcattattactggcttgttactccaagagcttgatgaagctgcctgggataaagccatgtataaggaaaatgtgcttcagaaacgcacgcaatctacggtaagacgtatttcttcagcgcttagaaaacgcctagaacacctaagctctgacttttgggcttttgcgtttttatgttag

SEQ ID NO: 3418 - protein, 79 aa, Shigella flexneri
MTPFRYNSDLTSGSLQTRECRIITGLLLQELDEAAWDKAMYKENVLQKRTQSTVRRISSALRKRLEHLSSDFWAFAFLC

SEQ ID NO: 3419 - DNA, 201 bp, Proteus mirabilis
atgaagaataaaataattagtggttttaaaaaatcgattgcatttttgtataaacaatttagtgatcttatccatatagctattacagcagtactatgttatctatgttttcttttttcacccactctgccaatagcaataataggatgtattgttattataatagttatgttcttacttagtatgtttgtttttccttaa

SEQ ID NO: 3420 - protein, 66 aa, Proteus mirabilis
MKNKIISGFKKSIAFLYKQFSDLIHIAITAVLCYLCFLFSPTLPIAIIGCIVIIIVMFLLSMFVFP

SEQ ID NO: 3421 - DNA, 630 bp, Proteus mirabilis
atgccagtcactattagcatttcagatgatgtgtacggaagattggaagcgttggctgttggattcgacacgccagagagagtgatcgagcgcttactcgactccgttgaggatagcgggtcgaaatccactggaaacaaacctgctctcactttcgttcctgatgagccagctttcaaaaatgagttgatagcgcgtaaaaaagcacaggtcgtacttcatctgaaaaatggggatcgagacgtgatccactggaatgcttctaggtttcagcccagctcaaatctgcgagctaacttgtggtcaggcattctgaggaactggaaggataaagggatcgtctcagcagagctgtcagttctaccccaaggtatcaaccaccctgacgacaacaccgatctcctaatagctatcgccggagaggttcactggacgcttgaagaggtagagcagtacttcgttgattatgacctggtaagtagtgacgatggtcacccctactactacctcgcaaccttcagtgaagagactcctgacaagttgaagcaaattgccgggttgaacagcgctaatcaactccatttggatctaaacatcgttccggatgaagatcctggcgagatcgagtag

SEQ ID NO: 3422 - protein, 209 aa, Proteus mirabilis
MPVTISISDDVYGRLEALAVGFDTPERVIERLLDSVEDSGSKSTGNKPALTFVPDEPAFKNELIARKKAQVVLHLKNGDRDVIHWNASRFQPSSNLRANLWSGILRNWKDKGIVSAELSVLPQGINHPDDNTDLLIAIAGEVHWTLEEVEQYFVDYDLVSSDDGHPYYYLATFSEETPDKLKQIAGLNSANQLHLDLNIVPDEDPGEIE

SEQ ID NO: 3423 - DNA, 1683 bp, Proteus mirabilis
atggcgtcagacacatcattgattgccgagcaaggcgtggccaccctgcccgatgcggcttgggcgcaggcccggcaacgggcggaaatcatcgggccgctggcagcgcttgatgtggtcgggcatgaagccgccgatgccgctgctcacgcgcttggcctgtccaggcggcaggtgtatgtcctaatccgccgtgcccggcaaggtgctgggcttgtgacggacctggctcgcagccgatccggcggcggaaaaggcaagggacgcttgccggaatcagttgagcgcatcatccgcgagttgctgcaaaagcgcttcctgaccaagcagaagcgtagcctggcagcgttccaccgcgaggtcgcgcaggcttgcaaagcgcaaaagctgcgggcgccggcgcgcaacaccgtggctctgcggatcgccggcctcgatccgctcaaggccactcgccgccgggaaggtcaggatgcgtcccgcagcctgcaaggtgtcggtggtgagcctcccgccgtgaccgcgccactggaacaagtgcagattgatcacacggtcatcgacctgatcgtggtggacgagcgcgaccggcaaccgattggccgtccgtatctgaccatcgccatcgacgtgtttacccgctgcgtgctcggcatggtcgtcacgctggaagcgccgtcatctgtttcggtcggcctgtgccttgtgcatgtcgcctgcgacaagcgtccctggctggagggtctgaacatagaaatggagtggccgatgagcggcaagcccaggctgctctacctggacaacgcggccgagttcaagagcgaagcgctacgccgaggctgcgagcagcatggcatccggcttgactatcgcccgctcgggcagccgcactacggcggcatcgtggaacggatcatcggcacggcgatgcagatgatccacgacgaattgccagggacgaccttctccaaccctgaccagcgcggcgactacgattccgaaaacaaggccgccctgacgctgcgtgagctggagcgctggctcacattggcggtcggcacctaccacggctccgtgcacaacggcctgctccagccgccggcagcgcgctgggccgaagctatcgcgcggaccggcgtgccaaccgtcatcactcgcaccacggcttttctggtcgattttctgcccatcatccgccgcacgctgacccgcaccggcttcgtcatcgaccacatccattactacgccgatgcgctcaagccgtggatagctcggcgcgaccgcttgcctgcgttcctgatccggcgcgacccgcgcgacatcagccgcatttgggtgctggagccggaggggcagcactatctggaaattccataccgcaccttgtcgcacccggctgtcaccctctgggaacaacgacaggcgctggcgaaattgcggcagcaagggcgcgaacaggtggatgagtcggcgctgtttcgcatgatcggccagatgcgcgaaatcgtgtccaccgcgcagaaagctacgcgcaaggcgcggcgcgacgcggatcgacgccagcatctcaaggcaacggcagttcttttcaaaaccacgccaccaccggacgcggacatggctgacccgcaggcagacaaccagccacctgccaaaccgttcgaccagattgaggagtggtag

SEQ ID NO: 3424 - protein, 560 aa, Proteus mirabilis
MASDTSLIAEQGVATLPDAAWAQARQRAEIIGPLAALDVVGHEAADAAAHALGLSRRQVYVLIRRARQGAGLVTDLARSRSGGGKGKGRLPESVERIIRELLQKRFLTKQKRSLAAFHREVAQACKAQKLRAPARNTVALRIAGLDPLKATRRREGQDASRSLQGVGGEPPAVTAPLEQVQIDHTVIDLIVVDERDRQPIGRPYLTIAIDVFTRCVLGMVVTLEAPSSVSVGLCLVHVACDKRPWLEGLNIEMEWPMSGKPRLLYLDNAAEFKSEALRRGCEQHGIRLDYRPLGQPHYGGIVERIIGTAMQMIHDELPGTTFSNPDQRGDYDSENKAALTLRELERWLTLAVGTYHGSVHNGLLQPPAARWAEAIARTGVPTVITRTTAFLVDFLPIIRRTLTRTGFVIDHIHYYADALKPWIARRDRLPAFLIRRDPRDISRIWVLEPEGQHYLEIPYRTLSHPAVTLWEQRQALAKLRQQGREQVDESALFRMIGQMREIVSTAQKATRKARRDADRRQHLKATAVLFKTTPPPDADMADPQADNQPPAKPFDQIEEW

SEQ ID NO: 3425 - DNA, 366 bp, Proteus mirabilis
atgagcgcctacaccgtgtcccggctggcccttgatgccggggtgagcgtgcatatcgtgcgcgactacctgctgcgcggattgctgcgtccggtggcgtgcaccccgggcggctatggcctgttcgatgatgccgccttgcaacggctgtgcttcgtgcgggcggccttcgaggcgggcatcggcctggacgcgctggcgcggctgtgccgggcgctggatgctgcggacggcgatgaagcggccgcgcagcttgccgttctgcgccagttcgtcgagcgtcggcgcgaagcgttggccgatctggaggtgcagttggccaccatgccgaccgagccggcacagcacgcggagagtctgccatga

SEQ ID NO: 3426 - protein, 121 aa, Proteus mirabilis
MSAYTVSRLALDAGVSVHIVRDYLLRGLLRPVACTPGGYGLFDDAALQRLCFVRAAFEAGIGLDALARLCRALDAADGDEAAAQLAVLRQFVERRREALADLEVQLATMPTEPAQHAESLP

SEQ ID NO: 3427 - DNA, 1647 bp, Proteus mirabilis
atgaccgaaatcaccgtgaatggcatgacctgcacatcctgcgccacccatgtcaaagatgctttggaaaagattcccggcgtgaatgccgctgtggtgtcctatccagaaagccgcgcgcaagtcatggcagacaccgccgtgagccacaaccaactgctggccgccatcgccgcattgggttatcaaggctcgatccgggttggtgatttcaaagatgaaccaaaaatccgtgatgcacttgagggcgccggtttgcatatcgccatcattggcagcggcggggccgcgatggcggcggcgctgaaggccgtcgagcaaggcgcgacggtcacgctgatcgaacgcggcaccatcggcggcacctgcgtcaatatcggctgtgtgccgtccaagatcatgatccgcgctgcccatattgcccatctgcgccgggaaagtccgttcgacggcggtattgcggcaactgtgcctgcgattgaccgcagcaaactgctggcccagcagcaggcccgtgtcgatgaactgcggcacgccaaatacgaaggcatcctggacggcaatccagccatcaccgttttgcacggtgaagcgcgtttcaaggacgaccagagcctggtcgtccgtttgaacgagggtggcgagcgcgaggtaacgttcgaccgctgcctggtcgccaccggtgccagtccggccgtgccgccgattccgggcctgaaagagtcaccctactggacttccaccgaagcgcttgtcagcgacaccattcccgcacgcctggccgtgatcggttcgtcggtggtggcgttggaactggcgcaagcctttgcccggctcggcagccaggtcacgatcctggcacgcagcaccttgttcttccgggaagacccggccatcggcgaggccgtgacagccgctttccgcgccgagggcatcgaggtgctggagcacacgcaagccagccaggtcgcccatgtgaacggcgaattcgtgctgaccaccggacacggtgaattgcgcgctgacaagttgctggttgccaccggtcgggcaccgaatacgcgcagcctcgcgctggacgcggcgggggtcactgtcaatgcgcaaggggccatcgttatcgaccaaggcatgcgcacgagcaacccgaacatctacgcggccggcgactgcaccgaccagccgcagttcgtctacgtggcagcggccgccggcacccgtgccgcgatcaacatgaccggcggcgacgcagccctcaatctgaccgcgatgccggcagtggtgttcaccgacccgcaagtcgccaccgtgggctacagcgaggcggaagcgcaccacgatggcatcgagaccgacagtcgcacgctgacactcgacaacgttccgcgagcgcttgccaacttcgacacacgcggcttcatcaagctggtcatcgaggaaggtagcggacggctcatcggcgtgcaggcggtggccccggaagcgggcgaactgatccagacggcggtgctcgccatccgcaaccgcatgacggtgcaggaactggccgaccagttgttcccctacctgacaatggtcgaggggttgaagcttgcggcgcagaccttcaacaaggacgtgaagcagctttcctgctgcgctggataa

SEQ ID NO: 3428 - protein, 548 aa, Proteus mirabilis
MTEITVNGMTCTSCATHVKDALEKIPGVNAAVVSYPESRAQVMADTAVSHNQLLAAIAALGYQGSIRVGDFKDEPKIRDALEGAGLHIAIIGSGGAAMAAALKAVEQGATVTLIERGTIGGTCVNIGCVPSKIMIRAAHIAHLRRESPFDGGIAATVPAIDRSKLLAQQQARVDELRHAKYEGILDGNPAITVLHGEARFKDDQSLVVRLNEGGEREVTFDRCLVATGASPAVPPIPGLKESPYWTSTEALVSDTIPARLAVIGSSVVALELAQAFARLGSQVTILARSTLFFREDPAIGEAVTAAFRAEGIEVLEHTQASQVAHVNGEFVLTTGHGELRADKLLVATGRAPNTRSLALDAAGVTVNAQGAIVIDQGMRTSNPNIYAAGDCTDQPQFVYVAAAAGTRAAINMTGGDAALNLTAMPAVVFTDPQVATVGYSEAEAHHDGIETDSRTLTLDNVPRALANFDTRGFIKLVIEEGSGRLIGVQAVAPEAGELIQTAVLAIRNRMTVQELADQLFPYLTMVEGLKLAAQTFNKDVKQLSCCAG

SEQ ID NO: 3429 - DNA, 144 bp, Proteus mirabilis
atgaaaaagctgctttccgcccttgccctcgctgccgttgttgcccccgtgtgggccgccacccagaccgttacgctgtccgtaccgggcatgacctgctcggcctgtccgatcggcgatttccaaggtcgatggcgtcagtaa

SEQ ID NO: 3430 - protein, 47 aa, Proteus mirabilis
MKKLLSALALAAVVAPVWAATQTVTLSVPGMTCSACPIGDFQGRWRQ

SEQ ID NO: 3431 - DNA, 435 bp, Proteus mirabilis
atggaaaacaatttggagaacctgaccattggcgttttcgccaggacggccggggtcaatgtggagaccatccggttctatcagcgcaagggcttgctcccggaaccggacaagccttacggcagcattcgccgctatggcgagacggatgtaacgcgggtgcgcttcgtgaaatcagcccagcggttgggcttcagcctggatgagatcgccgagctgctgcggctggaggatggcacccattgcgaggaagccagcagcctggccgagcacaagctcaaggacgtgcgcgagaggatggctgacctggcgcgcatggaggccgtgctgtctgatttggtgtgcgcctgccatgcgcggaaggggaacgtttcctgcccgctgattgcgtcactgcaagggaagaaagaaccgcgcagtgcggacgcggtgtag

SEQ ID NO: 3432 - protein, 144 aa, Proteus mirabilis
MENNLENLTIGVFARTAGVNVETIRFYQRKGLLPEPDKPYGSIRRYGETDVTRVRFVKSAQRLGFSLDEIAELLRLEDGTHCEEASSLAEHKLKDVRERMADLARMEAVLSDLVCACHARKGNVSCPLIASLQGKKEPRSADAV

SEQ ID NO: 3433 - DNA, 816 bp, Proteus mirabilis
atgagccatattcaacgggaaacgtcttgctcgaggccgcgattaaattccaacctggatgctgatttatatgggtatagatgggctcgcgataatgtcgggcaatcaggtgcgacaatctatcgattgtatgggaagcccaatgcgccagagttgtttctgaaacatggcaaaggtagcgttgccaatgatgttacagatgagatggtcagactaaactggctgacggcatttatgcctcttccgaccatcaagcattttatccgtactcctgatgatgcatggttactcaccactgcgatccccgggaaaacagcattccaggtattagaagaatatcctgattcaggtgaaaatattgttgatgcgctggcagtgttcctgcgccggttgcattcgattcctgtttgtaattgtccttttaacagcgatcgcgtatttcgtctcgctcaggcgcaatcacgaatgaataacggtttggttgatgctagtgattttgatgacgagcgtaatggctggcctgttgaacaagtctggaaagaaatgcataagcttttgccattctcaccggattcagtcgtcactcatggtgatttctcacttgataaccttatttttgacgaggggaaattaataggttgtattgatgttggacgagtcggaatcgcagaccgataccaggatcttgccatcctatggaactgcctcggtgagttttctccttcattacagaaacggctttttcaaaaatatggtattgataatcctgatatgaataaattgcagtttcatttgatgctcgatgagtttttctga

SEQ ID NO: 3434 - protein, 271 aa, Proteus mirabilis
MSHIQRETSCSRPRLNSNLDADLYGYRWARDNVGQSGATIYRLYGKPNAPELFLKHGKGSVANDVTDEMVRLNWLTAFMPLPTIKHFIRTPDDAWLLTTAIPGKTAFQVLEEYPDSGENIVDALAVFLRRLHSIPVCNCPFNSDRVFRLAQAQSRMNNGLVDASDFDDERNGWPVEQVWKEMHKLLPFSPDSVVTHGDFSLDNLIFDEGKLIGCIDVGRVGIADRYQDLAILWNCLGEFSPSLQKRLFQKYGIDNPDMNKLQFHLMLDEFF

SEQ ID NO: 3435 - DNA, 2025 bp, Proteus mirabilis
gtgtacctaaccgagttaaccattaccaattttagatcatttggttctgacggtattacagttaaatttcgtgaagggctaacagcccttgtgggtgaaaatgactctggcaagacagcagtaattgatgctctgagatttcttctcggaacaaccgatcaagaatggcttcgatttagtgatgatgacttccacaagacacgtgaagatagctcagaatcaagtgaaattaaaatatctggtacatttaaaaacttaacatccagcgataagttagggttcgttgaatacttaacctacggaattaataaggatgatgaacctacacttcaccttacacttacagcaaagcgtatgggaactagggcaggaaggccatatatctccacagagattcgatctggtaagaatggagagggaccaaatatggataacaactgccgttcattgcttgctgcaacatatctaaggcctcttcgtgatgctgagcgagagctttcctctggtcgtaattctaggctttcgatggtgctaaattcgctcgatggagcagaaatgggccagttgtttgatgcggaaacatttagttatgatgacattaaaaaactggggctattaggactaggtgacttattcaataagctgattgaacatcaccctcatattgagaatgggaagtcaaaagttaataatcatttagaaaaactacaacttcatggagactcactaaaaagctcgatatcagttagtcaaaatggctctgattcccagaggcttaggcaacttttagagaagctaactctcaatgtggataatactcctgggcgaatggggctaggatcaaataatattctttttattgcatgcgaattaatccttttagccgatgaccaagagcattttccgttattattaatagaggaacctgaggctcatgtgcatgcacagcgacaacttaggctaatacaatatcttcaaaagatagttaactcaaaaaaagatgaagaaaacaaaccacaaataataatcactactcatagccccaatcttgcatctgaggttaatctcaataatttagttattattcaagcaggcagagctttttctaccgctgatggtgaaactgaacttgattcgaatgattataaattcctctcacgttttctagatgtaactaaagcgaatctatttttcgcccgtggtgtcatgattgtagagggtgatgcagaaaatattttgatccctactttggccaagtgcattgggaaagattttacggaacatggagtttctatgatcaacgtcggaggcgttgggctacgacgatacgctaaaatattcatgagaaaaaatcctgatcaagatggaatacaatctgtacctgttgcttgtgtcaccgatctggacgttatgccaaactgtgctccctatattactaaggtcatccaagacgatagtgattggacaatattaggggacggagagaacagaaagtggcgtgctaagcgggattttacattgacgaaattaaatgaacataaggaaaagattaaatccaaggcccatgggcaaaatgttaagtcatttgtagcagatgagtggacactagaatatgacttagcatttgcaaacaacaacgctttggctgaagagctctatattgctgctcaattggctatatgggatgagggtaataattactctgaaaaaacagctaaggaaaaatttgagaaggcccaatccaaatatacaaccttaaaggaagaagctgacaaacttgcagcagataagggttggaacaagaatgaagttttagccagtaaagtctatgcaatgtatgtcacaggctctaaagcttcaaaatccatcgcggcacagtatttgtgtggaattatcatggacaagataacccttgaaaaaacatatgatttaagaaccaagctcccgggctatattgttgatgcaatagactatgttacatcgaatcttcgtattgtttcagggagtaagattaatgaaagttga

SEQ ID NO: 3436 - protein, 674 aa, Proteus mirabilis
MYLTELTITNFRSFGSDGITVKFREGLTALVGENDSGKTAVIDALRFLLGTTDQEWLRFSDDDFHKTREDSSESSEIKISGTFKNLTSSDKLGFVEYLTYGINKDDEPTLHLTLTAKRMGTRAGRPYISTEIRSGKNGEGPNMDNNCRSLLAATYLRPLRDAERELSSGRNSRLSMVLNSLDGAEMGQLFDAETFSYDDIKKLGLLGLGDLFNKLIEHHPHIENGKSKVNNHLEKLQLHGDSLKSSISVSQNGSDSQRLRQLLEKLTLNVDNTPGRMGLGSNNILFIACELILLADDQEHFPLLLIEEPEAHVHAQRQLRLIQYLQKIVNSKKDEENKPQIIITTHSPNLASEVNLNNLVIIQAGRAFSTADGETELDSNDYKFLSRFLDVTKANLFFARGVMIVEGDAENILIPTLAKCIGKDFTEHGVSMINVGGVGLRRYAKIFMRKNPDQDGIQSVPVACVTDLDVMPNCAPYITKVIQDDSDWTILGDGENRKWRAKRDFTLTKLNEHKEKIKSKAHGQNVKSFVADEWTLEYDLAFANNNALAEELYIAAQLAIWDEGNNYSEKTAKEKFEKAQSKYTTLKEEADKLAADKGWNKNEVLASKVYAMYVTGSKASKSIAAQYLCGIIMDKITLEKTYDLRTKLPGYIVDAIDYVTSNLRIVSGSKINES

SEQ ID NO: 3437 - DNA, 561 bp, Serratia marcescens
atgactggattaattattaccatcgcgttattgggtcttattttttattattacaaccgtattatctctatgcgtgaagcggttatctcaagtgaaacagaaatatcggtacaactcgaccgtcgtggtaaagtgtttgatagcttattagctacagtaaaaaaatatcttagtcatgaagccgatgtttttactaaaatcaccgaattaagagctaaaacacaaagtagcaataaccaagaagcaaaagcggcagaagatgagctatcaaaaattgtttcaagtggtgcgattaatgtcgctgttgaaaactatcctgaactcaaatcagatactatcatggctaatttacaagaagagattgtctcaacagaaaataaactctcttttgctaaacgtggctataaccgtaccttagagcaatatcgtgcgtttatcgcctctatccctgcggtatttattgtgaagatttttccaagtctcgtgattaataaagaatactggcgtcttgatgaaacagcgattaaatcagaagaagcgcgccgtattaactttgattaa

SEQ ID NO: 3438 - protein, 186 aa, Serratia marcescens
MTGLIITIALLGLIFYYYNRIISMREAVISSETEISVQLDRRGKVFDSLLATVKKYLSHEADVFTKITELRAKTQSSNNQEAKAAEDELSKIVSSGAINVAVENYPELKSDTIMANLQEEIVSTENKLSFAKRGYNRTLEQYRAFIASIPAVFIVKIFPSLVINKEYWRLDETAIKSEEARRINFD

SEQ ID NO: 3439 - DNA, 549 bp, Proteus mirabilis
atgcctagtctcgtgggctcggagatgtgtataagagacagggctataacatatctaaaagagtgcgctgatgagcatgaacctttagataagtataagcaagaattgatgttattagattataaaatgtcaacaaactatttgttaaatgattatatcttaaagtattttatctctaataaattgaaaaatattaaattttgtaattccatgtttttattaaaagacttttatagttataatgatttcaatgtcaaaacgaaaactaagatgattataattcctatcattgtccttattttaggtattgtttttggatgtgggactacattttttgtggttagtgaaaatcagtttccaaaatctttattggactggtttttttggggaggattaactttagttagcattcaatatatatactattcttcttatactttatggtgttattttcatatggttagaaaagtaaatgattttaatatttttatctcattagtgcgtatgaaaatattattacaaaacaaaagtttaaataacattttataa

SEQ ID NO: 3440 - protein, 182 aa, Proteus mirabilis
MPSLVGSEMCIRDRAITYLKECADEHEPLDKYKQELMLLDYKMSTNYLLNDYILKYFISNKLKNIKFCNSMFLLKDFYSYNDFNVKTKTKMIIIPIIVLILGIVFGCGTTFFVVSENQFPKSLLDWFFWGGLTLVSIQYIYYSSYTLWCYFHMVRKVNDFNIFISLVRMKILLQNKSLNNIL

SEQ ID NO: 3441 - DNA, 381 bp, Proteus mirabilis
gtggttgctgaaagactacgtaaattaatgaccttaggcacactcttttttatcttaggattagcgggctttatgctggcgggtgataatttaattttctgggcaatggcgatagcaatatttacctttggtgaactgatttatgcacctggtgagtatatgatgatcgataatattgcgccgttaggaatgaaagcaagttatttctctgcacaatctctaggttggttaggtgctgcattaaatccacttgctagtggttatatcctgacaaccttgccccctatttcgttattcgctattttaatggggatcgcagtactagcttggctttgtatgctgcaaggtatgaactacagtgaaaaaagaatagctgcttaa

SEQ ID NO: 3442 - protein, 126 aa, Proteus mirabilis
MVAERLRKLMTLGTLFFILGLAGFMLAGDNLIFWAMAIAIFTFGELIYAPGEYMMIDNIAPLGMKASYFSAQSLGWLGAALNPLASGYILTTLPPISLFAILMGIAVLAWLCMLQGMNYSEKRIAA

SEQ ID NO: 3443 - DNA, 630 bp, Proteus mirabilis
atgttaagtcaggtaaaaaataataaagcagattttgatgctatataccttttaacattaaggcttactgcacttataatatttccattactaatcggtttaggtattattgcacaaccttttatactaattgtattaggtgaaaaatggagttatgctgcaacattactcagcatattatgtataggctatatgttatatcctatacatgcaataaatttaaatctcttacaggtaaaaggtagatcagacctttttctaaaattagaaataataaaaaagatacttgttactattatactaataattactgttcctttaggtattgaagctatttgtataggaatagttatacaatcttatttagcactattgattaatacatactatacaggtaagttaacatctataaatataaaaaaacaatttaaaaatttatttcctatttggataattactatcatttgtagtctagtaagctggagtttatcctttaattttaaaaacatttatattcagttaatattaatattaacaataacacccagcatgtatataatatctatccgtatttttcaatacgagttattcaatattattatctccaatatatttaagaagaaaatttaa

SEQ ID NO: 3444 - protein, 209 aa, Proteus mirabilis
MLSQVKNNKADFDAIYLLTLRLTALIIFPLLIGLGIIAQPFILIVLGEKWSYAATLLSILCIGYMLYPIHAINLNLLQVKGRSDLFLKLEIIKKILVTIILIITVPLGIEAICIGIVIQSYLALLINTYYTGKLTSINIKKQFKNLFPIWIITIICSLVSWSLSFNFKNIYIQLILILTITPSMYIISIRIFQYELFNIIISNIFKKKI

SEQ ID NO: 3445 - DNA, 777 bp, Proteus mirabilis
gtgaaagtaaaagatgctgaagatcagttgggtgcacgagtgggttacatcgaactggatctcaacagcggtaagatccttgagagttttcgccccgaagaacgttttccaatgatgagcacttttaaagttctgctatgtggcgcggtattatcccgtgttgacgccgggcaagagcaactcggtcgccgcatacactattctcagaatgacttggttgagtactcaccagtcacagaaaagcatcttacggatggcatgacagtaagagaattatgcagtgctgccataaccatgagtgataacactgcggccaacttacttctgacaacgatcggaggaccgaaggagctaaccgcttttttgcacaacatgggggatcatgtaactcgccttgatagttgggaaccggagctgaatgaagccataccaaacgacgagcgtgacaccacgatgcctgcagcaatggcaacaacgttgcgcaaactattaactggcgaactacttactctagcttcccggcaacaattaatagactggatggaggcggataaagttgcaggaccacttctgcgctcggcccttccggctggctggtttattgctgataaatctggagccggtaagcgtgggtctcgcggtatcattgcagcactggggccagatggtaagccctcccgtatcgtagttatctacacgacggggagtcaggcaactatggatgaacgaaatagacagatcgctgagataggtgcctcactgattaagcattggtaa

SEQ ID NO: 3446 - protein, 258 aa, Proteus mirabilis
MKVKDAEDQLGARVGYIELDLNSGKILESFRPEERFPMMSTFKVLLCGAVLSRVDAGQEQLGRRIHYSQNDLVEYSPVTEKHLTDGMTVRELCSAAITMSDNTAANLLLTTIGGPKELTAFLHNMGDHVTRLDSWEPELNEAIPNDERDTTMPAAMATTLRKLLTGELLTLASRQQLIDWMEADKVAGPLLRSALPAGWFIADKSGAGKRGSRGIIAALGPDGKPSRIVVIYTTGSQATMDERNRQIAEIGASLIKHW

SEQ ID NO: 3447 - DNA, 573 bp, Proteus mirabilis
atgtttaatccatttaatccaggttattatactgaagcagaactttctcagttcggttttaagaatattggaagaaatgtttctatagctaaaaattgtactatcttaggcctcaataatatcaaaattggaaataatgttagaattgatgggtttacaaccataatagctaatggaaaaggttttttagatttaggctcatatattcatattggtggatattctgcaatttttgctggctcaggtgtcataatgaaagatttttcaggaatatctcaaggggttaaaatttatactaaaagtgatgattattctggtaataaaatgacaaatcctacaatcccttcaaatttaacgggagtgatcgaaggagaggtaatattagaaaaacatgtaatcgtaggttctcaatcaattatactcccgggagttactttaagagaaggaacagctattggagctaactcattaataactaaaagtacacaagaatggtgtatatattttggtaatcctgcgaaaaaaataaaaacaagacagaaaaaacctttagagttggagaaagaaatataa

SEQ ID NO: 3448 - protein, 190 aa, Proteus mirabilis
MFNPFNPGYYTEAELSQFGFKNIGRNVSIAKNCTILGLNNIKIGNNVRIDGFTTIIANGKGFLDLGSYIHIGGYSAIFAGSGVIMKDFSGISQGVKIYTKSDDYSGNKMTNPTIPSNLTGVIEGEVILEKHVIVGSQSIILPGVTLREGTAIGANSLITKSTQEWCIYFGNPAKKIKTRQKKPLELEKEI

SEQ ID NO: 3449 - DNA, 531 bp, Proteus mirabilis
atgcaatttactatagataatttacataaattcccagaagaaatagacactgaaaatagtgataatatttattcttatcatgaccttttctttcatcataatcatgttgtacctagctggaaagtgttattagattatatctatgaagattgcgatctagatgtattaactcaatatattgaaaaacatgcacaaactctaagctatgatgaaatagatctgattgaaggagacaattatgaccttttatatatgaaagttatttgtaacgataaccttagtgacaatgcatacaatttagtattaaaacctgtttatataaatactcattactgggatgagaaactaagtttgactaattttctacggttaataatgaataataaagtaccgttaaataatgactcttataaaaatgcaatacaatgcttttctccaactgagaataaagagaatatagaatcctttatatcatggttctctaattataaagaaatactatatatatgcaaatttattgcatggagatag

SEQ ID NO: 3450 - protein, 176 aa, Proteus mirabilis
MQFTIDNLHKFPEEIDTENSDNIYSYHDLFFHHNHVVPSWKVLLDYIYEDCDLDVLTQYIEKHAQTLSYDEIDLIEGDNYDLLYMKVICNDNLSDNAYNLVLKPVYINTHYWDEKLSLTNFLRLIMNNKVPLNNDSYKNAIQCFSPTENKENIESFISWFSNYKEILYICKFIAWR

SEQ ID NO: 3451 - DNA, 771 bp, Proteus mirabilis
ttgactatcgttaatagcaaagaattcattcgtgaggttaagcacacacctcagaatttctacattattcactattcttgccaaagcttgaatgatgataacgacggcttatctcctcgaattacgtcgattgcaatactgcacctgtctacagaccagacagtgagtttttctattcacgctattgctgaagaacttggtatcagtcgagataatatccatcaacgtctcgatgatattgagcttgcgttactaggtaaattcaatgaatttgtccgtgatcgtcgtgatagatactggattcactggaatatgcgaaatctgacttacggtttcgaacatttagaacatcgatatcgagtacttggtaaaaccgatatggcagtaattcctgttgaacgacgaatcaatctcaatgatattttgtctgaccgttatggcagtggttatgttgcagatcctcgcttaaagtcattgatgaatttgaatggtggtatccataggcactttttaactggtgcggaagaagtagaagcgttcaagagcaatgagttcatcaaaatgcacaactctacgctgtgtaagaccggtttttataagaaagtaatcgataagctagctcagggaaaacttaaaacgaacgcaaagggcatgggcgttcttattgataggctttttgaaagccggttggctaagacaattgcattggctagtgcattaatttcggtacccatctctgtttatcaaggctttatttggctaacaacatga

SEQ ID NO: 3452 - protein, 256 aa, Proteus mirabilis
MTIVNSKEFIREVKHTPQNFYIIHYSCQSLNDDNDGLSPRITSIAILHLSTDQTVSFSIHAIAEELGISRDNIHQRLDDIELALLGKFNEFVRDRRDRYWIHWNMRNLTYGFEHLEHRYRVLGKTDMAVIPVERRINLNDILSDRYGSGYVADPRLKSLMNLNGGIHRHFLTGAEEVEAFKSNEFIKMHNSTLCKTGFYKKVIDKLAQGKLKTNAKGMGVLIDRLFESRLAKTIALASALISVPISVYQGFIWLTT

SEQ ID NO: 3453 - DNA, 2052 bp, Proteus mirabilis
atggccgaattgaatgagttggataataagctgctggagcatttcagaggctacgttgtaagaaaggatcttgtgcggtctgtaaaagttggtgccaacgtccccgtttttgtattggaatatttaattgctaattcttgttctaccgatgacgaagaaaagattcgcaaagggatggaaaacgttaagaagattcttagcgaacactatgtaaaccctgaagagagctcactgattcactcgaaaattcgtgaaaaaggccgttataaaattattgataagatttcagtagagctggattctaagaaggatatttactgggccaagctgcaaaatagcaatatcattaacggcaatatccgtgatggcttagtgaaagagcatgagaaaatgctgatggggggtatttgggctattattgatgtggagtatgaccccgacatcaaaattggtcagcacatttacccttttgtggtaaccaacattaaacctattcagctttcatcgtttgataacagcaaaataatcaacaagcgtaaagaattcagcaagagtgagtggctggatattttgcttagaagttgtggttatgaacccagtgctgaaggcgtaagcgaccgtatcaagatgttgttattagcgcgcttgttaccaatggtcgaaagtaatttcaactttatcgaactcggaccgcgctctaccggcaagtcatttgtttacaaagagttaactccctacgccgtgttaatctctggagggcaaggtacagttgccaagctcttcgttcacggttcaacgggcaaagtcggtgcagttggtcaatgggatgctatctgctttgatgaagcgacagataagatctttaaggatcgtgaagctgtaccgttaatgaaagattatatggaatcgggttcgttttctcgcgcaggcgccggaggggaaattaccggtgtcgcatcgatcatcctcaacgggaatatcaaccaaccagtagaaactgtgttgcagacctctcacttgttcagccctttatcagatgaagtgaataacgatactgcttttctagaccgtattcatttttacctacctggttgggagatgattaagtttgccccacagcatttcacttcaagctttggtttcagtaccgattacttctcagaaacattaaagtcatttcgacgagtgacttatactgacgctttagagaactttttctctttggggtcacatttaaaacagcgtgataccaaaccggttaaaaaaactgtttcaggccttattaagctacttcaccctgacggcgaatataccaaagaagatatacgtgaatacttagagattgcccttgaaatgagacgccgtgttaaagagcagctcaagcgcattggtggtatggaattctgggataccaatttctcttacattgataaagatactcaggaagaacattttgttggattaccagaggagaaaggctctcacctgatagaaaacacacctttaccaccaggtgtttgttataccagcactagcgacggggataatgtcgcgctcgtgcgtattgaagctgttactacctcgggttctgggaaactcaatatttctggtgtaagtaacaccggagtaaaagaaaatatcaagaatacctaccagtatattaaagctaatgaaaaaacaattttaagtgaacagcattcgcttaaaaattacgatatcactatccaagtgaccaatatgctgggggcttcaatatcaacgggaattggctcggcggtttatatcgcaatcgtgtctgctctgtacaaaaagaacctaaaggctggccttgcagtgttgggtaatatatccgttggcggtgcgattgaaaggtcaattaactttgcagacaagataacaatgttgtctgagaacggtgcgaagacggttgttgttccaatggataatctagttgagctaacaaatgtaccaccaacagttcttggcaatacagatgttccgttttatcagaataatcagatgcttatgcaaaaaagcatactgcttgactga

SEQ ID NO: 3454 - protein, 683 aa, Proteus mirabilis
MAELNELDNKLLEHFRGYVVRKDLVRSVKVGANVPVFVLEYLIANSCSTDDEEKIRKGMENVKKILSEHYVNPEESSLIHSKIREKGRYKIIDKISVELDSKKDIYWAKLQNSNIINGNIRDGLVKEHEKMLMGGIWAIIDVEYDPDIKIGQHIYPFVVTNIKPIQLSSFDNSKIINKRKEFSKSEWLDILLRSCGYEPSAEGVSDRIKMLLLARLLPMVESNFNFIELGPRSTGKSFVYKELTPYAVLISGGQGTVAKLFVHGSTGKVGAVGQWDAICFDEATDKIFKDREAVPLMKDYMESGSFSRAGAGGEITGVASIILNGNINQPVETVLQTSHLFSPLSDEVNNDTAFLDRIHFYLPGWEMIKFAPQHFTSSFGFSTDYFSETLKSFRRVTYTDALENFFSLGSHLKQRDTKPVKKTVSGLIKLLHPDGEYTKEDIREYLEIALEMRRRVKEQLKRIGGMEFWDTNFSYIDKDTQEEHFVGLPEEKGSHLIENTPLPPGVCYTSTSDGDNVALVRIEAVTTSGSGKLNISGVSNTGVKENIKNTYQYIKANEKTILSEQHSLKNYDITIQVTNMLGASISTGIGSAVYIAIVSALYKKNLKAGLAVLGNISVGGAIERSINFADKITMLSENGAKTVVVPMDNLVELTNVPPTVLGNTDVPFYQNNQMLMQKSILLD

SEQ ID NO: 3455 - DNA, 405 bp, Proteus mirabilis
atgttgattgttattaatgattctaatctattttcaaactcagaaaaagcatcattattatataaatatcgtgaagaatgtcatgaatcattcattgacgaactagatatcactaatgaaacattaatatcattaattaaattatcaaataatgataatttttctattaacctaatagtacgattaataaataacaattataaggatagagaagaaatcgctaaccttgtagatcagcttcaagaaaaggaatttaataaaatatttaatcaaaaaactgcaactttaaatcttagcaataaccaagatgcagaattactattttctaccttagaggatgcaaagttaatcaagaaatggttattaaagggagaagggaagtattatattgagtgtatttattaa

SEQ ID NO: 3456 - protein, 134 aa, Proteus mirabilis
MLIVINDSNLFSNSEKASLLYKYREECHESFIDELDITNETLISLIKLSNNDNFSINLIVRLINNNYKDREEIANLVDQLQEKEFNKIFNQKTATLNLSNNQDAELLFSTLEDAKLIKKWLLKGEGKYYIECIY

SEQ ID NO: 3457 - DNA, 210 bp, Proteus mirabilis
atgcagggaactaattgggttaagtgtagtgagaaacatccagagaaggttaagctcattttgttttatgcaggtggtgaaactcatgcaggatggatgcttgatgaaggttgtggtttttacagcataaaaatatcaaagtggtttgactattcagatgttacctactggtgcgacttgccactcccaccaatgccagagggtgaatga

SEQ ID NO: 3458 - protein, 69 aa, Proteus mirabilis
MQGTNWVKCSEKHPEKVKLILFYAGGETHAGWMLDEGCGFYSIKISKWFDYSDVTYWCDLPLPPMPEGE

SEQ ID NO: 3459 - DNA, 249 bp, Proteus mirabilis
atgtcagctatagaagcaggttctgctggagtaccattattgttaagtaatgttggtggatgtagtgaattaattcataataacggaattatattcgaaaataatattgatagtctattaaatgcaattcagaaaattttgaataattatcattattattatcagaactctagttcttataaatcaattttccatattaatacttccaaacaacattatatgaatttaattgacggagtgaatgaataa

SEQ ID NO: 3460 - protein, 82 aa, Proteus mirabilis
MSAIEAGSAGVPLLLSNVGGCSELIHNNGIIFENNIDSLLNAIQKILNNYHYYYQNSSSYKSIFHINTSKQHYMNLIDGVNE

SEQ ID NO: 3461 - DNA, 348 bp, Proteus mirabilis
atgagtgctagcgatacatttgtcttatcttcagcttgggaagggtttggtttagttgtagcagaggctatgtcttgtaaaagaattgtgattgctactgatagtggtggtgttagcgaagttatggataatattggctttttagtcccaacaaaagactcaaaattattatttgatgcaatgaatcatgttttatcattgaataatgaagaaaaaaaacttattggtgaacaagcaagaagaaaaatattgcaagatttttctctccctaagattattgatacatggcttaaattatacgagcagctagaaaaaaatgaaaaagaaaattgtttttatcattactaa

SEQ ID NO: 3462 - protein, 115 aa, Proteus mirabilis
MSASDTFVLSSAWEGFGLVVAEAMSCKRIVIATDSGGVSEVMDNIGFLVPTKDSKLLFDAMNHVLSLNNEEKKLIGEQARRKILQDFSLPKIIDTWLKLYEQLEKNEKENCFYHY

SEQ ID NO: 3463 - DNA, 483 bp, Proteus mirabilis
atgaaagaaaaaggaatattagatcttctttctgcgatagagttaataaaaaataaaaatattagttttgatttagctggtgaaatggaaaataatttaaaagatatattaacaataaaaatccctaagctaaactgtaaatatcatgggattgttaaaggaaaagataaagataatcttttaagaaaagcggatatcctcatattaccatcttatgatgaggggcaacctctatgtatattagaagcttatagttacggatgtgcagttataacaacagatgttggaggtattagggatatatttaagaataatattaatggaatattttgccaagttaacgatccttcatctatcgtagtagcaatagataaaacaataaataatttaaatcactttaaactaaaaaatagaaaacttgcagaagaaaaatattcaacccaaaaatatgttgacaacctattaaaaataattgaagagtaa

SEQ ID NO: 3464 - protein, 160 aa, Proteus mirabilis
MKEKGILDLLSAIELIKNKNISFDLAGEMENNLKDILTIKIPKLNCKYHGIVKGKDKDNLLRKADILILPSYDEGQPLCILEAYSYGCAVITTDVGGIRDIFKNNINGIFCQVNDPSSIVVAIDKTINNLNHFKLKNRKLAEEKYSTQKYVDNLLKIIEE

SEQ ID NO: 3465 - DNA, 888 bp, Proteus mirabilis
atgtcatctcttttttctgaaatacaaaccgatattttaaatccagaatcaaacataactgatattttacgcaaatgcgcggtactggcatataaaattaataacgacgtttttatcaaatggacagacttggaattggaaggatatgaagattctgatgtccttcctgattatcgtataattggcactgtaattcgtggtgattttactgatggatttagagtgaatgctccaggaatggcaatagataaacatcttattcctaagtctttacaagatagctttggatcagggaaagtatattacccagcttcatatctcgaaagtttattattttattctggtgatgaagatcctaggcgagatatgcctatgtctgtactgtacaaatttaaagatttatatagtggacttttttgtatcagagcatatgaaatattgcctagaatggggtgctatagtgttgttgattctataaagaataaaatactaaaatttttattggaaatagaaaaaaagattgaaaatatagaggatattaaattgtcaaaagaagatgagaaggcgattactcagacttttaccaatcacatttatggcaacgctaatattgctaatgctagtgaaaattttaaccaaaatatccagcttccatctgatgaattaattaataatttattatctgaactgcttcaattaaaggagcaaggtaaggatgtggatactattaatactgttattccacaaattgaagaaatgaaacaaattaaagaccaaaaaggcataatggataaattggctaatgtaatgaccattgcaggtggtagtgcctcggtatgtagccttgttgcacaatatattcctgctatttcaaaattaattggctag

SEQ ID NO: 3466 - protein, 295 aa, Proteus mirabilis
MSSLFSEIQTDILNPESNITDILRKCAVLAYKINNDVFIKWTDLELEGYEDSDVLPDYRIIGTVIRGDFTDGFRVNAPGMAIDKHLIPKSLQDSFGSGKVYYPASYLESLLFYSGDEDPRRDMPMSVLYKFKDLYSGLFCIRAYEILPRMGCYSVVDSIKNKILKFLLEIEKKIENIEDIKLSKEDEKAITQTFTNHIYGNANIANASENFNQNIQLPSDELINNLLSELLQLKEQGKDVDTINTVIPQIEEMKQIKDQKGIMDKLANVMTIAGGSASVCSLVAQYIPAISKLIG

SEQ ID NO: 3467 - DNA, 195 bp, Proteus mirabilis
atgcagggaactaattgggttaagtgctcagataaattaccagaagtaggacagagggttcttattgctactgattatccatctgtttatgaggcagcaagatatttcggtaataagtttaatagattcggtcaagaagtaacagcaacccactggatgcctttgccacccccaccaatgccagagggtgaataa

SEQ ID NO: 3468 - protein, 64 aa, Proteus mirabilis
MQGTNWVKCSDKLPEVGQRVLIATDYPSVYEAARYFGNKFNRFGQEVTATHWMPLPPPPMPEGE

SEQ ID NO: 3469 - DNA, 297 bp, Proteus mirabilis
atgaagagtgacatacttgaggttcttaacttgcttaggctgcaaggtaaacaaatgcttgaattaattgaagcgagtgaggcgcaagcggtaaggatcagaaagagggttgaggcgttagagaagcagactatcaaagatactcgaaactggcgctgttttattggttttcaccaatgggaaattcatgggcattctgcatggactgagagtattgatggtgaagttagtgaaactgggaatctctacgtgttgagatgcgttcactgcggaaaattaaaagctaaatacatatag

SEQ ID NO: 3470 - protein, 98 aa, Proteus mirabilis
MKSDILEVLNLLRLQGKQMLELIEASEAQAVRIRKRVEALEKQTIKDTRNWRCFIGFHQWEIHGHSAWTESIDGEVSETGNLYVLRCVHCGKLKAKYI

SEQ ID NO: 3471 - DNA, 270 bp, Proteus mirabilis
atgcagggaactaattgggttaaggtgagtgagagattacctgaaatggacacgccagtgtttgctggatggtttagggaaaacggcgaatttgtatggggtagattcgtcagatgtgaagaacacggtgatgaaggttggatttggctatggtctatttgtactggtgattatttaagtgatgaaggtgattggctgctagacgatgattattcaatgataacgcactggcaacctttaccactcccaccaatgccagagggtgaatga

SEQ ID NO: 3472 - protein, 89 aa, Proteus mirabilis
MQGTNWVKVSERLPEMDTPVFAGWFRENGEFVWGRFVRCEEHGDEGWIWLWSICTGDYLSDEGDWLLDDDYSMITHWQPLPLPPMPEGE

SEQ ID NO: 3473 - DNA, 546 bp, Proteus mirabilis
atgcaaatagccaataggtttccatactggctttgtaatactgcattcgccttttctaattcaatgattttggcttccaagttaggcataggaacctcgatagtggatgaaatagttaagtggatcattgcaaatactgaaagaattatatcaatcgttgcaataattgcatcatactttattggtgtttattcgaacagacgcaacgaccggcgcaaagagtttaattcagttgcagaccctatctacataaggctcattaaagccaagaaagatctagatttagggttgtgcgttcaccattctttagttaatgaaaaagaaatattgaatctttctatccatatgaaagaaaaggaaagagaaaagctgatagtggcttacaaggagttttgtgatgctgtatcaatgattaagtgggataagtatcacaaaccaactttagaagacgatgtaagacagaagatagtagaaagccttaagtctcttatagacttaacaaaacctgtctcttatacacatctgacgctgccgacgaaggcttag

SEQ ID NO: 3474 - protein, 181 aa, Proteus mirabilis
MQIANRFPYWLCNTAFAFSNSMILASKLGIGTSIVDEIVKWIIANTERIISIVAIIASYFIGVYSNRRNDRRKEFNSVADPIYIRLIKAKKDLDLGLCVHHSLVNEKEILNLSIHMKEKEREKLIVAYKEFCDAVSMIKWDKYHKPTLEDDVRQKIVESLKSLIDLTKPVSYTHLTLPTKA

SEQ ID NO: 3475 - DNA, 492 bp, Serratia marcescens
atgttttggttgttatcttggtttgcgctattaatatttactcccattggatatattgaatttattaactcaaaacttcttcagtgggataatccatatatagtgtcgtcactattttttgttccagtgagttactttatttcatattttgttaagttattcattaaattatgtatttacttaaacagagcgttaacacaagtaagattaaataaaaaaaagaaaaacaatattaataatgtcaccgacaaagaagcttcgattattgcaatctttgctgaaataggtctggatagcgaattgtcttttgattcaatgaatgaaaaaggtgtcatcgaattatttaataaaggaataatcgaaccaattagaggtgactatattaacgagcctaattgcagatataggattactagaaattaccttaaagatatagaatacgctctagtaaataacactaaaatacgtaaagcatatgaagaggtaaggtaa

SEQ ID NO: 3476 - protein, 163 aa, Serratia marcescens
MFWLLSWFALLIFTPIGYIEFINSKLLQWDNPYIVSSLFFVPVSYFISYFVKLFIKLCIYLNRALTQVRLNKKKKNNINNVTDKEASIIAIFAEIGLDSELSFDSMNEKGVIELFNKGIIEPIRGDYINEPNCRYRITRNYLKDIEYALVNNTKIRKAYEEVR

SEQ ID NO: 3477 - DNA, 267 bp, Proteus mirabilis
gtgaccttttttcgtataaaagaggtaagtatggacattcagcaagaaacaaaaatttgtacactatcggcacgagtagaacgacaaggacaacaaattgcagagttacaaaaacagctcgctgatatgcaaaaggcaacgagctgtgagttagatagcgccattcaaaatgtcttattacaaggtgtagaaaatggtgcaaaaaaagcaaaggaacttattaaaaatcaagatttttatcaaaaaacaaagcagacttcaagatag

SEQ ID NO: 3478 - protein, 88 aa, Proteus mirabilis
MTFFRIKEVSMDIQQETKICTLSARVERQGQQIAELQKQLADMQKATSCELDSAIQNVLLQGVENGAKKAKELIKNQDFYQKTKQTSR

SEQ ID NO: 3479 - DNA, 234 bp, Proteus mirabilis
atgagttctttaaaacagaaaactactaatggtctaaaatggagtgctatagagagactaacaactcagggaatacaagttagtgttatgttgattttaggccgaatgctaggtcctactgcatttgccttaattggaatgttagctatttttattgctatttcacaaacattagttgatagtggctttagtaatgcattaattagaaaaaaaataaaaacagaatctgattag

SEQ ID NO: 3480 - protein, 77 aa, Proteus mirabilis
MSSLKQKTTNGLKWSAIERLTTQGIQVSVMLILGRMLGPTAFALIGMLAIFIAISQTLVDSGFSNALIRKKIKTESD

SEQ ID NO: 3481 - DNA, 564 bp, Proteus mirabilis
atgaaatcactattaaaacagttattaccgccgatgagttatgcgctagaagcccctcgacttgatgctgaattagagggggaagcgcactgttttctactcgctcaagaaagtgctatccgtgcccataacggtgttaccccttattttgcacaaaacttactttccgattgggagcgtgttttagatgtcacgcctgatgaaacattaagctatcagcaacgtttggagcgtgttttagttaaactcgctgaaacgggggggttgtctattccttactttattcaactggctaaaaaattgggctatcacatcactattgatgaattagatccttttcaagcaggcgtgagtcgtgccggtgataggttgacacaccctggtattttatgggtttgggtggtcaatattttcggtgctaaatcgcaattttatcgtttccgcgccggtggttctgttgcaggtgaacgcctttcattttgggcagataccatcattgaagctgtttttaatgacttaaagccggctcataccttttgttactttacttatcaggagtcttga

SEQ ID NO: 3482 - protein, 187 aa, Proteus mirabilis
MKSLLKQLLPPMSYALEAPRLDAELEGEAHCFLLAQESAIRAHNGVTPYFAQNLLSDWERVLDVTPDETLSYQQRLERVLVKLAETGGLSIPYFIQLAKKLGYHITIDELDPFQAGVSRAGDRLTHPGILWVWVVNIFGAKSQFYRFRAGGSVAGERLSFWADTIIEAVFNDLKPAHTFCYFTYQES

SEQ ID NO: 3483 - DNA, 921 bp, Proteus vulgaris
atgagtttagatattttagaaaataggaagtggctaaatttaaaggaaactgttcgattacttcaaaaaaaagtggatgcgtcaatccgcttatctgatgtggcaaggttaattgcagataaggatataaagccctctattttcttccgtacacctgtttttgccagagaagtcaaactggaagaaaaacctctttcctatttattagcagaaatagaaacggcattatcctgcaatcgccatttgttgagtgaagaaaccattattgcggaaacgctggtcacacacgccacacctattaatcaaaatattatccgtataaaagatgtatggtcagtattacccgtaggtattacgcttcatgaagcagagagaatatatagcgaagaagagcagttatcatccccttgtcgttctctttacgatgtaaaagggatcattgtgagtgatttagataaatactatcaaatcgtcactccttttgatgttaagcgagaattgatggaactcgtccaactgactaaagcgcaaaatatcacggataatggttttttgaatggtcatattgctaaattgaaagagattagggataaattagaagcaaatagcgcttatgaatcactgatgccctgcatttcattacctcctaatgcttatttagcgttaaaaagagaagacattaatgattttattcattcatggtgccagccagataagaaaatatcatctaaaacagcaaatgctcaatctgagtttatttatggattaatccgtactcaatacggcattgatgttgcagaaaatcccagaagacatattgaagggaaagcaggcgtgatacgtctcgcttttgagaaagaaggattatctttgccgagtgggaatactgtttctggctggataaaagatattatttcgtaa

SEQ ID NO: 3484 - protein, 306 aa, Proteus vulgaris
MSLDILENRKWLNLKETVRLLQKKVDASIRLSDVARLIADKDIKPSIFFRTPVFAREVKLEEKPLSYLLAEIETALSCNRHLLSEETIIAETLVTHATPINQNIIRIKDVWSVLPVGITLHEAERIYSEEEQLSSPCRSLYDVKGIIVSDLDKYYQIVTPFDVKRELMELVQLTKAQNITDNGFLNGHIAKLKEIRDKLEANSAYESLMPCISLPPNAYLALKREDINDFIHSWCQPDKKISSKTANAQSEFIYGLIRTQYGIDVAENPRRHIEGKAGVIRLAFEKEGLSLPSGNTVSGWIKDIIS

SEQ ID NO: 3485 - DNA, 510 bp, Proteus vulgaris
gtgttgcatctcttcaaatggatgggctatattgttggcgcgttagcaaaatctaacgtcaggattggaaccctgaatcagttactggcgacacatgacgcgcctagcgtctttttttgtgtttatatctgcgcaccgataaaaaatacggtattataccgtcctgattcaatggtggcgttgatagggcaaccgcaaggttggctggattccagtaactccagtagttccaaccctgtcagcgtcaccacccttattgagattggaacctctggtggtgactccttaactaagttactggagatcatcgttatgatggctatccctacccctattcaaatcaaattcttatttttgagcgttaatcgaacagatagcaaggctaaaccttgtcgtcttgaaattacagcggttaacgagcaagaagctagatcaaaatattcttccgattatgccttgtattttgcaggacaaattcccttacatgacacaagagggaatgcacaatga

SEQ ID NO: 3486 - protein, 169 aa, Proteus vulgaris
MLHLFKWMGYIVGALAKSNVRIGTLNQLLATHDAPSVFFCVYICAPIKNTVLYRPDSMVALIGQPQGWLDSSNSSSSNPVSVTTLIEIGTSGGDSLTKLLEIIVMMAIPTPIQIKFLFLSVNRTDSKAKPCRLEITAVNEQEARSKYSSDYALYFAGQIPLHDTRGNAQ

SEQ ID NO: 3487 - DNA, 162 bp, Acinetobacter baumannii
atgtctgctgaaactgtgcctgtacctggcaatgaagtgttgcctgcagggtcagtcgctgttgcagtcactgtatcgccatccaccaggttacctgggtttggtactgaccagctaccatctgtgcctgctaccactgttgcagttgtgccatcaggataa

SEQ ID NO: 3488 - protein, 53 aa, Acinetobacter baumannii
MSAETVPVPGNEVLPAGSVAVAVTVSPSTRLPGFGTDQLPSVPATTVAVVPSG

SEQ ID NO: 3489 - DNA, 408 bp, Proteus mirabilis
atgggcgcggacgtgcttgatgttcagggtgccgccgatcagcggccgcagcgtcgggtaggtctgcacgccctgcggcacgtacagcttggttttgccgaggtcgcggatgcgcggcgcgaaacggaagcccagcaggtgcatcagggcgaagacgtgatcggtgaagccggccgtgtcggtgtagtgctcctcgatccgcaggtcggactcgtggtacagcaggccgtcgagcacataggtggaatcgcgcacgccgacattcaccacgcgggtgctgaacggcgcgtactggtcggagatatgggtgtagaacagccgtcccggctcactgccgtacttcgggttgacgtgtccggtgctctcgccccggccgccagcccggaaacgctggccatcggaggatga

SEQ ID NO: 3490 - protein, 135 aa, Proteus mirabilis
MGADVLDVQGAADQRPQRRVGLHALRHVQLGFAEVADARRETEAQQVHQGEDVIGEAGRVGVVLLDPQVGLVVQQAVEHIGGIAHADIHHAGAERRVLVGDMGVEQPSRLTAVLRVDVSGALAPAASPETLAIGG

SEQ ID NO: 3491 - DNA, 279 bp, Escherichia coli
atgcctaacatcaaatttaactttagtgggttaaatacaatttacgctgaggcttgggcgaaaaaagatccaactattgcttttgaaataagactaggtgcaggttgttttgtctttatgatgttcctgtcaaaagaagatagtgaacagaatgataaattattcatatattatcgaaatatcaacacattatcacagttgaaactatacggttctcatctaggcggcgatttttttgcttacatcaagcctaaagaagaagctcttattaggcactga

SEQ ID NO: 3492 - protein, 92 aa, Escherichia coli
MPNIKFNFSGLNTIYAEAWAKKDPTIAFEIRLGAGCFVFMMFLSKEDSEQNDKLFIYYRNINTLSQLKLYGSHLGGDFFAYIKPKEEALIRH

SEQ ID NO: 3493 - DNA, 309 bp, Escherichia coli
atggagactttcgatactgataaatttcgctcagaactggatattttatcaagaaagattatgcctggttgtggtcttgtttttgagctatatcaacgtcgtttgagtgcagccattgataattttgttgccggattaccagaagaacaacagactctggcatttgaactggctcgccaagaatttgattatcgttctgcagaagagatcacggatgagatacgccgagacacggaaaatggctattgttgtcacggccttgatcgcaattgctgccctcttggttgcggtgatttagatcagtattaa

SEQ ID NO: 3494 - protein, 102 aa, Escherichia coli
METFDTDKFRSELDILSRKIMPGCGLVFELYQRRLSAAIDNFVAGLPEEQQTLAFELARQEFDYRSAEEITDEIRRDTENGYCCHGLDRNCCPLGCGDLDQY

SEQ ID NO: 3495 - DNA, 651 bp, Escherichia coli
atgatggacaaatcaaaaaattttttgatgatagcgttaagttcattattgctggcagggtgtgattcttctaaagatgccaataaatcaaactttgaaaaagcaattaatacaaaacttgagaatgaatgcattactatcaaccctctcggaatgcttgatagtaagccttatccagttcaattatctgtggctcagactaatcgatatacatctcaggaacgggcagacgaaataaacgccagacagttttccacgtttgatgcactggttaaagctggcttattgacagtaaaagatacccaggttgatgaaactatcggattttctaaaacaggtaaaaaagtacccggacgtgaatatgctctgacagataaagggaaaaaatatctgaaatcgccagagcgacctgacttctgtgtcggtcactataaggttgatgagatcattgattttactgaacctggtgatgcgatgggaatgaaaatcacgagggttaattacacattcagccctaccagtattgcagaatgggctaagcgtgatgatattcaggcggcatttcctctgattaaggttaatttgaaagagaaacaggaaaatcgcatctctctggtattgaaaaatgatggatggtctgctgaacgatag

SEQ ID NO: 3496 - protein, 216 aa, Escherichia coli
MMDKSKNFLMIALSSLLLAGCDSSKDANKSNFEKAINTKLENECITINPLGMLDSKPYPVQLSVAQTNRYTSQERADEINARQFSTFDALVKAGLLTVKDTQVDETIGFSKTGKKVPGREYALTDKGKKYLKSPERPDFCVGHYKVDEIIDFTEPGDAMGMKITRVNYTFSPTSIAEWAKRDDIQAAFPLIKVNLKEKQENRISLVLKNDGWSAER

SEQ ID NO: 3497 - DNA, 519 bp, Citrobacter freundii
atgagtgtgccgcaaacaaaagctgaactgcttttagctattgataaaaatttcagtaaattaattagttacctcaacgcaatcccaccagaaattacttcagataaatcaatggacggacatgccaaaggaaccgagatgagtgtccgtgatctagtttcgtatctgcttggatggaatgctcttgttataaaatggatcacttctgatactaaaggtctgccagtcgattttcctgaaactggctataaatggaatcagcttggccttcttgctcaaaaattttactcagattacagtgagctaagttatgatttgttagtagctgaacttcaagttgtaaaaaatgagattgtgaaccttattgatgatcgtaccgatgatattttgtatggaaggccatggtacaaaaaatggacgatggggagaatgatctcatttaacacatcttcgccttacgccaatgctaatggaagattaagaaagtgggcaaaaaataataatatcagtttaaagtaa

SEQ ID NO: 3498 - protein, 172 aa, Citrobacter freundii
MSVPQTKAELLLAIDKNFSKLISYLNAIPPEITSDKSMDGHAKGTEMSVRDLVSYLLGWNALVIKWITSDTKGLPVDFPETGYKWNQLGLLAQKFYSDYSELSYDLLVAELQVVKNEIVNLIDDRTDDILYGRPWYKKWTMGRMISFNTSSPYANANGRLRKWAKNNNISLK

SEQ ID NO: 3499 - DNA, 249 bp, Escherichia coli
atgtttgagaaagttgaagataaagcaaaagaagtagccggagaagttcaggagaaatatggtgaactgactgatgattacggaaatcaggtaaaaggtgctgcccgtaaaatcgctgcacagggtggtcaggctgcccaggaggcggcggatgttgtacgtaataatgtagaaaataatcccttcgcggcaatttccatcgccgcgggtgttggcctgctgattggcctgctcatcggacgaaaataa

SEQ ID NO: 3500 - protein, 82 aa, Escherichia coli
MFEKVEDKAKEVAGEVQEKYGELTDDYGNQVKGAARKIAAQGGQAAQEAADVVRNNVENNPFAAISIAAGVGLLIGLLIGRK

SEQ ID NO: 3501 - DNA, 213 bp, Proteus mirabilis
atgattaataaaattgatttcaaagctaagaatctaacatcaaatgcaggtctttttctgctccttgagaatgcaaaaagcaatgggatttttgattttattgaaaatgacctcgtatttgataatgactcaacaaataaaatcaagatgaatcatataaagaccatgctctgcgctgatgaatcccctaatgattttggtaaaaatcattaa

SEQ ID NO: 3502 - protein, 70 aa, Proteus mirabilis
MINKIDFKAKNLTSNAGLFLLLENAKSNGIFDFIENDLVFDNDSTNKIKMNHIKTMLCADESPNDFGKNH

SEQ ID NO: 3503 - DNA, 426 bp, Proteus mirabilis
atgcttaaaattttagtgattgaccggtgccactttacccgcacagggatagaggccttgcttaatcattctggcaggttcagctcctcatttctggtatcaggaatcaataatctcctgttagcaaaagagcatattttgcaatggaaaccgcatctggtgatcgcggatttatacagttttattagcgagacgcactccagtccgccaattaaacctttttttatgagttgtggcgtcatcccactaattttactgcaatcagcagacagacagcatgcacccatcgtgccctctcaatccgtagcccattcggtcttgaccaagcacaccacgctgaacacactctcccacacaattcaggatttccttatttgctcaaaaagggcacttccacagcccatgtttatgcactccctcccgtaa

SEQ ID NO: 3504 - protein, 141 aa, Proteus mirabilis
MLKILVIDRCHFTRTGIEALLNHSGRFSSSFLVSGINNLLLAKEHILQWKPHLVIADLYSFISETHSSPPIKPFFMSCGVIPLILLQSADRQHAPIVPSQSVAHSVLTKHTTLNTLSHTIQDFLICSKRALPQPMFMHSLP

SEQ ID NO: 3505 - DNA, 5487 bp, Proteus mirabilis
atgatcaatttcaagcctaaaattccggcgatgcttggggctctggcggttcttaccgctggtgctgctcatgcagagctgctggaatacacctttaaggctccagatggtacgcaacggtctctgactccgaatgccaactatgccaacccaacgggcaatatctcgtttgccttgagtgccggtatcgaccgaaaggtaaagatttcggtgcttcggtcggatggaacagtggtttcgacagcgaccagccaccttcttggggctactgatcgcatcacagtgggtggaaaatcctactatggtgcggaacttcaactaccagctccagttggtggggcatacactatcagggcggaaattcttgcctctgatggttctacagtacagacggatgaataccctcttactgtcgatgtgacgccgccaacctactcttcgcttgccccggtttatagtaactatgggcaggttactagcggtgatgtttggaaactgggtctaggtggctctgaggataatgcctttttgctgtcaggaatctctgatgagtcacccatcaaaggcgtcaaagcaaagctgtatcgtcaagacggttcactctacaaagatgtatccgtgaactacgatgacgctaacggacaagctagacagtctttccaatctggctttttcccagcctctgacttggatgaagtgtttacacttcagtttgagataagcgatagcgctggaaatagctatctttcacctcgtcaaaaagtgatgtttgatagcataaccaatgctccgtctgcaccttttggtgtttatgacccttcaagtacaaacaacttaggccctggattaaccggatttgttgcttacactgagggcatgacagttaaaactaacccaatcaagttagcttggcgtgttccgcgtgataactggcatgagtatagagaaggtgggataaatatgaccaatgccttgggagagatgtccaaggtaggagaagatgccagctatgtttatctcgtcacaaccgcaccttatggcaataccgacggcaattattggcgttgggtgaacttcggccagtgggggggaggcggtattgcttataacctcacactctctccatcagcgcctaaaagtcccagacttttgggtgtggactacaattacagtgatataggatggtctagtttttaccgctactgggtgaacaattctgttcttcctgtcactgttagtagtatccgtgtcaaagttgaaccaaggccttacgttcaaactgccgttcacaggggaagctgtgaaattcctgttggtcaagatagctgcgtgattgcaaatagcttcacaatggctaaaggcacaacagggtacgtccacgataatgcgacagttttcaatccggataaatctcttcgctcgaatcctctttgggcagaggttaactggaacgatcagcactaccctcagctaagtcagcagttcgatcaaaatagcaaggtatttaccttattcgttaaccagccaggacgaggcgcttactttgataggctgcgtctgcgaagtgcatggattgaagatagcaaaggcaacaagctgtctccaactggtgggttaatagccaacaactgggagaactacacttaccagtgggatcttaaaactctccctgaggggcaatacagtcttgttgccgcagcagaggagatgcacgggcctttaacgcgacaaccaatgttccagataacgtctgatagaacgccaccaaccatgacactcagtgtggcagatggagcagctatccagactctagatgatgttgttattaccttggctgatgctatcgacccttcacctaaattgacctctattgcccttgtaggggggcctgccaatgacaaggtgcagttgtcttggcgtgaggagtcgaaaggtcgattccgccttgagtacccggtaatgttcccttctttgaaggaaggggaatcttacacgctgactgtttccggtgaggatgcacaaggcaatgcggttcaaaaggctgttggcttcgagtacaaacctcgtcaggtaatgctggcggatgggatggatggcaaggtcatggtccccgctgtcactcatgaatttgttcatgcagatggcaaacggatcatcgaaaccaagccgctgacgctcagtgatggtgctgtcgtgacaggttcatacgacgtgtttgcgaccctacgttctgatgcgaaagtaccgctggtggttaatggggtgcgtatcgagccaggccagacaatggggatcatgagccaacatgatttcggtgcgtcaggtggtcgtttgagcattccggttaaacctgctgttcctgatgtggtcggctcttccagccttcttgtcatgacctccgcgccgaactcacccatcttggttgtggacatcaatacctggaaagggacggctaagctctctgctgaatcatggacaattcgccaggtcattgacccagtgaaaatctatgccctgccagagtcgggtgtgccttgccggttcaccacgaaagaggatgtggctatggccgcagacccaattcgtgacccggtgtgtttgctccagtgggacagaactccagatgaggctgaacaaactacgcaggacaacaacgggatgaaagttgctgggctggtggggcaggctgtgagcattggtgaacaacctgtcgaatacagcctgtacctgttcagtggtgacggttccaaggtaaaagttgggtctggctctcagaacctgacggtaactactgcctatggctctgttggctacaccccgattgatgacattgctcaggtgaatcgcgtcattgaagattttgatgtgaacttcaagcagagcaaggggccagactgttctataaccctcagcgcagaccgtgcgaaaaaagaggccgcgaacaaggctgttggtagtgcaagccgtgcctgtctgttcgagtggcagcagatccccgatggattggtccaagacccgttatcggaatcaccttcgctctctggttcattggcctccaacggcgttcatccactggggtggcgggtaagtattttcacccgtaacggcactagggtgacgttgaacgacgagactttcaatgtcgaagcggttgacccaccagctccgaccgttgaactagcctccgactacaacttcaaagacaacatctacttggtgccgatgacaggtaactacctgggtgatgccattatcaactctgaacgagctgatctggatattgccatatcgcgcaactcggatgttcttgagtctgagaccttcactccgggatggggtgccaccaataaggtgtatcgccgcatcaataccgatgagcgagcgttgtgggaggagaccacctacaaggtgaacgcggcctacaacaaggtgcctgatgtgaagactgaggttgtctaccgggctatctctgcaccttctgacagtatccgtcctatcgttgaagttaaaggtgataccgcgattgacacccaggcattgccggttagggttctcatccgtgatcagtacaaacctgatggtgactatgacgctaacacgatgggggtgtggaaagtacgcctgatccagcaaaaggcctacaacgagacggttgcgctcactgattatgcggaagcatcgaacggtgaagctcagttctcagtagacctgtctggtgtggatacttcctccgtccgtatcgctgctgaggctgttctggaaagccctgttgagggttacaaccgcacagagttgtctatcagacctgccttcttgacagtgcttcgcggtggtgccatcggtgctggcgtggaggctcgcaagttgtctggtgaagctccgttcactgctgtgttcaagctatctttggacgaccgtcaggatctccgggctaccggccaggttgtgtgggaaaccagtaaggacgacggtaaaacctgggagcagttcatcccagaagatcgatacaagtatcagcttgtgaagaccttcgacaagggggagtaccaggttcgggccaaggtggtgaacgtcaactcaggtgcggaaaagtacaccgaagcggtcagtgttgtcgcttacgacaaacctgatattgctgttatcggcccgaccacgttgtttgtcggaagtgaaggcaagtacacagcgaacctgacgttgaacgatgagccaatctccggtggcaatgccattgttgagtggtctactgacggtggcaaaacctacgcgcagacaggggatagcatcacgctttcgagcgatgaagaaacccgataccgcctgtgggctcgtgtgcgctctgccacggcaccggctgatgacggctatgcctatgaagttgcgaaaacggcggttgacttccgagcagtgaaggcacctcgtccttacgtgacagggccgcgagttattgagaccggtaagaagtatgtgttcaaagccgaaaccagcctgccttaccgtgggatggacgtgaagctgaacgggttcttcacgctgcctgatggctcgattgtgcagggtgatactgctgagtacgaaccctctgacactgacctcaatcaggctactgtagaaacgaagtacaccacctggatcgaaggataccgagatcagggtgcagaggcttcgcatagcctacgctcccgcgtttggcagtatgtatggccgagcttcggaatgcaggttaggaagaacgcagacgtggctcctgcgacgatcaccgcgtcagtgcggccaattgccttcaacggcaagctggaagagccgacctacgagtgggagttgccggaaggcgctgtgattcaggatcagcggcaggatattgtccggtcctttgtgatcaatgagccgggtgattacaacatcaaggtcactgtccgtgatgctcgcggccatgagaccgtgatcgagcaaccgctcaagatcggccaggcagcgccctatgccattgacctgcaatactctggctcgaacaaatacgagcgtgagcctctggatgtgctgttgcgaccgtacatttctggcggccacccacgcgaccgtatttcgactcgtgtttattcggtagatggtacaccgttggaaagcagtggttactacggcagagcaactctgggcgctggtgagcacagcatcaagctgaaaataacctcagaaatggggcatgaagctgagggcgaggtgaacatcaatgttgcagagaacaagttgcctgcatgtagcctgagctcacgagagaccgttgggtcgtggatcgtctatgcgaactgcgaagataccgatggccgcatgaagtcctacgaatggaccattgccggtgagttgcagagcatcagctctgatcgagtgactatcagcaagggcacctatgaaacgatgccgaccatctctctggttggggtcgatgactctgggggcaaatccgaagctgttaccatgaactaa

SEQ ID NO: 3506 - protein, 1828 aa, Proteus mirabilis
MINFKPKIPAMLGALAVLTAGAAHAELLEYTFKAPDGTQRSLTPNANYANPTGNISFALSAGIDRKVKISVLRSDGTVVSTATSHLLGATDRITVGGKSYYGAELQLPAPVGGAYTIRAEILASDGSTVQTDEYPLTVDVTPPTYSSLAPVYSNYGQVTSGDVWKLGLGGSEDNAFLLSGISDESPIKGVKAKLYRQDGSLYKDVSVNYDDANGQARQSFQSGFFPASDLDEVFTLQFEISDSAGNSYLSPRQKVMFDSITNAPSAPFGVYDPSSTNNLGPGLTGFVAYTEGMTVKTNPIKLAWRVPRDNWHEYREGGINMTNALGEMSKVGEDASYVYLVTTAPYGNTDGNYWRWVNFGQWGGGGIAYNLTLSPSAPKSPRLLGVDYNYSDIGWSSFYRYWVNNSVLPVTVSSIRVKVEPRPYVQTAVHRGSCEIPVGQDSCVIANSFTMAKGTTGYVHDNATVFNPDKSLRSNPLWAEVNWNDQHYPQLSQQFDQNSKVFTLFVNQPGRGAYFDRLRLRSAWIEDSKGNKLSPTGGLIANNWENYTYQWDLKTLPEGQYSLVAAAEEMHGPLTRQPMFQITSDRTPPTMTLSVADGAAIQTLDDVVITLADAIDPSPKLTSIALVGGPANDKVQLSWREESKGRFRLEYPVMFPSLKEGESYTLTVSGEDAQGNAVQKAVGFEYKPRQVMLADGMDGKVMVPAVTHEFVHADGKRIIETKPLTLSDGAVVTGSYDVFATLRSDAKVPLVVNGVRIEPGQTMGIMSQHDFGASGGRLSIPVKPAVPDVVGSSSLLVMTSAPNSPILVVDINTWKGTAKLSAESWTIRQVIDPVKIYALPESGVPCRFTTKEDVAMAADPIRDPVCLLQWDRTPDEAEQTTQDNNGMKVAGLVGQAVSIGEQPVEYSLYLFSGDGSKVKVGSGSQNLTVTTAYGSVGYTPIDDIAQVNRVIEDFDVNFKQSKGPDCSITLSADRAKKEAANKAVGSASRACLFEWQQIPDGLVQDPLSESPSLSGSLASNGVHPLGWRVSIFTRNGTRVTLNDETFNVEAVDPPAPTVELASDYNFKDNIYLVPMTGNYLGDAIINSERADLDIAISRNSDVLESETFTPGWGATNKVYRRINTDERALWEETTYKVNAAYNKVPDVKTEVVYRAISAPSDSIRPIVEVKGDTAIDTQALPVRVLIRDQYKPDGDYDANTMGVWKVRLIQQKAYNETVALTDYAEASNGEAQFSVDLSGVDTSSVRIAAEAVLESPVEGYNRTELSIRPAFLTVLRGGAIGAGVEARKLSGEAPFTAVFKLSLDDRQDLRATGQVVWETSKDDGKTWEQFIPEDRYKYQLVKTFDKGEYQVRAKVVNVNSGAEKYTEAVSVVAYDKPDIAVIGPTTLFVGSEGKYTANLTLNDEPISGGNAIVEWSTDGGKTYAQTGDSITLSSDEETRYRLWARVRSATAPADDGYAYEVAKTAVDFRAVKAPRPYVTGPRVIETGKKYVFKAETSLPYRGMDVKLNGFFTLPDGSIVQGDTAEYEPSDTDLNQATVETKYTTWIEGYRDQGAEASHSLRSRVWQYVWPSFGMQVRKNADVAPATITASVRPIAFNGKLEEPTYEWELPEGAVIQDQRQDIVRSFVINEPGDYNIKVTVRDARGHETVIEQPLKIGQAAPYAIDLQYSGSNKYEREPLDVLLRPYISGGHPRDRISTRVYSVDGTPLESSGYYGRATLGAGEHSIKLKITSEMGHEAEGEVNINVAENKLPACSLSSRETVGSWIVYANCEDTDGRMKSYEWTIAGELQSISSDRVTISKGTYETMPTISLVGVDDSGGKSEAVTMN

SEQ ID NO: 3507 - DNA, 225 bp, Proteus mirabilis
atgcagggagctaattgggttaagtgctcagataaaatgccaccatataaaacaccggttttgtgttgtgatattaactcactatatggcgaggtattcattgctgattacattagggaatttaggttcggtgatagggctaaattaactggcatctaccgtgggagtatgcaaggaaacgtaactcactggatgccacccccaccaatgccagagggtgaatga

SEQ ID NO: 3508 - protein, 74 aa, Proteus mirabilis
MQGANWVKCSDKMPPYKTPVLCCDINSLYGEVFIADYIREFRFGDRAKLTGIYRGSMQGNVTHWMPPPPMPEGE

SEQ ID NO: 3509 - DNA, 1008 bp, Proteus mirabilis
atgctcattttgatactttttgtttacttgttaattttattaaatattcatatggcaaagcaaaaattcggcttcacggataatcgagaacactttcaacacttaggtgcttggattgatgagtccttatatattgttatctcagctttttcaggtattttttttggtatagctggcgcaacattaggggggtattcttgggtaaatgaatgggaagcagcctctgggttattacaaagtgtttgggttatagttagttgtccttacgttctttttatatgtgctgctatatgtatattttttggagccagaggaacaataagggatcaaaaagcacaaaaaaataaaatagagtcactaacaaataataatagaagtattgaagatgcagaattagaattatcagagacaagaattaagatacagaagcttaatattgattctattgaactttggcttaaggtatattctaagcaactagagttaacgtcaaaggatagggcatcgatatactacgaagacaaaggaaatctttatattcttgctagatattcaaaaaacccagtgttaaagcaaatacataaattaaagtttccactggataaaggaataattagcaaagcatgggaagatggtttttatgagtgttctttgcctcaatataataccgataaagatgggtatataaagcaatgttgtgctgaatttggatatagtgaagaagatatagaaaaattaacaatgaaaagtagttgttattacgcaaaggcaattattgacgctgatgaccatataggaataataatattagaaagctataataataaaatcattgatgaagatcaaaaggatacagtagctcaatttttagagtctagttcaagcttgttagcaaatttaatcagaaatgccagaaaatttgagaggcagccagtagataactcagctagttctggtacaatgaaagatgaattagaactattacagcaagcaaaaaaaggaggctag

SEQ ID NO: 3510 - protein, 335 aa, Proteus mirabilis
MLILILFVYLLILLNIHMAKQKFGFTDNREHFQHLGAWIDESLYIVISAFSGIFFGIAGATLGGYSWVNEWEAASGLLQSVWVIVSCPYVLFICAAICIFFGARGTIRDQKAQKNKIESLTNNNRSIEDAELELSETRIKIQKLNIDSIELWLKVYSKQLELTSKDRASIYYEDKGNLYILARYSKNPVLKQIHKLKFPLDKGIISKAWEDGFYECSLPQYNTDKDGYIKQCCAEFGYSEEDIEKLTMKSSCYYAKAIIDADDHIGIIILESYNNKIIDEDQKDTVAQFLESSSSLLANLIRNARKFERQPVDNSASSGTMKDELELLQQAKKGG

SEQ ID NO: 3511 - DNA, 474 bp, Proteus mirabilis
gtgaagttatcactaatggctgccaagtcgaagaacggtattatcggtaatggaccagatattccatggagcgccaaaggcgagcaacttctatttaaggcaattacatataatcaatggcttttagttggacgcaaaacttttgagtcaatgggctctctcccaaatcgaaagtatgcagttgtaactcgctctaatttttctacgaatgatgagggtgtaatggttttctcctcaattcaggatgccttaataaatttagaggaaatcacggatcatgttatcgtttctggtggtggtgaaatatacaaaagcttgatttccaaagtagatactttgcatatttcaacagtcgacatcgagcgagatggagacatagtttttcctgaaatcccagatacattcaagttggtatttgagcaagatttcgagtctaacattaactattgttatcaaatctggcaaaagagttaa

SEQ ID NO: 3512 - protein, 157 aa, Proteus mirabilis
MKLSLMAAKSKNGIIGNGPDIPWSAKGEQLLFKAITYNQWLLVGRKTFESMGSLPNRKYAVVTRSNFSTNDEGVMVFSSIQDALINLEEITDHVIVSGGGEIYKSLISKVDTLHISTVDIERDGDIVFPEIPDTFKLVFEQDFESNINYCYQIWQKS

SEQ ID NO: 3513 - DNA, 216 bp, Proteus mirabilis
atgaccattgccgcgcaacgcatgcgccgcacgctccaggtagaccgtgttccacagcacgatggccgccgtcaccaggttgaggccgctggcccggtagcgctgctgctcgaaactgcggtcacggatttcaccaaggcggttgaagaacacggcacgggccagcgcattgcgcgcctcgcccttgttcagcccggcatgcacgcggcggcgtag

SEQ ID NO: 3514 - protein, 71 aa, Proteus mirabilis
MTIAAQRMRRTLQVDRVPQHDGRRHQVEAAGPVALLLETAVTDFTKAVEEHGTGQRIARLALVQPGMHAAA

SEQ ID NO: 3515 - DNA, 561 bp, Proteus mirabilis
atgccgaaactgagcgttgaccagttcagccaacgctgtcgagtacgtttcgtcgcgggtatgccaggcttgcagccaagcgagcttcgcgtaggtcgtgccggggcaggactcggccatcttggtcaggcccaggttgatcgcgtcggccaggatcgtggtcaacaacaggttcttgtccttggccagatcgcccgatttcaagtgcgtgaagtgccgggtgaagcccgtccactcatcgacttcgagcagcagttcggtgatcttgacgtgcggcaggaccatggctgtctggtctatcagcgcctgcgcggtgtcgggcaccgccgcatccagcggcgtgatcttcaagcccgactcggtgatgatggcatccggcaggtcgttggctgccgccatgcggttgacggtggcaagttgtgcttccagcagcgtcagccgctcatgcagatattgttcgcagtcggtggccacggccagcggcaattcgctggactgcttgaggctggtgaacttctcgggcggtaccaggtagtcctcgaagtccttgaactggcgtga

SEQ ID NO: 3516 - protein, 186 aa, Proteus mirabilis
MPKLSVDQFSQRCRVRFVAGMPGLQPSELRVGRAGAGLGHLGQAQVDRVGQDRGQQQVLVLGQIARFQVREVPGEARPLIDFEQQFGDLDVRQDHGCLVYQRLRGVGHRRIQRRDLQARLGDDGIRQVVGCRHAVDGGKLCFQQRQPLMQILFAVGGHGQRQFAGLLEAGELLGRYQVVLEVLELA

SEQ ID NO: 3517 - DNA, 657 bp, Proteus mirabilis
atgcttattcttggcagcgttaaacagcttacccaggatgcggtcgtgcaggtcgatgatttcgtcggtgacggtggccatgccctcggtggccagcgccacgagagtggcgtagcgccgttgcggctcgaatttggccaggtcggcgggtgtcatctggccgccctcgcgggcaatcttgagcaggcggttctggtgaaccagccgctcgatgccggtaggcagatcgagtgcctgccatgccttgaggcgttcgatgtgttccagcatatgccgcgaatttggcttggccggagactggcgcaaccaagccaaccaggtcgtcttgccgttgtcccggcgcttgagcagatcgtcgaggcggcggcgatgcgcgtccgccagtggttcggccaaggcgtcgtagatgcgccggttagcacgggtgatcgcctcggcactcgcccgctcgacggcgttgagggcgggcagaatgaccgactgccgccgcaggtgcccgatcaaggcgctggccagcacgatgcctttgtcggtttgcatcgccagctcggtcagcatctggacggcctgccggtaatggctcatggtgaagggccggaaaccgaacacggtttgcagctcgctcaggtgctcgcgccggcactgttgcaaagttag

SEQ ID NO: 3518 - protein, 218 aa, Proteus mirabilis
MLILGSVKQLTQDAVVQVDDFVGDGGHALGGQRHESGVAPLRLEFGQVGGCHLAALAGNLEQAVLVNQPLDAGRQIECLPCLEAFDVFQHMPRIWLGRRLAQPSQPGRLAVVPALEQIVEAAAMRVRQWFGQGVVDAPVSTGDRLGTRPLDGVEGGQNDRLPPQVPDQGAGQHDAFVGLHRQLGQHLDGLPVMAHGEGPETEHGLQLAQVLAPALLQS

SEQ ID NO: 3519 - DNA, 585 bp, Proteus mirabilis
atgcactgcgcacgagtcgcaagtcatgccggtgattttgagagtgctcataccatcgttccttattcgtgtgggccgccgtgtcgcacggtcagccgtctttcacaagcgcttggcggggagttcgcagccgtccggtccgcaacggcgatgcgccggcgacacgaagtcccagatcgacaccccaatcatcaaggccaggccgacgtacatcaggttcgccgtccaccagttgccgagcagccagaccgtggccgcaaacacgatggccgggccgatcatgccgagcagactgcgcagccattgccgatgactgaaccaacccagcgcgttcgccaggaaggccagcgcggcaaacagcggcagcaggcggctgatgaacagtccctcgtactggctcaagaagcccagcccgatggccgcgccgaagctggcgagggctggaaagcaggcggcgcagcccatcgcggaaacgacgctgccgagcgcgccggttttatcggcaatgcgtgtcatcagtcccatgaagcggctctcgctgttgtcgttggcttgctggctcactgcttgacgctggacggatag

SEQ ID NO: 3520 - protein, 194 aa, Proteus mirabilis
MHCARVASHAGDFESAHTIVPYSCGPPCRTVSRLSQALGGEFAAVRSATAMRRRHEVPDRHPNHQGQADVHQVRRPPVAEQPDRGRKHDGRADHAEQTAQPLPMTEPTQRVRQEGQRGKQRQQAADEQSLVLAQEAQPDGRAEAGEGWKAGGAAHRGNDAAERAGFIGNACHQSHEAALAVVVGLLAHCLTLDG

SEQ ID NO: 3521 - DNA, 402 bp, Proteus mirabilis
atggcagagcagggaaaggaattgccgggctatgtgcaacgggaatttgaagaatttctccaatgcgggcggctggagcatggctttctacgggttcgctgcgagtcttgccacgccgagcacctggtcgctttcagctgtaagcgtcgcggtttctgcccgagctgtggggcgcggcggatggccgaaagtgccgccttgctggttgatgaagtactgcctgaacaacccatgcgtcagtgggtgttgagcttcccgtttcagctgcgtttcctgtttggggtcgtttgcgggaaggggcggaatcctacgctaaggctttggccagcgatattctccggtgagattgatgtgttcccaggggataggagaagtcgcttgatatggcactgttgcaaatag

SEQ ID NO: 3522 - protein, 133 aa, Proteus mirabilis
MAEQGKELPGYVQREFEEFLQCGRLEHGFLRVRCESCHAEHLVAFSCKRRGFCPSCGARRMAESAALLVDEVLPEQPMRQWVLSFPFQLRFLFGVVCGKGRNPTLRLWPAIFSGEIDVFPGDRRSRLIWHCCK

SEQ ID NO: 3523 - DNA, 1155 bp, Proteus mirabilis
atgctgcaaacgattcagcaggatagaagtactgtattttttactgcggtggaaaatctcgaagatgtttcccatcagactattgtagatggagaagtcagtaattacttcgaagaagacaagaattatgacttgaatggcaatttcacaatttttagtcctccggttataaatacgttggtcagtttttatgacatctatgtagatcaatttcgcaccagcaacagcgtatatttgggcttttacacgacgagggatgtcggtaaggaaagaaaatccaagctcaatagcggtaaagaaatagctctaccagaaaaaccaattttagaaattcttcaatcgtttgatgatgtttcagacgatacaattaatttagtaaaagaaattcttgttgaagagtacgcttcccaatataaagaaaagcctaagtcaggaaacttagaaacgcttcggggtctaaatgctgatatgtttaaagagtttttgaggaaaattttatggcatttcggtcaggaagatgaggatgcactcaagcagacagttttaacggatattgaaaattcaccacttcacaacaatgcgcatataggcaaagaaaaaataatattttgtttgttaatggataagctgagtgaaaagcaaaatagtaaaaacttagtcgataagttggttcatagttcagatgtaaaactgatttttaaagaagcagagtctcaaattccagacgagagtatagaccctacttggcgctatatcgccgagcttgaaaaggatgtgaccgacaagcgaaatctgaaggaaaaagtactttcagtaattgaggatatttcagatcgtcgaattagactgttagctagaaaagcaagtggctctaagtatgaagagcgtgaagcagacaagtcttttttgtctttgaagtatcgtgtttttgaagcttgtgaagaatatttttcagatgatggatatgtagcccctgaaagcggcaacgacttggatgctgttcttcaaacgctcttatcaaaagcagtagaagatatttctaagttaaagaccgattacaaatatacgatttctaatgataaaacaatagaaggaattatttggaatttatttgatgggtgttttttagcttttgatgagtgtagtgatgagtga

SEQ ID NO: 3524 - protein, 384 aa, Proteus mirabilis
MLQTIQQDRSTVFFTAVENLEDVSHQTIVDGEVSNYFEEDKNYDLNGNFTIFSPPVINTLVSFYDIYVDQFRTSNSVYLGFYTTRDVGKERKSKLNSGKEIALPEKPILEILQSFDDVSDDTINLVKEILVEEYASQYKEKPKSGNLETLRGLNADMFKEFLRKILWHFGQEDEDALKQTVLTDIENSPLHNNAHIGKEKIIFCLLMDKLSEKQNSKNLVDKLVHSSDVKLIFKEAESQIPDESIDPTWRYIAELEKDVTDKRNLKEKVLSVIEDISDRRIRLLARKASGSKYEEREADKSFLSLKYRVFEACEEYFSDDGYVAPESGNDLDAVLQTLLSKAVEDISKLKTDYKYTISNDKTIEGIIWNLFDGCFLAFDECSDE

SEQ ID NO: 3525 - DNA, 522 bp, Proteus mirabilis
atgagtgatgtaagtacaaagaaaaggctaatgtacttaagcggtgaagatttctatctttattgctattccgttcttgttattttggattctttaggttgtcgtgatgggaaattttttagagactacaggaagttggcttttttaactgacattatcagtaatgataaaacagtctatgtggtttctcattcttcaggagaaaaactgaacccgaaagattatgagtgtttacttgacagctattcgaatggattaactagaagaagtgaaattcttaagttgttgtttgttcttgagaagagaggctatgtgactttgaatcgaggtaaagcacaagaaattgatgttactttgactaaggataaccttcccaatgactttttgaacagcaatgttttcgagtcggaatctaagaatataataaatatatcaaagaaagtgggacggttggcatcgctaactctggataccatgttaggtaaaatttatgttgaaaatggagttcgaacatgggtctga

SEQ ID NO: 3526 - protein, 173 aa, Proteus mirabilis
MSDVSTKKRLMYLSGEDFYLYCYSVLVILDSLGCRDGKFFRDYRKLAFLTDIISNDKTVYVVSHSSGEKLNPKDYECLLDSYSNGLTRRSEILKLLFVLEKRGYVTLNRGKAQEIDVTLTKDNLPNDFLNSNVFESESKNIINISKKVGRLASLTLDTMLGKIYVENGVRTWV

SEQ ID NO: 3527 - DNA, 1998 bp, Proteus mirabilis
atgggtctgatgcgagttaataagcttatttatgaaggaagcaagtattttttcgagtctaaagagttcgacgaaaatatcatcctaattgagggcgataatggaacagggaaaagcaccttctgtaatttgatttattttgcattgggtggagaggttccaatatttcgaagaaataatgataagcgccacgatgaaataacttctgatagtgataactatgttgatctttatatctcaatcaatgatggcagttatttactaaggcgctactttggagataatgaagtaacagtaatcccctatgagcgggtggttgagaagatatattcagaagataaaaatactttaattaaagagaaggtaagattttctctttcggaagataagactgaaatatatcccgtaaacagaagcaaagattcatacgttttttctgactggattctcgagaaattggaaatatctgtggtcgagctttttcatggatataatacatttaaaattaatatatcagacttgatgcggctgatttatcacgatcaacagccgaacccagagggtatttataaaaagccagatactaattcaacgtatgtttctgattctgagttggttcgaaaagctatttttgaactcttagttggtaaagcctattctgattactacgactctattgtcgaggaaaagaagctgtcgagagagaaaagcttggctaaagcggttgtgaatgagtacacgcttttagccgacaaaatgcgaaaaaatggcggggctaaaaatgtcagttttttacagaaagaaatctctgataaagagcagcaaattgacaagttgcatgatgccagacaggcattcaagcgaaatcgaactggatcaaatacaattaatcaagatattgagtcgtgcaaatcagaattaattgattgtgaacttagattaagccgattaaaagaaaatctggtttcagctcttgatgaacggtacaaattaaacgtagttagaaatgaatctgcttcagaaattagacgcattgaaaaagttattttttcacacgatcatctaaacctttttacatctgatacttgtccatactgcttaagtcacgtggatcgtgtggaagggcattgtgtttgtggcgcttcgatagaagaagaacaatatgagaggtttttctacacatcaaaagagtataaagatattctgaaaacgaaacttaaggcactgtcaacaattaaaaccgcatatgatgattgtgactctgaagttcaagagattaaaaaagaaattgagttgatagagaaaaagtcggtgactttccgtgaaaagctacaagaaatgcttgggcgggtcgatgaaattgttgacattgaaagcctaaatgatattgacgataaaatattgcagcttagagaagatgttgcgaatttgaatcgattgttggagattgaatcaaagctggaacgtatccaaaaagattttgatctggttagctctaaagcaaaagacgctgagttaaagaggaaagggcttgagattaaagctcaacaggatgtaacttcgaaggtaaatgcgtttagtaaaaagtatgatgagctgatgaaaaatactttgcctgattgcagatcggcaaagattgcgcttgataactatttgccttcaattaatgatggtctctatcgagaaacaagttcacttgtttcaattcgaatgatgtactttatcactctcatgcatttagctttgtctgatgaatcagtgacattcccgcgctttttacttattgacacacctgaaactgccggaatcgaattagagtatctgattaactgtattcgtcagttggaagaattgaaaaattatggagctgactttcaagttatcatttcgacaggtttaaacaagtatcccgagtcattaaaggacaatcgtgtactctttatgcccgataagcagaaggaacatatgctcttgaagaagaagagcctttctaagtaa

SEQ ID NO: 3528 - protein, 665 aa, Proteus mirabilis
MGLMRVNKLIYEGSKYFFESKEFDENIILIEGDNGTGKSTFCNLIYFALGGEVPIFRRNNDKRHDEITSDSDNYVDLYISINDGSYLLRRYFGDNEVTVIPYERVVEKIYSEDKNTLIKEKVRFSLSEDKTEIYPVNRSKDSYVFSDWILEKLEISVVELFHGYNTFKINISDLMRLIYHDQQPNPEGIYKKPDTNSTYVSDSELVRKAIFELLVGKAYSDYYDSIVEEKKLSREKSLAKAVVNEYTLLADKMRKNGGAKNVSFLQKEISDKEQQIDKLHDARQAFKRNRTGSNTINQDIESCKSELIDCELRLSRLKENLVSALDERYKLNVVRNESASEIRRIEKVIFSHDHLNLFTSDTCPYCLSHVDRVEGHCVCGASIEEEQYERFFYTSKEYKDILKTKLKALSTIKTAYDDCDSEVQEIKKEIELIEKKSVTFREKLQEMLGRVDEIVDIESLNDIDDKILQLREDVANLNRLLEIESKLERIQKDFDLVSSKAKDAELKRKGLEIKAQQDVTSKVNAFSKKYDELMKNTLPDCRSAKIALDNYLPSINDGLYRETSSLVSIRMMYFITLMHLALSDESVTFPRFLLIDTPETAGIELEYLINCIRQLEELKNYGADFQVIISTGLNKYPESLKDNRVLFMPDKQKEHMLLKKKSLSK

SEQ ID NO: 3529 - DNA, 507 bp, Proteus mirabilis
atgattggcaaatacctctcgccgtatgccctgttgtccatctccggcctgatagccgcgtctgaccagattgtaaaatggctggtccagcaatcaatggcatatggcgagtcggtttcggtgacgccattctttagctgggtgcacgtatggaacaccggtgccgcattcagtctttttgccaatggtggaggctggcagcgctactttttgatcggaatcgcggtggtggtctcaattttgctgatcaagctggtccttgagaaccgtcacaaaggagaggccatcgcctacagtcttatccttggtggcgcgatgggtaacctgattgatcggatatttcgtggctatgttgtggattcctttgatgtctattggcgagcctggcactggccggctttcaatgtcgcagatattgcaattgtcctcggtgtcttacttttcgtttcctcaagcttgttgcgtgaaagaacaaacaccaatgtcgaaacagattggtctgactga

SEQ ID NO: 3530 - protein, 168 aa, Proteus mirabilis
MIGKYLSPYALLSISGLIAASDQIVKWLVQQSMAYGESVSVTPFFSWVHVWNTGAAFSLFANGGGWQRYFLIGIAVVVSILLIKLVLENRHKGEAIAYSLILGGAMGNLIDRIFRGYVVDSFDVYWRAWHWPAFNVADIAIVLGVLLFVSSSLLRERTNTNVETDWSD

SEQ ID NO: 3531 - DNA, 2040 bp, Proteus mirabilis
atgagttacttgcctatagaaagactggaacagttacgaatcggaaccgttggttttgtatcgcctagtgaaattagagtttccttagaaattgattccccagactcagtctctcttcaaggaggctcacctcgcaactttcctcgaatcaacagttatgtgcttataaacagtgatgatggatttctagttggtcaagttgagtggatcgcagtagaacactcgccataccccaaaagaagaggcttgcaagattttggcttgatagacttaccttttcctctaaaaaagctcagtatcaaccccgttggtacattgagaagcgatagaaaaaacgatggtttcaaattcaccagaggaacagatgcatttccttcagttggtgattcagtgcttttacctactgaccaacaattaaactcaataatcgaatcaggtgaaaacagaagggttaaaataggagatagtcctctagctaacaatgcagaaataaaaatcgaccccgataagctttttgggcgacatatagctgttttaggcaacacaggtagtggtaaatcttgctctgtggcgggactaattcaatggtcactggacgcagttttacaacagggccaaactccgaacgctcgatttataatacttgatcctaacggggagtacagccgagcatttggtccaaagtcaaaatataaggggaatttattgcgcgtagaggctaactctgattatggtgagttagaacttaaagtaccatcatggctatggaacagttcagaatggggggcgttcactcaggcaagttcaaaagttcaactcccattactacgacgagctttgagggcgatgagaaatgatgtgttgtcagaagatgatgtgacaattcaagcaaaacatttttgcggaatacttttagtttcaataaggcaactagcaagtcaagggcagatatatgtgaatggtggtcatgccaaaggcttagttgaaagtttaacgtcatgggaaactagcctcataacattaaacgaaaaaatccacaaccaacctttcaatagtgtaataagcacgataaatacttacctatcttccagaagaggagcacagtggcctgctaagcctgaagtcagtgatactgataagttgatttctgagttaaaagaagctcatgttgcacttggtggtgatgaacaagaacttctcccgaaaagtgaagatacgcctattcgctttgaaggtgatgacttcgtcgcctatctcgaagctttagcacaagaaacgggaactgagcagttcatggaatttcttttgactcgaattcgcacaatgctaggtgacacccgaattagtgcagttactaaagattctgaggaaccaataagtttaactgattggctagatacttttcttgggaaggatactcatggtgctatcactgttatcgacctatcactagttcccaatgaaattatccatcttgtaacagcagtaatctctagagtgacttttgaagctcttcaacgatatcggaagatgaatggaaaaccattaccaacagtaatggttgcagaggaagctcatacatttatcaaacgatacaaagaagaaagtgagagtcaatcagtttctgatgtgtgctgcaaagtatttgaaaaaatcgctcgcgaagggcgtaaatttggtttgggactagtagtatcatcccaacgaccttctgagttatctcctactgttctttctcaatgtaatacttttttactgcacagaattagcaatgatagagaccaagaacaagttcataggcttgttcccgataacatgagggggctattaagagagctaccatcgctaccatctcgacatgcaattttactcggatgggcttcagaactaccggtgttagttcgaatgaaagaacttagtgaagagcaaaggcctcagtctgatgatcctgacttttgggacgtatggtctaactccacaggtgagcctcgtgaagtaaactggcagccaatcgttgaagaatggcaaaacagagattaa

SEQ ID NO: 3532 - protein, 679 aa, Proteus mirabilis
MSYLPIERLEQLRIGTVGFVSPSEIRVSLEIDSPDSVSLQGGSPRNFPRINSYVLINSDDGFLVGQVEWIAVEHSPYPKRRGLQDFGLIDLPFPLKKLSINPVGTLRSDRKNDGFKFTRGTDAFPSVGDSVLLPTDQQLNSIIESGENRRVKIGDSPLANNAEIKIDPDKLFGRHIAVLGNTGSGKSCSVAGLIQWSLDAVLQQGQTPNARFIILDPNGEYSRAFGPKSKYKGNLLRVEANSDYGELELKVPSWLWNSSEWGAFTQASSKVQLPLLRRALRAMRNDVLSEDDVTIQAKHFCGILLVSIRQLASQGQIYVNGGHAKGLVESLTSWETSLITLNEKIHNQPFNSVISTINTYLSSRRGAQWPAKPEVSDTDKLISELKEAHVALGGDEQELLPKSEDTPIRFEGDDFVAYLEALAQETGTEQFMEFLLTRIRTMLGDTRISAVTKDSEEPISLTDWLDTFLGKDTHGAITVIDLSLVPNEIIHLVTAVISRVTFEALQRYRKMNGKPLPTVMVAEEAHTFIKRYKEESESQSVSDVCCKVFEKIAREGRKFGLGLVVSSQRPSELSPTVLSQCNTFLLHRISNDRDQEQVHRLVPDNMRGLLRELPSLPSRHAILLGWASELPVLVRMKELSEEQRPQSDDPDFWDVWSNSTGEPREVNWQPIVEEWQNRD

SEQ ID NO: 3533 - DNA, 1419 bp, Proteus mirabilis
atgactattcagcaaattaaagttggcagtgttcctgatattattgagctaacaccaaactccaatgagcaaagtgattcttatccttttatcctatcaacgaatacttcatggggagaacagggttctaaaatatcaatagagaaattacgccaaaatattgagccttggttaacagcactttttcaatccgaacatttaaatctattgatcggtgcgggtttaagtacgtctattcaaatgtcggctacaggcgtgccacccgttggaatggggtggatcagtgatctagcggtctgtcaaagcgaaataaatgaattcgctacaaaagctgccaaatcggctggtcgcgcacaaggaaatatagaagatcaaattagagctattaatgaacttatcaaaggtcttgaaattttaacagtgttggatagcccgcaacctgaaaaccccccggctccatatgcagcctatagagacctaaaagctgatttagctgcaattaagggggaattgtctcgatgtctaggtgagttttcaaaatctgtcagtacaggagaacacttaattaaaagtgctgaaaaaaaacgaaaagaggaaactttcaattatcttgtgagtttcttaatgagctttgcaagtagaaccgctacacgcgacagattgcatatttttacaacgaactatgaccgaattatcgaggttggtgctgaacttgctggtttaagactcatagaccgttttgttggaagtattgctcccgtttttagatcctcaagattagaagttgattatcactataaccctccgggaatacgtggtgaaccaagatatttggaaggagtggcacgttttaccaaacttcacggttctctagattggcacgaacaagatggtgcgattaggcgctttggcctaccttttggagctcgctctgttgaaccgtttctagaagcagaggggcacgaaagcgatagttatgaacaacttatgatttaccctaattcagtcaaagatagagaaaccgctgagtacccctatgtagagttatttagagacttagcagcagcgactagccgtccaaacagtacattagtcacgtatggctatagctttggtgatgagcatataaacagagtaattgaagatatgcttaccgttccatctacccatctagtcatcattgctttcggagatccgctagaaagaattatgaacttcattggtaaaagtggaagaaaagctcaaatcactttactaatgggtgaccatttgggggatctaaaaactttggttgataactatctacctaaaccagccatagataaagcatcaataaagatggccgaattactaaaacagcgaggctttatccagtcagaacactcaggtaatgcaactaccaccgaggtaacatcatga

SEQ ID NO: 3534 - protein, 472 aa, Proteus mirabilis
MTIQQIKVGSVPDIIELTPNSNEQSDSYPFILSTNTSWGEQGSKISIEKLRQNIEPWLTALFQSEHLNLLIGAGLSTSIQMSATGVPPVGMGWISDLAVCQSEINEFATKAAKSAGRAQGNIEDQIRAINELIKGLEILTVLDSPQPENPPAPYAAYRDLKADLAAIKGELSRCLGEFSKSVSTGEHLIKSAEKKRKEETFNYLVSFLMSFASRTATRDRLHIFTTNYDRIIEVGAELAGLRLIDRFVGSIAPVFRSSRLEVDYHYNPPGIRGEPRYLEGVARFTKLHGSLDWHEQDGAIRRFGLPFGARSVEPFLEAEGHESDSYEQLMIYPNSVKDRETAEYPYVELFRDLAAATSRPNSTLVTYGYSFGDEHINRVIEDMLTVPSTHLVIIAFGDPLERIMNFIGKSGRKAQITLLMGDHLGDLKTLVDNYLPKPAIDKASIKMAELLKQRGFIQSEHSGNATTTEVTS

SEQ ID NO: 3535 - DNA, 864 bp, Proteus mirabilis
atgtactccaaatttgttgtttttgtatcgctgttaagcagcttaaccctcagcattcctgccaactcttctccagacctgatagtcaacagcatcaaagaggtagagcaaaacctgggtgctaaagtaggagtctcaatctacagcgtttctgatggttacctttggcattacaacggcgattcacgttttccgttgatgagcacctttaaaactcttgcatgtgcgaaattgctccacgatgttgaaacggcgaagctgtcgattgatcgatctgtgaagattgaggaacaagaccttattacttggtcgccgataacagaaaagcttgttggagagagcttttccctcaagcaggcttgcacggctgcaatggttatgagtgacaacacagcggctaatatagtactggacggtattagtggcccatctgaattgaccttgttcatgaaagaactcggtgatgaagtaacgcgactggatcgtatagagcctcatttaaatgaagcgcgaagcggggatgagcgtgatacaacaacacctaacgcgattgtaaaaagcctcgggaaactgctttatggcgagaaactctcaagtggctctaaagaacaattaattgaatggatggctggcaacaaggtgtccgatagcttgttgcgttcagtgctaccagaggggtggtcaattgctgataggtcgggtgctggtggttttgggtctaggggaatcaccgctgcgatttggtcaaatgaacagcagccattaattgttgcgatatatctcacccagactgaagcttcgtttgacgagagaaataaagctattgccaaaataggtagagaaattttcgcttcttataactaa

SEQ ID NO: 3536 - protein, 287 aa, Proteus mirabilis
MYSKFVVFVSLLSSLTLSIPANSSPDLIVNSIKEVEQNLGAKVGVSIYSVSDGYLWHYNGDSRFPLMSTFKTLACAKLLHDVETAKLSIDRSVKIEEQDLITWSPITEKLVGESFSLKQACTAAMVMSDNTAANIVLDGISGPSELTLFMKELGDEVTRLDRIEPHLNEARSGDERDTTTPNAIVKSLGKLLYGEKLSSGSKEQLIEWMAGNKVSDSLLRSVLPEGWSIADRSGAGGFGSRGITAAIWSNEQQPLIVAIYLTQTEASFDERNKAIAKIGREIFASYN

SEQ ID NO: 3537 - DNA, 2361 bp, Proteus mirabilis
atgagtcgggtttccccaaaaagttttccccaaggtatcattacgaaaggccacacagataagaatttccagtttctggttctgtccggtaatgttttgcttctaattcaatctcaccttgctaatttaccgccgtcccagcggcggagcgctaatagggctgtgttctacttcgaatgtttcctgtggctaatcaaccatccacctatcacaagcactctagaccttcgaacaaatgcttttctgagcattcagcgccttttctatggcgcgctttactcaaactgttttctggctgctgaagtaaaatactcaggcagacagagacttgtccggtatttctttaaactcctcgctgagctgtctaaatcgtctcctatcaatatttttgtatattcagaccttacagatagccaggtccgagaatgcatcgctcagtttgaagctattgggattgaccctgtacgagcagccaagctcatggggtggcaagtcgcagacagaagcgcgaactcatttcgattaaagatgggagccatcttcgatgtttttgggcctgattttacgatggaattacaccaggagagtaagaagcacgccttggctcatagtcattatagtaactacgctaatgtggtctctcgatttgatgattttctgcgctggtatgacgatgatccgatagacagaccttccttaaacgctcacgtgctccaagatccagtctttgtatatcagcttttctggagctttcagcgctggcatttcgaagggtactccgagcggagccaaacccaaccgacggaacgggtgttggcaaaccttcagcgccaatggatcagaatcatctgttgggcaaagtctgttctggttagcggagggcttatgtgttccccgcttggcgatgtgtggcccgaagggagcaaaaagctcactcgattcctccatgaagtaggccaccatcgatacgctgatggtgaatcccttgtatcacaaaagcttttgacccagatcccactgtctgtcacagataaggaggcaacggagcttctattcagacagatcgaagacgacttcaataaagtcgttcggtgggctcgacgggagattgatcacatagctcatcgtttgaacgttattgatcaggcctgcgatcaaggggatctgataacgctaggttctcgaatatctgctcgggcttatggccagcctgtgatggggatgaacagccttatcagaactgtaaaagaaacccacaacggatttgcaatcatcgaccacgctatgcgcggccacttggtaagcgcaacagggagttctttttcaacatcggagttagcggcgaatctggctatgccgacgaagtatgcgattgctcccatcgctctctggctagtagcgcagcatcccgttctgaccgaggcatctctattgaaatgcgagttattcgaccgaaacggtaagcgaaccggctttgttaagaccgactctggatctgtgcttgttgtgaagaaaaaccggaaagggaagcaacaggaggttgtactgagcgacgacgcagcttcggtggtcgagctgcttatccagatcacggccccggttaggcgctatctcaaggagaaaagggatgatgcctggcgacgattgttcatcgtcgcgggtggtcagggctttcaggaaccttacactttcacaaaccagaccagcttcgccaagatcctccggcagaaagcctttatacaagctcatagcgccgagttaggagacatggtctccgtattgtcgctggcccggataagggctaccgcaggtgttctcgtctacctcaagtcgttaagcatagagaaaatggcagagtcactaggcaactcgaaacgagtcgccatgaaccattatctgccgcctaccatcatgcagtttttccaagagcggtgggtcaggattttccaaaacgcggtgattgtccacgctatgaaggactctccttatctgcttgatgcaacggactttagcagcatgagtgagttggatatgtttctagaggcgcatgcccttcgaacgccgcctgaagaacccgaacagctgagtagttcctctgagcaaatatctggttcgtcagatccagagatcgttatttctatcgatgaaggcgttcttggtgtgctcctctcgctaaaaatggccgttgagcaagctggcccacgtgcggcgggaacggctgtgtactggagccagttcgcagcgaagatagaggctcacattgaatctgatggttatctagatccatatatccgcggttgtctagttaaggctaaggggatagcgaatcctcaacagtttgagggtctagtctatggatga

SEQ ID NO: 3538 - protein, 786 aa, Proteus mirabilis
MSRVSPKSFPQGIITKGHTDKNFQFLVLSGNVLLLIQSHLANLPPSQRRSANRAVFYFECFLWLINHPPITSTLDLRTNAFLSIQRLFYGALYSNCFLAAEVKYSGRQRLVRYFFKLLAELSKSSPINIFVYSDLTDSQVRECIAQFEAIGIDPVRAAKLMGWQVADRSANSFRLKMGAIFDVFGPDFTMELHQESKKHALAHSHYSNYANVVSRFDDFLRWYDDDPIDRPSLNAHVLQDPVFVYQLFWSFQRWHFEGYSERSQTQPTERVLANLQRQWIRIICWAKSVLVSGGLMCSPLGDVWPEGSKKLTRFLHEVGHHRYADGESLVSQKLLTQIPLSVTDKEATELLFRQIEDDFNKVVRWARREIDHIAHRLNVIDQACDQGDLITLGSRISARAYGQPVMGMNSLIRTVKETHNGFAIIDHAMRGHLVSATGSSFSTSELAANLAMPTKYAIAPIALWLVAQHPVLTEASLLKCELFDRNGKRTGFVKTDSGSVLVVKKNRKGKQQEVVLSDDAASVVELLIQITAPVRRYLKEKRDDAWRRLFIVAGGQGFQEPYTFTNQTSFAKILRQKAFIQAHSAELGDMVSVLSLARIRATAGVLVYLKSLSIEKMAESLGNSKRVAMNHYLPPTIMQFFQERWVRIFQNAVIVHAMKDSPYLLDATDFSSMSELDMFLEAHALRTPPEEPEQLSSSSEQISGSSDPEIVISIDEGVLGVLLSLKMAVEQAGPRAAGTAVYWSQFAAKIEAHIESDGYLDPYIRGCLVKAKGIANPQQFEGLVYG

SEQ ID NO: 3539 - DNA, 663 bp, Proteus mirabilis
atgattcaaacacgtaatcaatatctgcagtttatgctggttatgctggttatgctggctgcatggggcattagttggggagccagatttgtcatggagcaggccgttctgctttatggatcaggaaaaaactatttgttcttcagtcatggtactgttctgatgtacctgctgtgtgttttcctggtataccgccgttggatagctccgctaccggtcgttggtcagctgcgcaacgttggcgtaccgtggctggtcggtgcgatggccgtggtgtatgtcggtgtatttctgctcggtaaggcgctggctctgcctgctgagccatttatgacgaaactttttgccgataagtccatacctgacgtgatcctgacgttgctgaccatctttatccttgccccgttgaatgaggaaacgctgttccgggggattatgctgaacgtcttccgttcacggtactgctggacgatgtggctgggggcgctgataacgtcgttgttgttcgtcgccgcgcacagccagtatcagaacctgctgacactggcagaactgttcctggtggggttgattacatcagtggccaggatcagaagtggtggcctgctgctgccggtattgctgcatatggaagcaaccacgctgggtttactgtttggttga

SEQ ID NO: 3540 - protein, 220 aa, Proteus mirabilis
MIQTRNQYLQFMLVMLVMLAAWGISWGARFVMEQAVLLYGSGKNYLFFSHGTVLMYLLCVFLVYRRWIAPLPVVGQLRNVGVPWLVGAMAVVYVGVFLLGKALALPAEPFMTKLFADKSIPDVILTLLTIFILAPLNEETLFRGIMLNVFRSRYCWTMWLGALITSLLFVAAHSQYQNLLTLAELFLVGLITSVARIRSGGLLLPVLLHMEATTLGLLFG

SEQ ID NO: 3541 - DNA, 834 bp, Proteus mirabilis
gtgcaggctgccgcacaggcagatgcagatgcgggcagcagcaataccggcgcgcgaacctctaataagcgtaaagaaccttcgcctgaagaactggctatgcagcgtcgtctgggcggcgagctggcccaaactaatcaggcggccacaagcaatagtcccggagtgcagccccaggacaacgaaacaagcgaaggtagttcggcactcgctaaaaacctgactcctgcaaggctgaaggctagccgcgctggagtcatggctaatcccagcctgactgttccgaaaggcaaaatgatcccctgtggtaccggcaccgagctggataccactgttccgggtcaggtttcctgccgggtttcacaggacgtttactcagctgatggactcgttagactgattgataaaggctcatgggttgacgggcagattaccggtggtatcaaagacggccaggcgcgcgtgtttgttctctgggagcgtatccgcaatgaccaggacgggacaatcgttaatattgacagtgccggaacgaactcactcggcagcgcggggattccgggccaggtggatacccatatgtgggagcgtctgcgtggtgcgatcatgatttcgttgttctctgacaccttaacggcgctggttaaccagacgcagagtaataacattcagtacaacagcacagaaaacagcggtgagcagctggcgtctgaagcactccgctcttacatgtctatcccccctaccctctacgatcagcagggtgatgcggtgagcatttttgttgcccgcgacctcgatttcagcggcgtttatacgctcgcagacaactaa

SEQ ID NO: 3542 - protein, 277 aa, Proteus mirabilis
MQAAAQADADAGSSNTGARTSNKRKEPSPEELAMQRRLGGELAQTNQAATSNSPGVQPQDNETSEGSSALAKNLTPARLKASRAGVMANPSLTVPKGKMIPCGTGTELDTTVPGQVSCRVSQDVYSADGLVRLIDKGSWVDGQITGGIKDGQARVFVLWERIRNDQDGTIVNIDSAGTNSLGSAGIPGQVDTHMWERLRGAIMISLFSDTLTALVNQTQSNNIQYNSTENSGEQLASEALRSYMSIPPTLYDQQGDAVSIFVARDLDFSGVYTLADN

SEQ ID NO: 3543 - DNA, 897 bp, Proteus mirabilis
atgacatcatccctacagccacagttaaaaaactcatcagaaataaaaaaaatattaaaagaaataaatacatgttttactttacatgatggaagaacagttaatacattactagtttacttaccatgtagagaagacaataaaagttcccataaagaattttttgaatgcattaaaaatggaattcttcaaaattttgttttttcatgcagggaaatagaaaaaaaattgggtttaaatgctaaaacagggatggatatacttttcgataaagcgctaagaaaattaagtaagcaaacagctcaaggtgagttaggggaacttatattgtttacattacttgatgtatatctatgcgctcctaagcttttgagtaaagttgctaataaaaccagtccaaaaatgcctgtgtttggcgctgatgcggttcatgggcgatttttaaataataagtttcaattgtttttgggggagtcaaaattatataaaaattttaaggcggcagctactgatgcatcaaactcaatagtgaatgcaaaagataactttgatatagagtttgatcttcttgatagtgatatgaattttcctgattataacagtgaattagagagtgagattattgactttctaaacccatataccaatgaaaaatttttagactatatttattcaccatgttttatagggtttactcaacctgatattattgtaaaggatgaaagtgattatatagaaaagtatactaatttatcatgtgattatataagtcattttttttccaaaattgaaaaaaaaggattggacataaacaaagtaacattattaatgttgccgttcggttgtgttgatactttagtaaaagaatttatagaatatattggaataaaaaaatga

SEQ ID NO: 3544 - protein, 298 aa, Proteus mirabilis
MTSSLQPQLKNSSEIKKILKEINTCFTLHDGRTVNTLLVYLPCREDNKSSHKEFFECIKNGILQNFVFSCREIEKKLGLNAKTGMDILFDKALRKLSKQTAQGELGELILFTLLDVYLCAPKLLSKVANKTSPKMPVFGADAVHGRFLNNKFQLFLGESKLYKNFKAAATDASNSIVNAKDNFDIEFDLLDSDMNFPDYNSELESEIIDFLNPYTNEKFLDYIYSPCFIGFTQPDIIVKDESDYIEKYTNLSCDYISHFFSKIEKKGLDINKVTLLMLPFGCVDTLVKEFIEYIGIKK

SEQ ID NO: 3545 - DNA, 474 bp, Proteus mirabilis
atgattgaaaaacactattctccagacttcacaaccttaaaaaaagatatcgatacgcatgaaaaatcaatgtacgaatggtgggatgctttacaagagccgtatattgcagaatggactcttttattaacattggcttgttggggagttcctgatactgagttacattttaaagttactggttttattattggagctgcattttttttagcaaaatttagtgttctagccaaaaagcactcatattcgacaaaaacagagcataaatttttaaatcaacttcaacaatcaaaaatgtcggatgaagaaaggagttttttacatcagcaactacattctattaaaagaaaaagaagttttttaggtaatttgtttatcattaaaaagacttggaaaataattactgcatatgcctttttttccttctcttttattaaagtagtttttcctttctttaatgtaccgattttttag

SEQ ID NO: 3546 - protein, 157 aa, Proteus mirabilis
MIEKHYSPDFTTLKKDIDTHEKSMYEWWDALQEPYIAEWTLLLTLACWGVPDTELHFKVTGFIIGAAFFLAKFSVLAKKHSYSTKTEHKFLNQLQQSKMSDEERSFLHQQLHSIKRKRSFLGNLFIIKKTWKIITAYAFFSFSFIKVVFPFFNVPIF

SEQ ID NO: 3547 - DNA, 903 bp, Proteus mirabilis
atgttaagtccatattataatacctctgttatatctgttcccaccatcaatgatgatattgatgattttcaaacactttttgcattatattctaaagtgatgtcctcagatgcatcacatattattttcaactttgaccattgtaagtttctgaaacctaatgcgtgcgcctttctcggcgggatgttacgattgcttaaacgaaaaatgattaatactgtgataatgtgggataccttacgccctgaaattatggcaactctcaggcaaaacacattttgtcagcaatttggctctttaggctcattctatcaaggacatgcaataccttatcgtgaagaccctaaacaagatatgaattcaattattgattacttaactctgaattggattggtagaggatgggtcagagttagtgagccattaagagatgaaattgctggaaaagtatgggagatttatgctaactgcttcgaacattcagcctctcccatcggtgtattttcatgtggtcaacattatcataagaaaaatgaattagtattatctgttgttgattttggagttggtattccattcaatgtacgacaatttctttctatgggcaatccaagggcaactaaaatcacagatgaaaaatgtttggaatgggcatgtgttggtggccatactacagcagctaatgaaggcgtagctaggggactaggtttagatcttcttaaagattttgtgagagtaaataaaggaaaattagaattatatactcactcagcttacgcaaaatttgatgaaaatggtgaacattatatgactttacctttttcatttaggggtactatactgaatatcacgctgctgtgcgatgaaaaattttatcgattaacatcagagtcaggaaattaa

SEQ ID NO: 3548 - protein, 300 aa, Proteus mirabilis
MLSPYYNTSVISVPTINDDIDDFQTLFALYSKVMSSDASHIIFNFDHCKFLKPNACAFLGGMLRLLKRKMINTVIMWDTLRPEIMATLRQNTFCQQFGSLGSFYQGHAIPYREDPKQDMNSIIDYLTLNWIGRGWVRVSEPLRDEIAGKVWEIYANCFEHSASPIGVFSCGQHYHKKNELVLSVVDFGVGIPFNVRQFLSMGNPRATKITDEKCLEWACVGGHTTAANEGVARGLGLDLLKDFVRVNKGKLELYTHSAYAKFDENGEHYMTLPFSFRGTILNITLLCDEKFYRLTSESGN

SEQ ID NO: 3549 - DNA, 351 bp, Proteus mirabilis
atgaaaatcttagtcaaaaaatatataggaactcgctgcattctcaaagaagatggacaaaaattacatgataaaattgttcatcattttaaagttggggatgatgtcacattagatttcattaatgttaaaatgtttgcctctcctttttttaactatagtattggtcaattgtttaataattttaagcttgatgagatcagaaaaaggttacatattgagaacattgaacctgttggaagctcaattattgagcgagttattgaaaatgccaataggtttcagattgatgttgactacaaaaaaattgttgatgatattttagaacagcaagcaaaggagtcagactga

SEQ ID NO: 3550 - protein, 116 aa, Proteus mirabilis
MKILVKKYIGTRCILKEDGQKLHDKIVHHFKVGDDVTLDFINVKMFASPFFNYSIGQLFNNFKLDEIRKRLHIENIEPVGSSIIERVIENANRFQIDVDYKKIVDDILEQQAKESD

SEQ ID NO: 3551 - DNA, 615 bp, Proteus mirabilis
atggctttcagtggaacaatattatctaatgtatttgacatatcgacgtatacgccttctgataacgacaaatttctagttgatacaaatgtttggttctggataacatattctaaaggtgttccatcacatcgaccttatttacacaactacaataattttgtaaacacagctttaactaataattcgcaattatttcattcaggtttatccctagcggaactagctcacatcattgaaaaaacagaaaaagaaatccacgaggccacaattaatgtaaaaataaatacaaaagactttcggtataactactcagctgagcgacaaaatgctgtaaaagagatagaaaccgcatggtctcaggttgagcttttagcaaatcaggttgatttaactatttgcccaaatattactacctcctgcatgagtagtatgcattctaatactttagatggttatgatttaatgattcatagaagtatgactgatgcgggtatattaaatattattactgatgatggagattacacctcggtacctggtattaatgtttttacattaaataaaaatgtattatctgcagcaacaacccagaacaagttaattgtctcataa

SEQ ID NO: 3552 - protein, 204 aa, Proteus mirabilis
MAFSGTILSNVFDISTYTPSDNDKFLVDTNVWFWITYSKGVPSHRPYLHNYNNFVNTALTNNSQLFHSGLSLAELAHIIEKTEKEIHEATINVKINTKDFRYNYSAERQNAVKEIETAWSQVELLANQVDLTICPNITTSCMSSMHSNTLDGYDLMIHRSMTDAGILNIITDDGDYTSVPGINVFTLNKNVLSAATTQNKLIVS

SEQ ID NO: 3553 - DNA, 609 bp, Proteus mirabilis
atggctaaatattctgttgtaccattcgcttttgaatcattttcaataagaacactaacaataaaaaacatgccgtggtttgtagcggaagatgtttgtagtgctctaaatctaagtaatcctacaatgtcattgaaatctttagatgatgacaaacggtctaagttaaacttagggcgtcaaggaaaggtcaatattatcaatgagtctggaatgtatacattgatactacgttgccgtgatgccattaaaagtggttctattgctcacaggtttagaaagtgggttacaaacgaggtattaccgtctattcgtaaaacaggtggatatcaattatcaaaacgaaatatacctactgatattcccctctattgcccctgttgccataaacccttagaaattataaaaacccatcagcgccatagacatcacactgaaataatcgctatatgtaatagccatgcttgccagcaagatgctttaaaatatgatttaaatttctcatattacatagaattaaaaggcaaaatagaaagcgataacaaggatgttttagataaactatcatataaaaagcgattagctttaattgagttattatctgattag

SEQ ID NO: 3554 - protein, 202 aa, Proteus mirabilis
MAKYSVVPFAFESFSIRTLTIKNMPWFVAEDVCSALNLSNPTMSLKSLDDDKRSKLNLGRQGKVNIINESGMYTLILRCRDAIKSGSIAHRFRKWVTNEVLPSIRKTGGYQLSKRNIPTDIPLYCPCCHKPLEIIKTHQRHRHHTEIIAICNSHACQQDALKYDLNFSYYIELKGKIESDNKDVLDKLSYKKRLALIELLSD

SEQ ID NO: 3555 - DNA, 771 bp, Proteus mirabilis
atgaaaattagtaataaaaaagacctccctaagtggtttaatttatctgattatgattgttataacataatgccagatgatgaaattatatatcaattatcttgtaggtataatgcattgattacagaggaatataaagaaaatgatgttttctttgctaaaaaaattaataaaggtgtatatatttataatgataatgtaactccattatggaaaaaaaatgattttgataggaaactatatcttagcaaaggtaaatctatttctccaatgactataagagatgccaaatttatgtttggagacataaaagaaaaaataggaataagtatatcagataaagtagatgaagattttaatgatatgtatataagcatatctgcaattaataaattatcagttatttttgatggagttttttgtaaaattgatttaatgaaatcagacgaggttattttatatgaaatgagtcatttgctaaaaacatggaggaatgaattagatatacctgatgacgatgataccataaaaaatggctggtatgttgttaaagataagatattatcttatcgtatatttccattgattgacttaattttatgggaaaaggcaatgtcaaataaaattacaaatggcgtattggctgtatctttatttcctaatggagaatacgactctataaatatagcacaaactattagaccatttgctatgtctcttcttaactataaaactttagaaaaatttgagcacgaaatatctaataaataa

SEQ ID NO: 3556 - protein, 256 aa, Proteus mirabilis
MKISNKKDLPKWFNLSDYDCYNIMPDDEIIYQLSCRYNALITEEYKENDVFFAKKINKGVYIYNDNVTPLWKKNDFDRKLYLSKGKSISPMTIRDAKFMFGDIKEKIGISISDKVDEDFNDMYISISAINKLSVIFDGVFCKIDLMKSDEVILYEMSHLLKTWRNELDIPDDDDTIKNGWYVVKDKILSYRIFPLIDLILWEKAMSNKITNGVLAVSLFPNGEYDSINIAQTIRPFAMSLLNYKTLEKFEHEISNK

SEQ ID NO: 3557 - DNA, 495 bp, Proteus mirabilis
atgaatattttcaaccctactattttccccgcagttacagctctaattggttctcttattggtgcaggaattactgcctgtagtggcttatacatggaaagaagaagacataggagaaatgttgaaatatatacagcaggatttattgctgaagtcgaatcattagttgagataattaatataaggggatatatcacagatctagaaagtacactacaaacacttcccaaagatcaatcgatatcattcaacatcctgattcctgataactatgctcgcttttatgatgcgaatattgcatacgtaggtttattaaaaccaactactgctaaaaatttagttatttttcaccaaatactacaagccatagtgcaagattttaagccagaatccttttgtagcgccaatggtcacagctatgacacactgaaagaattacttaacctagctaataaagcaatacaattagctgatgaaattaagctaaataagtag

SEQ ID NO: 3558 - protein, 164 aa, Proteus mirabilis
MNIFNPTIFPAVTALIGSLIGAGITACSGLYMERRRHRRNVEIYTAGFIAEVESLVEIINIRGYITDLESTLQTLPKDQSISFNILIPDNYARFYDANIAYVGLLKPTTAKNLVIFHQILQAIVQDFKPESFCSANGHSYDTLKELLNLANKAIQLADEIKLNK

SEQ ID NO: 3559 - DNA, 564 bp, Enterobacter cloacae
atgatgactcagagcattcgccgctcaatgttaacggtgatggcgacgctacccctgctatttagcagcgcaacgctgcatgcgcaggcgaacagcgtgcaacagcagctggaagccctggagaaaagttcgggaggtcggcttggcgttgcgctgattaacaccgccgataattcgcagattctctaccgtgccgatgaacgttttgcgatgtgcagtaccagtaaggtgatggcggccgcggcggtgcttaaacagagcgagagcgataagcacctgctaaatcagcgcgttgaaatcaagaagagcgacctggttaactacaatcccattgcggagaaacacgttaacggcacgatgacgctggctgagcttggcgcagcggcgctgcagtatagcgacaatactgccatgaataagctgattgcccatctgggtggtcccgataaagtgacggcgtttgctcgctcgttgggtgatgagaccttccgtctggacagaaccgagcccacgagacaagaggcaatctcgtatgccgtcttctgcttgaaaaaaaaaaactaa

SEQ ID NO: 3560 - protein, 187 aa, Enterobacter cloacae
MMTQSIRRSMLTVMATLPLLFSSATLHAQANSVQQQLEALEKSSGGRLGVALINTADNSQILYRADERFAMCSTSKVMAAAAVLKQSESDKHLLNQRVEIKKSDLVNYNPIAEKHVNGTMTLAELGAAALQYSDNTAMNKLIAHLGGPDKVTAFARSLGDETFRLDRTEPTRQEAISYAVFCLKKKN

SEQ ID NO: 3561 - DNA, 207 bp, Citrobacter freundii
atgtacgtgtttttagggggtcggatgtacaaaaaaaagggggtcggatgtacaaaaaaagggggtcggatgtacgtggataactttatgtttcaacagcttttttacagggttgttcaccttatccctaactttactcaaagagggggagcggcattaacccgaaataaaaaaggcccgtatgggcctatttttttgcttccttga

SEQ ID NO: 3562 - protein, 68 aa, Citrobacter freundii
MYVFLGGRMYKKKGVGCTKKGGRMYVDNFMFQQLFYRVVHLIPNFTQRGGAALTRNKKGPYGPIFLLP

SEQ ID NO: 3563 - DNA, 438 bp, Escherichia coli
atgagtaaaattattgattttcctaccggaaaaaagagggagaaaagggccaaagcaatccgagcgcgtcgtaataaagaagcgcagcagcggagcgaaataaccccctcccaattttggtgggttaagaaaataaagttactcaccgtgattaaacagtcggcacgttttctcttaatatatttagggttattaactgccgacatccttatctgtctccttcttattctaggaaaactcctaaaattctttacgatgattggtatcatcgcggtgcttctgtttctggtcgtggaatataggaatgattggcattatacgcaatctgcattccatgccgcagcaatatttgttggcctgatcgccctgcgcatcgggcatgacaaactactgaatggcctaataaggcttaaatcctatctatccagaaaagggtga

SEQ ID NO: 3564 - protein, 145 aa, Escherichia coli
MSKIIDFPTGKKREKRAKAIRARRNKEAQQRSEITPSQFWWVKKIKLLTVIKQSARFLLIYLGLLTADILICLLLILGKLLKFFTMIGIIAVLLFLVVEYRNDWHYTQSAFHAAAIFVGLIALRIGHDKLLNGLIRLKSYLSRKG

SEQ ID NO: 3565 - DNA, 156 bp, Proteus mirabilis
atgagtttggaggcgatatttttgcttgctgaaagaaacgaagtgaagcgcattctagatggcatttcgtggaatgacattatcggcaagatgacatttaccagtcgcttaatgaaagttgaatctcaattgcgagatttaggcgttattttttaa

SEQ ID NO: 3566 - protein, 51 aa, Proteus mirabilis
MSLEAIFLLAERNEVKRILDGISWNDIIGKMTFTSRLMKVESQLRDLGVIF

SEQ ID NO: 3567 - DNA, 1674 bp, Citrobacter koseri
atgatcttactatcgatagaagggatgacctgtccaagttgcgtcgcccacgttaaagaagcactcgatgcgatcgaaggcgttaataaggttgaaatatcttatgaaaacgccagagcaacgatcaccacgaacggtggggtcagcgtaaccgttctcattggagcaatagaagctctcggttatatcgcaaaagaatccactggcactgcaaaagaaattacttcaccgaacgactgctgtgacaacgaaaatgcaagcaacactgaaagcaaccaaactcaacatgtggcgattatcggtacgggttccggcgcttttgcctgcgctattaaagccgctgaaggtggtgccaaggtcactcttattgagggagccgatgtgattggcggctgttgcgtgaatgtcggctgcgtaccctcaaaaattctaatccgcgccgctcaattggctcagcagcaacgcaataatccctttaccggactggaaaatcatgcgccccaattgagtcgagccttgttgactcagcagcagaccgctcgggtcgaagagctgcgcgcggcaaagtaccagaatattctggagacaaatcctgcgcttagtttacttaaaggttgggcgcaatttaaaaatgccaacaccctgatagtcagaaaaaatgatggaaccgagcaggcagttcacgccgataaaatcctgatcgctaccggctccacgccaaccattcctcctattgatggtttaactgaaacaccttattggacctctaccgaagcgctgtttgctcaggaattgccgcagcacctggtcgtgattggttcgtcggttgtagcgctggaaattgcccaggcttatcgccgtttaggcagtgaagtcaccatattagcaagacatacattgctttatcgggaagatcccttgctcggtgaaaaactcaccggatgttttgaaaaagaaggcattcgagtattaaacagtacgcaagctaccaaggtgacccacgatggaagccaatttacattggaaactaacgcgggcgatctacgctgcgatcgtttgctggtaagcaccgggcgacacgccaatacttgccaactcaatctgggcgcggtgggtgttacgaccaacaaaaagggcgaaatcgttgttaacgaacgcatggaaacgaatgttcccggtatttacgccgccggagactgctgcaacatgccgcaattcgtctatgtcgccgcggccgccggtagccgttccggcatcaacatgacgggcggatacgccaaactggatctatccaccatgccagcagtgatttttaccgatccccaggtggcaactgttgggctcacggaagagcaagccaacgcacaagacattgaaaccgacagtcgtgtattggagatggagaacgtgccgcgcgcactggcgaatttcgagaccgatggttttatcaaattggtgacggaaaaagccactggccgcctgatcggggcgcagattctggcgcatgaaggtggagaactgatccagagtgcggcgctggcgatccgcaaccgtatgacggtgacggaattagccgaccagcttttcccttacctgactatggtggagggtttgaagctctgcgcccaaacctttaacaaggatgtcaaagaactgtcctgttgtgctgggtaa

SEQ ID NO: 3568 - protein, 557 aa, Citrobacter koseri
MILLSIEGMTCPSCVAHVKEALDAIEGVNKVEISYENARATITTNGGVSVTVLIGAIEALGYIAKESTGTAKEITSPNDCCDNENASNTESNQTQHVAIIGTGSGAFACAIKAAEGGAKVTLIEGADVIGGCCVNVGCVPSKILIRAAQLAQQQRNNPFTGLENHAPQLSRALLTQQQTARVEELRAAKYQNILETNPALSLLKGWAQFKNANTLIVRKNDGTEQAVHADKILIATGSTPTIPPIDGLTETPYWTSTEALFAQELPQHLVVIGSSVVALEIAQAYRRLGSEVTILARHTLLYREDPLLGEKLTGCFEKEGIRVLNSTQATKVTHDGSQFTLETNAGDLRCDRLLVSTGRHANTCQLNLGAVGVTTNKKGEIVVNERMETNVPGIYAAGDCCNMPQFVYVAAAAGSRSGINMTGGYAKLDLSTMPAVIFTDPQVATVGLTEEQANAQDIETDSRVLEMENVPRALANFETDGFIKLVTEKATGRLIGAQILAHEGGELIQSAALAIRNRMTVTELADQLFPYLTMVEGLKLCAQTFNKDVKELSCCAG

SEQ ID NO: 3569 - DNA, 414 bp, Citrobacter koseri
atgctaatacggttactgacccggttcggcgataagattagctcattgggcgcgctggtttctgctatgggatgcgccatgtgtttcccggccattgccagtctgggcgctgcggtaggactgggttttctcagccaatgggaaggtctgtttgttagcacgctattacccctgtttgcctggattgccttggtactcaacggacttggctggttcagccaccggcaatggcaccgtagtgcgctgggtgtggccggccccattttattgctgttatcgctctatccgtttttccagtacggctggagcagctatgtcacctattcagcattaggcctgatggttgccgtatcgctttgggatattttttcaccggcgaataaacgctgtgatgatgacagctgtgctgtttaa

SEQ ID NO: 3570 - protein, 137 aa, Citrobacter koseri
MLIRLLTRFGDKISSLGALVSAMGCAMCFPAIASLGAAVGLGFLSQWEGLFVSTLLPLFAWIALVLNGLGWFSHRQWHRSALGVAGPILLLLSLYPFFQYGWSSYVTYSALGLMVAVSLWDIFSPANKRCDDDSCAV

SEQ ID NO: 3571 - DNA, 348 bp, Citrobacter koseri
atgtcaaaaagtaatcccaactttccaatcatcggcggtgttattgccgctattggcgctggtctttgctgcgctggtcctttcgtcttgttgctgctaggcgtgagtggctcctggattggtaatttaaccttgttagaaccttatcgtcccatttttatcctgctggttttagccttatttggcttcgcaggctggaaggtctatcgccccgtcgaggactgtgagccaggcaccgcctgtgcagttcctcaagtgcgaaaacgtcggcaggtgatcttttggttaacggcactgactgcgttggttttagtcaccagtaattattggattgtctggtttgcctga

SEQ ID NO: 3572 - protein, 115 aa, Citrobacter koseri
MSKSNPNFPIIGGVIAAIGAGLCCAGPFVLLLLGVSGSWIGNLTLLEPYRPIFILLVLALFGFAGWKVYRPVEDCEPGTACAVPQVRKRRQVIFWLTALTALVLVTSNYWIVWFA

SEQ ID NO: 3573 - DNA, 489 bp, Proteus mirabilis
atgtttggaacaatcattttaactgcgatgctcaccaccagctcagccactgccgaagatgcagggaagaacatcgcctcaggcttggcggcggcatccgccagccaaatggggcaggccgtaatgccaactttagctaccagctcggccattgcaaaaagcgcaggtaaaggcatggtgtcaggtttggctgcggcgactgccagctacattccccaagacgagctgagctttactcgaagctataagaactctgaggctgtggatatggcaaagggcctggggacattgaaagaagcgcctgagtttctctacgttgttacagacgtaaatgccaacatggcggtcaaatgcaagcgcgtctgggagcctcaatctctggctttaagtccagtgattgttgagctggtggaactacgtaagacgaacaacaaagacagctacgaacaagcactatcccacctcgattgttcaatgttcacagactaa

SEQ ID NO: 3574 - protein, 162 aa, Proteus mirabilis
MFGTIILTAMLTTSSATAEDAGKNIASGLAAASASQMGQAVMPTLATSSAIAKSAGKGMVSGLAAATASYIPQDELSFTRSYKNSEAVDMAKGLGTLKEAPEFLYVVTDVNANMAVKCKRVWEPQSLALSPVIVELVELRKTNNKDSYEQALSHLDCSMFTD

SEQ ID NO: 3575 - DNA, 618 bp, Proteus mirabilis
atgagacaactgatagcaattctgggagtggcaattctggccgggtgtgcctctaacgcccccgagcaaaagcctcagccccagactgcccctgccgaaaatgacaaacctgcccgagttagccgggaactgtcgatggcatgggacaacatggggcgcggtggtgctgcattacgtcaacctggttatatccatgtgctgggcgacggtaatgtcagcgcaacgatgaacaaggtcaaagatgactccgctggttcagataaaactccagcagggatcaagcagcacggggatgtgaacgaagccatcaataccttcaagtccatgaataaaggcaaaggctactcgctgtacgagttgtcacgctgggaacgctattgcgatggcggcaaaggtatggacgagcacgattggcgctttgtggaagccgaggggactacaaacatccccaaggatgttgtaaccggctgcataccacctacccacacctatcaagattatctgaatgcctggacgcacttttgcaccagccaggctgtaactgacgcagatcgccgcattgtgcgcgagtccgtgcgtccctattcagtggtgaacccatgcaaagctctgaaataa

SEQ ID NO: 3576 - protein, 205 aa, Proteus mirabilis
MRQLIAILGVAILAGCASNAPEQKPQPQTAPAENDKPARVSRELSMAWDNMGRGGAALRQPGYIHVLGDGNVSATMNKVKDDSAGSDKTPAGIKQHGDVNEAINTFKSMNKGKGYSLYELSRWERYCDGGKGMDEHDWRFVEAEGTTNIPKDVVTGCIPPTHTYQDYLNAWTHFCTSQAVTDADRRIVRESVRPYSVVNPCKALK

SEQ ID NO: 3577 - DNA, 447 bp, Proteus mirabilis
atgagctactccgttataaatcaagatggggtgcatctgtgcgacatcccattgaacgtctaccaggtgatacgtcgccaatccttgtctgcgttgtggctttactgggcgcagagcttgaatttggtgaaggtgctcattgcttgcgtcggaaagatgatctttgtgatgccggtaatgtggttctgggtgctggtggtgtgccgcttggttgaaccagaacgtatctcagacgtgccaggacttatctctccggacgtgatcgggtgggccgctggtgcggccatcaccctcattatctattccgtttttacacgcccagctttgtacggataccacaactttttcaagcagcatatttgctcaagagtaaagcaagtaacgccggaactcagaacagtcactgggccactgttcttttaccgaaacgaaattggaacgatatag

SEQ ID NO: 3578 - protein, 148 aa, Proteus mirabilis
MSYSVINQDGVHLCDIPLNVYQVIRRQSLSALWLYWAQSLNLVKVLIACVGKMIFVMPVMWFWVLVVCRLVEPERISDVPGLISPDVIGWAAGAAITLIIYSVFTRPALYGYHNFFKQHICSRVKQVTPELRTVTGPLFFYRNEIGTI

SEQ ID NO: 3579 - DNA, 378 bp, Proteus mirabilis
atgaaagtaaccaataaactcaaactgctggcactggggctgtgtatggccggtactgccatcgcggctcctgatgtgctcaatgacgacgcaaagctcaagaaccttgagaaggtgtgtcccgactgtaagatggtggcaaaagatgtactcaatctgcgggttgaaaactgccagctcaaagacacttccagtgcaatgatgattggcaccatgcaaaatgaccctatgttttcgtttatgctggcagtacacacagcggcaggctcggaggcatacaaaacggtagttggtgccgctggcaaccatgttgactgtgaaaacccgttgaactggatcaagctgacccagcaagcgattaaaggaggcaaagtctaa

SEQ ID NO: 3580 - protein, 125 aa, Proteus mirabilis
MKVTNKLKLLALGLCMAGTAIAAPDVLNDDAKLKNLEKVCPDCKMVAKDVLNLRVENCQLKDTSSAMMIGTMQNDPMFSFMLAVHTAAGSEAYKTVVGAAGNHVDCENPLNWIKLTQQAIKGGKV

SEQ ID NO: 3581 - DNA, 663 bp, Proteus mirabilis
atgcgtaagagagatttcttttttggagaggtgtatgaggggggggcaggagccactctacgactgagtgatatggaaccattggcaagaaaagtgtcggcagagttcttcactgcacaactgaaccgtatgctgaaagagcatgacggtcagttgacgctcagcgatggaacgtcgtaccccagcttttggagcttcatcgacaaggttgttccagagcaggttggtttcgtggagatctacgctcggcaggatgttaacgataatgttgaagcgacactggcgtgtgacatcgttttggtaaatggtgtgatcaccgttaaacctcactggtgtgcttacaaagacatcagggctgacgaagtgatttccaccttactggtgcctttgcatttgaaggctctccagggtaaggcttacattcgctgggatgatggtgaaaccgaacctctgttacaaaacgacgactatcaggctgaacttgaaaatgtgtttagtgtttccaagtacccatcagccatgagctggggcgatacagcagaccagaaggttaagcagtacaagatggaccttgagtgcgccacagatgttggttgtcgaggtgtctcatcagagcaagcatgggatgcttatcgagaactccgttacaatagaacagtgtga

SEQ ID NO: 3582 - protein, 220 aa, Proteus mirabilis
MRKRDFFFGEVYEGGAGATLRLSDMEPLARKVSAEFFTAQLNRMLKEHDGQLTLSDGTSYPSFWSFIDKVVPEQVGFVEIYARQDVNDNVEATLACDIVLVNGVITVKPHWCAYKDIRADEVISTLLVPLHLKALQGKAYIRWDDGETEPLLQNDDYQAELENVFSVSKYPSAMSWGDTADQKVKQYKMDLECATDVGCRGVSSEQAWDAYRELRYNRTV

SEQ ID NO: 3583 - DNA, 138 bp, Proteus mirabilis
atgtccgcacaagctcacgtcagagaaagctcatctggttcattcatctcctggcagttccttgtctggcaggtgatgttcgttataggtgttgttgcagggatgaacctggaacacgcattcaattttctaggttaa

SEQ ID NO: 3584 - protein, 45 aa, Proteus mirabilis
MSAQAHVRESSSGSFISWQFLVWQVMFVIGVVAGMNLEHAFNFLG

SEQ ID NO: 3585 - DNA, 378 bp, Proteus mirabilis
atgggaggaagtgtgaaccttaataaacaatttttctggtttttgatgaacgcggtgctgatgtgcatcttcatcgttccagtggccgtcgcgttttggctgtctgcttttgcggcaggttttgactggagtcagtgggttaagttggctgctgatacggccaacagagctgcaagtgacccggccaaggctctgggcacggttcagacctactggggcattctcagcttcttcctgctggcggcgtacagtctgatgttcaagtttaaagccaatgctaacaaggaagtgaaaactctgggggtggcccgaccagccaatgaagttagcgttgcggcttcggaaaaacattcggaagcggttcctcaaaatcaataa

SEQ ID NO: 3586 - protein, 125 aa, Proteus mirabilis
MGGSVNLNKQFFWFLMNAVLMCIFIVPVAVAFWLSAFAAGFDWSQWVKLAADTANRAASDPAKALGTVQTYWGILSFFLLAAYSLMFKFKANANKEVKTLGVARPANEVSVAASEKHSEAVPQNQ

SEQ ID NO: 3587 - DNA, 219 bp, Serratia marcescens
gtggatctggatcaaaagcaagaaccgtggatcagcgtcaacgacaagatgccggtcgtcggtgtgcctgttcattgccagcttaaaggatgttggtcgggcaaaattgttgagtacgacttgatccatgttcaggaagatgattgttcgtggcgaacggcggacgacaactcggaagtcagctatgacttcgatgtcatcacctggagacctatttag

SEQ ID NO: 3588 - protein, 72 aa, Serratia marcescens
MDLDQKQEPWISVNDKMPVVGVPVHCQLKGCWSGKIVEYDLIHVQEDDCSWRTADDNSEVSYDFDVITWRPI

SEQ ID NO: 3589 - DNA, 321 bp, Proteus mirabilis
atgaaaaagccattaccacccgtattacgcgccgcgctgtatcgtcgcgccgtggcctgtgcatggctgaccctgtgcgaacgtcagcaccgctatccgcaactcaccctcgatgcactcgaaagcgccattgccgccgagctggagggcttctacctgcgccagcatggcgaggaaaaaggccgtcagattgcctgtgcactgctggaagatttaatggaagccggaccactcatggccgcgccgtcgctgtcatttctcgggctcgccgtaatggatgagctttgcgcccgtcatatcacgtcgccggtactgcactga

SEQ ID NO: 3590 - protein, 106 aa, Proteus mirabilis
MKKPLPPVLRAALYRRAVACAWLTLCERQHRYPQLTLDALESAIAAELEGFYLRQHGEEKGRQIACALLEDLMEAGPLMAAPSLSFLGLAVMDELCARHITSPVLH

SEQ ID NO: 3591 - DNA, 1017 bp, Proteus mirabilis
atgacaagtaaaaaaactgagactgttgaaaaagatacacaagtaaaaatgaaagatataaaactcaaagcatttaaagttgagaataattcagtatcgaagtcatcatctaatcttttctcatgtgttgtgggagccttggatggtagtgaaagcgtcgaagatagatgtatgagagtaagcgctgacgatccagaaaaggagcaatatctcatttcaaactacctgtcacatgcaggtgaatttatctgttgcactttcatgaaaattgcaccaggtgatcaggctgaacatgtcactaaagaactatttgcaaagaaaaaattcactctagaagagcttggttcagagaccatagaaacagcagcaatatgtaaggagtatcattatttagtcgcaagtgacaattttttagttacgaaccaaccaataaatagaacaataattagtctgcaaacctatttgcgatggttaacgaaaaatgatgccatatcgttaaccccagtaattgatatgactaataaaacaaagattgaagatataagatctattataatgagggacccatcagtaggggcttcggaagatgcgcctgaaaattcagtatccgataataaaaatgcaataactagatcgtttgagaaagctgtgcgattatcaaaactctcagttgatgtaattagagggttaataaaggaagctgataaattcagtgacatgcagttaaatcaattgatttcagcagaactagtattaaaattgaagaaaaagcccaaagaaatgactgataaagattatgagtccataattggtgctacactgaagccagttagtgaacttgataacatttcttttaagagaagaaatggtccaacagaaataaaagggaaagacctaattagaataaaagaggttaaagtagaaaaaaccaactcaggaaagttgtccgagccacaattattccaagaaatgaggcgtttcatatcagaactcgaaaaaaatgaaaagaataattaa

SEQ ID NO: 3592 - protein, 338 aa, Proteus mirabilis
MTSKKTETVEKDTQVKMKDIKLKAFKVENNSVSKSSSNLFSCVVGALDGSESVEDRCMRVSADDPEKEQYLISNYLSHAGEFICCTFMKIAPGDQAEHVTKELFAKKKFTLEELGSETIETAAICKEYHYLVASDNFLVTNQPINRTIISLQTYLRWLTKNDAISLTPVIDMTNKTKIEDIRSIIMRDPSVGASEDAPENSVSDNKNAITRSFEKAVRLSKLSVDVIRGLIKEADKFSDMQLNQLISAELVLKLKKKPKEMTDKDYESIIGATLKPVSELDNISFKRRNGPTEIKGKDLIRIKEVKVEKTNSGKLSEPQLFQEMRRFISELEKNEKNN

SEQ ID NO: 3593 - DNA, 267 bp, Proteus mirabilis
atgaatttagagcagttagatactgatgattttattgaaagacttgaagtgttgcgttctattttaaaagttgaaggtaatcattttgttttccagttaagtgacaatgaagttgatcaatatgagatttctatctcctcatgtaacaccgcagagaagttgctttcatgggtatttcatttgactgaaaagcagtggatgaacactgagctactacgttatttcattcgtgtagcaagcgttaaatcgaatatcaaaattaactaa

SEQ ID NO: 3594 - protein, 88 aa, Proteus mirabilis
MNLEQLDTDDFIERLEVLRSILKVEGNHFVFQLSDNEVDQYEISISSCNTAEKLLSWVFHLTEKQWMNTELLRYFIRVASVKSNIKIN

SEQ ID NO: 3595 - DNA, 789 bp, Proteus mirabilis
atggatgagaaatataatagatttgtagatgaaacaatgttttcaagacaattattgggaattggtctcactagtttaagaaaagctagctttgctaatcgaggattgtattttcaagctttatctagcattagtttaggtttggaaagattaatgaagctttgcttacttcttgatgactataataaaaatgggaaatatacatcgagaaaagagatgaaagattatggtcataatttacagaaattatttaagcaaataacagagtgctctaaaaaaacaaataatcttagtgatatccatattcgagtacttgagttactaacagaattcgcccaatcatctagatatagtaatgtcgattttattactaatgatcacgataatgatcctatgaaaacttggcataatagtatagataaatatatatatgaaaagattttaaatgatagacaaagaaatcgcatagaagaaaaatgtgaattatctagaaacattggtgatggactacctgcttttactataggttattacgatgaaaatagaaaaccgatagatagtgttggcgagttatattctttagaaaaaagaagtgaaatacttgcaggatataggactcttttagtaattaatattatagaatgtatatataagatacttcattcgatgtctcgtgaatcaactgatccttattttcgttgccttgagctaaatcgtatttttgcaaccataacttatggttcagatagcgaaaaaattaaacgaaaagatttcaatagaatgtcttaa

SEQ ID NO: 3596 - protein, 262 aa, Proteus mirabilis
MDEKYNRFVDETMFSRQLLGIGLTSLRKASFANRGLYFQALSSISLGLERLMKLCLLLDDYNKNGKYTSRKEMKDYGHNLQKLFKQITECSKKTNNLSDIHIRVLELLTEFAQSSRYSNVDFITNDHDNDPMKTWHNSIDKYIYEKILNDRQRNRIEEKCELSRNIGDGLPAFTIGYYDENRKPIDSVGELYSLEKRSEILAGYRTLLVINIIECIYKILHSMSRESTDPYFRCLELNRIFATITYGSDSEKIKRKDFNRMS

SEQ ID NO: 3597 - DNA, 342 bp, Proteus mirabilis
gtgaataaatacaccgaactatctgatttcgagattaatttagctgttgctcacattgcgcttggcaagggtagctatgattggtgccctgataaaaaagaggtttactttgcaggtattgatggtggtgaatttttacatcatggatacttcgacccatgcaacaatccatccgacgcaatgccgattatcattgagaataagatagccttagttcctcaacttaatggcgatttatggatttgcagtcatcacccattttactcaactacgggaaatttatatcgcgcagctatggaaatttatttattaatgaaggatgcggagaatgaaaaagtatga

SEQ ID NO: 3598 - protein, 113 aa, Proteus mirabilis
MNKYTELSDFEINLAVAHIALGKGSYDWCPDKKEVYFAGIDGGEFLHHGYFDPCNNPSDAMPIIIENKIALVPQLNGDLWICSHHPFYSTTGNLYRAAMEIYLLMKDAENEKV

SEQ ID NO: 3599 - DNA, 498 bp, Proteus mirabilis
atgtgtgaattatcattctcaggtaaaataaatattattcgctcgactcaagtaaaagacaaaatagtctatgatgttatgcttgaagatcaaagtgcttactttcatatagtttgtaaggacaccaaacttgcagagatattatcaaatgctaaaagcaatgatacgatatttgcaaagggtgaagttaaattaaaagaatctgtaattaacaatattgttaaagaaagattctatattcttccatttatattatcaatcaatggcgttaatacttaccaaacaaaatcagagattgaaatagatgaggaagcaagacaacagcgcgttagaagtttagaacgcatcagagagttaacggatatattaaactttaataaatccagaaattcgcttgatgaatcaaataaaaaattggaagaaaataaatatgataataatcagcttttgttaaaaagccaattattaagttcattaaatagtaaaaaatctatttga

SEQ ID NO: 3600 - protein, 165 aa, Proteus mirabilis
MCELSFSGKINIIRSTQVKDKIVYDVMLEDQSAYFHIVCKDTKLAEILSNAKSNDTIFAKGEVKLKESVINNIVKERFYILPFILSINGVNTYQTKSEIEIDEEARQQRVRSLERIRELTDILNFNKSRNSLDESNKKLEENKYDNNQLLLKSQLLSSLNSKKSI

SEQ ID NO: 3601 - DNA, 228 bp, Proteus mirabilis
atgaaaaacgctttatttgttgctgtgatggttatcgggatggttactttgtctggttgtaaagaagaaacaaagtcttatgggtggtatctggataataaagaggatgcttatcgggtacatgagaaatgtcaaaaatcaggggagggttctgataactgcgaaaatgctcgcagggcatataacgcccatgaagatgccagaaaatggggatattctttaaaataa

SEQ ID NO: 3602 - protein, 75 aa, Proteus mirabilis
MKNALFVAVMVIGMVTLSGCKEETKSYGWYLDNKEDAYRVHEKCQKSGEGSDNCENARRAYNAHEDARKWGYSLK

SEQ ID NO: 3603 - DNA, 1854 bp, Proteus mirabilis
atggataaattaaagatgcacagccccgacatgacgcagcaaaacatagagaaaattcaggcgttgtttccgaactgcgtgacggaatcaaaaggggctgacggagagctaaagttagccattgattttgaccaacttaaacaagagctatcaaattcaatcgttgaaggcccgcaagagcgctatcagctgaactggcccggtaagcgagaagcactactaacagcgaatgcacctattgccaagaccttaagaccttgtcgagaagaaagtgtcaattttgacaccactgaaaacctctttattgaaggcgataaccttgatgcgctaaagatgttgcaagaaacatatttaggcaaggttaagatgatctatattgaccccccttataatactggaaaagactttatttatgcagatgactttgcagaaaatacagaggattacttaaaaagctctggacaaaaagatagtgttggcaatcgcatgatcgcaaatagtgaaaacaacggtcgatttcactctgattggctttctatgatgtattcaagattgaagttgtcacgcaatctaatgaaagatgatgggttgatatttataagtattgatgaagttgaaatatcaaatctaaaaaaaatggctgatgagatttttggagctgacaattttatagctgattttatttggcaaaataaaaaaggtggtggtaatgatgctaagtattgtgctgtagagcatgagtatgtggttatttatgcgaaaaatattcaatcattaccaagattatttgagtcattttcagatggctatgcgaaaaggtacaaagaggaggatgagcgcggtaggtttttctgggatacattcaaacgaaagtcaggtaagcaatattatgcaataacttgtcccgatggaacagttttagaaaatgatgaatatggaaatccattaagttggcttcgatctgaagctcgtttcaaaaaggatgtagacgatggtgaaataaagtttgaaaagcggactgacggttggagcgtcatgtttaagcagcgtatgcctgaagggaaaaaaccccgcagtcttgtgcttgataagggaactacaagtgatggaagttctgaaatcctaagtttatttgggaaaaatattttcagtaatccaaaaccaacaagtttattacgttacttgttagggatagggctgaatgaaagtgagattgtactagatttttttgccggttctgccacaactgctcatgcagtaacacatcttaatgctgaagatggcggtaaccgaaaatttattatggttcagctccctgaagaatgtgacaaaaagtcagaggcttataaagcaggctataaaacaattgcagaaatttccaaggagcgcatccgccgagctggcgcaaaaatattagaaggcgagtgccataaagactggaataaagacgttggattccgagtacttaaagtggatacttccaatatggcagatgtgtactactcgccagatcaggtttctcagggggcgttagacttattggtagataatattaaatctgaccgcactgctgaagatctactctttcaagtgctgctggattggggcgtcgatttaaccttaccaatcagaaaagaaatgattcaaggcaagatagttttctttgttgatgatgatgcgttggtggcctgttttgatctgcgtataaatgaagctttgattaaagagttagctgcaaaagaaccacttcgcgtggttttccgtgatgacggctttgagagtgatgcagtaaaaatcaatgctgagcagattttcaagcaagtgtcgccacatactgaagttaaagcgatataa

SEQ ID NO: 3604 - protein, 617 aa, Proteus mirabilis
MDKLKMHSPDMTQQNIEKIQALFPNCVTESKGADGELKLAIDFDQLKQELSNSIVEGPQERYQLNWPGKREALLTANAPIAKTLRPCREESVNFDTTENLFIEGDNLDALKMLQETYLGKVKMIYIDPPYNTGKDFIYADDFAENTEDYLKSSGQKDSVGNRMIANSENNGRFHSDWLSMMYSRLKLSRNLMKDDGLIFISIDEVEISNLKKMADEIFGADNFIADFIWQNKKGGGNDAKYCAVEHEYVVIYAKNIQSLPRLFESFSDGYAKRYKEEDERGRFFWDTFKRKSGKQYYAITCPDGTVLENDEYGNPLSWLRSEARFKKDVDDGEIKFEKRTDGWSVMFKQRMPEGKKPRSLVLDKGTTSDGSSEILSLFGKNIFSNPKPTSLLRYLLGIGLNESEIVLDFFAGSATTAHAVTHLNAEDGGNRKFIMVQLPEECDKKSEAYKAGYKTIAEISKERIRRAGAKILEGECHKDWNKDVGFRVLKVDTSNMADVYYSPDQVSQGALDLLVDNIKSDRTAEDLLFQVLLDWGVDLTLPIRKEMIQGKIVFFVDDDALVACFDLRINEALIKELAAKEPLRVVFRDDGFESDAVKINAEQIFKQVSPHTEVKAI

SEQ ID NO: 3605 - DNA, 369 bp, Morganella morganii
atggaagggatgaccatgccaagaaaagaagctgccgcatatattggtatatcagaagacacactctctcgttggtgcaagctaggattgattgcatacacaagaaaggacccatcaaagaaaaactcgccatacctatttacgagagctgcgtgtattgcggcagctaataaatcaattcacaatataccagtgaacgctggtgagacacgagagggaaaatcatgtctttattcagaagaggtaaaatatggtacggaaactacacgacgccaagcggtaaaagaatcaaggaatctcttggcacagaggacaagaagctcgcgcaggagttgcacgacacaagaaaggtcgagttatggcgcatag

SEQ ID NO: 3606 - protein, 122 aa, Morganella morganii
MEGMTMPRKEAAAYIGISEDTLSRWCKLGLIAYTRKDPSKKNSPYLFTRAACIAAANKSIHNIPVNAGETREGKSCLYSEEVKYGTETTRRQAVKESRNLLAQRTRSSRRSCTTQERSSYGA

SEQ ID NO: 3607 - DNA, 1170 bp, Citrobacter braakii
atgattaaaagaatcagcgttaacacattcaagtctttagttgattttgagttaaaccttgactcaaagtttaattgcattattggtttaaacggcgcagggaaaagttcggttttacaattatttagttatgtatctgctcttatagatggaaaaattgaccgttggctaactgaaagaggttgggaagaaaaagatgttgcttctcatttcttccccacacgaaaaacgtttgatcttgcactcgatatagagctttcagataagcaattgcgttgggaagccacttacaactggaaaagaggcttatgtacaagtgagaccctaactgatttaatcaatggtcagcaactgttacgtctatatcagggaagactcaaaactaagcgtcacagttttcctgatctgattttcaaatattcaggttccatattgtctgctgtggatgattcagctttaccgcaagaagccatcatttttcgaaattttatgagtaatattgacagtcatgaccttttatcgcctaaggtcatgcgttcaggtcgttttgcttcagcaggaaaaattggtggtgcaggagagtatctaattagttatatccataaccttgataagaattcccaaaatattttattaaaaaacctatatggctattttcctcaagtagtgaaaattgaaactaaaactgagttaaatggcacattaagtcttttgttaacagagcggttttataatgaggatgggtctcacatcgatgttgtaaccaatgccaagcacatcaacgatggcatgttgcgtattttaatcatactggcaagtcaaagatctagttcgagattccagcaatttgatgaagttgagaatggtgttaactctgaaataaccgaaaaactggtcgaggcattcataaactcacctcagcaagtcttgattacaacgcatagtccaatggtattgaattatatagaagatgaattagcgaaaagttctataatacttgtttataaaaataaacaaggacataccaaggcaaccaaattatttgccttaccatctctgactaagaaacttaattcgctggctcctggtgatgccatgcttgacgtgtacctaaaagatactgccgaagaagctgaacttctggcaaattcgtcagagttgagtcggtag

SEQ ID NO: 3608 - protein, 389 aa, Citrobacter braakii
MIKRISVNTFKSLVDFELNLDSKFNCIIGLNGAGKSSVLQLFSYVSALIDGKIDRWLTERGWEEKDVASHFFPTRKTFDLALDIELSDKQLRWEATYNWKRGLCTSETLTDLINGQQLLRLYQGRLKTKRHSFPDLIFKYSGSILSAVDDSALPQEAIIFRNFMSNIDSHDLLSPKVMRSGRFASAGKIGGAGEYLISYIHNLDKNSQNILLKNLYGYFPQVVKIETKTELNGTLSLLLTERFYNEDGSHIDVVTNAKHINDGMLRILIILASQRSSSRFQQFDEVENGVNSEITEKLVEAFINSPQQVLITTHSPMVLNYIEDELAKSSIILVYKNKQGHTKATKLFALPSLTKKLNSLAPGDAMLDVYLKDTAEEAELLANSSELSR

SEQ ID NO: 3609 - DNA, 1218 bp, Proteus mirabilis
atgatctccagctttgaaaagtgcccagataattggagcatgctgagaattgatgaaatcgcaatcatacaaagtggaactggctttcctcctgatgctcaaggatcgtcaaacggttcgattccatttttgaaagttagtgatatgaatttaccgaagaactctcgatttattgaagagtggaataattcaattacagaagaacaggtttcaaaactcaaagcaaaacttttacccaaaggcgctgttatattcccaaagattggtggggctattgctaccaacaaaaagcgagtgctaacgatacccagctgtttcgataacaacgttatgggactgaaagctaaacaaggggttttagacgaatatctatattggttactacaatcaatagatttgactgcttggagctcttcatcttcgcttccttcaatgaaggcttcgactgtaaaagagtttttggtaccagtaccatcgatggcggaacaaaaacgcatcgtcgcaaaactcgatgcactgctcaaccgcatcgacaccgccatcgagcatttgcaggaaagcgtcacattggctgatgcgctgtcaaaaaacgggctgtcagaaatattcgagagcctaaaagatcgttatgaggtcgtacccctatcatttgtcgtaaaaattaatagtggcattgcgttaccgaaactttttaaaaacggtttcagcgatggtgacattccatttttcaaagtggcacaaatgaacaaccaccatgaaactatggttgcgccagagataacatttaatgaaaccgttgccaaagaacacaaaataaagctatttcctaagggcagcacgctgattcccaaaagaggtggggcaatcctaaccaataaaaagagaatgctgcttgaggatgcgtcatatgacagcaacatcatggggttaaaagctgacgaatctaaaatttccgacgagtaccttttcgccttcatgcggacaatagatttagcaaatttcgtcgacgcaagtacgatcccgcaagttaacaacaaacacattgatcagatgcaaatccctttggcaagtatcgaggaacaggctggcgtggttagccgcgtaaacttgttggttaaaaaagtcgaaacaatgaattcagaaattcaaagacaactggatgatttgcaagctttgaaaagttcaattctcgattccgcctttaaaggtgagctctaa

SEQ ID NO: 3610 - protein, 405 aa, Proteus mirabilis
MISSFEKCPDNWSMLRIDEIAIIQSGTGFPPDAQGSSNGSIPFLKVSDMNLPKNSRFIEEWNNSITEEQVSKLKAKLLPKGAVIFPKIGGAIATNKKRVLTIPSCFDNNVMGLKAKQGVLDEYLYWLLQSIDLTAWSSSSSLPSMKASTVKEFLVPVPSMAEQKRIVAKLDALLNRIDTAIEHLQESVTLADALSKNGLSEIFESLKDRYEVVPLSFVVKINSGIALPKLFKNGFSDGDIPFFKVAQMNNHHETMVAPEITFNETVAKEHKIKLFPKGSTLIPKRGGAILTNKKRMLLEDASYDSNIMGLKADESKISDEYLFAFMRTIDLANFVDASTIPQVNNKHIDQMQIPLASIEEQAGVVSRVNLLVKKVETMNSEIQRQLDDLQALKSSILDSAFKGEL

SEQ ID NO: 3611 - DNA, 1980 bp, Proteus mirabilis
atggaattaacactcgcacctaacccgctgtacgaccagccacaaaccttaaatatcaataaggttgctactttaattggtgaaaatggcagcggtaaatccagtatcttgcagtcagtatttgaagagcggttaaacaagcgcgcacatcaccacctaaatgtggtgtgcttctcttcagggcagaatgaaaactactctgaaaagtttggtatttacttaaaacgtgaacgtaaagcaggtagaggtttggggttagagtgcctttactttgacaagccctggtcaaaattactcattttcctcgcaacggcgactaaacgtagtggcaaagttcgttcatttttgcgcgaacgaggctatgttactgaatcaacacttcaaggtgatgaccaaactacgtgcttaaaatgcgcattcaaaattgataaaaactacgtcaatcgagttcaggatgccctgaagcgcgaagaaaatggcgaagttgatacattacgaaatacgccttacttccgttcgttagacagcttcatcagcacctttcactctagagactatgagtttgagcaaccgctacgtaagcgaacaattgaaataccagcaatccgactgatcgatgtttcgttcgattacccaagacaaccacaagcaggtgaagagggtatagaggctggtgaagccaataatcaagctcaaaatacagcgtttgatcctgaagtgagcttttttacccaagcggcagacaatgattacttcattgataaaaaaggctataagctcgtatttaaaggtgggatagaacttgaccaactgagcgatggtgaataccagctgctctttctatatgcgttgattgatctttttgattcaccgaataccctgtttttgttggatgaagcagactcacatctgcatttcaaaaatgttgagcggttatgggaaatacttaaaaaaattaatggttatgtacttacaacatcacacctgttggattcaatatctcagctagaaataaatgatattaatgtggtaagtaaaagcgttgtttctccagcagcaaataacatcgaacttaatgatcgcctaaaggctttgagtagcataagccaaataaaattcaaagaatgttcattgtataaaatagtcgttcttgtcgatcatgaaaatgattgggatattttcaaattacttgttcttcgtaagctatcgactaacgcatttgatcgtgaacagataattgatagttttaaaagtatactacccgtacgattgaactctggatggaatagtcactcggagtcatttgcagaaaagaagatgaaatgggtatcgacttatgcaacatttgtagctaaccaacctgtccaaacaaccaatgttatccttatttgtgatcgagatagtctgccatatcaagatattggtactgataaatgctctcttgctgttcaaggtatagatcctaataaatatcagatcaacaattcagcatttgacacaactgtcttggcttggcaacgcagagagattaaacactacttgttgtcttactctgctatgaacaagtctgatgttgatatgttaaataccatttattttggagaagcgtcttgccttagagacgggcaaaatggcgactataaaatcaccatggaggatggtttgtgctctcttttaagtgaaaaagaactaagtaaatcagaacaaaaacaaatgaatcctaaacttctttatgagtttaagaaagtctatggcgatgacgtaaagcccttcaagttagttccttcatttaatgagtctttagccacgttagattcatcattggtcaagaaactcgtgtctagttacatcgaaaatacagaagcacccaaagggtttaacctagtgctagcaactcaatatattgaaaaaatgaagcccgcagaaatcagcgaagacatcaccaagatgtaccagtttattaaagagaaattacgataa

SEQ ID NO: 3612 - protein, 659 aa, Proteus mirabilis
MELTLAPNPLYDQPQTLNINKVATLIGENGSGKSSILQSVFEERLNKRAHHHLNVVCFSSGQNENYSEKFGIYLKRERKAGRGLGLECLYFDKPWSKLLIFLATATKRSGKVRSFLRERGYVTESTLQGDDQTTCLKCAFKIDKNYVNRVQDALKREENGEVDTLRNTPYFRSLDSFISTFHSRDYEFEQPLRKRTIEIPAIRLIDVSFDYPRQPQAGEEGIEAGEANNQAQNTAFDPEVSFFTQAADNDYFIDKKGYKLVFKGGIELDQLSDGEYQLLFLYALIDLFDSPNTLFLLDEADSHLHFKNVERLWEILKKINGYVLTTSHLLDSISQLEINDINVVSKSVVSPAANNIELNDRLKALSSISQIKFKECSLYKIVVLVDHENDWDIFKLLVLRKLSTNAFDREQIIDSFKSILPVRLNSGWNSHSESFAEKKMKWVSTYATFVANQPVQTTNVILICDRDSLPYQDIGTDKCSLAVQGIDPNKYQINNSAFDTTVLAWQRREIKHYLLSYSAMNKSDVDMLNTIYFGEASCLRDGQNGDYKITMEDGLCSLLSEKELSKSEQKQMNPKLLYEFKKVYGDDVKPFKLVPSFNESLATLDSSLVKKLVSSYIENTEAPKGFNLVLATQYIEKMKPAEISEDITKMYQFIKEKLR

SEQ ID NO: 3613 - DNA, 1407 bp, Proteus mirabilis
atggctattggttcattatcgcgtagcgaatttgttgagcgtctttataaagttgtgagaccatcgtcaccgattgatacacctgagtttctcttcggcagaaatcaacaaatatcttcgataactgatgcccttatggctcctgggcgacattcttttatctacggaagtagaggggtgggaaagtcgtcgttagcacattctgtagcttttcagcttcaagatgaaactaatccaattttgcttagttgttctccatcatctacattagaatctatagtatctgaagctcttaaaagagcgagtagtgaattagagagtaaaagtgattggacggccagtgtgtcgattggtatcgctggaaatggttttaagtttgagcgaaaaagtacaaaagaaacaaaacatattgaaatttatgatgtttcctccgcagtattcgcattacaacatttagaaaaaatacattctaaaattccttatattgtaatagatgaatttgatcgaatagacagttcagaagagcgagaaaagtttggaacacttttaaaacaacttggagatatgcgttgcaaggtaaaaataatttttacaggtatagctgattcttttcaagaaattttatgtggacatgcttctagtgcacgtcaaattcatgagctaaagcttgagccattgccatgggatgggcgagcaagaataattgaacgagcttttgaagaatttaatatttttgtccctgaggatattaaatttaggatttcaggattgagtgatggtttccctcattatgtacatataatatgtgagaaaatactgtatgcattatatgacaaagaaaatgatattaaagaagtagattatccgttgtttattcaagggttagatgatgcagtaaaatcagtagagcagagtttgaaagtgtcatataatcatgcgactgaggctagggatgctcagtatgcctatgtcctgtggtctgttgctgattctgcagatctacaaagaaagaaagcagatattttacagtcatatcaagacgtatgtgaacaattaaaaattactccactgaatgatacatctttcagccgaatcttatctcttttaaagaaaaatgaatatggagaggttgtggttcctgcattccctgggaaacgtagcggatggtataaattcaatgaaaatatgcttagaggttatgtaaggatgcatgctgaagttagaggaatacagcttgacttccagaaaaactttacaagtaatgagccaacagccaattcaagagtaaaaaataggtttaataagacgatctctcaagttgaaagagaagttgattatgaaagaagacgtaatcaggaaactttgaaagaactttctagagagtatgctaggcgaaataaaccttaa

SEQ ID NO: 3614 - protein, 468 aa, Proteus mirabilis
MAIGSLSRSEFVERLYKVVRPSSPIDTPEFLFGRNQQISSITDALMAPGRHSFIYGSRGVGKSSLAHSVAFQLQDETNPILLSCSPSSTLESIVSEALKRASSELESKSDWTASVSIGIAGNGFKFERKSTKETKHIEIYDVSSAVFALQHLEKIHSKIPYIVIDEFDRIDSSEEREKFGTLLKQLGDMRCKVKIIFTGIADSFQEILCGHASSARQIHELKLEPLPWDGRARIIERAFEEFNIFVPEDIKFRISGLSDGFPHYVHIICEKILYALYDKENDIKEVDYPLFIQGLDDAVKSVEQSLKVSYNHATEARDAQYAYVLWSVADSADLQRKKADILQSYQDVCEQLKITPLNDTSFSRILSLLKKNEYGEVVVPAFPGKRSGWYKFNENMLRGYVRMHAEVRGIQLDFQKNFTSNEPTANSRVKNRFNKTISQVEREVDYERRRNQETLKELSREYARRNKP

SEQ ID NO: 3615 - DNA, 135 bp, Proteus mirabilis
atgcctaacttggaagccaaaatcattgaattggaaaaggcgaatgcagtattacaaagccagtatggaaacctattggccatttgcattggacttatcgtagttatgtttatagccatctataggttaaaataa

SEQ ID NO: 3616 - protein, 44 aa, Proteus mirabilis
MPNLEAKIIELEKANAVLQSQYGNLLAICIGLIVVMFIAIYRLK

SEQ ID NO: 3617 - DNA, 225 bp, Proteus mirabilis
atgaactggattaaacgaagtgatgaaacaccacagaaagacggcaaatattttacattcggatctcatggccggactaccgcatggtggaaaggtaatatcagcaattttcaaaatgctgaatctggagaaaatgaggggatgcaggacatggatggtgaagtttacattgtcacgcattggatgaacttaccagaaaagccagagccaccacaggagagctaa

SEQ ID NO: 3618 - protein, 74 aa, Proteus mirabilis
MNWIKRSDETPQKDGKYFTFGSHGRTTAWWKGNISNFQNAESGENEGMQDMDGEVYIVTHWMNLPEKPEPPQES

SEQ ID NO: 3619 - DNA, 1020 bp, Proteus mirabilis
atgtgttccacgcttgtacgcatgccggggtcgatgacgatagcgccttgcggggtgagcgtgacgcccgtcgcatccagtgccagcttgcgtgtgttgggcgcgcggccggtggcgaccagcagcttgtcggcgcgcagttcgccgtgcgccgtggtgagcacgaattcgccgtccccttcaccattgatatacgcgacctggctggcctgggtgtgttccctcacctcgatgccctccatgcggaatgcggccgtgacggcttcgcctatagctgggtcttcgcggaagaacagcgtgctgcgagccaggatcgtcaccttcgctccgagtcgggcgaacgcctgcgccagctccagcgccaccactgatgagccaatcacggccaggcgcttaggaatcgtctcgctgaccagcgcttcagtggaagtccagtacggagtgtctttcaggccgggaatcggcggcacggccgggctcgcgccggtggcgatcaggcagcggtcgaatgccaccacgcgctcgccgccgtcgttgagttgcacgatcaggttgcgattgtccttaaagcgggcggagccgtgcagcacagtgatcgccggattgccctccaagatgccttcgtacttggcgtggcgcagttcatcgacgcgggcctgctgctgggccagcagcgccgtgcgctggatggtcggcgtggtagcggcgatgccgccatcgaacgggctttcccggcgcagatgggcgatatgggcggcgcggatcatgatcttggacggcacacaaccgacattgacgcaggtgccgccgatggtgccgcgctcgatcagcgtgacacgtgcgccttgctcgacggccttcagcgccgctgccatcgcggccccgccgctgccgatgacggcgatatgcaatgcgccgctgctacccgtcttgtcgtttctgcccagcagatcgcgcatcttgtcgagcaatccgcccggcgtcgaaactgagggggcatcggccagcgtggcccgataa

SEQ ID NO: 3620 - protein, 339 aa, Proteus mirabilis
MCSTLVRMPGSMTIAPCGVSVTPVASSASLRVLGARPVATSSLSARSSPCAVVSTNSPSPSPLIYATWLAWVCSLTSMPSMRNAAVTASPIAGSSRKNSVLRARIVTFAPSRANACASSSATTDEPITARRLGIVSLTSASVEVQYGVSFRPGIGGTAGLAPVAIRQRSNATTRSPPSLSCTIRLRLSLKRAEPCSTVIAGLPSKMPSYLAWRSSSTRACCWASSAVRWMVGVVAAMPPSNGLSRRRWAIWAARIMILDGTQPTLTQVPPMVPRSISVTRAPCSTAFSAAAIAAPPLPMTAICNAPLLPVLSFLPSRSRILSSNPPGVETEGASASVAR

SEQ ID NO: 3621 - DNA, 399 bp, Morganella morganii
atgagtgaaaataatttaagcccaaatgaaaaaccgttgttatctaatgaagataaaattcatttagaacatttactagaaaaaataaggcctttattagcattaaagcgcctagataatattgttgatttattatccttagcctcagataccgtcgatattatggataacgcaacggtagaaaaattggcggttgcttttgaagaaacattaattccggtttgggaattaactacggcctttaatatggctaaaaaagaatctctttatcaggataaaaaatataccttaggtgcgattttttcattattagaaaatcctgacaccttaaaaggattaactattgtactaaggacattacaaattattggggaaaataatcagaaaatagaagtttaa

SEQ ID NO: 3622 - protein, 132 aa, Morganella morganii
MSENNLSPNEKPLLSNEDKIHLEHLLEKIRPLLALKRLDNIVDLLSLASDTVDIMDNATVEKLAVAFEETLIPVWELTTAFNMAKKESLYQDKKYTLGAIFSLLENPDTLKGLTIVLRTLQIIGENNQKIEV

SEQ ID NO: 3623 - DNA, 789 bp, Serratia marcescens
atgggtgaatttttccctgcacaagttttcaagcagctgtcccacgctcgcgcggtggtcgagcgccatctggctgcgacactggacacaatccacctgttcggatctgcgatcgatggagggctgaagccggatagcgacatagacttgctcgtgaccgtcagcgccgcacctaacgattcgctccggcaggcgctaatgctcgatttgctgaaagtctcatcaccgccaggcgatggcggaacatggcgaccgctggagctaactgttgtcgctcgaagcgaagtagtgccttggcgctatccggcgcggcgtgagcttcagttcggtgagtggctccgccacgacatcctttccggaacgttcgagcctgccgttctggatcacgatcttgcgattttgctgaccaaggcgaggcaacacagccttgcgcttctaggcccatccgcagccacgtttttcgagccggtgccgaaggagcatttctccaaggcgcttttcgacactattgcccagtggaatgcagagtcggattggaagggtgacgagcggaacgtcgttcttgctcttgctcgcatttggtacagcgcttcaactggtctcattgctcctaaggacgttgctgccgcatgggtatcggagcgtttgcctgccgagcatcggcccctcatctgcaaggcacgtgcggcgtacctgggtagcgaggacgacgacctagcaatgcgcgtcgaagagacggccgcgttcgttcgatatgccaaagcaacgattgagagaatcttgcgttga

SEQ ID NO: 3624 - protein, 262 aa, Serratia marcescens
MGEFFPAQVFKQLSHARAVVERHLAATLDTIHLFGSAIDGGLKPDSDIDLLVTVSAAPNDSLRQALMLDLLKVSSPPGDGGTWRPLELTVVARSEVVPWRYPARRELQFGEWLRHDILSGTFEPAVLDHDLAILLTKARQHSLALLGPSAATFFEPVPKEHFSKALFDTIAQWNAESDWKGDERNVVLALARIWYSASTGLIAPKDVAAAWVSERLPAEHRPLICKARAAYLGSEDDDLAMRVEETAAFVRYAKATIERILR

SEQ ID NO: 3625 - DNA, 297 bp, Proteus mirabilis
gtgggccaacttaaactgggcaatctgaagtttgacctgtttgcccgctatgcgggcaaagtcctcactccaatcgaattggaaggcttcgccacaagcaaagcgcaaggggatgaaacaacccttgcccgaggtttgcgccttgaactgttcggaatctttccactgtcgggcaaaggcacacactcggtcataagacccggtaaagcccaaagcgaccaaatcccggtacatgctgcgcaggtttctgcgcagcttctttgtctttttgtgctcggtggagagccactgccttaa

SEQ ID NO: 3626 - protein, 98 aa, Proteus mirabilis
MGQLKLGNLKFDLFARYAGKVLTPIELEGFATSKAQGDETTLARGLRLELFGIFPLSGKGTHSVIRPGKAQSDQIPVHAAQVSAQLLCLFVLGGEPLP

SEQ ID NO: 3627 - DNA, 273 bp, Escherichia coli
atgatcacgccagccacaggagacatgccgcgtcccatatgtgatgcctgctgcataggtaaaatcattgcaattggattaacccccatgctatgggcaatttgtggaataagttcaacgaatgcaaggaaaggtgcattacctgagcccataataattgcggcagccaatgtcacgatagcgaacactaatgccatggcaaatggtggtagaccaacagattccgccataacgatcaggctgtctattgcaccactgactttaataccatga

SEQ ID NO: 3628 - protein, 90 aa, Escherichia coli
MITPATGDMPRPICDACCIGKIIAIGLTPMLWAICGISSTNARKGALPEPIIIAAANVTIANTNAMANGGRPTDSAITIRLSIAPLTLIP

SEQ ID NO: 3629 - DNA, 228 bp, Proteus mirabilis
atggatatcattgctgaaattgcttttcgcatcattggatttatgactgaaattatttatagcattcttagtttctttggatttagaatcgccgttctaggaagtagctttttccttcttcatatgttcagttatcatcctcttttcatcataatctttatagttgtagtgatcgtgttatatgcaccagtgatatataagttagtgaggaaaagaaaaagtaattaa

SEQ ID NO: 3630 - protein, 75 aa, Proteus mirabilis
MDIIAEIAFRIIGFMTEIIYSILSFFGFRIAVLGSSFFLLHMFSYHPLFIIIFIVVVIVLYAPVIYKLVRKRKSN

SEQ ID NO: 3631 - DNA, 345 bp, Proteus mirabilis
atgacgattaatgatttaaaggcaatcaatgatcggtatatagccgatgaacgtagaaaagcgattattgaaagagctgaagtaaaagcgaatgtttatgagtccgctaaaagattatttcaacttgcggaagataacgattatgtaaaacgtagtgatggttatattgatgtaattctaacaggttgcaacattaatgtttttctcaacctaactaaggatagcgggttgtttaaaaattgtggcaataaaatataccaacacatgttctgcaataaactccttatgcatgaaaaactaaatcatatgggcggagttaatttcgccagaattatcctttcctaa

SEQ ID NO: 3632 - protein, 114 aa, Proteus mirabilis
MTINDLKAINDRYIADERRKAIIERAEVKANVYESAKRLFQLAEDNDYVKRSDGYIDVILTGCNINVFLNLTKDSGLFKNCGNKIYQHMFCNKLLMHEKLNHMGGVNFARIILS

SEQ ID NO: 3633 - DNA, 651 bp, Proteus mirabilis
atgattttatgtatagctgaaaaaccttctgtggcaaaagatattgccgaagtaattggtgcaaaacaacgcaacaacggcttttatgaaggaaatggctattgggtaacctggacttttggccatctgtgtacattgaatgaaccccatgattacaaagaaaattggaaatactggaaattggaagatctgccaattgtacctaaaaaatttggcattaaactaattgataacgatggagtaaaaaggcaatttgctgttattgaaaaattggtagcatcttgttctgaagtcatcaattgcggggatgccgggcaggaaggggagttgatacaaagatgggtattggcacctggtcaagaaagcgggccatacccaccaagtggccaagacgggcgcggtcaccctgatccagcgttttggatcggcgctcaatctgaatgttcacttccacatgctgtttctcgacggtgtgtatgtcgagcaatcccacggctcagcgcgtttccgctgggtcaaggcgccgaccagcccagagctcacccagctgacgcacaccatcgcccaccgggtgggtcgctatctggaacggcaaggcctgctggaacgggatgtcgaaaacagctatctggcctcggatgcggtggatga

SEQ ID NO: 3634 - protein, 216 aa, Proteus mirabilis
MILCIAEKPSVAKDIAEVIGAKQRNNGFYEGNGYWVTWTFGHLCTLNEPHDYKENWKYWKLEDLPIVPKKFGIKLIDNDGVKRQFAVIEKLVASCSEVINCGDAGQEGELIQRWVLAPGQESGPYPPSGQDGRGHPDPAFWIGAQSECSLPHAVSRRCVCRAIPRLSAFPLGQGADQPRAHPADAHHRPPGGSLSGTARPAGTGCRKQLSGLGCGG

SEQ ID NO: 3635 - DNA, 507 bp, Proteus mirabilis
atgaaactatcattaattgttgccatggataaaaattttggcattggtaaagacaacgatttgttatggaaattgccggctgatatgaaattctttaaagaaacttcaacaggtcatgtagtaataaccggacgtaaaaattatgaatctattcctgagaaatttagacccttgccaaatcgtgaaaatgccgttttaactcaccaaatcggctatcaagcaccaggagctcatgtctttttttcacttactgaatgtttagagttctataaaaatgaaaccgaaagaactgttttcatcattggtgggggacaaatttatgcagaagttatgcagcgaaacatccttcaagaaatgtatatcacacaagtagatggagtgtttgacgcagatactttttttcctaaattttctgaatctgagtggaatagtgaaactgtactgaaacagggtattgatgaaaaacacgcttttgcttttgaaataaaaaaatatacacgtaaataa

SEQ ID NO: 3636 - protein, 168 aa, Proteus mirabilis
MKLSLIVAMDKNFGIGKDNDLLWKLPADMKFFKETSTGHVVITGRKNYESIPEKFRPLPNRENAVLTHQIGYQAPGAHVFFSLTECLEFYKNETERTVFIIGGGQIYAEVMQRNILQEMYITQVDGVFDADTFFPKFSESEWNSETVLKQGIDEKHAFAFEIKKYTRK

SEQ ID NO: 3637 - DNA, 243 bp, Proteus mirabilis
atgaatgatgatttcaagtcatgtctaattgaggttttaaccattttcactgtaactatcttactttgttttacgctcacctttggggtgatgtatggcgttaattcatatcagtgtaatcagtatcagggtatcactggtattgagacaaaaatgggtggatttgagtgctatgtaaacactgggaaagcatatattccatatgatgaatacaaattacggtcggcaactcacagagagtaa

SEQ ID NO: 3638 - protein, 80 aa, Proteus mirabilis
MNDDFKSCLIEVLTIFTVTILLCFTLTFGVMYGVNSYQCNQYQGITGIETKMGGFECYVNTGKAYIPYDEYKLRSATHRE

SEQ ID NO: 3639 - DNA, 237 bp, Proteus mirabilis
atgaaagataaaacaggtgggcccgccttcccaaatgtaccagatggtgctggtgataagtggtctgattgggatatgggcatgacgttgcgagactattttgctgctaaatgcatgtcagcaatcattaactcattaaatggccctgttgtatttgaagaatgcaaaggcgattttgatgtgtacgcaaaacaagcctatgtcatggcagatgcgatgttaaaggctagggggtaa

SEQ ID NO: 3640 - protein, 78 aa, Proteus mirabilis
MKDKTGGPAFPNVPDGAGDKWSDWDMGMTLRDYFAAKCMSAIINSLNGPVVFEECKGDFDVYAKQAYVMADAMLKARG

SEQ ID NO: 3641 - DNA, 693 bp, Proteus mirabilis
atgaatatttatattgatatcgaaactataccatcacaagacccaatggttagacaaaaatttatagatgatgtgaccgcccctggtaattacaagaagcaagaatcaattgatgcgtggctagctgagaaccgagaaattgtcggcgaagaaaactggaaaaagactagttttgatggggggttgggtcatgtttgcgtgattggcgtagcaattaatgacggggaaacaaaaactttctacgcagaagattatctagccaatgaaaagagaattatcactgatttatttgagcttattgacgacaattacgacccatcaaaaaacgtaccacctgtatttattggtcataacgtagctgagtttgacctcaaattcctattccaacgcgctgttgttcttggtgttaaacctccgagagtgatccctttcggagctagaccatgggataaggccatatttgacacaatgactgtatgggctggtcataatggacgtgtatcgttagataaactctgctctgttcttggtttagacgctaaaggctctgaaactggcgaagatatagacggaagtaaagtttgggattttgttaaggacggaaagatttcagttgtagcagagtattgcaagggtgatgttgatcgggttcgagatattcataaacgcatgacatttcaattaaccgcctaa

SEQ ID NO: 3642 - protein, 230 aa, Proteus mirabilis
MNIYIDIETIPSQDPMVRQKFIDDVTAPGNYKKQESIDAWLAENREIVGEENWKKTSFDGGLGHVCVIGVAINDGETKTFYAEDYLANEKRIITDLFELIDDNYDPSKNVPPVFIGHNVAEFDLKFLFQRAVVLGVKPPRVIPFGARPWDKAIFDTMTVWAGHNGRVSLDKLCSVLGLDAKGSETGEDIDGSKVWDFVKDGKISVVAEYCKGDVDRVRDIHKRMTFQLTA

SEQ ID NO: 3643 - DNA, 876 bp, Proteus mirabilis
atggtgacaaagagaatgcaacggatgatgttcgcggcggcggcgtgcattccgctgctgctgggcagcgcgccgctttatgcgcagacgagtgcggtgcagcaaaagctggcggcgctggagaaaagcagcggagggcggctgggcgtcgcgctcatcgataccaaagataatacgcaggtgctttatcgcggtgatgaacgctttccaatgtgcagtaccagtaaagttatggcggccgcggcggtgcttaagcagagtgaaacgcaaaagcagctgcttaatcagcctgtcgagatcaagcctgccgatctggttaactacaatccgattgccgaaaaacacgtcaacggcacaatgacgctggcagaactgagcgcggccgcgttgcagtacagcgacaataccgccatgaacaaattgattgcccagctcggtggcccgggaggcgtgacggcttttgcccgcgagatcggcgatgagacgtttcgtctggatcgcactgaacctacgctgaataccgccattcccggcgacccgagagacaccaccacgccgcgggcgatggcgcagacgttgcgtcagcttacgctgggtcatgcgctgggcgaaacccagcgggcgcagttggtgacgtggctcaaaggcaatacgaccggcgcagccagcattcgggccggcttaccgacgtcgtggactgtgggtgataagaccggcagcggcgactacggcaccaccaatgatattgcggtgatctggccgcagggtcgtgcgccgctggttctggtgacctattttacccagccgcaacagaacgcagagagccgccgcgatgtgctggcttcagcggcgagaatcatcgccgaagggctgtaa

SEQ ID NO: 3644 - protein, 291 aa, Proteus mirabilis
MVTKRMQRMMFAAAACIPLLLGSAPLYAQTSAVQQKLAALEKSSGGRLGVALIDTKDNTQVLYRGDERFPMCSTSKVMAAAAVLKQSETQKQLLNQPVEIKPADLVNYNPIAEKHVNGTMTLAELSAAALQYSDNTAMNKLIAQLGGPGGVTAFAREIGDETFRLDRTEPTLNTAIPGDPRDTTTPRAMAQTLRQLTLGHALGETQRAQLVTWLKGNTTGAASIRAGLPTSWTVGDKTGSGDYGTTNDIAVIWPQGRAPLVLVTYFTQPQQNAESRRDVLASAARIIAEGL

SEQ ID NO: 3645 - DNA, 402 bp, Escherichia coli
atgatactttcagtatcaatgccactcattttctggacgaaaatgaatgacataaggctccgccctctggctattttcttcggctggacgcctgcgaaaaaaaccattcacccaagcccgtcaaactcactgcgttcgtctgaccacccccttttttcgcccctgtatttggtcgctcaaaaatgtggtggtcagacgcttcgcttgacggggggctttgcccccaaaacgaaacacgttcactggggttcacttgccatcgctggggcgtgtcatttcgtttcggctccccctgtttttccctttcttcgctggacgctcatcaggataaaaacaaaaagcctaccgccctcgttttactcggttggtcaaatcgcttcttgccacaaaacaagtttgtga

SEQ ID NO: 3646 - protein, 133 aa, Escherichia coli
MILSVSMPLIFWTKMNDIRLRPLAIFFGWTPAKKTIHPSPSNSLRSSDHPLFSPLYLVAQKCGGQTLRLTGGFAPKTKHVHWGSLAIAGACHFVSAPPVFPFLRWTLIRIKTKSLPPSFYSVGQIASCHKTSL

SEQ ID NO: 3647 - DNA, 348 bp, Proteus mirabilis
atgaagataaaacttactaataagagagtgcacaaactctctatagagccgattgaaaaagaaaataaaaatgacaaaaaaaagataagaatcagatatatagttaatttaagtattgaaagcatttttgctttatatttagaatatgattttgacttcgatattgatggcgaagtagatgatacctttaaggattcgtccgagataaaaacatcaattcctagttacacatatccttatatcaaaacttttatagaaacggtaattactaactgtgactatccaaaaatacaaatccctacaattaatttttacgatttagatgacaatattgaaatagaagattaa

SEQ ID NO: 3648 - protein, 115 aa, Proteus mirabilis
MKIKLTNKRVHKLSIEPIEKENKNDKKKIRIRYIVNLSIESIFALYLEYDFDFDIDGEVDDTFKDSSEIKTSIPSYTYPYIKTFIETVITNCDYPKIQIPTINFYDLDDNIEIED

SEQ ID NO: 3649 - DNA, 393 bp, Enterobacter cloacae
atgccggcactcgaccgacagaaccgaattttggcaccgccgagacgcaaatacgctttctctgcgcggagggcttttgtccgaagcgcgccgtttgggcgctccgggcggtcagtcactatgtggtcggttccgttctcgagcagcaggcatctgatgccgatgagagagttccggacaggccagatgtgtccgagcaagcaccgtcgtccttcctgcacgatctgtttcacgagttggaaacagacggcatggatgctgcgttcaacttcggactcgacagcctcatcgctggtttcgagcggctgcgttcatctacaacagattagaggcttatgcccctttgccgccccaactgccacgacaccgatccgctttgcacgatgcccatga

SEQ ID NO: 3650 - protein, 130 aa, Enterobacter cloacae
MPALDRQNRILAPPRRKYAFSARRAFVRSAPFGRSGRSVTMWSVPFSSSRHLMPMREFRTGQMCPSKHRRPSCTICFTSWKQTAWMLRSTSDSTASSLVSSGCVHLQQIRGLCPFAAPTATTPIRFARCP

SEQ ID NO: 3651 - DNA, 492 bp, Enterobacter cloacae
atggccgctccgtggatctcatcgccagaaatggcgatgcgagatccagggcagggcggccgccatcgtcagacctggcgatggtcgacgccggcgcgcatcgtcggatgtggcgatgcgagctcgaggtcggtggccaccgccggcgacctggtgccatcgtcggcaatggcgatgctgcagctcgacgtgcgcggcctggtcgtctcggcatcgtcggatgcggcgatgctcgagcgaggcgaaaaaaaaccgcctcggggtgtccgaggcggcaagtctgcatgcggttcagggaggaagaaaccgcgccggcgatcagggaggaaaaccgcgcggcctgatgtgcagctcggccactttagccggatttttcgacttatccgatgcgagcggcccgccgtgggcgctgctcgatctgctgttgctttttctcgacgtgcttctgctcctggtgctgctgctcgtcgcgcggcactgttgcaaagttag

SEQ ID NO: 3652 - protein, 163 aa, Enterobacter cloacae
MAAPWISSPEMAMRDPGQGGRHRQTWRWSTPARIVGCGDASSRSVATAGDLVPSSAMAMLQLDVRGLVVSASSDAAMLERGEKKPPRGVRGGKSACGSGRKKPRRRSGRKTARPDVQLGHFSRIFRLIRCERPAVGAARSAVAFSRRASAPGAAARRAALLQS

SEQ ID NO: 3653 - DNA, 282 bp, Proteus mirabilis
atgaataaatcaaggcagcaatttgaatgttggtactttaataatcaccgtcatgaacaaaaatacccactacacaaagatgagagtggggaatatttctatgatggagcaaggagagcatgggaggcttggcaagcatcacgcgagagtttagagattgaattgccagagcctaaccctgaagattcagggagtcctaacttttacgacgggtacaacactgcaataagcgatattcatgacgaattaatcagcaatggagtgaaaataaaaaatgaataa

SEQ ID NO: 3654 - protein, 93 aa, Proteus mirabilis
MNKSRQQFECWYFNNHRHEQKYPLHKDESGEYFYDGARRAWEAWQASRESLEIELPEPNPEDSGSPNFYDGYNTAISDIHDELISNGVKIKNE

SEQ ID NO: 3655 - DNA, 261 bp, Proteus mirabilis
atgccgatcacgcgagaagatatacaggcacattatgattatcacaacattacacaactcgatgatttacatacaactgattatcgtgagttggttagcggacattcttttttctttcaagatactggcggaaatttaagacacacattatcagaggaaatcttagcaacgaataaagaacaattagatgtattaattgaacaactgcaagcgtttagaaaaataatgaatgatgtccccgaatggttgagtgataaataa

SEQ ID NO: 3656 - protein, 86 aa, Proteus mirabilis
MPITREDIQAHYDYHNITQLDDLHTTDYRELVSGHSFFFQDTGGNLRHTLSEEILATNKEQLDVLIEQLQAFRKIMNDVPEWLSDK

SEQ ID NO: 3657 - DNA, 501 bp, Proteus mirabilis
atgaatttcaatcagcttgcatatccagaattaattattattaatggagatgagtacaaaggtagccgagaaagcagtactgtacgaataccctacaccgatgaacccgatattggaattggtgatgttattacacaaaaatcaggaaaaagacttattgaattaaaagtattagatgcttcatttcttgctggaggatcattgaatataggtactcaccacccacacatgttaactctacaagttgaaaatatgactgccagtgagcataaaacgaaagatcttaattctgtcgttaatataggtaatatttctggacatcaaatacaagttgggaataataacacccaaattacaaatgtaactattcaggaattagttgaaaagattgcaaaatctaatgatgttgaggcaaaaagatctctcattaaattactagaaaatagtaccgttgcaagtgtaataggggcaggtatttccgggctaataagtttattataa

SEQ ID NO: 3658 - protein, 166 aa, Proteus mirabilis
MNFNQLAYPELIIINGDEYKGSRESSTVRIPYTDEPDIGIGDVITQKSGKRLIELKVLDASFLAGGSLNIGTHHPHMLTLQVENMTASEHKTKDLNSVVNIGNISGHQIQVGNNNTQITNVTIQELVEKIAKSNDVEAKRSLIKLLENSTVASVIGAGISGLISLL

SEQ ID NO: 3659 - DNA, 192 bp, Proteus mirabilis
atgaaattaacagaacgtcaaatcagcacattaaaaaatataaataatggatatggtcagttaagcaataggctatcaattttctcgttggagaataaagggcttattaagcttcacccaaaggacggatggcaattaacagagttaggcattgaagaactaaaaaggtggaatgatggatatattagatga

SEQ ID NO: 3660 - protein, 63 aa, Proteus mirabilis
MKLTERQISTLKNINNGYGQLSNRLSIFSLENKGLIKLHPKDGWQLTELGIEELKRWNDGYIR

SEQ ID NO: 3661 - DNA, 123 bp, Proteus mirabilis
atgtccaaacaagaaagcattgcaaaaatgttaaggcttgcaaatcgtctggatgaaattatagcagacttgactgcaaagaaagatgatatgattaataaatcatataataaagcagcctaa

SEQ ID NO: 3662 - protein, 40 aa, Proteus mirabilis
MSKQESIAKMLRLANRLDEIIADLTAKKDDMINKSYNKAA

SEQ ID NO: 3663 - DNA, 345 bp, Proteus mirabilis
gtgaaaaataacttcaaagatgcagttttggttaaggatgcgcaagcctctatcgaagaaaggcagttaaacagcataaaaatgactgtgcaaggcttgataaactttgtaataactagctttgagcagttagggatagataggctacacgaacttactgacccttcacttgatgaattgacacttattgttcaagagttaagttcagaagctaaaaaacaccaagatatgaaccttcaacaaacattattaatagcagaaatactgcttaatgatattaaaatgaaaaatccagaaatgtgctcaaatagctctcaaatgctaaagaaagccaatattttctga

SEQ ID NO: 3664 - protein, 114 aa, Proteus mirabilis
MKNNFKDAVLVKDAQASIEERQLNSIKMTVQGLINFVITSFEQLGIDRLHELTDPSLDELTLIVQELSSEAKKHQDMNLQQTLLIAEILLNDIKMKNPEMCSNSSQMLKKANIF

SEQ ID NO: 3665 - DNA, 288 bp, Proteus mirabilis
atgaatggtttttttacggctgtatattgggtgttaaacattattcagattattgctgtaatatcgggctttcatgaatggctaggctggaatattgttatatctattatatttgctgctattattggatggtttcctctgattggtacattcatgggggttatgggagctgtagaaggatggggttgggaatactggcaggcaatactattattcatttggcctttaattttagtatttttcttcggtacactgagtgctgtaactgataagttttctaggaactaa

SEQ ID NO: 3666 - protein, 95 aa, Proteus mirabilis
MNGFFTAVYWVLNIIQIIAVISGFHEWLGWNIVISIIFAAIIGWFPLIGTFMGVMGAVEGWGWEYWQAILLFIWPLILVFFFGTLSAVTDKFSRN

SEQ ID NO: 3667 - DNA, 543 bp, Proteus mirabilis
atgaaaaaactgtcagtttcagagttagctaagctttatggatattcaagacaagccatatatgcacatataaacaaaggaaatttatctaaaggatctgatggattaattgacttttcagaggccctaagagtttttggggaaccacaaaaaaaagaggatacagtcaatcaaagtcaatcaattaacagtcaaaacttgacagaagttgacttactaaaacgtcaagttgacatactggaaaaacaattaaatcaggcaatacagagagaaaatcaatctttagaacgtgaatcgttttatcaagaacagattgaagctatgcagcgcttactagaagcaccaaaagccaatatgactacctttaccgatcagagctttaaacaggatatagcaacggatcctcggtcggaactagcaacgaactatgacgaattgactactcctcagcaagacaataagcgtattcctatcccggagcatgttgaaccagaacagaagaagagaggcttcctaagccgctttttccttccatatggttag

SEQ ID NO: 3668 - protein, 180 aa, Proteus mirabilis
MKKLSVSELAKLYGYSRQAIYAHINKGNLSKGSDGLIDFSEALRVFGEPQKKEDTVNQSQSINSQNLTEVDLLKRQVDILEKQLNQAIQRENQSLERESFYQEQIEAMQRLLEAPKANMTTFTDQSFKQDIATDPRSELATNYDELTTPQQDNKRIPIPEHVEPEQKKRGFLSRFFLPYG

SEQ ID NO: 3669 - DNA, 1089 bp, Proteus mirabilis
atggaaaacaagagaacaatatataatatacaaatattgagattcgttgccgctgcgctagtggtactagctcacgcagagatatttatttatgatggagctaaatctgagccattaggtggatttgtggttgatatattttttgttattagtggatttataatcccttatatagcatacagaggaattgactataacggaaaattcaaggttggatctataaatttctttcttcgtcgtattgtcagagtagtccctttatatgctattagtacagctatatgcgttttttttgcctatctagtatcatataaacttagtaacccaactccgccagtttcattttggtggccatctacaaaaattgatatgttatggtacattgatagtataacattcactcactggaatcgaccccctatattgggtgttggatggacgttacagtatgaatttttattttatgcgtttttctctctttttatagcagttaaactttctaagatcgaatatgttgaagtggcgttcattacaatcattgtattgtcaaatatgttactatcatatagtggaacttcttggtttattcatgagtatgctccttttattaacttgactgctagcccgataatgattgagtttgctatgggcatgctactatatagattatacatttctaatgccctattgtgtaaaggtgtatcactaacaatactggtattgtttatccctgtattttatgttttagaaaaaaatatgattaccacctcattaggaggagattggcacaggcctttggtgtgggggttttttgccttttatggcgtgtgggccgcaattagccttgaaggtaaaataaaagcgcctaaatttatagtttttttgggaaatgcatcttacagtatttatttaatgcatgcgctcattacagcatggatggctcacatttttgtagttagcgacatggtaagcaaaattggaatttatgggtattatattatttattttaccctcagttgtgctctaggatctattgctcacatttgtattgaaaaaccaatagctcggcatttgagacgttttttttga

SEQ ID NO: 3670 - protein, 362 aa, Proteus mirabilis
MENKRTIYNIQILRFVAAALVVLAHAEIFIYDGAKSEPLGGFVVDIFFVISGFIIPYIAYRGIDYNGKFKVGSINFFLRRIVRVVPLYAISTAICVFFAYLVSYKLSNPTPPVSFWWPSTKIDMLWYIDSITFTHWNRPPILGVGWTLQYEFLFYAFFSLFIAVKLSKIEYVEVAFITIIVLSNMLLSYSGTSWFIHEYAPFINLTASPIMIEFAMGMLLYRLYISNALLCKGVSLTILVLFIPVFYVLEKNMITTSLGGDWHRPLVWGFFAFYGVWAAISLEGKIKAPKFIVFLGNASYSIYLMHALITAWMAHIFVVSDMVSKIGIYGYYIIYFTLSCALGSIAHICIEKPIARHLRRFF

SEQ ID NO: 3671 - DNA, 2583 bp, Proteus mirabilis
atgtctacaattccaacacaaaatccagttccaagtgaagcaccgcgcgacctgaaatataactcaggcaaagttgacgagttcgttacgtcaaataatcatttttacactgaccgctttggtaaaaaacattatactatagatggtattaattttttatcaaaacaggcaatgcttaactatggctatatcacgaagaggtcttttgaatcgggtaataccatcatcaatcctaacgatgttcttctctgggaagacaatggcgaatactacagatgggatggcgaactccccaaagtagttagtgctggctcaactccagagtcagcgggaggaattggagcgggggggtgggtttcaattggtgatgcagcccttaggggggagattagccaatcaacaaaaaactacaacacatttatagatgctgttaattctaacacagattctattataaaaagtatatttattgcgggtagaatatctccaaacgatggtggctgtggtctatatactaaaaccggcacaggtacaccaggagatacagatgatggtagtttttttgtaacccaaaatggtgttaggtttgatttagtatcagatgcaactatagctacatttggtggtgtcgatggtggaagttttcgttctgcgttggataggctaaaaacttatgttagtaacagagatagagttttaaaaataaaatcaaatcacgaaattttgatgaatttttctcctgaaattccctctgggtattttaatggatttactcttgatgttgatgaaaacgtgacgatagctactgctagtgatgaagcagttaagtcgccattggtaaatttggttagaccggtaaagtttttcttcacgggaaataatactagttatttgttgcgccctactgttgggataactaatggggaatataaacctctaatttcaggaacaccgcctaaaccaccacaaataactaatgcaaactatactgataataaatcattatttatcaatatccctgaaaaagagaactatgtttacacatcttttttaaatgattgggaattcttatctagctcttggcctatgggggtgtttgatactgtttctccagcctcaatcttagaagattcattgtcaatacctgcgccgacagaaaaatttgtatgtgcctcattcagtaaaataaagccgagtgcagaatattttgtatctatgtacgctggagataatactaatggtatctctgctattactgttgaggcggaagataaacggtggatttactacgagaatcactttggggaggggtattttattgagggaaccgtcggtggttcattcaaagaaaaaaaagtttcatatttaggaggttccacgcatgggtcacaatggattaaaaactccatcacctctgtgagaattgatactctcaaatcatttacaatccttgtaaatggtattgaacgtattgctgttagggagacagagggcattattggcagaataggattcggatcttatggtgcggataataattatatgtctttattctacccgtatatcatagaaaacaggcagtaccgttccgcaaaaccaattaatattgccattgttggtgattcaatcacagatgcatcaataggaaatggatgggctcaattcgcacaacaggcgttggagggtactcatggaattagggtcggacggatggaaaccattgctattagtggatatgcatcaaatgatattataggcgtgtttaatgcaacaaatctgtctgatattgatgtggttttatttcaaataggcgttaacgacatccaaaggcaatcaggtagggaattgctacgtgataatgtaagacaaatgatggtaaaagccaacgacctcggaatcccgtgcatagtttctcttccaactcaattttataccagagatcaaagtgtaacgttaacaggagtacaggggtatgggcaaccatcagctaattatgagaagggcgccatatacagggcaatacttgcaaatgacgttactcgtcttaattttgagatcggtcagccactaaatgcaataaatacaggttctcttgatgatatggggccagttgttgctgaatatttaatgacaaatcaagatcccatggttatggataatattcaccctacatcatacggcagaatgttattgggtttgtctaatgctagagctatagcatcgcatatgtttggtaaaagaaccgatcctgttattaataatcaaatgcctgaatcatggggaaaaaatagctggtctgtaaatttggcaactagtgcgtcagtgacatcataccctgatggtaaaatagctctaagtggagttatatccaatactggctcaggaattacagaaaatggcaccatagtttgccatctgccgctaagcatctctccaaccaagagaatggtatttgcagtagcaaaagtagatgaaaaaggcaaccctatagggcaaggtaacattgttatagataataatggtgaaattaagatttatggtttctcgactggaaatatctgtcttgatggtgtaatttattag

SEQ ID NO: 3672 - protein, 860 aa, Proteus mirabilis
MSTIPTQNPVPSEAPRDLKYNSGKVDEFVTSNNHFYTDRFGKKHYTIDGINFLSKQAMLNYGYITKRSFESGNTIINPNDVLLWEDNGEYYRWDGELPKVVSAGSTPESAGGIGAGGWVSIGDAALRGEISQSTKNYNTFIDAVNSNTDSIIKSIFIAGRISPNDGGCGLYTKTGTGTPGDTDDGSFFVTQNGVRFDLVSDATIATFGGVDGGSFRSALDRLKTYVSNRDRVLKIKSNHEILMNFSPEIPSGYFNGFTLDVDENVTIATASDEAVKSPLVNLVRPVKFFFTGNNTSYLLRPTVGITNGEYKPLISGTPPKPPQITNANYTDNKSLFINIPEKENYVYTSFLNDWEFLSSSWPMGVFDTVSPASILEDSLSIPAPTEKFVCASFSKIKPSAEYFVSMYAGDNTNGISAITVEAEDKRWIYYENHFGEGYFIEGTVGGSFKEKKVSYLGGSTHGSQWIKNSITSVRIDTLKSFTILVNGIERIAVRETEGIIGRIGFGSYGADNNYMSLFYPYIIENRQYRSAKPINIAIVGDSITDASIGNGWAQFAQQALEGTHGIRVGRMETIAISGYASNDIIGVFNATNLSDIDVVLFQIGVNDIQRQSGRELLRDNVRQMMVKANDLGIPCIVSLPTQFYTRDQSVTLTGVQGYGQPSANYEKGAIYRAILANDVTRLNFEIGQPLNAINTGSLDDMGPVVAEYLMTNQDPMVMDNIHPTSYGRMLLGLSNARAIASHMFGKRTDPVINNQMPESWGKNSWSVNLATSASVTSYPDGKIALSGVISNTGSGITENGTIVCHLPLSISPTKRMVFAVAKVDEKGNPIGQGNIVIDNNGEIKIYGFSTGNICLDGVIY

SEQ ID NO: 3673 - DNA, 237 bp, Proteus mirabilis
atgaaaaatatttggtctgataacaatgctcctgaattaacacctgcaggctatgttaaagttgccctcacacacaatctacctgttttctcgtgtgtgtcacaggcgcaatacataaatagtctggccattaagttcgtaacggatttcgtactcgccagcaaaaatccgtctgacatccctggtttcaaactgaaacaactgttcatcccatacgtggatgagttaacagaatga

SEQ ID NO: 3674 - protein, 78 aa, Proteus mirabilis
MKNIWSDNNAPELTPAGYVKVALTHNLPVFSCVSQAQYINSLAIKFVTDFVLASKNPSDIPGFKLKQLFIPYVDELTE

SEQ ID NO: 3675 - DNA, 282 bp, Proteus mirabilis
atgaattacgatgaaataacgaaaatcactgcagaacgtattagcgactacatgactgaagcggttaatacagactctaaatctgttgcggaaatgtttcataacgctgcatggggagtgctatcattgtggtttgaactcgtcacaaaaatagatctggatatacataaaaagaacaggtatgcaagttatgattttagaagaaaaatcgaaatgcagcatgaagagtttcagaaaatgacagagcgtgagcaagtgcctttattgaaattgcctgaataa

SEQ ID NO: 3676 - protein, 93 aa, Proteus mirabilis
MNYDEITKITAERISDYMTEAVNTDSKSVAEMFHNAAWGVLSLWFELVTKIDLDIHKKNRYASYDFRRKIEMQHEEFQKMTEREQVPLLKLPE

SEQ ID NO: 3677 - DNA, 222 bp, Proteus mirabilis
atgttattttctaataaatgtttttttctaaaacatattgaacatatatgtagttttatttttcttgtgaaaaaatactcagataataaatcccaatttatattattgttggataattttaagtttatattttgcggttttttatttattaagaaattaaatagaaaaatatttgcttctttatttatagtgaataaatctagttcatggttaggaaactga

SEQ ID NO: 3678 - protein, 73 aa, Proteus mirabilis
MLFSNKCFFLKHIEHICSFIFLVKKYSDNKSQFILLLDNFKFIFCGFLFIKKLNRKIFASLFIVNKSSSWLGN

SEQ ID NO: 3679 - DNA, 345 bp, Pseudomonas nitroreducens
atgtcagatttcatcaccgtactgcgcgatacctgtcccgtacccgtgctggacgccaccaagtggaagcggatcgacggcgatccgcataccgtcaacctcaacgcatacgcctcggcggacggcagcaagctgatgggcacctggatctgcacgccgggcaagtgggaggtgaactacgaacgctgggagttctgccacttcctcgacggctactgcatcatcaccccggaaggcgagcaaccggtgcacctgagggcgggtgacgtgttcgtcatcgagccgggcctgcgtggtacctgggaggtagtggagacggtgcgcaagtacttcgtcttcgcctga

SEQ ID NO: 3680 - protein, 114 aa, Pseudomonas nitroreducens
MSDFITVLRDTCPVPVLDATKWKRIDGDPHTVNLNAYASADGSKLMGTWICTPGKWEVNYERWEFCHFLDGYCIITPEGEQPVHLRAGDVFVIEPGLRGTWEVVETVRKYFVFA

SEQ ID NO: 3681 - DNA, 3132 bp, Pseudomonas aeruginosa
atgaacccctcccgcccgttcatcctgcggccggtcgcgaccaccctgctgatggtggcgatcctgctctcgggcctgatcgcctaccgcttcctgccgatctcggcgttgccggaagtggactacccgaccatccaggtggtcaccctgtaccccggcgccagcccggagatcatgacctcgtcgatcaccgcgccgctggagaaccagctcgggcagattccggggctcaacgagatgtcttccagcagttccggcggcgcctcggtgatcaccctgcaattcagcctgcagagcaacctcgatgttgccgagcaggaggtccaggcggcgatcaacgccgcgcagagcctgctgcccaacgacctgccgaaccagccggtgttcagcaaggtgaacccggcggacgcaccgatcctgaccctggcggtgatgtccgacggcatgccgctgccgcagatccaggacctggtggatacccgcctggcacagaagatctcgcagatctccggggtcggcctggtcagcatcagcggcggccagcgcccggcggtgcgggtgcgcgccaacccgacggcgctggcggcggcggggctgagcctggaggacctgcgcagcacggtgaccagcaacaacctcaacggccccaagggcagcttcgacggcccgacccgtgcctcgaccctggacgccaacgaccagttgcgctcggccgacgcctaccgcgacctgatcatcgcctacaagaacggctcgccgctgcgcatccgcgacgtcgccagcgtcgaggacgacgccgagaacgtgcgcctggccgcctgggccaacaacctgccggcggtggtgctgaacatccagcgccagccgggggccaacgtgatcgaggtggtcgaccggatcaaggcgctgctgccgcagctgcaatcgaccctgccgggcaatctcgacgtgcaggtgctgaccgaccgcaccatcaccatccgcgcctcggtcaaggacgtgcagttcgagctggcgctggcggtggcgctggtggtgatggtcaccttcctgttcctgcgcaacgtctacgccaccctgattcccagcttcgccgtgccgctgtcgctgatcggtaccttcggcgtgatgtacctgtccggcttctcgatcaacaacctgaccctgatggcgctgaccatcgccaccggcttcgtggtcgacgacgcgatcgtcatggtggagaacatcgcccgctacctggagcagggcgactcgccgctggaagcggcgctcaagggctcgaagcagatcggcttcaccatcatctcgctgaccttctcgctgatcgccgtgctgatcccgctgctgttcatgggcgacgtcgccgggcggctgttccgcgagttcgccatcaccctggcggtggcgatcctgatttccggcttcgtctccctgacccttacgccgatgctcagcgccaagctgctgcgccacatcgacgaggaccagcagggccgcttcgcgcgcgccgcggggcgggtcatcgatggcctgatcgcacaatacgccaaggccctgcgggtggtcctgcggcaccagccgctgaccctgctggtggccatcgccaccctggcgctgaccgcgctgctctacctggccatgcccaagggcttcttcccggtgcaggacaccggggtgatccagggcgtcgccgaagcgccgcagtcgatctccttccaggccatgtccgagcgccagcgcgcccttgccgaggtggtgctgaaggacccggcggtggccagcctgtcctcctacatcggcgtcgacggcagcaacccgaccctcaacaccggccgcctgctgatcaacctcaagccgcacagcgagcgcgacgtcaccgccagcgaagtgatccagcgcctgcagcccgaactcgaccacctgcccgggatcaagctgtacatgcagccggtgcaggacctgaccatcgaggaccgggtcgcccgcacccagtaccagttcaccttgcaggacgccgacccggacgtgctcgccgagtgggtgccgaagctggtggcgcggctgcaggagttgccgcagctcgccgacgtcgccagcgactggcaggacaagggcttgcaggcctacctgaacatcgaccgcgacaccgcctcgcgcctcggcgtgaagctctccgacatcgacagcgtgctctacaacgccttcggccagcggctgatctcgaccatcttcacccaggccacccagtaccgcgtggtgctggaggtggcgccgcagttccagctcggcccgcaggccctggagcagctctacgtgccgtccagcgacggcacccaggtgcgcctgtcgagcctggcgaaggtggaggagcggcataccctgctggcgatcaaccatatcgcccagttcccctcggcgaccctgtcgttcaacctggccaagggttactccctgggcgaggcggtcgaggcgatccgtggcgtcgaggccagcctggagctgccgctgagcatgcagggcagcttccgcggcgcggcgctggccttcgaggcctcgctgtcgaacacgctgctgctgatcctcgcctcggtggtgaccatgtacatcgtcctgggcatcctctacgagagcttcatccatccggtgaccatcctctcgaccctgccctcggccggggtcggcgcgctgctggcgctgatgctggcggggcaggagatcggcatcgtggcgatcatcggcatcatcctgctgatcggcatcgtcaagaagaacgcgatcatgatgatcgacttcgccctcgacgccgagcgcaacgaaggcaagccgccccatgaggcgatctaccaggcctgcctgctgcgcttccggccgatcctgatgaccaccatggccgcgctgctcggcgcgctgccgctgatgctcgccggcggcgccggcgccgagctgcgccagccgctgggcatcaccatggtcggtggcctgctgctgagccaggtcctgaccctgttcaccaccccggtgatctatctctacttcgaccgcctggcccgtcgctgggcggcctggcgcaagcagcgcgggctggacctgaacaccgaggccgggttcgacggggacgccgggcgatga

SEQ ID NO: 3682 - protein, 1043 aa, Pseudomonas aeruginosa
MNPSRPFILRPVATTLLMVAILLSGLIAYRFLPISALPEVDYPTIQVVTLYPGASPEIMTSSITAPLENQLGQIPGLNEMSSSSSGGASVITLQFSLQSNLDVAEQEVQAAINAAQSLLPNDLPNQPVFSKVNPADAPILTLAVMSDGMPLPQIQDLVDTRLAQKISQISGVGLVSISGGQRPAVRVRANPTALAAAGLSLEDLRSTVTSNNLNGPKGSFDGPTRASTLDANDQLRSADAYRDLIIAYKNGSPLRIRDVASVEDDAENVRLAAWANNLPAVVLNIQRQPGANVIEVVDRIKALLPQLQSTLPGNLDVQVLTDRTITIRASVKDVQFELALAVALVVMVTFLFLRNVYATLIPSFAVPLSLIGTFGVMYLSGFSINNLTLMALTIATGFVVDDAIVMVENIARYLEQGDSPLEAALKGSKQIGFTIISLTFSLIAVLIPLLFMGDVAGRLFREFAITLAVAILISGFVSLTLTPMLSAKLLRHIDEDQQGRFARAAGRVIDGLIAQYAKALRVVLRHQPLTLLVAIATLALTALLYLAMPKGFFPVQDTGVIQGVAEAPQSISFQAMSERQRALAEVVLKDPAVASLSSYIGVDGSNPTLNTGRLLINLKPHSERDVTASEVIQRLQPELDHLPGIKLYMQPVQDLTIEDRVARTQYQFTLQDADPDVLAEWVPKLVARLQELPQLADVASDWQDKGLQAYLNIDRDTASRLGVKLSDIDSVLYNAFGQRLISTIFTQATQYRVVLEVAPQFQLGPQALEQLYVPSSDGTQVRLSSLAKVEERHTLLAINHIAQFPSATLSFNLAKGYSLGEAVEAIRGVEASLELPLSMQGSFRGAALAFEASLSNTLLLILASVVTMYIVLGILYESFIHPVTILSTLPSAGVGALLALMLAGQEIGIVAIIGIILLIGIVKKNAIMMIDFALDAERNEGKPPHEAIYQACLLRFRPILMTTMAALLGALPLMLAGGAGAELRQPLGITMVGGLLLSQVLTLFTTPVIYLYFDRLARRWAAWRKQRGLDLNTEAGFDGDAGR

SEQ ID NO: 3683 - DNA, 1281 bp, Pseudomonas aeruginosa
atgactccaacgaccggtaaatccaagttccgtaccctgcgcccgtggctgatcaccgccctggccttcgccgccgtgatcggcctggtgatgtggctggcggcgcccgcctcggcaccgtcctccgacgggcgacccggtcgcggcggcaagccgggcgccgcgctgcccaaggccaacgcgctcaccgtcggcgtggccagggtggagcagggcgacctggcgctgcatttcaacgcgcttggcaccgtcaccgccttcaacacggtgaacgtcaagccgcgggtcaacggcgagctggtcaaggtgctgttccaggaggggcaggaggtcaaggccggcgacctgctggcggtggtcgacccgcgcacctacaaggcggcgctggcccaggccgagggcacgctgatgcagaaccaggcgcaactgaagaacgccgagatcgacctgcagcgctacaaggggctgtatgccgaggactcgatcgccaagcagaccctggatacccaggaagcccaggtccgccagttgcagggcaccatccgtaccaaccagggccaggtcgacgacgcccgcctcaacctgaccttcaccgaggtccgcgcaccgatttccgggcgcctcggcctacgccaggtggacatcggcaacctggtcaccagcggcgataccacgccgctggtggtgatcacccaggtcaagccgatctcggtggtgttcagcctgccgcagcagcagatcggcaccgtcgtcgagcagatgaacggccccggcaagctgacggtcaccgcgctggaccgcaaccaggacaaggttctcgccgaaggcaccctgaccaccctggacaaccagatcgacaccaccaccggcacggtcaagctcaaggcgcgcttcgagaacgccgacggcaagctgttccccaaccagttcgtcaacgtgcgcctgctggcgcagaccctcaagggcgtgctgaccattccggccaacgccgtgcagcgcggcaccaacggtatctatgtctacgtggtcggcgccgacaacaaggtcagccagcgcagcgtcgccatcggcaccagcgagaacgagcgggtggtggtggaaagcggcctgaaggccggcgagcaggtggtggtggaaggcaccgaccgcctgcgcgacggtatggaagtgcgtgtcgccgaggcctccccgcaggtcctcgagggcgagccgcagaaaccgcagactggccgccccagcggcctccagggcgactcggtgggtagcgggagcgctgaatga

SEQ ID NO: 3684 - protein, 426 aa, Pseudomonas aeruginosa
MTPTTGKSKFRTLRPWLITALAFAAVIGLVMWLAAPASAPSSDGRPGRGGKPGAALPKANALTVGVARVEQGDLALHFNALGTVTAFNTVNVKPRVNGELVKVLFQEGQEVKAGDLLAVVDPRTYKAALAQAEGTLMQNQAQLKNAEIDLQRYKGLYAEDSIAKQTLDTQEAQVRQLQGTIRTNQGQVDDARLNLTFTEVRAPISGRLGLRQVDIGNLVTSGDTTPLVVITQVKPISVVFSLPQQQIGTVVEQMNGPGKLTVTALDRNQDKVLAEGTLTTLDNQIDTTTGTVKLKARFENADGKLFPNQFVNVRLLAQTLKGVLTIPANAVQRGTNGIYVYVVGADNKVSQRSVAIGTSENERVVVESGLKAGEQVVVEGTDRLRDGMEVRVAEASPQVLEGEPQKPQTGRPSGLQGDSVGSGSAE

SEQ ID NO: 3685 - DNA, 480 bp, Pseudomonas aeruginosa
gtgtcgctgctggtcatccacaatatcagcctgccgccgggacagttcggtaccggcaaggtccaggcgttcttccagaatcgcctggacccgaacgaacatccctatttcgaggagatccgccacctgacggtttccgcgcatttcctcatcgaacgcgacggcgccatcacccagttcgtctcctgtcacgaccgcgcctggcatgccggggtttcctgcttcgacggtcgcgaggcgtgcaacgacttctcccttggcatcgaactggaggggaccgacacggaaccgtacacggacgcgcagtacactgccctggtcgggctgacgcggctgttgcgtgcggccttcccggcgatcaccccggaacgcatccagggccactgcgatatcgccccggagcgcaagaccgatcccggcgaggctttcgactggtcgcgctaccgcgccggattgaccgattccaaggaggaaacatga

SEQ ID NO: 3686 - protein, 159 aa, Pseudomonas aeruginosa
MSLLVIHNISLPPGQFGTGKVQAFFQNRLDPNEHPYFEEIRHLTVSAHFLIERDGAITQFVSCHDRAWHAGVSCFDGREACNDFSLGIELEGTDTEPYTDAQYTALVGLTRLLRAAFPAITPERIQGHCDIAPERKTDPGEAFDWSRYRAGLTDSKEET

SEQ ID NO: 3687 - DNA, 375 bp, Pseudomonas fluorescens
atgaaaattctcatcgtggacgacttttccacgatgagacgcatcatcaagaacctcttgcgggacttgggcttcaccaataccgccgaggccgacgacggcaccacggcgctgccgatgctgcacagcggcaatttcgactttctcgtcaccgactggaacatgccgggcatgaccggcatcgatctgctgcgcgcggttcgcgccgacgagcgcctcaagcacctgccggtgctgatggtcaccgccgaggccaagcgcgaccagatcatcgaagcggcccaggccggggtcaacggctatgtggtcaaacccttcaccgctcaggtcctgaaggaaaagatcgagaagattttcgagcgggtcaacggctga

SEQ ID NO: 3688 - protein, 124 aa, Pseudomonas fluorescens
MKILIVDDFSTMRRIIKNLLRDLGFTNTAEADDGTTALPMLHSGNFDFLVTDWNMPGMTGIDLLRAVRADERLKHLPVLMVTAEAKRDQIIEAAQAGVNGYVVKPFTAQVLKEKIEKIFERVNG

SEQ ID NO: 3689 - DNA, 1131 bp, Pseudomonas aeruginosa
atggacctgaaagctgatgcgctcgaaaaactagtccagatagctcgctatggggctgtaggagatggcgaaaaggttcgagtccacacgatgcgcttgattcgtagcttacgagaggagggaaaccctttagctacgaggctccaagacgcagttttctctcagcgttttgatgaggctagcaccgcagtcatacgacgggtaaaagaaacagggatttctgcaccacctcctactgatttagactcaggaggagagttgttaaatattgaggatcctgtggcccttccagaagggtttatgcggtcgagggaaatcaaggggccattggaccttattgtaggtgagtttaaaaatctaaagaaattaagtgagtttggtataagtccaactagtaaggtgctttttacagggcctccgggtgttggaaaaacagtggcggctagatatctggctagtaagctaaaattgcctcttgtagttttggatctggcctctgttgttagtagttttttggggcgtactggtgtaaatattaagaaggcgcttgagtatgcatcctctcgtccatgtgtccttttgttagatgaaatagattcaatagctaagaaacgagatgatatttctgatgttggggagattaagcggttagtgactgtggttttgcaagaattagacttgtggcagtctaagggtatcttaattgctgctacaaatcactatcatttgttggatccagcggttcaacgccggtttgatagggtggtcgagtttaagcggcctggttttttagaattgcttgaagttggtgggctgctgattcgtcgtgaagagaaagtacctaaagcatggatagtgttcatggctaaaataatggctgatacatcgtttagtgattttcagcgtgaggtaaataatcttaggcgacactatttgattgaaggggaggtcggagctgaagaatatctaaggtctcagcttgagataatggtgaggccagaagatcgagctttcagaaaagagcttgctgtgcttctagtgaaggatggaagagcttcgcagcgctcagcgagtagggttactggagtttctagagatacattgcgtcatgctttaacagcggaggtttaa

SEQ ID NO: 3690 - protein, 376 aa, Pseudomonas aeruginosa
MDLKADALEKLVQIARYGAVGDGEKVRVHTMRLIRSLREEGNPLATRLQDAVFSQRFDEASTAVIRRVKETGISAPPPTDLDSGGELLNIEDPVALPEGFMRSREIKGPLDLIVGEFKNLKKLSEFGISPTSKVLFTGPPGVGKTVAARYLASKLKLPLVVLDLASVVSSFLGRTGVNIKKALEYASSRPCVLLLDEIDSIAKKRDDISDVGEIKRLVTVVLQELDLWQSKGILIAATNHYHLLDPAVQRRFDRVVEFKRPGFLELLEVGGLLIRREEKVPKAWIVFMAKIMADTSFSDFQREVNNLRRHYLIEGEVGAEEYLRSQLEIMVRPEDRAFRKELAVLLVKDGRASQRSASRVTGVSRDTLRHALTAEV

SEQ ID NO: 3691 - DNA, 582 bp, Pseudomonas aeruginosa
atgcggatcagtgagggtttgcaactgcgggtcaaggatctggatttcgatcacggcacgatcatcgtgcgggagggcaagggctccaaggatcgggccttgatgttacccgagagcttggcacccagcctgcgcgagcagctgtcgcgtgcacgggcatggtggctgaaggaccaggccgagggccgcagcggcgttgcgcttcccgacgcccttgagcggaagtatccgcgcgccgggcattcctggccgtggttctgggtttttgcgcagcacacgcattcgaccgatccacggagcggtgtcgtgcgtcgccatcacatgtatgaccagacctttcagcgcgccttcaaacgtgccgtagaacaagcaggcatcacgaagcccgccacaccgcacaccctccgccactcgttcgcgacggccttgctccgcagcggttacgacattcgaaccgtgcaggatctgctcggccattccgacgtctctacgacgatgatttacacgcatgtgctgaaagttggcggtgccggagtgcgctcaccgcttgatgcgctgccgcccctcactagtgagaggtag

SEQ ID NO: 3692 - protein, 193 aa, Pseudomonas aeruginosa
MRISEGLQLRVKDLDFDHGTIIVREGKGSKDRALMLPESLAPSLREQLSRARAWWLKDQAEGRSGVALPDALERKYPRAGHSWPWFWVFAQHTHSTDPRSGVVRRHHMYDQTFQRAFKRAVEQAGITKPATPHTLRHSFATALLRSGYDIRTVQDLLGHSDVSTTMIYTHVLKVGGAGVRSPLDALPPLTSER

SEQ ID NO: 3693 - DNA, 612 bp, Pseudomonas aeruginosa
gtggtgcaaggcacctgtatggctctccatcagttcgcagatcacttggttcacgagttcgaaaacaagtttgagtccgagaccattaatgatctgttcggaggcggttacgagatagtggcataccacggtggtcagttccacaagatctcagacgtggcttacgtctatgcagaggcagaagtcgacgccgatggcatgcttcaggtcgaactgccaaaattcctgctcaagtccacctatcacggtgatgacctcaaaatcaggagcatgggaattcactacgacgagatagatgataattgcacaacccaaaatgaccggacgttcaccattgcccccattacccgtcactatgaaacccacgttgaagaaggctgcgaggacatcgaactttcaggggagtttctttgctttgtgatcaaagtgaagcttccaactggcagcttcacgattccctttatcagaaagtacgatggtcctatgggctttgcggaaaaagccttcaccgccattgcacgtcggaaccatgtgtatttcttctactcggataccctcaggagggagctacaagatcacgtactcgagtacatgcgcttgctccactcctag

SEQ ID NO: 3694 - protein, 203 aa, Pseudomonas aeruginosa
MVQGTCMALHQFADHLVHEFENKFESETINDLFGGGYEIVAYHGGQFHKISDVAYVYAEAEVDADGMLQVELPKFLLKSTYHGDDLKIRSMGIHYDEIDDNCTTQNDRTFTIAPITRHYETHVEEGCEDIELSGEFLCFVIKVKLPTGSFTIPFIRKYDGPMGFAEKAFTAIARRNHVYFFYSDTLRRELQDHVLEYMRLLHS

SEQ ID NO: 3695 - DNA, 873 bp, Pseudomonas aeruginosa
atgaacgttctgatgattcatggaatcggtcaagagacttcgactaaggatgaactcctccagaagtggacagagtccatccactccagtcaactaggcttgctcgatggggcgttggtcgagatggcgtattacggtacgacgcttgccgactggacaaatggcaagacgaagaatgcagtcggtatgggcgtagagtccacggtggttgatgtcggtgatattgatgaattgaaattccttagcgccgtaatggaggagttcgccagcgaccatggtatcgaggaggctgagattgaggcctcgatagaaacggcggaaaatgatgtagtaccgatggataacttcatcgcaaggcgcctagtcggcttactgcgcgtggtcgagaagatttctccagccaaaggctcactccttcttcggataattaggcaggggtatacctacctttcttcacccggggcagcaaaggctgtcgatagcatcgtgcgaccattattacaaagaagccctcaggtgctgattacccactcgctcggaaccgttattgctttcaagttactgcgcgagatggaatcgaacggcactgaagttcagattccacttcttataaccatgggatcgccgctgggcctggacgcgctcaaggcgaaacttggggcgccgcggcgaaaaccagcctttgtggagcagtggatgaacttctatgacccatcggactttgtcgcgcttggaaagccgttgaataaggataatttcgcaagcaacatcgataacgatggcaccgttgataacaagaccttcaacgcccatggcattgttggctatctcccacacaagggcgtcatcgacacgcttaaacgcgttctatag

SEQ ID NO: 3696 - protein, 290 aa, Pseudomonas aeruginosa
MNVLMIHGIGQETSTKDELLQKWTESIHSSQLGLLDGALVEMAYYGTTLADWTNGKTKNAVGMGVESTVVDVGDIDELKFLSAVMEEFASDHGIEEAEIEASIETAENDVVPMDNFIARRLVGLLRVVEKISPAKGSLLLRIIRQGYTYLSSPGAAKAVDSIVRPLLQRSPQVLITHSLGTVIAFKLLREMESNGTEVQIPLLITMGSPLGLDALKAKLGAPRRKPAFVEQWMNFYDPSDFVALGKPLNKDNFASNIDNDGTVDNKTFNAHGIVGYLPHKGVIDTLKRVL

SEQ ID NO: 3697 - DNA, 1740 bp, Pseudomonas aeruginosa
atgaagctgtttttgaccatcggggtttcggaagcaccaccgctttcgcatttgccgggagcgattacagtcgctcgcgaaatgggtgactgggcacgaaagtccggatttgtcgcggaagtgattactgacgaaaataaaactccggtcacgattgcgcgtatccgtgaaacactgctcggaatgctttcgaccaacgacgaagtggagctttttattctgcacttcgccgggcatggatttcgatctggagcagaacaaaacgtttggctccctagcgattggcacaaggaaatgcgcgccatatctgtggagggactgaagagacaactctaccggcatggaataaagagcctgtcgatcttcggtgatgcctgccgatcattaccaacggacatcgatactgcggatattttcggtgaccctgtgctcccgagagggccatatgatgcagtggcccccattattgatcgcatcaacgcggttggggatggtcagcaagcgtacatgctgaaaggagatggagttgccccgcccaggtgcgttttttccactgttcttgtcgaagggctgtgcggtctcaaagacgaggcatttgacaagtataatccggattgcgtgattcccgagtcacttgcattgttctcgagggatcgattgaaggaaattggtgagacatacgatctgaaatgttctcccgattacgctaccggcatccctagggagcatgcgatttatttcaggcgcggtgagaatctagccgacctacccattcctcaatggcctgcgccaccttgccccctggttcacgcaccggataacaccggcgaagatttgcaggcaagtccccaccatattgagttccgagccttcaagcggcacttccgagacagcctgtcgctgcactactatcccgttacgctgggcatgaacctaactatccgcggcgcggtgccgaagaagatatggagcacatccccagttgaaaaatgcttgatcgatgctgatggagcaacctaccgagtacgaggcacggcagatggcgccatccaaatcctcgtcgaatttgacgatggcgtattcgcatcggccgtagtatatgagaacctcattacgctgataagtcgagacgaaaagggtgggataaattggacctgcatttctgaatttcctaaatccgagagggggctacgcacttctatcaatgtgatcgcggatcttcaggcgggcaatctctctgctgaccaagtggatgatatcgcggcaaaactgcgagaagcaaaacacatcgatccaaccttgggcgccatcgcgagctatttgtacgactacacgggagacatagatagcatacggcgtatggcgttctattattgcctgtacgctcaacccatgccgttcgacgtggcctttatggggctgctctcaaccaaagagcgccggggcggtattgtggcggaggtgccgccgattccagcaaggccgtggtcgcttgcaaatgataggttgcctggctgggttacgaaggcgaccgatggagaggaggggcgggttgcgggcctatggccttggctccgccagggttggcaattcatggaggatccagcgccgcaagaagaagcggctgcggaaggattgcgtgatgtcgctaaatttctgttgccgtcgcaattctcttcattcaaggaagagggggcgggaatactgatagataggtttaacatggaggcaagggaatga

SEQ ID NO: 3698 - protein, 579 aa, Pseudomonas aeruginosa
MKLFLTIGVSEAPPLSHLPGAITVAREMGDWARKSGFVAEVITDENKTPVTIARIRETLLGMLSTNDEVELFILHFAGHGFRSGAEQNVWLPSDWHKEMRAISVEGLKRQLYRHGIKSLSIFGDACRSLPTDIDTADIFGDPVLPRGPYDAVAPIIDRINAVGDGQQAYMLKGDGVAPPRCVFSTVLVEGLCGLKDEAFDKYNPDCVIPESLALFSRDRLKEIGETYDLKCSPDYATGIPREHAIYFRRGENLADLPIPQWPAPPCPLVHAPDNTGEDLQASPHHIEFRAFKRHFRDSLSLHYYPVTLGMNLTIRGAVPKKIWSTSPVEKCLIDADGATYRVRGTADGAIQILVEFDDGVFASAVVYENLITLISRDEKGGINWTCISEFPKSERGLRTSINVIADLQAGNLSADQVDDIAAKLREAKHIDPTLGAIASYLYDYTGDIDSIRRMAFYYCLYAQPMPFDVAFMGLLSTKERRGGIVAEVPPIPARPWSLANDRLPGWVTKATDGEEGRVAGLWPWLRQGWQFMEDPAPQEEAAAEGLRDVAKFLLPSQFSSFKEEGAGILIDRFNMEARE

SEQ ID NO: 3699 - DNA, 189 bp, Pseudomonas aeruginosa
atggaacgagaactgagcttcaatgagtggctggacgagggcgagcggcgcgaggcgctgcgcgacatttaccatgaggaccagataggccctggaagtgatttcaccgaatgggccaggatcatctaccggattcgtaaggagcccgccgagcgtaccaagtgcccgcgccgctggccgtatgtgtga

SEQ ID NO: 3700 - protein, 62 aa, Pseudomonas aeruginosa
MERELSFNEWLDEGERREALRDIYHEDQIGPGSDFTEWARIIYRIRKEPAERTKCPRRWPYV

SEQ ID NO: 3701 - DNA, 1245 bp, Pseudomonas aeruginosa
atggccgtggacgacaccgcaccacgagccctacgccaaggccccatcgcactggcagaactgttcgatgctgcgctgaaagaccttgcgcccaagcccgcccccagcgcacctgcgtctacacctgcacagtcgcccacgcccacctccggcgatgctttcctgttcagtggcaaccggcacgagacggtgccacgcaagttgttcctcgaccgccgcctgacgccgctggaacgaaacgcctggcaagtgttccgactgatgctcaacgacgatggcgtgaccgcatttcccacctacgagcagttgcgcccctggctagcgtccatgccctgcgcaggccaggcctcgcatgaaaccgtggcacgggcgctgacactgatgcgcctgacccgctggctgagcctggttcggcgacggcgcgaccccaagaccggccgcatcctcggcaatctgtacgtgctgcacgacgaacccctgacaccgttcgaggccatgcagctcgacccggactacctgcaactcgtcagccaggcgctcggccattctgccaaggccgtgcagatcgtgggcctgcacacgctcaaggaaatcggcgaagacccattactggccggacgcaccctcccgtcacggttgcaggtgatggccgaacgtctcgccaaccagaaccccacggcctgcgaaagttatccacaggaagacgccattcacgattccgaagaaggggctccgagccttcttcggaatcgtgaacgacccgctacggattccgaagcagggctgaaacccgcgccagacgtctctcttcggaatccgaagcaggcccgtacagtacgtagtagttgtattaatgaaatacgtactactgcgcaggcgcgcgcgctgggcgatctgcaatggcccaagcgctttgcacaactgaaggcggaacagcaggcgggtgccaaggtggcattgcagcaagttgatccctcgctgaggcaggacgtgctggacgaatgggccgcgcgttgtagcaaccccggcatccgcaatcccgcagggtatctgttcggcatcatccagcgggccatccacggtgagttcaatgcctgggcaaagaaagacccgccaccggcacccactcaaccaaacgaacggccaccacccgcaccgccgacccaaacgcagggtaagccggtgccaccagaagtcgccaggcagcacatcgagcggctgcgaaatctgctcgccagcaagtga

SEQ ID NO: 3702 - protein, 414 aa, Pseudomonas aeruginosa
MAVDDTAPRALRQGPIALAELFDAALKDLAPKPAPSAPASTPAQSPTPTSGDAFLFSGNRHETVPRKLFLDRRLTPLERNAWQVFRLMLNDDGVTAFPTYEQLRPWLASMPCAGQASHETVARALTLMRLTRWLSLVRRRRDPKTGRILGNLYVLHDEPLTPFEAMQLDPDYLQLVSQALGHSAKAVQIVGLHTLKEIGEDPLLAGRTLPSRLQVMAERLANQNPTACESYPQEDAIHDSEEGAPSLLRNRERPATDSEAGLKPAPDVSLRNPKQARTVRSSCINEIRTTAQARALGDLQWPKRFAQLKAEQQAGAKVALQQVDPSLRQDVLDEWAARCSNPGIRNPAGYLFGIIQRAIHGEFNAWAKKDPPPAPTQPNERPPPAPPTQTQGKPVPPEVARQHIERLRNLLASK

SEQ ID NO: 3703 - DNA, 1629 bp, Pseudomonas aeruginosa
atgactgagatcacttcccagcagatggccggcaaactgcttgcgtccgggttcgagcgcagcggcccgtcagcaacgaccttgagcgacccgatcgccgacacgcccatggtcgtgacgctcgaccaattgcgcccctacgaccacgacccgcgcaagaagcgcaatccggtgtacgaggaaatcaaggcatccatccgcgagcgtggtctggacgcggctccggccatcacccggcggcccggcgacgatcactacatcatccgtaatggcggcaacacgcgactggcaatcctgcgcgaactctggtcggagaccaaggacgaacgattttttcgggtctcatgcctgttccgcccgtggcccgagcgtggcgagatcgtcgcgctcaccgggcatcttgcggaaaacgaactgcgcggtggcctcaccttcatcgagcgggctttgggcgtcgagaaagcgcgcgaattctacgaactggaaagcggctccaccctgagccagtccgagctggcccgccgcctggccgccgacggataccccgtgcagcagtcgcacatcagccggatggccgacgcagtacgctacctgctgcccgcaatcccgaccgtgctctacgccggcctggggcgtcaccaggtcgagcggttgtcggtcatgcgcaaggcctgcgagcgcacctgggcgcattacgccaaaggccgctcactggttcaggacttcgacgagttctttcaggaagtgctgtcgcaattcgatgtccaggccgacgagttctctgcgcagcgcatacaggacgagctgatcggccagatgaccgaattgctgggtgttgattacgacgtgctcgctctggacatgaccgaatccgagagccgccagcgcgccttggtcagcgagccgacgccgccctcgacgccgcctgccctgccagagccagaggccattgcgcgcccacctgccgatactgcgccacctgctgcgaggccgacggcaactccctcgacgggcgagagcgacgcggaagccagtcattcggacgcggtcagcccggcgacagatggcgaccggcttcaggagcacatcgtctcgccggcgccgacaacggaacggcttgagtccatccagcgcatggtcgccgaccagttgggcgatgcactgccgcacgacttctcggcgaatgtcttgcagtccatcccggtgcaggctggtgggctctatccgatctcggatgtctggtacatcgcccccggcctggacacacccgagcacctgcgcatccacgtcgcgcagtttgcccgcgagattgcgggcgaggcacacctgggcgagtgcatcgatgaccgtccagaaggcatcggcttcgcctgccgtgcccatacctcaagcctggcgccaaagggccgtgccgtccatgcgctgttggcttgcctggccggtcagcagcccgccgacgtcggtctggacaacgggcaactcgtcatcgacctgccggcgctgctgcacggccagggcgacgtaacccgacgattgagcgacaccgcgctggtcaagctgttccgcctgctgcgactggcccgccgcctgctcgatctcgaagccggcgctgcggactctggaacctaa

SEQ ID NO: 3704 - protein, 542 aa, Pseudomonas aeruginosa
MTEITSQQMAGKLLASGFERSGPSATTLSDPIADTPMVVTLDQLRPYDHDPRKKRNPVYEEIKASIRERGLDAAPAITRRPGDDHYIIRNGGNTRLAILRELWSETKDERFFRVSCLFRPWPERGEIVALTGHLAENELRGGLTFIERALGVEKAREFYELESGSTLSQSELARRLAADGYPVQQSHISRMADAVRYLLPAIPTVLYAGLGRHQVERLSVMRKACERTWAHYAKGRSLVQDFDEFFQEVLSQFDVQADEFSAQRIQDELIGQMTELLGVDYDVLALDMTESESRQRALVSEPTPPSTPPALPEPEAIARPPADTAPPAARPTATPSTGESDAEASHSDAVSPATDGDRLQEHIVSPAPTTERLESIQRMVADQLGDALPHDFSANVLQSIPVQAGGLYPISDVWYIAPGLDTPEHLRIHVAQFAREIAGEAHLGECIDDRPEGIGFACRAHTSSLAPKGRAVHALLACLAGQQPADVGLDNGQLVIDLPALLHGQGDVTRRLSDTALVKLFRLLRLARRLLDLEAGAADSGT

SEQ ID NO: 3705 - DNA, 891 bp, Pseudomonas aeruginosa
atggaactgcgacaccttcgctgctttgtggctctcgcagaagagctgcacttcacacgggccgcagagcgcctgcatatcgaacagccacccttgtcccgcgccatcaaagagcttgaggatgatctgggtgtggtgctcttcgagcgcaaccgccgaggcacggtactgaccgaggcgggagcaacgttcctgcaagatgtgcgcagagtgttcgccgtcctcaaacaggctcaggagaacgtacaggcggtcgctgcgggcctgagcggaagccttcgcattgccgtatccgacggtgcaatcgatcccaggctgtcggccctcctggcccgctgccgcgaggaagagccggagatcgagattcgcctgtccgaagtgccgttggccgatcagttgcgtggtttgcgctcaggtgacttctcgatcgggtttgcgcacacggcggaagtcggcgacgacatcgttaccgagccactctggcacgatccgctggtggtagccgtgcccgcccggcatcctttactttcacacaaggctgttccgctgcatcagcttgcgatctacccactggtcttatgtgacccgcaggcatgcgaaggctaccatcgtgaactggcgcggctgctgcggcctttggagcgtccacccgacgtcgccgagcacgtgtcgtcattggacatgatgctcaccctggtcggtgccggctacggggtaggcttcatcaccgaaaccaggatcgcggcgagcctgcgccccgacgtggtgatccgccctctggccatggattccgcagtcatcacgacctacttgctacggcccgccggcgaggactcgccggtgtcggtggaacgattcatcgcgcgcctgcgcgcgcactcggacgattga

SEQ ID NO: 3706 - protein, 296 aa, Pseudomonas aeruginosa
MELRHLRCFVALAEELHFTRAAERLHIEQPPLSRAIKELEDDLGVVLFERNRRGTVLTEAGATFLQDVRRVFAVLKQAQENVQAVAAGLSGSLRIAVSDGAIDPRLSALLARCREEEPEIEIRLSEVPLADQLRGLRSGDFSIGFAHTAEVGDDIVTEPLWHDPLVVAVPARHPLLSHKAVPLHQLAIYPLVLCDPQACEGYHRELARLLRPLERPPDVAEHVSSLDMMLTLVGAGYGVGFITETRIAASLRPDVVIRPLAMDSAVITTYLLRPAGEDSPVSVERFIARLRAHSDD

SEQ ID NO: 3707 - DNA, 3222 bp, Pseudomonas aeruginosa
atgaagctgatccacaacaccggttcgcagcgcgtcatcgatttgatccgccctcatctcaagcgtggcaatcagctcggttgcgtgacgccttcgttctctctttacgccttcgctgaagtccgagaggctctgtccaccctggaacgggtccaattgattgtgcctcccgacgatgcggtgcttgaactccttggttcggaaggtgaccgtgccgcgcgcaatcgtctgcaggcacgctggttggccaatcagtgcgcgaagtggatcagtgagaaggttgatctgcggcgggcatcaagatcagtgcctcaaggtgcagcagtcatgcgcaggctcgatggaacgcctgaacaagtggtgctggggtcgttcgccttcagcacatcaggccttggcctgacgccaggcaacccattgagcttgattcaggcatcggaatctgctgacgaggccgcgcagcttgcccaatggttcgatcaccagtgggcaaatctgcaaagcgtttctgccaccgattcggaggacaagagcaaagggcgtgatgccgttctcgaagcgctgcgagcccttggtgagcaccgcgacccgttcaccatctacacattgatgttgcatcacctgtttcgtgacagtggcgacgagatggatgaagagcgcatcgtcaagtccgccaccggcattcgcaataccgtggtgtggaagaagctcttcaagttccagcgcgacggcgtggtgggcgcgatcgacaaactcaaccgctttggcggctgcatcattgccgacagtgtcggcttaggcaaaaccttcgaagccctggccatcatcaagtaccacgaactgcgcaacgaccgcgtgctggtgctggcgcccaagcgcctgcgcgataactggacgctttacaaggccaacgacaagcgcaacgtccttgcaggcgaccgtttcaactacgacgtcctcaaccacaccgacctgtcacgcgatggcggcacatccggcgatatcgatctgtcgcatgtgaattggggcaactacgacctggtggtgatcgacgaatcgcacaacttccgcaacaaggccacccacaaaggcaaggagtcgcgctacgaccgcctgatgcggcggatcatccgcgaaggcgtcaagacccgcgtgctgatgctctcggccacaccggtcaacaaccgcctggccgacctgcgcaaccagattgcctttgccaccgaaggcgatgacaccgccctgatggagcacggcatcgccagcatcgaggccacgacccgcaaggcgcaggcgcagttcaaccgctggctggcgctggacgaagctgaaaaaacaccgacccggctggtggagatgctgggtttcgactacttcaccttgctggaccatctcaccatcgcccgctctcggcggcacgtggagaaatactacggcaccagcgagacaggccgcttcccggatcgcctgccaccgatcaacatcaaggccgacgttgaccttgcgggcgagttccgcgccatccgcgacatcaatcaggaaatccgccgactcaccttggccagttatgcgccgctgcgctatgtcctgccccacaaacaggaagcctacgacgccaagtacagcacgcagattcgcggcggagaaagcttcttccgccaagcggaccgcgaagaaagcctgattcatctcctgcgtgtgaacgtgctcaaacgcatggaaagcgccgtttcttccttcaccctgacactgcaaaggcagctcaaggacgtggaggccacgctgggccgcattgagtcgcatgccgatgcactggaggaaatcgacattgccgacgtcgatatcgacgaccccgcgttcgagtccttgttggtcgggcgcaaagtcaaggtgctgctggatgacgtggatctgatccgctggaagcaggatctgctggaagaccgcaaccgcctggcaaccctgctggcggctgccaaacaaatcgatgccgcccgcgacgccaagctgaccgcactgcgcgacttgatccaacgcaagtgccacgatccgatcaaccccggcaaccgcaagatcatcgtgttcactgctttttccgatacggcgcactatctctatgcgcagctcgctccctgggccaaaagcacgttgggtgtcgatgctgcgctggtcaccgggagcgccggcatacagaccaccttgcccggtctgcgcaaaggcatgagcgatgtgctgtcggcatttgcgccgcgcgccaaggagcgcccggccgaactggccgctgaaggcgagattgacttgttgatcgccaccgactgcatttccgaagggcagaacctgcaagactgcgactggctgatcaactacgacatccactggaacccggtgcgcatcatccagcgcttcggacgcatcgaccgcatcggctcgcccaaccagcgcatccagctcgtgaacttctggcccaacatggagttggaggaatacatcaacctggaacagcgcgtcagcggtcgcatggtgctgctcgatgtctcggccacaggggaagaaaacctgatcgagcaacaatccggcaacgccatgaacgatctggaataccggcgcaagcagttgctcaaattgcaggacaccgtcatcgacatggaagacctgtccaccggcgtgtcgatcaccgacctcaccctgaccgacttccgcatcgatctggcgcaatatctgaaggcgcaccccggcaagctcgacacccagccccttggagcctatgcggtgaccacgacactggatgccgatattccccccggcgtgatcttctgcttgcaagcctgcggcccggcagcaaagcccgccgcatcgtccgactacccgctcgcgccgcactacctggtgcatgtcggcgatgacggaaccgtattgctgccttacccccaggccaaacgcatcctggaccgcctcaagcgcctttcgctggggcgcgaacgacctgatgaaagtgcctgcgcgcggttcgacaaggccaccaaagggggcgaagacatgcgccatgcccagaagctgctcgcggcggcagtggcatccgtcgccggcaagcacgaggaacgggccgtggccagtctattcacgcccggcggcacgcacgccatgaaaggcgaattcgccggcagcggtgattttgaggtggtggcattcctggtggtgctgccggaaagggaggcagcatga

SEQ ID NO: 3708 - protein, 1073 aa, Pseudomonas aeruginosa
MKLIHNTGSQRVIDLIRPHLKRGNQLGCVTPSFSLYAFAEVREALSTLERVQLIVPPDDAVLELLGSEGDRAARNRLQARWLANQCAKWISEKVDLRRASRSVPQGAAVMRRLDGTPEQVVLGSFAFSTSGLGLTPGNPLSLIQASESADEAAQLAQWFDHQWANLQSVSATDSEDKSKGRDAVLEALRALGEHRDPFTIYTLMLHHLFRDSGDEMDEERIVKSATGIRNTVVWKKLFKFQRDGVVGAIDKLNRFGGCIIADSVGLGKTFEALAIIKYHELRNDRVLVLAPKRLRDNWTLYKANDKRNVLAGDRFNYDVLNHTDLSRDGGTSGDIDLSHVNWGNYDLVVIDESHNFRNKATHKGKESRYDRLMRRIIREGVKTRVLMLSATPVNNRLADLRNQIAFATEGDDTALMEHGIASIEATTRKAQAQFNRWLALDEAEKTPTRLVEMLGFDYFTLLDHLTIARSRRHVEKYYGTSETGRFPDRLPPINIKADVDLAGEFRAIRDINQEIRRLTLASYAPLRYVLPHKQEAYDAKYSTQIRGGESFFRQADREESLIHLLRVNVLKRMESAVSSFTLTLQRQLKDVEATLGRIESHADALEEIDIADVDIDDPAFESLLVGRKVKVLLDDVDLIRWKQDLLEDRNRLATLLAAAKQIDAARDAKLTALRDLIQRKCHDPINPGNRKIIVFTAFSDTAHYLYAQLAPWAKSTLGVDAALVTGSAGIQTTLPGLRKGMSDVLSAFAPRAKERPAELAAEGEIDLLIATDCISEGQNLQDCDWLINYDIHWNPVRIIQRFGRIDRIGSPNQRIQLVNFWPNMELEEYINLEQRVSGRMVLLDVSATGEENLIEQQSGNAMNDLEYRRKQLLKLQDTVIDMEDLSTGVSITDLTLTDFRIDLAQYLKAHPGKLDTQPLGAYAVTTTLDADIPPGVIFCLQACGPAAKPAASSDYPLAPHYLVHVGDDGTVLLPYPQAKRILDRLKRLSLGRERPDESACARFDKATKGGEDMRHAQKLLAAAVASVAGKHEERAVASLFTPGGTHAMKGEFAGSGDFEVVAFLVVLPEREAA

SEQ ID NO: 3709 - DNA, 807 bp, Pseudomonas aeruginosa
atgacggtcatcgacgcgcacgccgttatccaggcattgggcctgcccgacagttgccgggtagagcagcgcgtccccaagaaactgctgttggagaatggtgtgcctacggcgtccgacaaacgcttgatcaccgatgccattgaagaaatccagtggttcgccgcgctcaagcccaacaccatcggcgtgcctgactaccgggacgcgcagcgcgagtaccttgagatcgcagtgctggttgtgaccttgcggggtaccgtcaaacccgccagttgctcgcggctggctgaactggtgcaccgtgcggtgccttatccggtgctgttgctgttggttgaaggacaaacggtggccttgtccctggcccacaagcgctgggcgcagaacgaggccagcaaagtggtgctcgacggcagccttacgttggccttgctatcccacgcaaccgccaatgccacggcgaccgatgccgcagcacgctccgaagccgagcatgccttcgtgcaatccctgtcgattgcacaccagccccagacctcgttgcacgccctctatcaaggctggatggattgcgtgcaggccctgcaggctgcgcggcggacaggaaactaccgaaccacggcaacgccggagcaggcggcggcgcgtcggcaggcgctggccgattgcgagcggcttgaaggcgagatcagccgcctgcgggcacaaggcgcgaaggaaaagcagatggcacgccaagtcgaaatcaatctccaattaaaagcactgttggccgagcgtcagcagatcgctcaatatctctga

SEQ ID NO: 3710 - protein, 268 aa, Pseudomonas aeruginosa
MTVIDAHAVIQALGLPDSCRVEQRVPKKLLLENGVPTASDKRLITDAIEEIQWFAALKPNTIGVPDYRDAQREYLEIAVLVVTLRGTVKPASCSRLAELVHRAVPYPVLLLLVEGQTVALSLAHKRWAQNEASKVVLDGSLTLALLSHATANATATDAAARSEAEHAFVQSLSIAHQPQTSLHALYQGWMDCVQALQAARRTGNYRTTATPEQAAARRQALADCERLEGEISRLRAQGAKEKQMARQVEINLQLKALLAERQQIAQYL

SEQ ID NO: 3711 - DNA, 1233 bp, Pseudomonas aeruginosa
gtgaaggccacagaaaccaacctgctcaagttcttgaagaaatctccgcagttcgtcattcccatctatcagcgcaattactcctggacggaagcccagtgccaacagctgtggtcagatttgctgaggtcgggtcgtgacgagcagattaatggccatttcatcggttccatcgtttatgtggagcgtggtctgtccaccgtcaccacccaggaagcactgctggtcatcgacggacaacaacgtcttaccacgtgcaccttgttgattgcagcactggccaagcactttgaagccaatcagctgcctgaattgctggacagtttctccgcgcgaaagctgcacaattactacctgctcaatcctgaagaggacggcgagcgccactacaaactcattctgtcggaaactgataagaagacgttgttggccatcatcaaatccgcaccgatgcctgcggagatcagtacccgcatagagcagaactacacgctctttcaggcgctgataaacaagcatcaggacgagctcaaagccatctgccaagggttggccaaattgctcatcgtcgaggtgtcgctcgatcgcactcaggacaatcctcagctcatcttcgagagcatgaattccaccggccttgagctcagccaggccgatctgattcgcaactacatcctgatgggattggagccaaagctccagactgagctttaccagagttactggcggccgatggaaaaatcgttcggccagaaggcctacgtgacgcacttcgatccctttatgcgtcactatctcactgccaaaacaggtgagattcccaacgtgcgcgaagtgtatgctgccttcaaggctttcgctcgcgccagccagcttgataccactgcgcttgttgctgatatccacgcctatgccagctactactgcgccatggcgcttggtgcggaaacggagtcgaaactaaaagaagcttttcacgatctgcgtgagctgaaggtagacgtagcctatcccttcctgcttgatgtctatcacgactacaagcaagcacggttggctgcggacgaattggtgagcatcgttcgcttggttgaaagctacgtgtttcgccgcgccatctgcgccattcccaccaactcgctgaacaagaccttcccaggcctgagccggacactgaaaaaagaccgttatctggagggctctgttgcaaagattggcggcagtcagaggtag

SEQ ID NO: 3712 - protein, 410 aa, Pseudomonas aeruginosa
MKATETNLLKFLKKSPQFVIPIYQRNYSWTEAQCQQLWSDLLRSGRDEQINGHFIGSIVYVERGLSTVTTQEALLVIDGQQRLTTCTLLIAALAKHFEANQLPELLDSFSARKLHNYYLLNPEEDGERHYKLILSETDKKTLLAIIKSAPMPAEISTRIEQNYTLFQALINKHQDELKAICQGLAKLLIVEVSLDRTQDNPQLIFESMNSTGLELSQADLIRNYILMGLEPKLQTELYQSYWRPMEKSFGQKAYVTHFDPFMRHYLTAKTGEIPNVREVYAAFKAFARASQLDTTALVADIHAYASYYCAMALGAETESKLKEAFHDLRELKVDVAYPFLLDVYHDYKQARLAADELVSIVRLVESYVFRRAICAIPTNSLNKTFPGLSRTLKKDRYLEGSVAKIGGSQR

SEQ ID NO: 3713 - DNA, 312 bp, Pseudomonas aeruginosa
atggcagcccaagcactttccatcagccaaacaccgagcctgcgcttctcgccaggccaggtggtcatgacctgcggcgtcgatgacctggtccgacagggccggctcaacccgactccctacctgcgtcgccacctcggcggcgattggggcgacctcgacgacagcgacaggcggcagaacgatgccgcgctgaagtccggcgaggatcgtctgttttcttcttacgaggtcacacccggcctgaagatttggatcatcaccgaatgggatcgcagcgtcaccacgctgttgctgcccaacgagtactga

SEQ ID NO: 3714 - protein, 103 aa, Pseudomonas aeruginosa
MAAQALSISQTPSLRFSPGQVVMTCGVDDLVRQGRLNPTPYLRRHLGGDWGDLDDSDRRQNDAALKSGEDRLFSSYEVTPGLKIWIITEWDRSVTTLLLPNEY

SEQ ID NO: 3715 - DNA, 642 bp, Pseudomonas aeruginosa
atgaatgccgcgcagtctccccgtcgcccgatcaccgccatgatgttgcagagcctgatgtggctctggctgatcggcctcagcgttttcgtcgctctcggctaccaggcggtgaacgagcaggtcgaccaggagctgcttaattcccgcctgcaacgtctcgaagcgcaggcggtaggtctggccgaggccattgaggccatccagcagcgtccaaccgtcgcaacggcggcagaccttaaagacacccgcgaactcctggaagcacgcgctgcccaggtcgagacaacgctgagcggctatgccgctgctgacgaccttcaggcgctgcgcacggaggtcgagcaaatcaagacgcgccagaccgttgcgcgcaccgcagcacccgctcagccgcgcacaccgcgcaggcctaacgccaagccggaaccgctgccactgccgttccgcatcgtcggcgccgaacttcgcgccggccagcgcagcctgtccgtcgcgccgagcagcggggacttcacgcccgaccagcttgaggtactgctgcccggcgattcgctcggcccatggcgctttcaggcggtcgagggcaactccgccgtgtttcaggccggcgaccagacccgtcgcgtggcgatcccttga

SEQ ID NO: 3716 - protein, 213 aa, Pseudomonas aeruginosa
MNAAQSPRRPITAMMLQSLMWLWLIGLSVFVALGYQAVNEQVDQELLNSRLQRLEAQAVGLAEAIEAIQQRPTVATAADLKDTRELLEARAAQVETTLSGYAAADDLQALRTEVEQIKTRQTVARTAAPAQPRTPRRPNAKPEPLPLPFRIVGAELRAGQRSLSVAPSSGDFTPDQLEVLLPGDSLGPWRFQAVEGNSAVFQAGDQTRRVAIP

SEQ ID NO: 3717 - DNA, 1371 bp, Pseudomonas aeruginosa
atggggctaaagaccgagctgaaagctctggtggatgagttagatcgcgtgcacaagggggccactccatggtccgaagaggccggcattcctgatttcatcaccgctgagaacggtatgcagcggtacttcaccaagaaggcaagagaggcgcttgggcagttctccagcaccctccatcagaatcggactctgaactcagtgaagatcgaacccgaggcctttcagaaaattgcccgccaagccgttgccgatatgcacgcctcgggtgagctttcggggtttgatgaatgcgatcagggcgggctgcttcccaaactgaaattgcttatcgaggaacgactcgcaagcatcaccaacgaacacacgcactatttccctgcctggaccctgggcatggagaggaagtctccgttctccctcggcccggtgacattcttgaataggtcggactggatagattctgtagatttccctcagcagggaaaggatcactatctgaaccaaccagaggcgaaccaccgctggaaggaaattctcaaggatgccttgcagaaggccaatgatggctcctccatcgaagggctggccaacgccgtctacagtgcgatagtcggatgtccagccttggtcaaggtaacagtccgtggctatgagcgtgaattctcacgcaagctggcgagattggttggcaagacagcgcttgacgctatctctctgggctttggagcccccgagtgcttcctgcaacaggcgcttcaagacgagcgcctaccgcctgcgggtagcgatcgcctggtcgaaaccaaagggtttctgtggttgcctggaagctcgctcgggaagcggattccttcgcaacctcctgaacgagtaaggcaagcgttggatgacatgacatctattcttccggcattcgcggcgatccttgatgggctgcttgatccatcgagtcacccgcatcccaagcttgccaatcgatgggctactgcgctggattggttcggcgaaggaaaccgtgagttaagcgatgctatagcgttggcgaagctcggaacctgcctggatgtactgagctgcggcggcaggaacggcggtatctgtaaaatggtcgtgcatctgaccggaacgagtgacgacacgcaggtaatacgaggcaaccgtcctcgcacgctgaagcaattggtcaaggacatctatgaccatggtcgatcgcagatactgcatggcacgcactacgacagactggaatcattcgcggcagagcggcagtatgcagcctacctcgcacggatcgtattgattgagtgcgcagtgcgactacagcgttatggtggtccagatgatgacggggcgttcagcacaatatag

SEQ ID NO: 3718 - protein, 456 aa, Pseudomonas aeruginosa
MGLKTELKALVDELDRVHKGATPWSEEAGIPDFITAENGMQRYFTKKAREALGQFSSTLHQNRTLNSVKIEPEAFQKIARQAVADMHASGELSGFDECDQGGLLPKLKLLIEERLASITNEHTHYFPAWTLGMERKSPFSLGPVTFLNRSDWIDSVDFPQQGKDHYLNQPEANHRWKEILKDALQKANDGSSIEGLANAVYSAIVGCPALVKVTVRGYEREFSRKLARLVGKTALDAISLGFGAPECFLQQALQDERLPPAGSDRLVETKGFLWLPGSSLGKRIPSQPPERVRQALDDMTSILPAFAAILDGLLDPSSHPHPKLANRWATALDWFGEGNRELSDAIALAKLGTCLDVLSCGGRNGGICKMVVHLTGTSDDTQVIRGNRPRTLKQLVKDIYDHGRSQILHGTHYDRLESFAAERQYAAYLARIVLIECAVRLQRYGGPDDDGAFSTI

SEQ ID NO: 3719 - DNA, 753 bp, Pseudomonas aeruginosa
gtgaaaccgaaacgtccttccattcctatgccggtacaggcgctccgccatcggcgctggccctggttcgtggcgattggactgatcacactgctgttgatctggctcgtgtcccgcgcacccagtgaacccgcgttgcaggctcccgcgcaggtcagcaccgcgcaggtggccgggcctccctggcagatgggcaacgcgcagggccgtttcacgctgacgctctatgccgacctcgaatgtccgttctgccgagcgtacttcccgcagctcaagcgctgggtgggtgccaacgcggacgtagctctgcaatggcaccaccagccgctggccgcgcacgaaccggccgcctccgccgaggcacgcctggccgagtgcgccgccgaaagtggcgggcatgctgcgttctggcaggccattgaatggatctatgcgcacacacgtagcgacggcttgggcttgcccgagggtctgcgctatcccggcctcaacccagccgtcgagcagtgtttggccagcgagcgaccggatagggtgattcgcgctcaggccgaggaagccaccaagggcggcgtgaccgcgacgccttcgattcgtctgcaggatcgccaaaccgatcaggcagtcgtgttgcaggggccgatcgaaggcgatgcactgctgtcggccatggacatgctggtggctgaggatgccgccgctccaccgaccaccgaaatgcctgccgacgttgtcggcgacatgcccaggtag

SEQ ID NO: 3720 - protein, 250 aa, Pseudomonas aeruginosa
MKPKRPSIPMPVQALRHRRWPWFVAIGLITLLLIWLVSRAPSEPALQAPAQVSTAQVAGPPWQMGNAQGRFTLTLYADLECPFCRAYFPQLKRWVGANADVALQWHHQPLAAHEPAASAEARLAECAAESGGHAAFWQAIEWIYAHTRSDGLGLPEGLRYPGLNPAVEQCLASERPDRVIRAQAEEATKGGVTATPSIRLQDRQTDQAVVLQGPIEGDALLSAMDMLVAEDAAAPPTTEMPADVVGDMPR

SEQ ID NO: 3721 - DNA, 495 bp, Pseudomonas aeruginosa
atgtctgtcgtcatcaatgactcctgcctggagtcgctttccgatatttctattcagaacgaggactggatcgttcagcaagccatcgtgttgctggagcggcgggttttcaaagcagggccacgtcttgagcggcccgcagcggtcagggactaccttcgtttgaagctggtcgccgagcccaacgaaatattcgtcgtcgtgttcatgaacagcatgcacgccgtgctggccgtggagccgatgttccatggaacgatcaatgcgacctcggtttatccacgtgtcgtgctgcagcgagcgttgcaactgaacgccgctgcggtcatcttcgcgcatcagcacccctcgggcaccaccgagccatccaatgcggatcggttgctgaccgagcagttgaagacggccttggcgcttatcgacgtgcgggtactcgaccatttcgtgattggtcaaggcgcaccgtactcgttcgccgagtctggtcttttgtaa

SEQ ID NO: 3722 - protein, 164 aa, Pseudomonas aeruginosa
MSVVINDSCLESLSDISIQNEDWIVQQAIVLLERRVFKAGPRLERPAAVRDYLRLKLVAEPNEIFVVVFMNSMHAVLAVEPMFHGTINATSVYPRVVLQRALQLNAAAVIFAHQHPSGTTEPSNADRLLTEQLKTALALIDVRVLDHFVIGQGAPYSFAESGLL

SEQ ID NO: 3723 - DNA, 447 bp, Pseudomonas aeruginosa
atgccagcatctttattccgcttcgcatccggctggcgaacccttggcctggccgttgcactgccggcatccttggccgttttcagcccagccaccttcgccgccgatgtggtggtcgtcaccgacagccgccacccggtcaagactatgggtggagagcggctgatcgagctggatgaaggccagcgcatcgaagccgagctttccgcacagctgcccgccgatcccgagcaggccacggccatcgtcaagcgccgcctgaacaacggcggtgccggcctccagcgccgcatcgcttccgcataccagggcgtcgccgacgcctggagcctgggcgtcaccagcattccggcagtcgtggtggatcagcgttacgtggtctatggcgagccggacgtggcccgtgccgtcgcgcgcgttgcgcaacaccggaggccgcagccatga

SEQ ID NO: 3724 - protein, 148 aa, Pseudomonas aeruginosa
MPASLFRFASGWRTLGLAVALPASLAVFSPATFAADVVVVTDSRHPVKTMGGERLIELDEGQRIEAELSAQLPADPEQATAIVKRRLNNGGAGLQRRIASAYQGVADAWSLGVTSIPAVVVDQRYVVYGEPDVARAVARVAQHRRPQP

SEQ ID NO: 3725 - DNA, 360 bp, Pseudomonas aeruginosa
atgagcacgacctcgtggcgcccgcgctggctgttcagccggcgcgtggggcaggcactgctgtgggcggtgatgctcgtcgccgcggccgtgggcgccaacatcgtcggtatctacctcgtcggcagcgttgctggatgggagcagtggctggtggctgccgcgggctacttcctggtgtggcggttgtgcctgtatggggcgacggcctatggctgggtctggatgcgccgccggctgctggcacgcgaggaacaaaacgggacagatgggcaggcacggcgccgcctggtgcgcagcgagatcgccggcgtcttcgccatcgtggtgctggaagccagcctgctgatgcagggctga

SEQ ID NO: 3726 - protein, 119 aa, Pseudomonas aeruginosa
MSTTSWRPRWLFSRRVGQALLWAVMLVAAAVGANIVGIYLVGSVAGWEQWLVAAAGYFLVWRLCLYGATAYGWVWMRRRLLAREEQNGTDGQARRRLVRSEIAGVFAIVVLEASLLMQG

SEQ ID NO: 3727 - DNA, 363 bp, Pseudomonas aeruginosa
atgaacacgacgacccgaatcagcacctcggagcgcctcggccgcaccgtcggtcgtggatggcgcacttatgtgcgtggcgagcgacggttgtcgaactggctcgcctccaagggggtgccggtcgttggtgccgctatgggattgtgggtggtcaagctggtcgcacttggtgtgctgctgtacaccgcgtcttggctggcgctgctgctggtggccgcggtggtggctgcatgggtggcgcgcaatgcgggcctggacgacgacccgaccgagccggaatggcgcaacgggcctgctggattcggtctgtacacctacgatggtttccgaatcgatccgcacatcgaggacgacgagtag

SEQ ID NO: 3728 - protein, 120 aa, Pseudomonas aeruginosa
MNTTTRISTSERLGRTVGRGWRTYVRGERRLSNWLASKGVPVVGAAMGLWVVKLVALGVLLYTASWLALLLVAAVVAAWVARNAGLDDDPTEPEWRNGPAGFGLYTYDGFRIDPHIEDDE

SEQ ID NO: 3729 - DNA, 582 bp, Pseudomonas aeruginosa
atgttcgagatgaagaacgagaatgacgaaactgccaccaagaagaagaacgaagacttcctgaaggagctcgacaaggatcgcaccgagaagggctgtgagtatgcggtgctagtttctctactcgaaccggacagtgagttatataacactgggatcattgatatgtcccaccgccacccgaagatgtacattgttcggccgcaatttttcattcccatcatcacgctgctgcgaaatgcggcgatgaattcgctcaagtacaaattggaactggcgctcgtgaaggcgcaaaacatcgatatcacgaacttcgagacccagctggatacgttcaagaccgcattcgcgaaaaactacgacctcgcctccaggcgatttcagacagcaatcgatgaaattgacaagtcgatcgaccacctacagaagacgaaggaggccctgcttggcaccgacaggaatcttcgacttgcgaacgacaaggcgcaggacgtgacgatcaagaagttgactcggggtaacccaacaatggctgcgaagttcgccgaactcaaggacggcggatcttctgatgctgaatga

SEQ ID NO: 3730 - protein, 193 aa, Pseudomonas aeruginosa
MFEMKNENDETATKKKNEDFLKELDKDRTEKGCEYAVLVSLLEPDSELYNTGIIDMSHRHPKMYIVRPQFFIPIITLLRNAAMNSLKYKLELALVKAQNIDITNFETQLDTFKTAFAKNYDLASRRFQTAIDEIDKSIDHLQKTKEALLGTDRNLRLANDKAQDVTIKKLTRGNPTMAAKFAELKDGGSSDAE

SEQ ID NO: 3731 - DNA, 222 bp, Pseudomonas aeruginosa
atgcgccgccttccgtctctcaccgccctgcgcgccttcgaatgcgcggcgcgacacgcgcacttcggccgcgccgccgccgagctgtgcgtcaccgacagcgcggtaagccaccaggcccgccagctcgaagagcaactgggcgtcgtcctgttccggcgccagggccgccaggtacggccgaacacctgctgcgcagcctgcaacaggcgttcgagctga

SEQ ID NO: 3732 - protein, 73 aa, Pseudomonas aeruginosa
MRRLPSLTALRAFECAARHAHFGRAAAELCVTDSAVSHQARQLEEQLGVVLFRRQGRQVRPNTCCAACNRRSS

SEQ ID NO: 3733 - DNA, 708 bp, Pseudomonas aeruginosa
atgcatgaaatcatctgccctcactgcgggaaggcattcaagatcgatgaagttgggtacgcggacattctgaagcaggttcgagatagcgatttcgagaagcagttgcatgagcggctagagttggccgagcagggaaagcgcaatgcggtcgaactagctgaagccaagattgccaacgaattgcagaagacctcgtctgccaaggacgccgagatccaggagctgaaggccaggcttgatgctggcgaagttgcgcggcaacttgccgtggccgaggctttgagcgcggtggaaaaagagcgtgacacgcttgcaaatgaattggaacaagcgaagcgtgacaagcaagccgtatccaagttggcagaggtcacgctcatgagcgaagtgcaaaaagccgctgcagcgaaggagtcggagatacaggaactcaaggcgaagcttgacgctgttgtcatcgagaagaagctcgcgattaccgaagcagtcggcgcggtcgagaaagaacgtgacgaattgaagagcggcttgcagcgggtagaacttgaaaagcatctcgccgagaaatctttgaaagaaaagtacgagacgcagatcaaggatcgtgatgacgcaatcgagcgcctacgggacatgaaggcgcgactatcgaccaagatggtgggcgaaactcttgagggggtcgtctcagaaaacggaaaataa

SEQ ID NO: 3734 - protein, 235 aa, Pseudomonas aeruginosa
MHEIICPHCGKAFKIDEVGYADILKQVRDSDFEKQLHERLELAEQGKRNAVELAEAKIANELQKTSSAKDAEIQELKARLDAGEVARQLAVAEALSAVEKERDTLANELEQAKRDKQAVSKLAEVTLMSEVQKAAAAKESEIQELKAKLDAVVIEKKLAITEAVGAVEKERDELKSGLQRVELEKHLAEKSLKEKYETQIKDRDDAIERLRDMKARLSTKMVGETLEGVVSENGK

SEQ ID NO: 3735 - DNA, 1881 bp, Pseudomonas aeruginosa
atgaagatccaatccgttcgcatccgaaactttcgcacgttgaaagacgtgacgattccgttcgattccgtcacgaccttcatcgggccgaacggtgccggcaagtcaacggtgcttcgtgcgctcgactggttcttcaacggcaaacccggctcgctgacggagaaggattgctcttttggggcgactgacgaagacatcgaggttcaggtcaccttcgcagacctcaccgaaaaggatcgcgaggcacttggcaagtacgcgccggaaggagttgccacgttcaccgcatggaagcgccgatctcccgatggcaccgatgtgctctccgccaatgcaaagggatttccggctttaaatgccatcaaggcagcaggcggtgcgactgcgaagaaagagctgtatgccactctccggcgcgagcgcccggagcttgaccttcctgcggcgaatactggtccagccgtcgagcaggcgatgacaacttgggaggcggctcacactgatcaactgctcgatgcgcccgaggctttgcaaaccaatttcttcggtttcaacagcggcggcaagatgagcgggctcttcgacttcgtcctggttacggcagaccttcgggcaagtgaagagtccatcgacggcaaggcaagcatcattgggcgaatccttgagcgctcgattgaccgaactgccgctgatgaggcaatcgcggaaatcgttgcggagtcacgggcaaagcagcaacaagtctacgaagagaagttcaaggagcaacttggggccatcacaacgcagctcaacgaggtcgtcacaacctatgcgccaggccgggcaatcacggtttctccggctgaggtggaactcaaggcacctcgcacgacgttcgacgtggccgtgctcgacggcaccaccgagactgcggtggagcggcagggacacggctttcagcgcacgctgctgatctcggctctgcaactcttggcgcagtcgggcgcagcctcggccgagggagtcatctgcctggcgatcgaggagccggaacttttccagcacccgatccaggcgcagacctttgcgaaggtgctcaggtcgctcgccgaagatgctggcaagcgcatccaggtgacctatgcgacgcatagcccctacttcctggaggctcgacatttccatcaagtcagacggctgacgagatccgctgacgaagtcccggtggtgacggtccactttgccacggttgaggatgtgaaggccaggctgaatggaacagtggatggcgatgtggtcgatcgcaggctcgaccataacgtggccgaccagcttgccatagcactcttcgcgaatcgcgcatttcttgtggaggggacaaccgaatctgctgtgttctacggtattggagatagaacttcccccggcgcccttgaggcagcaggaatttctatcgtttctgtgggcagcaagacatcgatacccctcgcgcatgcgattttgaaatctattggtgtgccagtctacgcactgtttgatgcagacggtggatttgaagcgcgagccaaagccaaaaacaaaaagcaagatgacatagatcgggagcgcaacaatcatgcggtagagaactgcagattaatgcggtacttcggcttgcctgaagaagattttccatccgccaccatttccgacgtcgcggccatttttgatgatcatcttgaagcgtttctgtctgcgaactggggtgagtggataactgcctgcaatagtgttgaggctgataccggaataaatctatcgaaaaaccaactcgcataccggactgcaacactccggtcgggaggagtggtgccagaaatgcttaagcagattcttgtcaaggtggagggtaagtaa

SEQ ID NO: 3736 - protein, 626 aa, Pseudomonas aeruginosa
MKIQSVRIRNFRTLKDVTIPFDSVTTFIGPNGAGKSTVLRALDWFFNGKPGSLTEKDCSFGATDEDIEVQVTFADLTEKDREALGKYAPEGVATFTAWKRRSPDGTDVLSANAKGFPALNAIKAAGGATAKKELYATLRRERPELDLPAANTGPAVEQAMTTWEAAHTDQLLDAPEALQTNFFGFNSGGKMSGLFDFVLVTADLRASEESIDGKASIIGRILERSIDRTAADEAIAEIVAESRAKQQQVYEEKFKEQLGAITTQLNEVVTTYAPGRAITVSPAEVELKAPRTTFDVAVLDGTTETAVERQGHGFQRTLLISALQLLAQSGAASAEGVICLAIEEPELFQHPIQAQTFAKVLRSLAEDAGKRIQVTYATHSPYFLEARHFHQVRRLTRSADEVPVVTVHFATVEDVKARLNGTVDGDVVDRRLDHNVADQLAIALFANRAFLVEGTTESAVFYGIGDRTSPGALEAAGISIVSVGSKTSIPLAHAILKSIGVPVYALFDADGGFEARAKAKNKKQDDIDRERNNHAVENCRLMRYFGLPEEDFPSATISDVAAIFDDHLEAFLSANWGEWITACNSVEADTGINLSKNQLAYRTATLRSGGVVPEMLKQILVKVEGK

SEQ ID NO: 3737 - DNA, 2157 bp, Pseudomonas aeruginosa
atgccaaagaataccgagtttgaggagagtctcaccatgaccattaaaaaaatcgataccaccagcccagaagcccaatccgccgatctggtggcgggaaatatcgaacagctcaaagcgctgttcccggagctgatcaccgagggcgcgggcggcgtggccgtgaatgtggacgtactcaaggcgctggtgggcgatgccaccgtcaccgatgccgacgagaaatacggcctcaactggcatggcaagcgccgcgcccggcaattggcgctcacgcccagcacgggcaccctgcgcccctgcccggaagacagcgtggactgggataccacccagaacctgatgatcgagggcgacaaccttgaagtgctcaagctgctgcaaaaaagctatgccagcaaggtcaagctgatctatatcgacccgccgtacaacaccggcaaggattttgtgtatccggacaattttcaggacaacatcaagaactatctggagctgaccgggcagatcgagggtggagagaagattagcagcaataccgaggccagcgggcgctttcataccgactggttgaacatgatgtatccaaggttgaagctggcgaggaatttactgcgagaggatggggtaatcctgctcagtatcgacgagcatgagatcacgaacctgcgctccgtgatggatgaagccttcggtgaagaaaattttctatcctgccttacatgggaaaaaggcagaaaaaatgatgccaagtttttttccaatggacatgagtacgttcttgtctacgcaaaatcgcagagctaccttcgagagcagaaaacgctgtggcgtgaagaaaagccgggtgcccgagatatctggaataaatacctcgaactgcgcgttcagcatggaatccaagacaacctgatcgaagaggggctgcaagcttggtattccgacttgcccaaagcacaccccgctaaaaagtggagccgctacaagcgagtggatcaaaacgggccgtggcgggatcgtgacatctcctggccgggcggtggtgggccgcgctatgacgtccttcatcccgttacaaatcaaccgtgcgttgtgccggaggccggttggagatactcatcttccgatgaaatgcaacgccagataaaacttgggcttgttgagtttcgccaagaccacacggagccgcccttccgaaaggcacatatccgcccgattcctcaggagcttgattcggacagttcgactgatgttgatgcgcctgaggaaccagccgatatcgaggatgaagaagaattcgcaactcaggttaggggtagctacttctacaagcaatcccaggtttcggtgaaatatctccggaccctattggggaagaaagtcttcaacaatccaaaggatctggacgagattgcgaaactgatccgctacaccacgtctgatgaccctcacgccgttgtgctggatttttttgcgggcagcggcacgacgggcgaggcgacgatgcagttgaacagtcaggataacgggagcagacgttacattcttgtccaacttccagagtcgcttgacgcaagcgacaagcagcaaaagattgctgcaaagtactgtggagaccttggacggccgctgaatatcgctgagctcactaaagaacgcctacgccgttccggaaccaagatcaaagccgataacctcgactggcagggcgacaccggcttccgcgtattcaagctcgacacctctaatatccgagcctggaatcccaaaccacacgatctggaagccacactgttcgaccatcaggatcacctgctcgaaggccgcagcgaggccgatgtgttgtacgaactgctgctcaagctcggccttgatctttgcgtacccatcgaaaagcgcggcattgaagggctagatgtacatgccgtaggcggcggcgtgctgttggcttgcctggccgaaaaaatcacccgtgagcaggtggagccactggcccaaggcatcatcgcctggcacaaggagctggcacccgctggccctgctggaaaagaaagcacctgcgtgttccgcgacagcgcctttgccgacgacgttgccaaaaccaacctcgccgcgattctggagcagcacggcatccagaacgtgcgtagcttgtaa

SEQ ID NO: 3738 - protein, 718 aa, Pseudomonas aeruginosa
MPKNTEFEESLTMTIKKIDTTSPEAQSADLVAGNIEQLKALFPELITEGAGGVAVNVDVLKALVGDATVTDADEKYGLNWHGKRRARQLALTPSTGTLRPCPEDSVDWDTTQNLMIEGDNLEVLKLLQKSYASKVKLIYIDPPYNTGKDFVYPDNFQDNIKNYLELTGQIEGGEKISSNTEASGRFHTDWLNMMYPRLKLARNLLREDGVILLSIDEHEITNLRSVMDEAFGEENFLSCLTWEKGRKNDAKFFSNGHEYVLVYAKSQSYLREQKTLWREEKPGARDIWNKYLELRVQHGIQDNLIEEGLQAWYSDLPKAHPAKKWSRYKRVDQNGPWRDRDISWPGGGGPRYDVLHPVTNQPCVVPEAGWRYSSSDEMQRQIKLGLVEFRQDHTEPPFRKAHIRPIPQELDSDSSTDVDAPEEPADIEDEEEFATQVRGSYFYKQSQVSVKYLRTLLGKKVFNNPKDLDEIAKLIRYTTSDDPHAVVLDFFAGSGTTGEATMQLNSQDNGSRRYILVQLPESLDASDKQQKIAAKYCGDLGRPLNIAELTKERLRRSGTKIKADNLDWQGDTGFRVFKLDTSNIRAWNPKPHDLEATLFDHQDHLLEGRSEADVLYELLLKLGLDLCVPIEKRGIEGLDVHAVGGGVLLACLAEKITREQVEPLAQGIIAWHKELAPAGPAGKESTCVFRDSAFADDVAKTNLAAILEQHGIQNVRSL

SEQ ID NO: 3739 - DNA, 1128 bp, Pseudomonas aeruginosa
atgcaaaatatttttatttatcgtagctacatccctatccttgcaattagcccagcagaaatgactgctgtggagcagttgccggataaagaaaaagatcaactacttccccttttccctcttaggggatgggttggctcccatcgtctaagaaacactctagcaagaatttcagaggctattaacgaacgcccctggattgcagacatagatgaaaaatttctaagtgaaaacaaaatattcctctttacgggaaaacatccagaaaccccaatatatcaagagctaaaagacctactaaatccgaataatgcgtatgaaaactggtgcgagttcattaagaaaaatgaaaatacaattccgtgcataagacatgaaactcttgaaggcattgacgagcaaatacgaaaactcagagacttaaaccgcgggatagttttcagaatatctccagacgaacataacctatctaaacacgaacatataatacactccctgcggtcaaacgaaataaaaaacatcttaataatttacgacctaggagcaattgatcaaaacttcagagagaggcaatcaatccttgaaaagtttatgcagcttgccaaagaaaatattaaagaaatagcaatatccgtgagtgcatcttcattcccatcaggatttgcaggccaaagggaaggggaaaactctatatatgagaggattctattcaactcgatagagtcgaaaaaaatttattcgccattaatttactccgacagaggcagtgcacgtgctagcaagcaagatggaggttccggaaccccaccgcctcgaattgactatccaatgaaaaaagattggaagtttgtacgtcgcgaaattgatgatgacgcccccggctctaaagaaagaaggagggcagcctatatagagattgcgaaagaagtagtctcagccgattattggctcccaaatctcagattatggggaacacaacaaatcgaactcactgcagaagaaaatacctttggcatatttagcgctcaaaaggcaactgccgcaaggataaacattcatatttttgttcaactacattacaacagcgtaccagaagaaatagacactgatgaagagtgggtggactaa

SEQ ID NO: 3740 - protein, 375 aa, Pseudomonas aeruginosa
MQNIFIYRSYIPILAISPAEMTAVEQLPDKEKDQLLPLFPLRGWVGSHRLRNTLARISEAINERPWIADIDEKFLSENKIFLFTGKHPETPIYQELKDLLNPNNAYENWCEFIKKNENTIPCIRHETLEGIDEQIRKLRDLNRGIVFRISPDEHNLSKHEHIIHSLRSNEIKNILIIYDLGAIDQNFRERQSILEKFMQLAKENIKEIAISVSASSFPSGFAGQREGENSIYERILFNSIESKKIYSPLIYSDRGSARASKQDGGSGTPPPRIDYPMKKDWKFVRREIDDDAPGSKERRRAAYIEIAKEVVSADYWLPNLRLWGTQQIELTAEENTFGIFSAQKATAARINIHIFVQLHYNSVPEEIDTDEEWVD

SEQ ID NO: 3741 - DNA, 1596 bp, Pseudomonas aeruginosa
atgcgaatcaatcaaccactcagcggccgcgaacgcagtttcccagcagaacagcacctcatttccgccaccgatacccgcgggatcatcacgtactgcaacgacgagttcgccgagatcagcggatttacccgcgaggaattggtcggcagcccgcacaacctagtgcgtcacccggatatgccgcctgccgtgttcgctcatatgtgggactacctaaaatccggacgcagctggatgggcatcgtcaagaaccgctgcaagaacggcgatcactattgggtcagcgcctatgtcacgcccatccaggaaaacggccgggtcgtcggctacgagtcggtgcgcagcaaacccaacagcgagcaggtgcgccgtgccgaagcgctctacgcgcgcctgaaccaggggcgcccggccatcggccgtggcgaagcattcgcgcaactggcacgcttcttcgtgctgccgctgctcggtgtagtgagcggcgcggcgctctggagcctggaattgcccggcacggcgctctggagcctggaattgcccggcacggcgttgctgctgaccttagtcctgcttgggctgcagggttttgccagcctgcacaactccagccagctgctcggccgggctcgtgcagtagcgccaaaaacattcgacagcccgctggtggcccgcacctacagcgatgcctccgggccaatggcgctgctgcacctggcactgatcagcgaggatgcacggattcgcacggcgctttgccgcctgggagatttcgccgaccagaccgccgccctggccaaggaaaacggccgcctcaacgagcaggccgaacgtgccctgcaggcccagcgcaatgaagctgaccaggccgccacggcgatgcacgagatggccgcgtcgatcaatcaggtcgccagccacgtccagcaaaccgctcaggaagcacgtcaggccagtgaactggctatggccggcgcccagcagtcgcagcaaagccgccaggtcatcgagcaactggcgcagactgtcgatggcatcggccaatcggtgcagtcactggccgatgaaaccgcttccatccagcaagccgccagcatgatccacgcgattgccgagcagaccaacctgctggccctgaatgccgccatcgaagcagcccgcgccggtgagcagggccgtggctttgccgtagtggccgacgaagtgcgcgccctggcctccaagacccgccagtctaccgacgtcatccagggcatcatcacggacctgcataaggaaaccgaacgtgccttgagcgtcgctcgcgccggcagcgaggaagcgcgtaacggcgtggcgcgggtagcgcaaaccgaacaatcgctgcaaggcatcagccagaccgtcgacaatatccaccagatggccgagcaaatggccgctgctgccgaacagcagagcctggtcgccgaggatattgcccggcagatcaactcgatttcgcaggccaccaacgacaatgccgaagtcaccggcaatagcgcgcgcctaggcagccagctacagtccactgcaggctccctgcacgcgctggtcgagcgtttcaacagttaa

SEQ ID NO: 3742 - protein, 531 aa, Pseudomonas aeruginosa
MRINQPLSGRERSFPAEQHLISATDTRGIITYCNDEFAEISGFTREELVGSPHNLVRHPDMPPAVFAHMWDYLKSGRSWMGIVKNRCKNGDHYWVSAYVTPIQENGRVVGYESVRSKPNSEQVRRAEALYARLNQGRPAIGRGEAFAQLARFFVLPLLGVVSGAALWSLELPGTALWSLELPGTALLLTLVLLGLQGFASLHNSSQLLGRARAVAPKTFDSPLVARTYSDASGPMALLHLALISEDARIRTALCRLGDFADQTAALAKENGRLNEQAERALQAQRNEADQAATAMHEMAASINQVASHVQQTAQEARQASELAMAGAQQSQQSRQVIEQLAQTVDGIGQSVQSLADETASIQQAASMIHAIAEQTNLLALNAAIEAARAGEQGRGFAVVADEVRALASKTRQSTDVIQGIITDLHKETERALSVARAGSEEARNGVARVAQTEQSLQGISQTVDNIHQMAEQMAAAAEQQSLVAEDIARQINSISQATNDNAEVTGNSARLGSQLQSTAGSLHALVERFNS

SEQ ID NO: 3743 - DNA, 1269 bp, Pseudomonas aeruginosa
atgcccgacattcccattgccgacgctctgttctccgctctcctcagtcgtgacgcggatgcactcgatgcgatcgaggcaaatcacgccgccgaatgcgcattcattcgcactgtcatctgcaccgatgcttcgggtgccgttgacttagacctcgggctcagcgtgtcctccagcgactacgtgacctcgttttttgaagggccgcgtgcgttcttcatgtcggccggaaccagcgtccatgcccgtctcacaggtggtaggtcgaacgtgctgatcgacttctctctcagcttcgactcgaatttcgcagagaagctgcgtgcagtcatcgccggcgagaacattcagcgggctgatcgcgatagggtcatcgaaattctcatgctgaaggctcgaaaccgccatgtgcagttcgatgtgatgccgtttctcatcgagaacacgcgcatggcccgtaacgagccctcaaacgagcgccccctgaatacgctgatcgctttccgcatgctcgaccacctgaattggcatgcctttcaggatgatcccagccgcttcgctttcgatgcttcatacgaggacctgaaagccctgctccggcccgatgccgaagccttcctggcggagtttcaagccagtgagcatatcgatcatcacgaagcaaagagcgctggagcgcaggcgctgctactgcggttcgctcgactttggcatgaggaacgcaaacgggacaagaatcgcatcctgcgtgaattgctccgtttcagcatccataaactagggtcgatcccgcttaccgaattgcggctgatctggagtagcatgacctctagccagggatcgccattcttcggccccatcatgggcagttcccctgagatgttgcagaagattcgcggcatggcctgggacatgacattgctccgcgttatggagcaaatcgccacagctagccaggccggctccttcttcatcccctatttcgtgtcaatggatcgccgctggcgccatctccttagcttaaatcctgtgaggttgatgctgatcgacgacgcgcatcgacgcgtgcttttcgcacggaccgatgaactagagttccagcgcgtgctgggagagtgcatgcagaccgcatttcagttggagatggcacctgaaagggtcgaggctcgccgcagggcggcgcagaccgttgaattgaacgcaatgaagcagctcgtcgccgaagaagagccattggctcgaacaagagctgcagtagccgtcgagtga

SEQ ID NO: 3744 - protein, 422 aa, Pseudomonas aeruginosa
MPDIPIADALFSALLSRDADALDAIEANHAAECAFIRTVICTDASGAVDLDLGLSVSSSDYVTSFFEGPRAFFMSAGTSVHARLTGGRSNVLIDFSLSFDSNFAEKLRAVIAGENIQRADRDRVIEILMLKARNRHVQFDVMPFLIENTRMARNEPSNERPLNTLIAFRMLDHLNWHAFQDDPSRFAFDASYEDLKALLRPDAEAFLAEFQASEHIDHHEAKSAGAQALLLRFARLWHEERKRDKNRILRELLRFSIHKLGSIPLTELRLIWSSMTSSQGSPFFGPIMGSSPEMLQKIRGMAWDMTLLRVMEQIATASQAGSFFIPYFVSMDRRWRHLLSLNPVRLMLIDDAHRRVLFARTDELEFQRVLGECMQTAFQLEMAPERVEARRRAAQTVELNAMKQLVAEEEPLARTRAAVAVE

SEQ ID NO: 3745 - DNA, 1782 bp, Pseudomonas aeruginosa
atgtattacagcagtggcaattacgaagccttcgcccgcccgcgcaagccagacggggtcgacggcaaatccgcatggttcgtcggctccggcctggcctcgctggccggcgccgccttcctgatccgcgatggccagatgccgggcgagcgcatcaccatcctggagcgcatcgacgtgccgggcggcgcactggatggacttgagaagccggacaagggcttcgtgatccgcggcggccgcgagatggagaaccatttcgaatgcctgtgggatctgttccgcagcattccgtcgctggaagtcgagggggccagcgtgctcgacgagttctactggctgaacaaggacgaccccaatttctccctgcagcgcgccaccatcgaacagggcaagcctgcgcccgacatgggcaagttcacgctcagcaaggccgcgcagaaggacatgctcaaggtcttcatggccacgcgcgaggagatggagaacaagcgcatcaacgaggtgttcggtgaggacttcctcgccagcaacttctggatgtactggcgcaccatgttcgcgttcgaagagtggcattcggcgctggaaatgaagctctatctgcaccgcttcatccaccacatcggcggtctggcggatctttccgcgttgaagttcacccgcttcaaccagtacgaatcgctggtgctgccattggtgaagtggttgaaggaccagggcgtggtgttccagtactgcaccgaggtgacagatgtcgatttcgacatcgatgccaccaacggacgcaagcaggccacgcgcatccactggaaccgcgacggccagcccggtggcatggcactcggccccgatgacctgttgttcatgaccatcggctcgctggtggaaaacagcaacgagggcgaccataagaccgcggcgctgctggacgaaggcccggcaccggcttgggatctgtggcggcgcatcgcggccaaggatccgtcgttcgggcggcccgacgtgttcggcacgcacattccggagaccaaatgggaatccgccaccatcaccacgctggacgcgcgcatcccgaagtacatcgagaagatcgccaagcgcgacccgttcagcggcaaggtggtgaccggcgggattgtcaccgccaaggattccagctggctgctgagctggacggtgaaccgccagccgcacttcaagaagcagcccaaggaccaggtcgtgatctggttctatggcctgttcgcggacgtgccgggggattacgtcaagaagccgatgcaggactgcaccggcgaggaaatcacccaggaatggctgtatcacatgggtgtgccggttgaggacatcgcggagcttgcagccacgggagccaacaccgtgccggtgatgatgccgtacatcaccgccttcttcatgccgcgtcaagccggtgatcgccctgacgtggtgccagcgggcgctgtgaacttcgcattcatcggccagttcgcggagtcgaagcaacgcgactgtatcttcaccaccgagtactcggtgcgcacgccgatggaagcggtctacacgctgttgggcattgaacgcggcgtgccggaagtgttcaattccacctacgacatccgcaccctgctggatgcactgcaccagctgcgcgatggcgaagaattggcgttgccgggcccgtcgttcctgcgcgaccgcgtgttggccaggctcgaccgcaccgagatcggtgcattgctccacgacgccggcctgctggccggggaggacgcatga

SEQ ID NO: 3746 - protein, 593 aa, Pseudomonas aeruginosa
MYYSSGNYEAFARPRKPDGVDGKSAWFVGSGLASLAGAAFLIRDGQMPGERITILERIDVPGGALDGLEKPDKGFVIRGGREMENHFECLWDLFRSIPSLEVEGASVLDEFYWLNKDDPNFSLQRATIEQGKPAPDMGKFTLSKAAQKDMLKVFMATREEMENKRINEVFGEDFLASNFWMYWRTMFAFEEWHSALEMKLYLHRFIHHIGGLADLSALKFTRFNQYESLVLPLVKWLKDQGVVFQYCTEVTDVDFDIDATNGRKQATRIHWNRDGQPGGMALGPDDLLFMTIGSLVENSNEGDHKTAALLDEGPAPAWDLWRRIAAKDPSFGRPDVFGTHIPETKWESATITTLDARIPKYIEKIAKRDPFSGKVVTGGIVTAKDSSWLLSWTVNRQPHFKKQPKDQVVIWFYGLFADVPGDYVKKPMQDCTGEEITQEWLYHMGVPVEDIAELAATGANTVPVMMPYITAFFMPRQAGDRPDVVPAGAVNFAFIGQFAESKQRDCIFTTEYSVRTPMEAVYTLLGIERGVPEVFNSTYDIRTLLDALHQLRDGEELALPGPSFLRDRVLARLDRTEIGALLHDAGLLAGEDA

SEQ ID NO: 3747 - DNA, 642 bp, Pseudomonas aeruginosa
atgcgtaagtcaaaccaccgggctgcattcgccagtgatcccaaatttctggagcggattgcaaggcagctccaaagcgagccaacatctaccctgccctcccctgctgatataaagccgatcaaggccgtccagcgcctcgaaaaagtccaaaccgccaatatggatgggaggaaagacaggattagcctggaatctacatccagggtactgaccatttgcttccccggggcgaagctggtctctctcaacaccatgctccgcgtccacgacgccaaggccacccgcctgaagaacacatggctgaaacgagtggaggcccttcgatacacctacaaggctgttctcgaggaatggatagccattgcgacctatcctctgttggtcgaggaggtatacatcacaggtgagagcagcttgctcgacccagaaagtgttaccgcggcctgcaaaccggttattgatgcacttgtttcgaatgggttcttgccggacgatgatccatcccacattgctcaccccttaccctacacctccagaggcgagtctcctggcctggtgatttgcttacgtcctgcagggcggccttggggactaatcgaagatgcaacgattcaggtggccagctcattagggcgttga

SEQ ID NO: 3748 - protein, 213 aa, Pseudomonas aeruginosa
MRKSNHRAAFASDPKFLERIARQLQSEPTSTLPSPADIKPIKAVQRLEKVQTANMDGRKDRISLESTSRVLTICFPGAKLVSLNTMLRVHDAKATRLKNTWLKRVEALRYTYKAVLEEWIAIATYPLLVEEVYITGESSLLDPESVTAACKPVIDALVSNGFLPDDDPSHIAHPLPYTSRGESPGLVICLRPAGRPWGLIEDATIQVASSLGR

SEQ ID NO: 3749 - DNA, 138 bp, Pseudomonas aeruginosa
atggaagtggaggatatcgacaacctctcgcgcaaccaagacatcgcggtcggactgcaagtgatcttgaagccacgggcccgtcccaccccgacatggacctcgatgcccgaacggacgttagatttcgagttctag

SEQ ID NO: 3750 - protein, 45 aa, Pseudomonas aeruginosa
MEVEDIDNLSRNQDIAVGLQVILKPRARPTPTWTSMPERTLDFEF

SEQ ID NO: 3751 - DNA, 357 bp, Pseudomonas aeruginosa
gtgtcgacttccaacgaagaccagaaccacggcatccagatcgccctgcgcgcgatggaagccccgctgcgcgagatcgtcaccaatgccggcgaagagccgtcggtgatcgtcaaccgcgtcaaggaaggttcgggcaacttcggctacaacgccgccaacggcgagttcggcgacatgatcgagttcggcatcctggacccgaccaaggtcacccgcaccgcgctgcagaacgccgcttcgatcgcgggcctgatgatcaccaccgaagcgatggtggccgaggccccgaagaaggacgagccggcgatgccgggcgccggtggcatgggcggcatgggcggcatggatttctaa

SEQ ID NO: 3752 - protein, 118 aa, Pseudomonas aeruginosa
MSTSNEDQNHGIQIALRAMEAPLREIVTNAGEEPSVIVNRVKEGSGNFGYNAANGEFGDMIEFGILDPTKVTRTALQNAASIAGLMITTEAMVAEAPKKDEPAMPGAGGMGGMGGMDF

SEQ ID NO: 3753 - DNA, 927 bp, Pseudomonas aeruginosa
atgatttacgaggtcgatgaaatactgaatgaagccgtaatgacgggcgttccctcaataattgtggaggggattgacgatatctgtatttatgagggcatctcgaaaaaatctccattcttagttgaggtctatgcggttgaatatattgatggttttggcgagggatgcgatgaagtggtgagagctgtttcggagatcgagcagattccaagctcaaatcacaaagtttctgaccatgttttgggtgtaatagataaggatgtgcgtgatttcaggaatgagcttcctgaatctgacgcagtgctaacacttaaatattactccattgaaagtcactttgtttccaaagccattattcaacatactttgtccttgtgtactcgctcgacccaagagcttgttactgaggaattatgtgatttcataatgtcagaattggagcctagactgctaaagatttattatcactgcctagagtctctgaagaacgcagtggttagagattatgatgctgcattcgcatattcttataattatggcagattgagagatactaatgcccagcggattattaatgaaaaaaaagaagagcttgatatttttgctgcgtcgatgagcattgatgcttctatggagtcaataaagagaatcgctaggggtaagtggctgattgagattttttctgaagaattacttgcatacataaatggcctacaggaaatgtgcaaggacggtgctgtatcaacctgtaagtgctgtcttaatgctgcatttgataagtgcttatatagaatcagagagggtattggtaagaatgcaattaaggggctggcgttctctaatacggaaggtgcagagtttggctatattgttcagagaatttcgagtctaaagggctcagttcagagagcacaagcaagctaa

SEQ ID NO: 3754 - protein, 308 aa, Pseudomonas aeruginosa
MIYEVDEILNEAVMTGVPSIIVEGIDDICIYEGISKKSPFLVEVYAVEYIDGFGEGCDEVVRAVSEIEQIPSSNHKVSDHVLGVIDKDVRDFRNELPESDAVLTLKYYSIESHFVSKAIIQHTLSLCTRSTQELVTEELCDFIMSELEPRLLKIYYHCLESLKNAVVRDYDAAFAYSYNYGRLRDTNAQRIINEKKEELDIFAASMSIDASMESIKRIARGKWLIEIFSEELLAYINGLQEMCKDGAVSTCKCCLNAAFDKCLYRIREGIGKNAIKGLAFSNTEGAEFGYIVQRISSLKGSVQRAQAS

SEQ ID NO: 3755 - DNA, 1296 bp, Pseudomonas aeruginosa
atgagaataaaaagctttaaaattactggctttaaagctagcaatagaaatgcaatggtttctttctcaaatcaaaatgtcaccgttatatatggtgataacggatgtggcaaaacaacatttctaaaagtcttgagtgcgtttctagctcaggatgacgcatctctagttaccatgggtgtcgatagtataaattgtgtagttgtagataaagggcgcgagctagatgtgtgcgtgccactttccgcggaaggtacttacaactggagtgcttatgataattcatgtcttggccactcaagatccctttccctaggggttgagcgcggtattagcactcaagctatgaaagtggacccagaatttttggctgatttctttactcactccaagcatgctggctacttccttaatgatggcccgccgtcacccttgcgtcgacgaagaataattgatcttgctgaagatttgtctctgtacttaaggcgtcgcacttctgcgacgaggttcaggaatagcagggtaagatcggagattgattatgacaagccgcatctatatctgcaaagtataaaaatagagaacatagaagagctattgcttcgcaggtacagaattgctcgattcatggccaccaagaaaattcaaagtgcattgttcgacactctatcggtggccattgacactggtcaaagtgaaaacccaatagtaagtgaaacatctgaagatttttcaaatagacttcttgagaatagggcaaggattatcgaggctcttgatgatggcgaggcaaacgcattcaaagagcgcattatcaatatcctcaactcaattgatagagatgaaggattacagagggttcttgatcataatcttctgagacagctgttccggaatatgattgacgagctagaggttgagcgccttgtgcttagctctattaacttgctgattgataaatttaacagctatcttatcgaggataaaaagctcgtagttaacggcgaagaagtattcattgagattgatgggaataagcactcgttaaatgacttatctagtggtgagcgccatatattgactttcctagctcttgttttgtttgaaggcgagggtagggatttcttaatcattgatgaacctgaaatctcattgaatattaagtggcagcgcgagcttatggcgatattttccgagctgctacctggcacgcaaataattgttgcctcgcattctccggcattggccaagcgcaatccggacttcctctctgaactaaaagtttggagaggttaa

SEQ ID NO: 3756 - protein, 431 aa, Pseudomonas aeruginosa
MRIKSFKITGFKASNRNAMVSFSNQNVTVIYGDNGCGKTTFLKVLSAFLAQDDASLVTMGVDSINCVVVDKGRELDVCVPLSAEGTYNWSAYDNSCLGHSRSLSLGVERGISTQAMKVDPEFLADFFTHSKHAGYFLNDGPPSPLRRRRIIDLAEDLSLYLRRRTSATRFRNSRVRSEIDYDKPHLYLQSIKIENIEELLLRRYRIARFMATKKIQSALFDTLSVAIDTGQSENPIVSETSEDFSNRLLENRARIIEALDDGEANAFKERIINILNSIDRDEGLQRVLDHNLLRQLFRNMIDELEVERLVLSSINLLIDKFNSYLIEDKKLVVNGEEVFIEIDGNKHSLNDLSSGERHILTFLALVLFEGEGRDFLIIDEPEISLNIKWQRELMAIFSELLPGTQIIVASHSPALAKRNPDFLSELKVWRG

SEQ ID NO: 3757 - DNA, 222 bp, Pseudomonas aeruginosa
atgagcaacatccgcaacctccagtggaacgaaggggcgcctgatgaggttcagcgcgggatgcttatcgaatattgccatacagcatggcttgtcggagacggccagtttccgagtatcaccagagagaaaatcgcgcgctgggcatggctgatcaagccccacgaactcgcctggctcgaagacatggcaaacaagcacaaagcgagggcgcggggatga

SEQ ID NO: 3758 - protein, 73 aa, Pseudomonas aeruginosa
MSNIRNLQWNEGAPDEVQRGMLIEYCHTAWLVGDGQFPSITREKIARWAWLIKPHELAWLEDMANKHKARARG

SEQ ID NO: 3759 - DNA, 243 bp, Pseudomonas aeruginosa
atgagcgttcgtaccgagctggatgcgttggcctacatgaccgaatgcacgctggcgacagtggagcgtttggggatgatcaagtcgcgcaagaagagcgagtttgagcgccagattggcatcgctcagaaggggatcgactggatcaagatgttcggcggttattcttcgggccgtgtcggatcagtcatcgctagcggtctgagtgtgcacgcctgggcacacaaggatctggtgaaatga

SEQ ID NO: 3760 - protein, 80 aa, Pseudomonas aeruginosa
MSVRTELDALAYMTECTLATVERLGMIKSRKKSEFERQIGIAQKGIDWIKMFGGYSSGRVGSVIASGLSVHAWAHKDLVK

SEQ ID NO: 3761 - DNA, 288 bp, Pseudomonas aeruginosa
atggggccgaaaatgtggactcttccggttttttctgatttggggagtgaagttgtggaaatcgagattaaagacgacataaaccacccacagcactacaagctgttccccgacatggaagccttcgacgtgatcaaggcatccctgagccctgccgagcttcgcggctacctcaagggtaatgtcctgaagtatcgccttcgtgctggagagaaagggcctgcggagaagtgcatcgccaatgctgaatggtacaaagcccgtctgtttgagcaggagagcgcctga

SEQ ID NO: 3762 - protein, 95 aa, Pseudomonas aeruginosa
MGPKMWTLPVFSDLGSEVVEIEIKDDINHPQHYKLFPDMEAFDVIKASLSPAELRGYLKGNVLKYRLRAGEKGPAEKCIANAEWYKARLFEQESA

SEQ ID NO: 3763 - DNA, 744 bp, Pseudomonas aeruginosa
atgcaccttctctatctcgatgagtccggaagcgtagccgacccaaaccagcgtttctttgtgcttggcggcgtcagcgtctttgagaggcagtcgcattggatagagactgagctgaacaaaattgccgaaagattcaacgccgaatctccatacgacattgagttgcacggctccccgatgcgatctggaagggatgggtggaaacaccatcccttgagcgcccggattcaggcgatcaaggatgcgctggcagttagccttaccagcaagaatgttcgtcttttcgccgcagttatcgacaagcgcgtatttgcaggcgcagaccctgtagagcacgcattcgagaagctatcgatgcgcttcgacctctttttgcggaggctctacaccaagcatggagatgcgcagagaggaatcatgctgttcgacaagagcagcactgagcgaaggattcaaacgcttgcccgcgagttcaaacacactgggcacagccagggccaaacgaagaattatgctgaggttcctgttttcctggactccaaagcttcccggctgatccagcttgccgacctggtagcttttgctctattccgaaaattcgagcacgctgacgatcagttctttgatgtcatcaaggaaaacttcgatgatgatggcgggatacagcacggcctttacctcagaactcaaagcggggcgccccctgcagtaatcgcgcaggtccaaccggcaaggatctag

SEQ ID NO: 3764 - protein, 247 aa, Pseudomonas aeruginosa
MHLLYLDESGSVADPNQRFFVLGGVSVFERQSHWIETELNKIAERFNAESPYDIELHGSPMRSGRDGWKHHPLSARIQAIKDALAVSLTSKNVRLFAAVIDKRVFAGADPVEHAFEKLSMRFDLFLRRLYTKHGDAQRGIMLFDKSSTERRIQTLAREFKHTGHSQGQTKNYAEVPVFLDSKASRLIQLADLVAFALFRKFEHADDQFFDVIKENFDDDGGIQHGLYLRTQSGAPPAVIAQVQPARI

SEQ ID NO: 3765 - DNA, 1524 bp, Pseudomonas aeruginosa
ttgttcaagcatgcccaacttgaatccgtcaaagcctggctcggcgaccccgcgcacggcgccttgcccctgcatgcacgggtacagcgggccattcgccagttgatcctggatggcgcgctcgatgtaggccgccccctgcccgcgtcgcgcgcgttggcgaagtcgctgggggtgtcccgcgacacggtggagtcggcctatggccagttgcacgccgaaggtttcattgagcggcgggtcggcagtggcagcttcgtgtccgagcaggcccggtggctgcccgggcgcggcagaccacggcgcacgagcgtggatcgcaaggcacccctgcgcctgagccggcgcggcgatgccatgctccagggcggcggcgtgcgcgacttcctgatgtcgcgccccttcgcgcccggcgtgccggagacgcgcagctttccgctgccaacctgggagcgcttgcagcggcaggtgttgaaggagtacggcaccctggcgctgctgcacagcccaccgcagggcatggagccgttgcgacgcgccattgccgcctacgtcaacctcgaacgaggcgcgcaggccacacccgagcgcgtgctggtgctgaccagttcccaacaggccatgaccctgtgcgccaccgtgctgctcgatgctggcgagcgcatcttcatcgaagaccccgtgtaccacggggcgcgcaaggcatttgacgccgccgggttggattgcgtgcccgtgccgatggatgaccaaggcatgcagatagcgcacctgctggcaaaggcgcagaccccttgcaatgccgcccgggcggtgttcctgacgccctcgcaccagttcccaaccggggctacgctggcgttggaccggcgcctggccgtcatcgaatgggcccgccagcaccaggcttggatcatcgaggacgactacgacagcgaattccactacgaaggcaagcccaccgcatgcgtacaggggctcgacccccacggccgcacgatctacatcggcaccttcaccaagtcgctgttccccggcctgcgcatcggctacatggtgctgccggaggctctggtgtcgcccatgaccgtggcccgcaccctgctggatgggcacagcgcaccgatcccgcagctcaccctggctcgcttcatcgagggtgggcatttcggagcccatgtgcgaaccatgcgggccgtctatgcggaacgccgcgatgtgctggcgcagctggtgcgccagcacctggccgacttcgtggagcccagggtgcccgctggcgggatgcagatgccttgcgtgttcatccgcgacattcccgagcgcgaggcggtggaatcggcacggcgggtcggcatcgacctgctggggctgaccgcgctgcatgcatcgcgccgccatgcatcgggcagggatggggccggtttcctcatgggatttgctgcccatgcaccccatgaactggagatcgctgtcaagaagctggcaagcgtgctgcgtgcgctgtgtcgccgatcaccatga

SEQ ID NO: 3766 - protein, 507 aa, Pseudomonas aeruginosa
MFKHAQLESVKAWLGDPAHGALPLHARVQRAIRQLILDGALDVGRPLPASRALAKSLGVSRDTVESAYGQLHAEGFIERRVGSGSFVSEQARWLPGRGRPRRTSVDRKAPLRLSRRGDAMLQGGGVRDFLMSRPFAPGVPETRSFPLPTWERLQRQVLKEYGTLALLHSPPQGMEPLRRAIAAYVNLERGAQATPERVLVLTSSQQAMTLCATVLLDAGERIFIEDPVYHGARKAFDAAGLDCVPVPMDDQGMQIAHLLAKAQTPCNAARAVFLTPSHQFPTGATLALDRRLAVIEWARQHQAWIIEDDYDSEFHYEGKPTACVQGLDPHGRTIYIGTFTKSLFPGLRIGYMVLPEALVSPMTVARTLLDGHSAPIPQLTLARFIEGGHFGAHVRTMRAVYAERRDVLAQLVRQHLADFVEPRVPAGGMQMPCVFIRDIPEREAVESARRVGIDLLGLTALHASRRHASGRDGAGFLMGFAAHAPHELEIAVKKLASVLRALCRRSP

SEQ ID NO: 3767 - DNA, 1299 bp, Pseudomonas aeruginosa
atgaccgaggctttcaacacacggactgacggttacgccaaccgtgccgaattcgaggaatctcccatgcagacgaccgcccctcacctgatgcgcgcctacgcccgccaacctgtctctttcgtgcgcggtaacggcgcgcggctctgggacgatcagggtgtggagtacctagatgccattgccggtgtcgcggttaccagcctgggtcatgcccacccggaaatcgcggccgtcatcgccgaacaggccggggcgctgctgcacacttccaacgtgttccgcatcgactggcaggagcagttgggggaacgcctgtgtgcgctgaccgggatggaaagcgccttcttctgcaactcgggtgcggaagccaacgaaaccgccctcaagttggccaggctgcatgcccatcgcaggcaggtggcacgaccgcagatcctagtcatgggcaacgccttccatggccgcacgctggccacgctcgccgccacagacaacgcggccaaccagcagggtttcgggccgttgctgcctggctttctgcgtgctccctacggtgatatcagcgcggtacgccaggcggcagaacaatccccggacatcgtggcggtgttgatcgaatctgtacagggcgagggcggcattcgggtggccagtgccgaatacttgcgcgaactgcgcgctttatgcgaccagagggactggttgctgatgctcgacgagatccaggccggcatggggcgcaccggcgcgtggttcggatacgcgcacgcgggcatctcaccggatgtggtgaccctggcgaaagcgctgggcaatggctttcccatcggcgcgtgcctggcgcgcggtattgcggcagacctgttctcgccgggccagcacggctcgaccttcggcggcaatccgctggcttgccgggtggcctgcaccgtcctcgacatcatggcccgtgacaggatgcccgagcgcgccatggtgctgggcgctcgcttgctggtgggcctgcgcaaggcgctggcaggtcacccgcacgtcctcgccattcgcggcctgggactgatggtgggtatcgaactggaccggccctgcaaggaactagttgggcgcgcgctggctgagcagcgcctgctcatcaccgtgacccgagacaccgtgatcaggctattgccaccattcgtttgcgacgagcgtcagattgacgacatcgtggtgcgtgtagcgcgcctgctttcatcggacctggttgattgcgaggtttggtctgttccggctcagccgatggacatcaccgtatga

SEQ ID NO: 3768 - protein, 432 aa, Pseudomonas aeruginosa
MTEAFNTRTDGYANRAEFEESPMQTTAPHLMRAYARQPVSFVRGNGARLWDDQGVEYLDAIAGVAVTSLGHAHPEIAAVIAEQAGALLHTSNVFRIDWQEQLGERLCALTGMESAFFCNSGAEANETALKLARLHAHRRQVARPQILVMGNAFHGRTLATLAATDNAANQQGFGPLLPGFLRAPYGDISAVRQAAEQSPDIVAVLIESVQGEGGIRVASAEYLRELRALCDQRDWLLMLDEIQAGMGRTGAWFGYAHAGISPDVVTLAKALGNGFPIGACLARGIAADLFSPGQHGSTFGGNPLACRVACTVLDIMARDRMPERAMVLGARLLVGLRKALAGHPHVLAIRGLGLMVGIELDRPCKELVGRALAEQRLLITVTRDTVIRLLPPFVCDERQIDDIVVRVARLLSSDLVDCEVWSVPAQPMDITV

SEQ ID NO: 3769 - DNA, 996 bp, Enterobacter cloacae
atggatgttgtcgccgagcatcgaggccaggaagccgtctccgaacttctgcatcagcttctgcgcggtgactgccccgatggtcgggatgcgcttcaaggctttcagcacggccgaggactggtcgctgccggacaggctgcgtgggcggatcagcgtccacaggggcgctgcgcaatggctgcacttcctgcggtactcctcggcttcgagcgcgaccgggttgaccggctcgccgtcgaggtcggtgatgaccgtgccgcagtccgggcaggccgccacgtcgccgtggcgggtgcgccgctgggtgaagacaggcttccagtggaaccccatccgcatcctgacgcgccccaggacaaagaactcctggccggtcggctgcacacccaactgctcgcgcagcttgatgagcttgaccaaggtatcggggccgttgagcacccagaccttcgcgcccgctactgtctcctggatctcgcgccgccacttgtaaacaaggtgcgggggcgagagaaccaaggtccggcggtagccttcggcgttgagcacagcggccgtggcgatgccgacggtcgtcttgccgcagcccatctcgccattgacgatcgcggcgcgctcgccacggtcaatcagcagctccgcggcggcgtggacgacttcggcctgggcctggaacagcttgcgcttgaggctggcgacgatgagctggcgatgtgcttgcggttggccggtatagaccggcgggttggcgctgttgagggcgtcgagcagttcgtcgccgaactcgccgacgaaatcctgaaggctcagggtcagaggggaagattccgcgtcgagcagttcgccctgtacgggcgcggcttcagcggcattggtttcgagatcgagggacatggtgatgctccaaagaaaaaggggcatgcaccacccccagcggggcagtggcatgccccgtggtgggaagtaaatcgacgcgtggccgacggtggttga

SEQ ID NO: 3770 - protein, 331 aa, Enterobacter cloacae
MDVVAEHRGQEAVSELLHQLLRGDCPDGRDALQGFQHGRGLVAAGQAAWADQRPQGRCAMAALPAVLLGFERDRVDRLAVEVGDDRAAVRAGRHVAVAGAPLGEDRLPVEPHPHPDAPQDKELLAGRLHTQLLAQLDELDQGIGAVEHPDLRARYCLLDLAPPLVNKVRGRENQGPAVAFGVEHSGRGDADGRLAAAHLAIDDRGALATVNQQLRGGVDDFGLGLEQLALEAGDDELAMCLRLAGIDRRVGAVEGVEQFVAELADEILKAQGQRGRFRVEQFALYGRGFSGIGFEIEGHGDAPKKKGHAPPPAGQWHAPWWEVNRRVADGG

SEQ ID NO: 3771 - DNA, 432 bp, Pseudomonas aeruginosa
atgtcatccatcctgcgcctcgaccgcctgcgccagttcatcggcgagctggcgacactgctcgacagccgtcccgacgaatccgccctgctcgcccaagcccaccccctgctggccgagctggtgcgccaggacgactggctgccggaagactgcgcccgccccgatccacagcgctaccaacagtacctgctgcatgtcgactcacggcagcgcttctcggtggtcagcttcgtctgggggccgggccagatcacaccggtacacgatcatcgggtctggggcctgatcggcatgctccgcggggccgaatactcgcagccgtacgccttcgatgcggggggcgtccgcatcccagcggagcccgtcgacgcctggagcccggcgaggtcgaagcgctgtcgccacgcattggcgacgtgcaccaggtga

SEQ ID NO: 3772 - protein, 143 aa, Pseudomonas aeruginosa
MSSILRLDRLRQFIGELATLLDSRPDESALLAQAHPLLAELVRQDDWLPEDCARPDPQRYQQYLLHVDSRQRFSVVSFVWGPGQITPVHDHRVWGLIGMLRGAEYSQPYAFDAGGVRIPAEPVDAWSPARSKRCRHALATCTR

SEQ ID NO: 3773 - DNA, 3738 bp, Pseudomonas aeruginosa
atgtggaaaatctggtccaacctccaacgattcggccgacccgtcctgcgctggttcaagcctggcgtgccgctgatgctgttggtgctcatgcttctggcactgggcgccatctggtggctcgggccccaatggacctggggcgaacgccagcctcttggaaacctgaccgcgcgcgtccttgctacggtcgtgctgctggtcatcccgctgctggcatgggctctgcgcctgcgccaacgcgcgcgacagctggaggccgaacgcaagcacgatgatgcagtgcaggtagacgcctgcctgcggtacgtcgaggcgcaggaacgcgatctcgatcggagcctggcgctgctccagtcccacctcaagggacgtcacgccctgtaccagatgccctggtacctggtgctggggcaggagaactcgggcaagaccagcttcgttaaccgttccaatcagagcttctcgctgaccggagaagtgaaagctggcagccggcgcctgcaggaggacccggacaagatctacaccatcgactggtggataggcgcccaggcagtgctcatcgatccacccggggaaatcatcagccagccccggattggcgccgacgcgaaagatggcggcatgcaggatgctgcggccgtcgacaaaggtgtctcggcgcgccggctcccggcaggattgccggaagatctccattcgcgtctgtgggacagctttgtcgcctggcttggacgcaaccgcagccgtcggccgctcaacggcgtggtgttgatggtcagcctagtcaccttgctgaatcagaagcccagtgaccgtaaagctctggccgcgctactgcgcgcccggctgaccgaactcagccgcgagctcggcacacgcccgcccttgtatgtcgtgctcagtaagttcgacctgctcgaaggcttcgagaccctgtttgcccgtctgccaaaatccgcgcgggaggacattttcggctttagtttcaccttggattccgtgcgggactacgatgcctggctggaggagcttggcgtgcgctacgacgctttcctgggccggctgaacgagcaggtcttcgacgccatggcggacgttactgaaacgtcgcaacgcgaatcgctgtattccctggtgcggcagctgtcaggcctgcgaccggtgctgttgggtttcctggcggatgtgatgggcagcgatcgcttcgccaccccagctctaccgcgcggcgtgttcttctcctcggtgtaccagcagggcgtgctcaacaacgccttcgtggcatcggccgcaaggacctacgacctgcgcgagccggtcaatgacgtacaccccagcgggcgggcgatggtctacttcgcccagcaactgtttcaacggatcatctaccccgagtccggccttgccggcgacaatccgcgggtccttgcgcagaagaagcatgccctggtcctgcgcttcggcattgcgtcgctgggcagcatgctgctcatcggcggctggtaccactactacgcggtcaaccgcgacaaggccctgagcgtactggatcgcagccgagatttcagtgccagcgccatcgacggacagttggatccaaccggccgcaacctgctgcagccactgaaccagatcagcaatgcggtcgccgtctacggggactaccgggatgcctggccgctggtcgccgacatggggttgtaccagggacgggcgataggccccaaggttgacgaggcctacctggcgctgctgtcgcaacgcttcctgccggcgctggccagcggagtcatggaagaactggacggtaaggacaccgacagtgacgcccaactggccgctctgcgcgtgtaccggatgatcgaagaccggcccaaccgccgtccgccggtcgtcgaaggctggatggccgcgcagtggcaggcagccttccccggcgaggatcgcgtccagcgcaccctcatgcgccacctcgaatatgcaatgaagtatgccgacacgcgcctgccgcagtaccaggcccgggtcgcggtggttcagcggcaactgcgacagatccccttgccggagcgggtgtacatgaccatgcgccgagagtcgggagcgtccctgcgttcgccgctggatctacgcaacgaaattggcccggcctttgacatcgtctaccagcccgaattcgaaacagcgaagggggaggaggggagtcgcctgcccgccaacggccgcatcgatgccctgctgaccgccaggggttacagcagctacttcgctccgcacagcgaggatctcaccgaactggcgatgatcgaccagtgggccctgggcgagcgcagcaagatcgactattcggaagccgacaaggcagccttggccgagcgcatccgtgcgatctacagccgtgactacgtggacacctggcagcgcaacctcaaccagctcgagatacgggacttccaggacatcgcacaggcggtcagcatcctcggaagcgtcaccagtccggccgcgccgctgcgccgcctggtcgaaacggtgcgcgacaacagtgagcttggcgtcaaggcggttcctgccaagagcggtacggaaacagtggccgacaaggctgcttcgttggtcgacaagtcggtcaagaccagcgacgacgcgcagacggctccgccgatcatggacatcgcgcgcgccttcgcgcccatgagccaactcctggacgccaagggcgagcgtgcgtcttatctggacgaaaccatgcaggccatcggcagcgtgcaggacagggtgcgcatcgtccacgacagtccagaccgaggcaaggccgcacttggcttggtgctggaacgcttttctctgaaaggccccgaccccattgccaacctgcagcgcatcgccgctggactgccggagccgatgaaccggcaagtgggcaagctggccgacgaatcctcacgggtgatcctggtggaggcgctacgcgagttggagcgccgctgggatgccgatgtctatcgcttctaccgcgagcgcctggccaatcgctatccgttcaacccggccagccgagaggaagcttccctagaagatttcaccgcgttcttcggcccccagggtcggttgcagcagttccgcaacaagtacctgaacctcttcctcgaagaaaacctggaagccctgtactccgagcgccttggtggctacctggtgcgggccgacgtactgacccagttggagtcggccgaccgcatccgcgatgcattcttcaacagtcgtggcctgctgggcgtgcagttctacgtcgagcccctgggactagcgcctaacaagcgcagcagctcgctcagcgtcgaagggcaattggtcacctacaaccacggcccaaccaccagcaccgcgctcatctggccgaacaccctggcacctagcaacgaaagccgcatgaccctcgtcaacgccggcggcagcagtagcggcctggtctatcgcggcccctggtccctctaccgcctgttgagccaggcgcgcctgaatggcgcaaccagcaccagtgtggatatcagtttctccgcgccggacggtggcatgcgctaccgcgtcagcacggagaaggctaacaacccgttcacgcagccgctgttcaagggcttcgtgctgccacacacactgctgcaggatggcctgcgggcacgcgctgattctgatggcaacgccggaaggcgcctgcgcgaggctggataa

SEQ ID NO: 3774 - protein, 1245 aa, Pseudomonas aeruginosa
MWKIWSNLQRFGRPVLRWFKPGVPLMLLVLMLLALGAIWWLGPQWTWGERQPLGNLTARVLATVVLLVIPLLAWALRLRQRARQLEAERKHDDAVQVDACLRYVEAQERDLDRSLALLQSHLKGRHALYQMPWYLVLGQENSGKTSFVNRSNQSFSLTGEVKAGSRRLQEDPDKIYTIDWWIGAQAVLIDPPGEIISQPRIGADAKDGGMQDAAAVDKGVSARRLPAGLPEDLHSRLWDSFVAWLGRNRSRRPLNGVVLMVSLVTLLNQKPSDRKALAALLRARLTELSRELGTRPPLYVVLSKFDLLEGFETLFARLPKSAREDIFGFSFTLDSVRDYDAWLEELGVRYDAFLGRLNEQVFDAMADVTETSQRESLYSLVRQLSGLRPVLLGFLADVMGSDRFATPALPRGVFFSSVYQQGVLNNAFVASAARTYDLREPVNDVHPSGRAMVYFAQQLFQRIIYPESGLAGDNPRVLAQKKHALVLRFGIASLGSMLLIGGWYHYYAVNRDKALSVLDRSRDFSASAIDGQLDPTGRNLLQPLNQISNAVAVYGDYRDAWPLVADMGLYQGRAIGPKVDEAYLALLSQRFLPALASGVMEELDGKDTDSDAQLAALRVYRMIEDRPNRRPPVVEGWMAAQWQAAFPGEDRVQRTLMRHLEYAMKYADTRLPQYQARVAVVQRQLRQIPLPERVYMTMRRESGASLRSPLDLRNEIGPAFDIVYQPEFETAKGEEGSRLPANGRIDALLTARGYSSYFAPHSEDLTELAMIDQWALGERSKIDYSEADKAALAERIRAIYSRDYVDTWQRNLNQLEIRDFQDIAQAVSILGSVTSPAAPLRRLVETVRDNSELGVKAVPAKSGTETVADKAASLVDKSVKTSDDAQTAPPIMDIARAFAPMSQLLDAKGERASYLDETMQAIGSVQDRVRIVHDSPDRGKAALGLVLERFSLKGPDPIANLQRIAAGLPEPMNRQVGKLADESSRVILVEALRELERRWDADVYRFYRERLANRYPFNPASREEASLEDFTAFFGPQGRLQQFRNKYLNLFLEENLEALYSERLGGYLVRADVLTQLESADRIRDAFFNSRGLLGVQFYVEPLGLAPNKRSSSLSVEGQLVTYNHGPTTSTALIWPNTLAPSNESRMTLVNAGGSSSGLVYRGPWSLYRLLSQARLNGATSTSVDISFSAPDGGMRYRVSTEKANNPFTQPLFKGFVLPHTLLQDGLRARADSDGNAGRRLREAG

SEQ ID NO: 3775 - DNA, 2028 bp, Pseudomonas aeruginosa
atgaccatgcaaataatcgacgcacagtcgccggaagcgcacagcgccgacctcaaggccgaaaatatcgacaaactcaaagccttgttccctgagctgatcaccgaaggccctaatggcgtggccatcaaccaggatgtgctcaaacagctagtcggcgacgccactgtaaccgacgccgacgaaaagtacggcctgaactggcacggcaagcgcgcagcacgccaactggcgctcacgcccagcactggcacgctactgccctgccccgatgaaagtgtggattgggacaccacacaaaacctgatgatcgagggcgataacctcgaagtgctcaagctgctgcaaaagagctatgcgggcaaggtcaagctgatctatatcgatccgccatacaacactggtgacgactttgtgtatccagataatttcgaagatagtatctctagctatctagaactaaccgggcaagttgagtccggaagaaaaataaccagcaacaccgaagctagcggccgattccatactgcatggttaaacatgctccaccctagactcaagctagccagaaatctgctccaatcagatggctacattgcggttagcataaatgatcgcgagctaagccaccttcgccaaataatgaacgaaattttcggcgaagagaacttcatctctgtattggtctatgacaaaaatagaaaaaacgacgcaaaacttgtatccaacggacatgaatacatggtgatttatggaaaaaataaatcactactaacagagcttgacgtacgactgcgcgccccaaaagaaggcgcagatgaagtaaaagaaatctttgagaaacttagaaaagaactcaatgacgactggaaaaaaattgctgatgaactaaaaaaattctattctacatttagcgaggacgaccctcgactccccctagcaagatttaccaaagttgatgagcgcggcccatatcgagatgacggagatccaagttggcctggcggcggcgggcctcgctatgaagtccctcatatcaaaacaggtaagccatgtaaaattccaagcagggggtgggtatggccaacttacgagcgcatgaaggaagaaattgacgcaggcaatatagcctttgggcaagacgaaacaaccatcccgtcagtacgaagaaatcttttcgagaaaaacgatcaggttatgcgtagcgtgcagttcagctatgctcaaaaagcaagccaagattttgcagaaatttttgatggcaagagcatttttcagaatcctaaaagctacctggacatgaagaagatagttgagtacttctcttcgggtaacgacgtcgttttagatttttttgcaggatcaggtaccaccggacacggcgtaatgcttgcaaacgccgatggcaatcagcgccggcgtttcatacttgtgcagctacccgagccactagatctagaaaacaaagaccagaaaaacgctgcagaattttgtttggaatcaggttttcagatgaaactatctgaaataacgaaagaacgcttacgcagagcagcaatcagagtaaacagtgaatttcctagctatcagggcgattttggcttccgcgtttataaacttgacgtttccaatatccgggcttgggatcaaaatccagaagatattgaacgcagccttcttgatcaccagaatcaccttattgaaggcaggagcgagtccgacattctctacgaactgctgctaaagctcggtctagacctgtgcgtaccgatcgagcaacagcagatcgccggcaaaaccgtacacagcatcggcggtggcgtcctgctggcttgccttgcggagcgaattactcgcgatcaggtggaagacctggctcagggtattgttgcatggcacaaggcacaagccccagccagcgatagcacctgcgtgttccgtgacagcgcatttgccgacgacattgccaaaaccaacttggccgccattctcaaccaggccggcatcaaaaacgtgcggagcctgtaa

SEQ ID NO: 3776 - protein, 675 aa, Pseudomonas aeruginosa
MTMQIIDAQSPEAHSADLKAENIDKLKALFPELITEGPNGVAINQDVLKQLVGDATVTDADEKYGLNWHGKRAARQLALTPSTGTLLPCPDESVDWDTTQNLMIEGDNLEVLKLLQKSYAGKVKLIYIDPPYNTGDDFVYPDNFEDSISSYLELTGQVESGRKITSNTEASGRFHTAWLNMLHPRLKLARNLLQSDGYIAVSINDRELSHLRQIMNEIFGEENFISVLVYDKNRKNDAKLVSNGHEYMVIYGKNKSLLTELDVRLRAPKEGADEVKEIFEKLRKELNDDWKKIADELKKFYSTFSEDDPRLPLARFTKVDERGPYRDDGDPSWPGGGGPRYEVPHIKTGKPCKIPSRGWVWPTYERMKEEIDAGNIAFGQDETTIPSVRRNLFEKNDQVMRSVQFSYAQKASQDFAEIFDGKSIFQNPKSYLDMKKIVEYFSSGNDVVLDFFAGSGTTGHGVMLANADGNQRRRFILVQLPEPLDLENKDQKNAAEFCLESGFQMKLSEITKERLRRAAIRVNSEFPSYQGDFGFRVYKLDVSNIRAWDQNPEDIERSLLDHQNHLIEGRSESDILYELLLKLGLDLCVPIEQQQIAGKTVHSIGGGVLLACLAERITRDQVEDLAQGIVAWHKAQAPASDSTCVFRDSAFADDIAKTNLAAILNQAGIKNVRSL

SEQ ID NO: 3777 - DNA, 1902 bp, Pseudomonas aeruginosa
atgacgatgcaacccctctggtatttgcctctcagtaatgaatttagcaagagcttggtcagtggtggagcgctgggtgtcgagcagttaagcaagtatgagctggcagcgatagtctatctattgcagctgcccaagctagcgagtcaatctagatcccccctagatatggagcgcatttttgccgggttactggtgcacccgagtgatctcctggcatcagcgctaaccaattcttatagtcgcgatgcctttgtggctggcttactgcttgcctctaccgtgggtattggcctaattgatgcgagtgcggtggcgcagcgccaatacgttcatggtgacggctcatggaatttcgatttctccagagcctatgcacctccgcctcatattgcaaagtacgaacacattcggcctggtgggcagcttatccgcttgagtgatccgcagcatcggctaatcgaaaccattcgtgccaaccgtgaggactcaattgaaacccaggcgtatgctggctcgggtaagaccttcgttttgaaggagatcgtgactatattgcatgataagaagtgtctctttcttgctgatgcagacagcaagctttggtcggtcaggaaaaagtttcctaaagaaaaaattaaaactctaacgtttttcaatttggcctgtcggattttgtcccatggtagtccactgctagatgcgaagataagagcggccgccagtcggaatttttctgatgagagcgtggctgaacgcctaaatatttcttccttgggcagcttaagtggtcagcaggtagtacgcgtgttgcgtccagcaatacaaaaattctgcctctccaaagaaattgaagtgagtgctaagcacttacccacttcattgttggcgtctctctctcccgcacaacagaagctattgattgcggttgctaatcagctttgggctgcaatgatcgatcttgatcgacaagacttggccattccggtcaatggttggcatcgcctgaagcagatagccctgatagggctaaatatcccggcttcagttgatgtcgtgatcattgatgaagggcacgacctgataagccccctggttgaaattcttgatcgctcgccgcaagtggtgattaccttgggggatcaattccagaacctccaaggccgttacgtatctcacgccgcaaagattcgtcaccgagaaatgacactctccttgcgggcgggcccccagattgccgactacctaaatccacttatcgacatctttccagacgcgcgggttgagccattcattggcaacgtcgagaaagaaactctcactgcggaataccgagcagatcagtttccagaagagccatctacaatcttgacagcagatgagtggggcgtgttcgattggctgattcgcaatcgacgattaggtgcgggggctgcggtagctagcagcgttaacctcggaacttttctgcaggactgtctcggtctttacactggcctgtctgccccgcagcactcccggcttgtacgctatcgttcctggggggagctgcgttccaagatgttctggaaccaagcttttttacgtgtagaggaatggctggaaaaggtcggcacgaagtttggagtttcaggcttggttaacagagccgagctggatgaactcggtggtggtattccttgccggcatttgattgctactgtagcgtctacaaagaattttgagctaccaagggtagcgatttccgaagatctatattacttcgaagatttacgcgggaaacgtgaaatgtcgcgaaagctagcgctactctataccgccattacgcgctgctccgggaagatatactttccgagtacgcatggcgactggatcaattgtattgtgcagtccaggcactga

SEQ ID NO: 3778 - protein, 633 aa, Pseudomonas aeruginosa
MTMQPLWYLPLSNEFSKSLVSGGALGVEQLSKYELAAIVYLLQLPKLASQSRSPLDMERIFAGLLVHPSDLLASALTNSYSRDAFVAGLLLASTVGIGLIDASAVAQRQYVHGDGSWNFDFSRAYAPPPHIAKYEHIRPGGQLIRLSDPQHRLIETIRANREDSIETQAYAGSGKTFVLKEIVTILHDKKCLFLADADSKLWSVRKKFPKEKIKTLTFFNLACRILSHGSPLLDAKIRAAASRNFSDESVAERLNISSLGSLSGQQVVRVLRPAIQKFCLSKEIEVSAKHLPTSLLASLSPAQQKLLIAVANQLWAAMIDLDRQDLAIPVNGWHRLKQIALIGLNIPASVDVVIIDEGHDLISPLVEILDRSPQVVITLGDQFQNLQGRYVSHAAKIRHREMTLSLRAGPQIADYLNPLIDIFPDARVEPFIGNVEKETLTAEYRADQFPEEPSTILTADEWGVFDWLIRNRRLGAGAAVASSVNLGTFLQDCLGLYTGLSAPQHSRLVRYRSWGELRSKMFWNQAFLRVEEWLEKVGTKFGVSGLVNRAELDELGGGIPCRHLIATVASTKNFELPRVAISEDLYYFEDLRGKREMSRKLALLYTAITRCSGKIYFPSTHGDWINCIVQSRH

SEQ ID NO: 3779 - DNA, 1299 bp, Pseudomonas aeruginosa
atgtctgacgttatcgtgagccatagttttcatccggtgggccaggggctatttagcaccgggatgatttattctccgggtcgtgaggggcccttgtttgtttggatttatgactgtggtaccacttcttcgcagtcatacctggatgacgcgttgcacaggttctcgacggtccagcatgtagacctcgttaccatttcgcattttgacaaggaccacatcagtggcatggtcaagctgcttatgagggtctcggtcgaagaattactattgccgtacatgccgctctggcagaggctcgtcctgataattgaggcgggcatcacgtttagagcacccttagcccgattcctcctggaccctgttgggttcatctcagaaattccgaatgcgaacgtcaagcgcattctgttttctatgccctcaagtgatgcaggtgagtcaactgaccttcctaagcctgacggaagccagccgctggataaacagagcaatacaaagcaaagaaaagaagagcgaaaatccgacaatgggcgcaatggcaacaggctagagattgaaatcgaggccatcgatgagacgagcctgccaccggaagatgagaggcgccgctacaaagaagaggtcaaggcaaaatcgggcattgaagtgctgtacctgagaccaggttctgccattacagtggccggtttctgggaattcgtaccgtacaacgatgcaagcctcgcaggtaaggtgtccaaaagctttaaggctcgtgtagagaagcttcgccacgacctgctgaatgagcaagatccagatgataaagccttggcgctgtatggactgaagaaggcatatatcaagacgttcggcttcggttcggaggagcggaacgtaatttctctcttcctatatgccggcttgatcaatcgggaccactattggggccccagcacaagctacacatacgggtacgctcggcacgcctacaccttcggcacgccgtgtggtggagtgctgtatacgggagacggctacctaaataaccagtctcgctttgatgctttacatcagtacttaggtgaggagcgcatgcaaagtattcacgtacttcaggtgatgcatcacggctccagaagtaactggttccctggtatagccgcaaaaattagtccccaatacagtgttttctgctcagacccggctcaccgtggctacaagcatcctcatgcagaagtgctgagagatttttgggggtttgggcctgttcaggttgataaggacaatagagtcgatttcgagatgcacctgtag

SEQ ID NO: 3780 - protein, 432 aa, Pseudomonas aeruginosa
MSDVIVSHSFHPVGQGLFSTGMIYSPGREGPLFVWIYDCGTTSSQSYLDDALHRFSTVQHVDLVTISHFDKDHISGMVKLLMRVSVEELLLPYMPLWQRLVLIIEAGITFRAPLARFLLDPVGFISEIPNANVKRILFSMPSSDAGESTDLPKPDGSQPLDKQSNTKQRKEERKSDNGRNGNRLEIEIEAIDETSLPPEDERRRYKEEVKAKSGIEVLYLRPGSAITVAGFWEFVPYNDASLAGKVSKSFKARVEKLRHDLLNEQDPDDKALALYGLKKAYIKTFGFGSEERNVISLFLYAGLINRDHYWGPSTSYTYGYARHAYTFGTPCGGVLYTGDGYLNNQSRFDALHQYLGEERMQSIHVLQVMHHGSRSNWFPGIAAKISPQYSVFCSDPAHRGYKHPHAEVLRDFWGFGPVQVDKDNRVDFEMHL

SEQ ID NO: 3781 - DNA, 966 bp, Pseudomonas aeruginosa
atgttcgttcatgacgatgaacattgctggtcattggtagcaccacacaagctgaccctggttcttgaggaagaagcttgggtcagggcctcctcatttgaagacgtgcttgcagtaacaggatcgcctctggatgaacccgtctcggaggtcgagttcgtagtgcctaaaggctgcaagatcatgatcgacgcagcggcgcgcatccttgcgctgtgtaatcaaacggtcaagattgggaaaaccgtctcgattgatttcagcgcgtgcaaggcgacgttgacgtacttcaatcgactaggcttttttgatcacctatcagggatggtgaacgtggttccggagcgtccttcccagtcaggcgcggcaacctaccgtggcaataatgacggtgtggtcgagcttgcttcgattgacccccgcattcccgatgaatccatccccaaacgcttgaaaaacagtctggtgaagtgtgccggtgagcgatattcgcagtccgcgtttacgttcatttctgagctgttcggcaatgtgcgggatcatgcaaagtctgaaattccgggctttgcggctcttcagcactacccgaaaggtggcaagattcagacggtgatctctgacagcgggattggcattgtgggaagccttcagcccgttctggcgcacaagtaccaggcgctttctcgaacgctcgatttttcgaaacctgaggcaggcccagaactggtattgcatgtgtttaagcagggacgaatctccagctctgatgatgatggccgggggctcgggttgaagcgaagtggtgacgtagccgccgatttcaacgccaccgttacggtccggcaaaaaaacttcgagctgacaatggtttacagcgatggccgactcaatcgcagtgaccatcggctagatatgccgaccatcctaggtacccatatctgcttcgacttcttaattgacagctaa

SEQ ID NO: 3782 - protein, 321 aa, Pseudomonas aeruginosa
MFVHDDEHCWSLVAPHKLTLVLEEEAWVRASSFEDVLAVTGSPLDEPVSEVEFVVPKGCKIMIDAAARILALCNQTVKIGKTVSIDFSACKATLTYFNRLGFFDHLSGMVNVVPERPSQSGAATYRGNNDGVVELASIDPRIPDESIPKRLKNSLVKCAGERYSQSAFTFISELFGNVRDHAKSEIPGFAALQHYPKGGKIQTVISDSGIGIVGSLQPVLAHKYQALSRTLDFSKPEAGPELVLHVFKQGRISSSDDDGRGLGLKRSGDVAADFNATVTVRQKNFELTMVYSDGRLNRSDHRLDMPTILGTHICFDFLIDS

SEQ ID NO: 3783 - DNA, 1050 bp, Pseudomonas aeruginosa
gtgggagaaagagaagatctcttggcatctattgccaataccatcagtacgtatcgagtgggcgaaatcgcccaacctacgccagatcatgtcgggcggtgggtaagccagttcacaccagagaatcagctttcgtttcttcgtgaatttgatcacgtgatccgccagacctttctgacgaaagaggtcgtgacgcgctttctgagcaatctagtcacgaacgaaaaattggcaggccaggatccaagagcatactgggcccgtgccaacttcctgcgggttcaaaaggcgggacagagccagaaggaaatgcttagcctctttggtgaggtgcttcagcagcaatgcggcctacagcttgctgactgtggggtagagggcggcgacttcatctaccttgacgatgtgcttttcactggtgggcgggtggcgacggatcttcaggcctggattaccgacagggctccggcgaacgcggttgttcatgtgattctgatggcctaccacactagcggccactactacatcacgagcaatcgattgaaaaaggccatagaggcctcgggaaagaaggttcaggtccatttctggcgcttggtcgagctaaagaatcagaaaagccagaaagattctgccgacgtgctatggcccgcagtggttcctgaagtggcttctgtgcaggcatacgtggcctcagagcagagattccctcttgccctgagaaacgcgggcggagctttgggggtgttcagttcagagcaggggcgccagctgctggaaaccgagttcttgatcgcgggggtcaagatcaggtcgctgacccagtctcccaaagacttcatcaggccgcttggttgtggcagttttggggtaggctttggatcattagtagcaacgtaccggaactgccccaacaattgtccattggctttatggtggggtgacccccaggtcaatgcgggcgcgctccattggtaccccttgttggcgcgtaagacctacgcagcgccagagaatatcttcaatgtcctcgatgacctcaccgcgtaa

SEQ ID NO: 3784 - protein, 349 aa, Pseudomonas aeruginosa
MGEREDLLASIANTISTYRVGEIAQPTPDHVGRWVSQFTPENQLSFLREFDHVIRQTFLTKEVVTRFLSNLVTNEKLAGQDPRAYWARANFLRVQKAGQSQKEMLSLFGEVLQQQCGLQLADCGVEGGDFIYLDDVLFTGGRVATDLQAWITDRAPANAVVHVILMAYHTSGHYYITSNRLKKAIEASGKKVQVHFWRLVELKNQKSQKDSADVLWPAVVPEVASVQAYVASEQRFPLALRNAGGALGVFSSEQGRQLLETEFLIAGVKIRSLTQSPKDFIRPLGCGSFGVGFGSLVATYRNCPNNCPLALWWGDPQVNAGALHWYPLLARKTYAAPENIFNVLDDLTA

SEQ ID NO: 3785 - DNA, 1143 bp, Pseudomonas aeruginosa
atgcgtgaacagtatgaccgaagccaattgctcgacgaggtctgggccgaaccggtgaaggtcgtagcgccacgctatggcctgtccgatgtcggcttgaagaaactctgcgcacgcttgcaagtgccgacgccggcacgtggccattgggccaaggtgaaagctggacgtggtgtaccgccaaaaccgaagctgaaggatttcaaaggtgatccccgtcagttgcttaagccgttcgttccgccagcggcaagggtgccagagccggaactggcagatcagcgttttcaggcggtggaggcgcgggaaaaagaccccgcgcatcgcatcaccgtcccagtccgagtgacccgctggcacccgctggttacggcctcccgcgatgccttccaaaagccatataaggacagtcgcggcctcccgctaccccacggcaaagggctcgacattgttgtatcggcagcgcaacgcccccgcgcgttacgcttggcgaatacgctggttcaagctttggaagcgcgcggtttcctcctagtggccgggagtcggcatctagaggtggaggtattcggggtgtgcctgtctttgagcatcgtggagtcaaccacgcgcgctgactatgtacccacggccgctgaactggcggagaaggcacgtcgaggatggggctactggcctcgatacacctacaccccctcggggcgcttggaagttcgaggtgacggcgggtatggcggcttgattcgggacggcgcacgccagcaagtcgaggagcagcttaacaagctggtcatcgggatggccaagcgggccgtgggtatcctctgctaccgcgaggagcgggcccgcgcagaagcgttacgagagattcagcgtcgcgaagcgctggtgcagaaggcactccaggaagcggagcagcagaagctaaaggagcttcgagccgctgcgcggcgctggcaggaggcgcagctgatccgagcctacctggatgccgtcgagcaggctgacctagtgcgtggagatggctccagtgaagcgcagcgggcttacctgcactgggcgcgggcgaaggccgattggctggaccccctggtcgacgcccccgatccccttttggaccaggtcattcaggtgccgtactaa

SEQ ID NO: 3786 - protein, 380 aa, Pseudomonas aeruginosa
MREQYDRSQLLDEVWAEPVKVVAPRYGLSDVGLKKLCARLQVPTPARGHWAKVKAGRGVPPKPKLKDFKGDPRQLLKPFVPPAARVPEPELADQRFQAVEAREKDPAHRITVPVRVTRWHPLVTASRDAFQKPYKDSRGLPLPHGKGLDIVVSAAQRPRALRLANTLVQALEARGFLLVAGSRHLEVEVFGVCLSLSIVESTTRADYVPTAAELAEKARRGWGYWPRYTYTPSGRLEVRGDGGYGGLIRDGARQQVEEQLNKLVIGMAKRAVGILCYREERARAEALREIQRREALVQKALQEAEQQKLKELRAAARRWQEAQLIRAYLDAVEQADLVRGDGSSEAQRAYLHWARAKADWLDPLVDAPDPLLDQVIQVPY

SEQ ID NO: 3787 - DNA, 333 bp, Pseudomonas aeruginosa
atgctgacactgcgaaaacggcaacaactgctgacggcactgctggaagactatcccgaggaatacattgacggttacgtaatcgacgcccgcatcgattgccattgcctgagcggatacatctacaaagcgctcggttacgacaatggcgagctgttcaccgccgacgtcgaatgtatcgtgcggtacgcgcgtcgctacgttgtgcgcagccgccattcggcgtatctgatcgtcaattttcacccgcagggcggtcgtcgctcgctgcgcgaaacgctggcgattttcacgcgtggcaccgcgctgtcgatgccatcgacgcgacagtga

SEQ ID NO: 3788 - protein, 110 aa, Pseudomonas aeruginosa
MLTLRKRQQLLTALLEDYPEEYIDGYVIDARIDCHCLSGYIYKALGYDNGELFTADVECIVRYARRYVVRSRHSAYLIVNFHPQGGRRSLRETLAIFTRGTALSMPSTRQ

SEQ ID NO: 3789 - DNA, 681 bp, Pseudomonas aeruginosa
atgagaaagtttggcaatggctcagaggtcatgcgcggtgaagcgaaatatcgggttgtgtcatatcgtccccataactcccaaattcgacttgaggacttgccagagaagcagcagctggggctgcacgacatgtccgcgcgtcgtgggctgacaccggaccagattattggcgtgcttcagtgcgtactggatggccgcctccgtccgacgggccagcttcccgatcttcctgggttggcaggcctgcgcttcgaccgccgagaggttgaggcgctgttggcagcggacgttgaggacgcgcacgagccgacgctgctgattaccgacgtcgtgcgaatgcagggttggaagcacgaaagcatcctggcttggatcaaggcgggccacctgcgcgtggttcacgagcaacgcggtcaacagcaggtgacggcgattcctgtttcagcactgctcgacttcctctcgcgctacctggtgctggctgatgcggctgagcgcgtcggcagcaaatcgaattggattctgcgggggttgatgcccgccggcgtcgcggcggttggcggggcgtccctaccgggcggtgggcagcgtggggtgttgctggagatcgatgccctcctccacgccgcgcaatggaacaagcgtctgccacacgaggtgccgccatgtgcgtggtga

SEQ ID NO: 3790 - protein, 226 aa, Pseudomonas aeruginosa
MRKFGNGSEVMRGEAKYRVVSYRPHNSQIRLEDLPEKQQLGLHDMSARRGLTPDQIIGVLQCVLDGRLRPTGQLPDLPGLAGLRFDRREVEALLAADVEDAHEPTLLITDVVRMQGWKHESILAWIKAGHLRVVHEQRGQQQVTAIPVSALLDFLSRYLVLADAAERVGSKSNWILRGLMPAGVAAVGGASLPGGGQRGVLLEIDALLHAAQWNKRLPHEVPPCAW

SEQ ID NO: 3791 - DNA, 726 bp, Pseudomonas aeruginosa
atgatcaaagacagcaaaacaccagagcatgcacgggatgtgacgcggcaacggagacgcgggcgtcgagccctcgcctattgctctcgaaagaatggcgatgtggaagtacgcgtagagtccggcctggagcatatggttggcatgcttttggaagccgaccctcgggtagtcagctatgtcgctcagccattcgtggtggagttggagtcaaatgcagttcttgcgaataaggatgcctatatcaaaaagcctggcgtgaaatcgagattttatactcccgattttgtatgccgcatggacgatggctctctgttggttgtagatgccaagcatgatcaatttctagaaaaattcgaggagcgacgcgaggatatctctcagtgtcttcggggacatgggatggattttcggatcataccgcaaagtcagattgatgctgtggtcatgcgaaatatttccatacttaatgggtggcgtgcgaatcaccttgatcaatatgtgaaagcatatagtgaagaggtttgtcggattttggaaactaagcctatttggcaggctgacgagctttctcagcatttgagtgcggggaaagccgccatctgctgcgcgctactcaccggggttctcaagagtaatttgcgccaatgcctattttcaggggttgccgttgtatcggcggcacatggtgatctccatcatttcgaaatactggagatccgctga

SEQ ID NO: 3792 - protein, 241 aa, Pseudomonas aeruginosa
MIKDSKTPEHARDVTRQRRRGRRALAYCSRKNGDVEVRVESGLEHMVGMLLEADPRVVSYVAQPFVVELESNAVLANKDAYIKKPGVKSRFYTPDFVCRMDDGSLLVVDAKHDQFLEKFEERREDISQCLRGHGMDFRIIPQSQIDAVVMRNISILNGWRANHLDQYVKAYSEEVCRILETKPIWQADELSQHLSAGKAAICCALLTGVLKSNLRQCLFSGVAVVSAAHGDLHHFEILEIR

SEQ ID NO: 3793 - DNA, 840 bp, Pseudomonas aeruginosa
atgcagcgagaagccgccgaccttgccggcatcgccctccagcgagcctgcgtcaccgggcaatgtttgcagcgtgacgaccttgcggccagcgtcgcgaccggtggcgatgcggtaggtcatcgaactcatccgcagcccatccatgccgtcgtcgctacccgcgctgtcggacaggaacacggattcgtcttcgccttcgagccagccgcggcgcgacaggtgccggcacacgcgatgcgcgatggtgttggccagttccgtcagttgcgccgatgtgggcgcacgggtgcggtgcaggcgcggcttgcgctgcggacgctcggtggtgtcctcgtacacgccgtcgagccacagcatgtggaagtgaacattcaggttcagcgcgctgccgaagcgctggatcagggtcaccgcaccgcattgcgccgtatcccgcggcacgccggcctgatcggcaagccaaccggcgatcacacgatgcacgatgcccagcaccgggctgatggcctccggcttgctggcgaacaggaagcgcaacgggtaggggaaactcagcacccattgccgcaccggccgcgggccgaacacctcgtccaccagatgccgcgccgactcggccatgcgccgtgcgccgcagctcgggcacagcccgcgcttcttgcaggaatacgccaccagcctctcggcacgacagtgctcgcagaccacgcgcaggaagccgtgctcgagcacgccgcagcgcaggtaggtctcgaactcctcgcgcacatactcgggcagcgggcggtcttcggcctcaagacgcgcgatgaagtccgggtagtgcgcctgcactag

SEQ ID NO: 3794 - protein, 279 aa, Pseudomonas aeruginosa
MQREAADLAGIALQRACVTGQCLQRDDLAASVATGGDAVGHRTHPQPIHAVVATRAVGQEHGFVFAFEPAAARQVPAHAMRDGVGQFRQLRRCGRTGAVQARLALRTLGGVLVHAVEPQHVEVNIQVQRAAEALDQGHRTALRRIPRHAGLIGKPTGDHTMHDAQHRADGLRLAGEQEAQRVGETQHPLPHRPRAEHLVHQMPRRLGHAPCAAARAQPALLAGIRHQPLGTTVLADHAQEAVLEHAAAQVGLELLAHILGQRAVFGLKTRDEVRVVRLH

SEQ ID NO: 3795 - DNA, 1449 bp, Pseudomonas aeruginosa
atggggactaagatatatgcactactcttgagggtcatgctgtttgtagtgtggtcattgcctattctggctgtttctccaagcgctaatgcagcaatctaccagtggaaggtttcgccttttggtatggagacaaagcgtttccctaaccctaatgcagcctgtgagtatgcatatacttctatatctagtaattgggataaaaagattgagccagatataaaaaatcgcgtagttcattgttatttttctggtaatggcgtgtattggcaggatatggcggccattctggagggggattcttgcccgttaggtgcggagtttaatggcgatacaggtatttgtgagtgcagtcctggttatgaaatggatgatattggatgtaagcctccggaaaagccgaaatgtgaagatactattggtacatggattcctcatcaatatccgattccggctgatggtgttgcgccttatccgcgtcctggcgtggtgtgttcgaaaagttgtcagtttgtagatgcttcgttggccccgaaaagttgttatacggcgggcgatagtgggttttgctacacgtattaccggggtaacggttcggagtgcaaagaaggtgatgaaactcaggtgaatccgtcgaaccctgcgccgaatcccgatccgggtgatggcggtgacgacccgaacaatccgaagccacctgtggagtgcatcgggggctatgtgtggaatggcaccaagtgcgtgaatccgagtgatccgccgccgcctgaccccagcaatccgggcggcgatggcaacggctctggcggcgatggtgagaacggcggaggcactgggggcggtacgggcggtggtaccggtggtggtactggaagcgggaacggtgacggttcaggaaccggctcgggtgaaggttccggcaacggtagcggtactggcagcggcacgggtacgggctcaggggaggggactggtggcggaggaggaggcggggacaagccgggggaggagtgcaagccgggtgagagctgcaacggctcgaccgatggcggcgataccgagtgcgacaagcccattgcctgcgacggcgacccgttccagtgcgcgatcctcaagcaggcccacaaggattcctgcgacctgcgcaagctgccgaccgataaggaaaagaaagacctccaggacctgattgaccagcagcagaagaagctcgacgccgaacagcaggcgctcgatggcaaggtcgatggcctgttctccgacttcaagcaggcagccagcggcagtagcgcgcaggggcggtgcctgaccgacgctcagttccaggtgctgggcagcagcttcacgctgccgttttcgcaggtgtgcgagttcctgcatctgttccggttcgcggtgatcgccatggcctatctggcggcggcccgcatcgtttctcgcggattctga

SEQ ID NO: 3796 - protein, 482 aa, Pseudomonas aeruginosa
MGTKIYALLLRVMLFVVWSLPILAVSPSANAAIYQWKVSPFGMETKRFPNPNAACEYAYTSISSNWDKKIEPDIKNRVVHCYFSGNGVYWQDMAAILEGDSCPLGAEFNGDTGICECSPGYEMDDIGCKPPEKPKCEDTIGTWIPHQYPIPADGVAPYPRPGVVCSKSCQFVDASLAPKSCYTAGDSGFCYTYYRGNGSECKEGDETQVNPSNPAPNPDPGDGGDDPNNPKPPVECIGGYVWNGTKCVNPSDPPPPDPSNPGGDGNGSGGDGENGGGTGGGTGGGTGGGTGSGNGDGSGTGSGEGSGNGSGTGSGTGTGSGEGTGGGGGGGDKPGEECKPGESCNGSTDGGDTECDKPIACDGDPFQCAILKQAHKDSCDLRKLPTDKEKKDLQDLIDQQQKKLDAEQQALDGKVDGLFSDFKQAASGSSAQGRCLTDAQFQVLGSSFTLPFSQVCEFLHLFRFAVIAMAYLAAARIVSRGF

SEQ ID NO: 3797 - DNA, 2145 bp, Pseudomonas aeruginosa
atggatatcgaaaaaatcacaaaggacatcctcgcatttagcgacccttttacggacagtaaaataaaaaacccagcaggaaaacgtagagtagaactaacaagaaacgcaagagaattagccttcgatatcgacaaaacttcaggaagaatctcctctaggcaccgaaaagcagactatcaaaatctaaaatcccttctagcttctccagaattttgcgatataagaaggcttgcagacactcagcatcggtactattcacggcaagaacacagtcccgagataccagccgaaataaccataaacaataagaaaattccagcagaaaatctagctgaaaaaatatcttctatcgatgggaaaatttcgttaacgctgctcgatggacctgccggtgtcggaaaaacacatcaaatcaaacaactagccaagaaacaagcagcaaattttttaagcgacaaccaatcaccacctgttttacacatcagcagcggaggaagaagactttcaaacttccccgacgtactggctgcaaccacacaagagatcggagcatgctttaatggaaagcaagtaccaatattagttcgtcacggattaataattgctgcaattgatggtttcgacgaactggttgatgctgacggctatgaagactcatggagggcccttcaacattttctcaatgatgtaggagactcaggacagataatacttgcggcaagagatacattcatcgaccaacaggaattactagaaagaataaacaaagaaaatttcgaaaacataaagcttgaacttggccatatcaatctagtatcaccagacagcgcgatagaatatctatccaagtctccacactggaaacctgacgatattaactcagaaatcactcgagatatcttatcagaaggtagctacgcacttcgaccattttttcttaatgtattgagagacgcaggtggctgggagaaagtaaaagacgagggcttcagatcctatctcgtcaatagcctaatcctgagggaggcaaaaataatttcttctacactaaaaggattagacgctcaagaagttatacctccactacaccatttattctctgaaatatcacttgaaatggcaattagagaaaacaacttaattgatctagagcacctttcatttattatgtcatatgtatttgagggggtcacagatgatgcttccatacgcaaactctctcataaatctggaagtacctctttacttgaaataacaaacgaaaaagacaagagaaaattcccccactcagaaattcaatactatttctttgcccatgccatacttgaagcactagcaggaaaatcaaccccttctgttcttcgaagaacaatactaggaaatgagcaacttgaagtattcgcagaagtatttgcatctaaagaaaaacaggcgaaagacgctacaacctacttgtactctgaactcaataaagatttgactgccgacagcctttcgaacaatggagccgcaataaccctactagcattctcgctaggtctgctcaacaggcttgactacctaacagttaatgaggccacttttgcagccggctcaccatcgggcgtcttaaacgacttttctgcgagtcgaatagatgcatgcggcgctgatctgacagacgtaacattcgagaaaactaggattaccacactagtaatcgatgaatacacaaaattcggaaaaagttatccacaaatagactcattagaaattcgtggtcctaactctcgcatagagcgctcaccagaaataattagcagcgaactctcaaaacacagcatagccacctcagaaaaaaattactcagagaatccagctataaaactattggaaaagctagcacggcgctcaaatcgttattgctacataagagaagagggcgatgacgagggttcattcttattaaaagatgacagatggccaatactcaaaaatattcttaaaaagcacaacagaattgatatcaaagtaaagaaacctatgcatggaagacctgctcctttattcagaatcaaaaaccccatggaactccttaatcactcactaccagaaacaataaaaatacttgatgatatattaaaaaacacccagcaatattaa

SEQ ID NO: 3798 - protein, 714 aa, Pseudomonas aeruginosa
MDIEKITKDILAFSDPFTDSKIKNPAGKRRVELTRNARELAFDIDKTSGRISSRHRKADYQNLKSLLASPEFCDIRRLADTQHRYYSRQEHSPEIPAEITINNKKIPAENLAEKISSIDGKISLTLLDGPAGVGKTHQIKQLAKKQAANFLSDNQSPPVLHISSGGRRLSNFPDVLAATTQEIGACFNGKQVPILVRHGLIIAAIDGFDELVDADGYEDSWRALQHFLNDVGDSGQIILAARDTFIDQQELLERINKENFENIKLELGHINLVSPDSAIEYLSKSPHWKPDDINSEITRDILSEGSYALRPFFLNVLRDAGGWEKVKDEGFRSYLVNSLILREAKIISSTLKGLDAQEVIPPLHHLFSEISLEMAIRENNLIDLEHLSFIMSYVFEGVTDDASIRKLSHKSGSTSLLEITNEKDKRKFPHSEIQYYFFAHAILEALAGKSTPSVLRRTILGNEQLEVFAEVFASKEKQAKDATTYLYSELNKDLTADSLSNNGAAITLLAFSLGLLNRLDYLTVNEATFAAGSPSGVLNDFSASRIDACGADLTDVTFEKTRITTLVIDEYTKFGKSYPQIDSLEIRGPNSRIERSPEIISSELSKHSIATSEKNYSENPAIKLLEKLARRSNRYCYIREEGDDEGSFLLKDDRWPILKNILKKHNRIDIKVKKPMHGRPAPLFRIKNPMELLNHSLPETIKILDDILKNTQQY

SEQ ID NO: 3799 - DNA, 291 bp, Pseudomonas aeruginosa
atgaatggcttggaaaaacacccaacgctgactgctgtgattcaaacggatgatgggcaggagcaaaggattttggtgaaagctattgttctttctgaagataaccacgcttatgcactggtcgatgagagtggtgagttgcgtcctgcaaaagcagagatcaaagaaaataatgcgcttaacatcctgttcttcaacgctgtctggatcgaaggcgatcgagtgtccaccctggacatcatcacgaaagagaagaaacttcatatcggcaagctgatcagccttagctga

SEQ ID NO: 3800 - protein, 96 aa, Pseudomonas aeruginosa
MNGLEKHPTLTAVIQTDDGQEQRILVKAIVLSEDNHAYALVDESGELRPAKAEIKENNALNILFFNAVWIEGDRVSTLDIITKEKKLHIGKLISLS

SEQ ID NO: 3801 - DNA, 243 bp, Pseudomonas aeruginosa
atgagcacgaccaagaagctgcggctcgggccgctgcccaagaccgagaacgtcaagctgacatttgcctgcccggccagcctgaaagccgagctcgaccgctacgccgcgatgcacgcgcagacgtatggcgaggcggtcgatgcagagaagttgatcccgcacatgctggaggcgttcatggcgggtgatcgtggcttcaagaggggagggcaggcagcgccgaagccatcggcgaagtga

SEQ ID NO: 3802 - protein, 80 aa, Pseudomonas aeruginosa
MSTTKKLRLGPLPKTENVKLTFACPASLKAELDRYAAMHAQTYGEAVDAEKLIPHMLEAFMAGDRGFKRGGQAAPKPSAK

SEQ ID NO: 3803 - DNA, 600 bp, Pseudomonas aeruginosa
atgacgacccgctccaacaccacatgcacgcacgaagccgcgccgcgtcctcgctcgcgcctgcgcaatcgcatcgtcgtggcgacactggccgccgtcggcctcgctgcgctggcctgggcggctttcgtgtcgccgctgccgcgtctgacctacagcccgtccgacagcgtggcggtcggctggtatcgcatcgaaccgctcgacccgcgcaccgcctcgctgccccgtccgctgtccgtggacagcatcgtgctggtgccgctgcccgccaaggccgccatgctggctgcgcagcgcggctacctgccggcgcgcgtgccgctgctcaagcgtgtgggcgccgtcgcgccgcaggaggtgtgcattactggccgcgttgtccgcatcgacagcgtgccttcggccgccgtgctgcccgctgaccgctggcgccggccgctgccatcctggcagcaatgccgccgccttgaacccggcgaactgttcctcttgagtgtgaccaacccggcgtcgttcgacagccggtatttcgggccggtcagcgcatccgccgtgatcggcgtggcgcatccggtctggctggagtcacgcccatga

SEQ ID NO: 3804 - protein, 199 aa, Pseudomonas aeruginosa
MTTRSNTTCTHEAAPRPRSRLRNRIVVATLAAVGLAALAWAAFVSPLPRLTYSPSDSVAVGWYRIEPLDPRTASLPRPLSVDSIVLVPLPAKAAMLAAQRGYLPARVPLLKRVGAVAPQEVCITGRVVRIDSVPSAAVLPADRWRRPLPSWQQCRRLEPGELFLLSVTNPASFDSRYFGPVSASAVIGVAHPVWLESRP

SEQ ID NO: 3805 - DNA, 768 bp, Pseudomonas aeruginosa
atggccgaagcgagcgccgagcattggtatcccaccgccgcctatctctacacactgcacctcgacggccccgcgctggcgtgggaattcctgcgccgcaatcccgactaccgccgcgactggctgcgccgccgccggccacaggccgccgaacgctggggtttgcgcctgctggaagatcccgacctggacgcgcgggacgcccatccggtctggttccccgaccatgacggcgtgatccagctctacccggacgccgacccgccaccggatgccgacgctttcgcgttctggtgcgtccctggcgacaagcatttgatccacgacggtacgcgcttggtgctgatgtcgcgctggcccggctgctgcgtgcggctcgcgcttgggccgggcctggaagacggcatggcctacctctacgccactcgcgcttgcgccacgccctgcgcgcgctatcgcacgttggcggccgagctggatgcgctgtccgccgcgaccgtggccgcgcctgcggcgtcggcccgctcccggcctacgctcgccgcagtgcaggagttgcacaccttgcaggcgctcgacgcgaccctcgcgggcgcgtccttgcgcgaggtggccgaaggactgttcggtgcggatgccgtcgcggccgactggcacaaggacagcgccttgcgtgcccgcgtgcggcggctggtgcggcgtggcgaggcgttcatgcgcagtggctatcgcagcctagcgcagctaccgccagttgcatcgcagtaa

SEQ ID NO: 3806 - protein, 255 aa, Pseudomonas aeruginosa
MAEASAEHWYPTAAYLYTLHLDGPALAWEFLRRNPDYRRDWLRRRRPQAAERWGLRLLEDPDLDARDAHPVWFPDHDGVIQLYPDADPPPDADAFAFWCVPGDKHLIHDGTRLVLMSRWPGCCVRLALGPGLEDGMAYLYATRACATPCARYRTLAAELDALSAATVAAPAASARSRPTLAAVQELHTLQALDATLAGASLREVAEGLFGADAVAADWHKDSALRARVRRLVRRGEAFMRSGYRSLAQLPPVASQ

SEQ ID NO: 3807 - DNA, 882 bp, Pseudomonas aeruginosa
atgaggcgctgcggagttcgctgcaggggcagggcgcacggcctctggccgggcagcccattcctgaccttggtagggctgggagaatgcctcgtccgggatgtgccgatactgaccatccagcacatcgtccgggctgagggtacgaaggtaaggctccggaagacgatcagcctcgggcatttggaaggtgcgcaggtgaggctcgacgcccatagctgcatcttcggcgatgtgcacttcctcctgggcgggctgagctgcgtcaggacctgcagcccccgccgaatcctgcggcagcgaagcgagcacatcggcaagcccgccatgactgggcggggcaacctctgcccaaactcgctccacatgagcacgatggcccgcatcgatcgcagagcgaatcatggactcgatcatcgtccactcgatcatctggcctgcgggatccgcagggttctccgaccagtcgtggttccgcaggatctcgcgcagcaaatagatcgaggagggcaggccatccatcagatcgtcttgcccggcctggtcaccaagcgcctccgcaggcgcaacgacttcttccagagcggactcgtcttccttaccggcttcgccctgttctttcagcgaatcacgaatggcggcttcgtcagccgcagtgtcatctgcagggacttcaacgaacccatcgtcgacttcgccgacgccggcctcttctcccgggttttcagactgcgttttcttcaagaagcccattctcgtcccctccagatgagatctgcactagaaccgcactgccggcaggcgcggcgtatccgtactgtgcacaaattttactttcgttgcattataataagcgactctagcaaacattcccatatatag

SEQ ID NO: 3808 - protein, 293 aa, Pseudomonas aeruginosa
MRRCGVRCRGRAHGLWPGSPFLTLVGLGECLVRDVPILTIQHIVRAEGTKVRLRKTISLGHLEGAQVRLDAHSCIFGDVHFLLGGLSCVRTCSPRRILRQRSEHIGKPAMTGRGNLCPNSLHMSTMARIDRRANHGLDHRPLDHLACGIRRVLRPVVVPQDLAQQIDRGGQAIHQIVLPGLVTKRLRRRNDFFQSGLVFLTGFALFFQRITNGGFVSRSVICRDFNEPIVDFADAGLFSRVFRLRFLQEAHSRPLQMRSALEPHCRQARRIRTVHKFYFRCIIISDSSKHSHI

SEQ ID NO: 3809 - DNA, 1104 bp, Pseudomonas aeruginosa
atggagagaccacctattactggggtgcttttggccttcggcgcagcaccctacaagttcgagaaagacgagtcggcaagcttctacgtccagttacagctgcccactggcgagaccaaaaccctatggggtgtgggcttggaaaaagcactcgaagactctggggtgcaacttggtgaggtcctgactgcccagaacctggggaggcagccagtcgaggtcgatatcaaggttcgtgacgaagacgggaaactaacgggcgaggtccgccgagaggtggtgcatcgcaacgtatggtcagtgatgggtgcgccggagttggactggcggcgggacgcggagcagaaggagcagcctggccaaagcgacaatgaccaggctcgtggtggccctgcggattcctcctcgaccgaaagggccgctgccggcgccaccgcgaccagtaccgatcaagttttcgcagatgcaggcaatgcgtcagctcaagaaacctcggtgaaagactcagcccgtactggatctcggcgggacaagcgagatcgctccccgtctcggggccggcgagcggagcccgccgaggcgggggtacaacagcatggggccgccggcaccggtggtggcctcggccccgacctggtatcgaaggccttttcggcgcccttcaatgtcgcaaccgcccttggcggcctgttctcgacttcctttaaagaggtggggcacaagttcacagcgcgaagcgtagatggctatggcgttctggaaggacagctttcggatctggccaatgccgttgagcgcaaggccacctggttgaagtcgcagggggagatagatggtcaggtggcaccaggtgctgcgcaaacggcggaagatctgaagcggcttctgggggatttcgacaccctttccggtcggttttccgatatgggcagcaagctcggatatgactacgccgaaactctggaaaaacattctacttccatgaagtccgccctcgatagtctaaatggaaaagtcgaaattattgctgagcttcaagagcttgtcagtaaacttgtagacaaacttgaacgacttttttcgaacataaaaatgggtcgataa

SEQ ID NO: 3810 - protein, 367 aa, Pseudomonas aeruginosa
MERPPITGVLLAFGAAPYKFEKDESASFYVQLQLPTGETKTLWGVGLEKALEDSGVQLGEVLTAQNLGRQPVEVDIKVRDEDGKLTGEVRREVVHRNVWSVMGAPELDWRRDAEQKEQPGQSDNDQARGGPADSSSTERAAAGATATSTDQVFADAGNASAQETSVKDSARTGSRRDKRDRSPSRGRRAEPAEAGVQQHGAAGTGGGLGPDLVSKAFSAPFNVATALGGLFSTSFKEVGHKFTARSVDGYGVLEGQLSDLANAVERKATWLKSQGEIDGQVAPGAAQTAEDLKRLLGDFDTLSGRFSDMGSKLGYDYAETLEKHSTSMKSALDSLNGKVEIIAELQELVSKLVDKLERLFSNIKMGR

SEQ ID NO: 3811 - DNA, 168 bp, Pseudomonas aeruginosa
atgggcaaggctcgcttgagggaagggcagctagaaaacagggcgatgacggtgttcaagttcttcttcctgttcgtcctgcaaaacatcgagctggctgatcagctgagcagccagctcggcatcgccctccagggcaacctgcatggcatggttgaccatgtgtga

SEQ ID NO: 3812 - protein, 55 aa, Pseudomonas aeruginosa
MGKARLREGQLENRAMTVFKFFFLFVLQNIELADQLSSQLGIALQGNLHGMVDHV

SEQ ID NO: 3813 - DNA, 471 bp, Pseudomonas aeruginosa
atgagcaaggccgaagaattcatcgcgcaagatttcgtttacgccggtcgccgcttgctgaagagcgggaagatgggaggagaggtgtttgtcgtgactggcagtgctcttggtgagcgcatgctttttgattaccgcacactgaaaggcaaggcggtgggcggcatctatcgtggcgcgagcttttctgccgatcaggtgcgcgacttgagcaaggcgagctaccagggccagtgggcggatgatctcgcccgcgtggactggcgggttcgtgatgaggccgccgaagcagagcagcgcaccgacaagctggaggccgatgccaagcgcgcccatgaaattgaggagctgctgctgccactgcggaagctgtacgccagttattcgcagcgtaacgactatggcggtaaggaagcgctagaggcagctgtattgcgcgccttgcgtcgtcgcccgcccaagacagcgtga

SEQ ID NO: 3814 - protein, 156 aa, Pseudomonas aeruginosa
MSKAEEFIAQDFVYAGRRLLKSGKMGGEVFVVTGSALGERMLFDYRTLKGKAVGGIYRGASFSADQVRDLSKASYQGQWADDLARVDWRVRDEAAEAEQRTDKLEADAKRAHEIEELLLPLRKLYASYSQRNDYGGKEALEAAVLRALRRRPPKTA

SEQ ID NO: 3815 - DNA, 840 bp, Pseudomonas aeruginosa
gtgcactttctgttccgttgctccccaaacggcagattcagggcttacgttggtttttggttccattgctccccaaacccccagaacgagacggcgccggtccaaattcatttcgaccagggcctgaaacgctcgcagcagatcttcgctgacatcaacagcaaggcggtcaagccatcgtctgccatcaacgcgctgtacgaccaccgcaatccctacaacgcctggatccagcagctactcaacggcatgcccagcatcaagaagcgcatcgacttcgagaacgcaacgcctgggcagcgctcgtacaaactatggagcctggtggcgttcaagaagttcgttaccctgctcacgggtgtcagtgagcgaaccatcggccaggtcgacgaaacacgcctgcagggcatcgctggattggttcgccaattcctggaggagtgcggaaaacatctgcctcaatgggcccacatgatcagtggtgggattcccgcggctgatgtgcgagaagtcatgatcattggtcatgcggtgttcttggaggcgctggggatttttggtcgggaagcactgtttgctggcacctatctgacgccgatcgagcgcgatgcaaaagtcattgacccgagccgtgcccgctggcattccatgcagcggctggccgctctagaaacgagcaaaagcgacgccatgtgggaaaatcgttgcgtcgtgctcgggaagatgcagaagactaccgacggtacaaagtccactgcagcaaaattgctgcaggtcgccggcatcgccttgccggaggatctagccgccgtgaacggccgggttgaagcgtctcaataa

SEQ ID NO: 3816 - protein, 279 aa, Pseudomonas aeruginosa
MHFLFRCSPNGRFRAYVGFWFHCSPNPQNETAPVQIHFDQGLKRSQQIFADINSKAVKPSSAINALYDHRNPYNAWIQQLLNGMPSIKKRIDFENATPGQRSYKLWSLVAFKKFVTLLTGVSERTIGQVDETRLQGIAGLVRQFLEECGKHLPQWAHMISGGIPAADVREVMIIGHAVFLEALGIFGREALFAGTYLTPIERDAKVIDPSRARWHSMQRLAALETSKSDAMWENRCVVLGKMQKTTDGTKSTAAKLLQVAGIALPEDLAAVNGRVEASQ

SEQ ID NO: 3817 - DNA, 879 bp, Citrobacter koseri
atgaaactgggatttattggcctgggaattatgggctcgccaatggctatcaatttggcacgcgccggtcatcaattacacgttacgactattggtccggtcgcggacgaactgctctcgctgggggcggtaaatgttgagactgcacgtcaggtaactgaatttgcagacattatcttcataatggtgccggatacgccgcaggttgaagaggtgttatttggcgaacacggttgcgccaaaacatcgcttcagggaaaaaccatcgtcgatatgagttctatttctcctatcgaaaccaaacgttttgcccagcgcgttaatgaaatgggcgctgattacctggatgccccggtttccgggggagaaatcggggcgcgtgaaggcactctgtcgattatggtcggcggcgagcagaaagtctttgaccgcgttaaaccgctctttgacatcctgggaaaaaatatcaccctggtgggcggcaatggggatgggcaaacctgtaaggtggctaaccaaattattgttgcgctgaatattgaagcggtttctgaagccttagtgtttgcttcaaaagcaggcgccgatccggtacgcgtgcgccaggcgttaatgggcgggttcgcctcttcacgcattctggaagttcacggcgagcggatgatcaaccggacgttcgagcctggtttcaaaatcgcgcttcatcagaaagaccttaatcttgcattgcaaagcgcaaaagcgctggcgctgaatttaccgaatacggcgacctgccaggaattattcaatacctgtgcggcaaatggcgggagccagcttgatcattcggcaatggtacaggcgctggaattaatggccaatcataaattgtcctaa

SEQ ID NO: 3818 - protein, 292 aa, Citrobacter koseri
MKLGFIGLGIMGSPMAINLARAGHQLHVTTIGPVADELLSLGAVNVETARQVTEFADIIFIMVPDTPQVEEVLFGEHGCAKTSLQGKTIVDMSSISPIETKRFAQRVNEMGADYLDAPVSGGEIGAREGTLSIMVGGEQKVFDRVKPLFDILGKNITLVGGNGDGQTCKVANQIIVALNIEAVSEALVFASKAGADPVRVRQALMGGFASSRILEVHGERMINRTFEPGFKIALHQKDLNLALQSAKALALNLPNTATCQELFNTCAANGGSQLDHSAMVQALELMANHKLS

SEQ ID NO: 3819 - DNA, 1455 bp, Citrobacter koseri
atggaacatcaaagagagctataccagcagcgcggttatagcgaagacttattacctaaaacagaaacccaacgaaactggaaggcatttaactatttcaccttatggatgggatctgtacataacgtgccaaattacgttatggtcggcggtttttttatactgggcctatcaacatttaatatcatgttggccattattatcagcgcattatttattgcggcggcgatggtaatgaatggcgcggcaggcagcaaatatggcgttccttttgctatgatattgcgaggttcttacggcgtccgcggcgcgctattccctggattattgcgagggggaatcgcggcaattatgtggttcggcttacagtgttacgcgggatcgctggcatttcttattttgattgggaagatctggccaggatttctgacattaggcggagatttcaagctgctgggtctttcactgccaggactaattacttttctaattttttggattattaacgttggcatcggttttggcggtggtaaagtattaaataaatttaccgctatcctcaatccatgtatttacattgtctttggcggcatggctatttgggcaatatcgctggtcggcattggcccgattctggactatctgccttcaggcgtgcaaaaagcagagcacagcggctttctgttcttggtggtgattaacgccgtagtcgccgtctgggcagcgccagcggtgagcgcgtccgatttcacgcaaaacgcgcattcatttcgcgctcaggcattgggacaaacgctggggcttatcgtagcgtatatattattcgccgtagccagcgtgtgcattattgccggagccagtattcattatggtatggatacctggaacgtgctggatattgtgcagcgctgggacagcctgtttgcttcattctttgcggtgttggtgattctgatgacgacaatttcaaccaacgccaccggtaatattatacctgcggggtatcaaattgcggcgcttgccccgacaaagcttaactataaaaatggcgtaatgattgccagtattatcagtctactgatttgtccatggaaattaatggagaatcaggacagtatttatctgttcctcgatattatcggcggtatgcttggcccggtaatcggcgtaatgttagctcattattttgtggtaatgcgtggaaaaattaatcttgatgagctgtacaccgccagcggtgattacaaatattatgataatggatttaacctgactgcattttcagtcaccctggtcgcagttattctgtcattaggcggcaagtttataccatttttggagcctttatcccgcgtgtcctggtttgtaggcgtaatagttgcgttcgttacttatgcgctattgaagaaacgcacgggttttgaaaatacaggagagaaaaaactcgcaggttaa

SEQ ID NO: 3820 - protein, 484 aa, Citrobacter koseri
MEHQRELYQQRGYSEDLLPKTETQRNWKAFNYFTLWMGSVHNVPNYVMVGGFFILGLSTFNIMLAIIISALFIAAAMVMNGAAGSKYGVPFAMILRGSYGVRGALFPGLLRGGIAAIMWFGLQCYAGSLAFLILIGKIWPGFLTLGGDFKLLGLSLPGLITFLIFWIINVGIGFGGGKVLNKFTAILNPCIYIVFGGMAIWAISLVGIGPILDYLPSGVQKAEHSGFLFLVVINAVVAVWAAPAVSASDFTQNAHSFRAQALGQTLGLIVAYILFAVASVCIIAGASIHYGMDTWNVLDIVQRWDSLFASFFAVLVILMTTISTNATGNIIPAGYQIAALAPTKLNYKNGVMIASIISLLICPWKLMENQDSIYLFLDIIGGMLGPVIGVMLAHYFVVMRGKINLDELYTASGDYKYYDNGFNLTAFSVTLVAVILSLGGKFIPFLEPLSRVSWFVGVIVAFVTYALLKKRTGFENTGEKKLAG

SEQ ID NO: 3821 - DNA, 1362 bp, Citrobacter koseri
atgtcttttgatttaattattaagaacggtactgtcatcttagaaaacgaagcgagagttatcgatatcgccgtccagggcggaaaaatcgccgcgattggcgagaacctgggggaagcgaaaaatgtgctggatgcgacgggattgatcgtttcgccgggcatggttgacgcgcatacccacatttctgaaccgggccgtacccactgggaaggctatgaaaccggtacccgcgcggcggcgaaaggcggtattaccacgatgattgagatgccgctcaatcagctgccggcgacggtcgatcgtgagacgattgaactcaagtttgacgcggcaaaaggtaaattgaccatcgacgccgcgcagttgggcggtttggtttcttataacctggatcggcttcatgagctggacgaagtgggcgttgtcggcttcaagtgctttgtcgccacctgcggcgatcgtggcatcgataatgattttcgcgacgttaatgactggcagttttacaaaggcgcgcaaaaattgggggaaatggaccagacggtactggtacattgcgaaaatgctctgatttgcgatgagctgggcgaggaagctaaacgcgaaggtcgcgtaacggcgcatgattatgtcgcctcacgtccggtatttactgaagtggaagccattcgtcgcgtgctgtatctggcgaaagcggcaggttgccgtctgcacgtttgccatatcagcagcccggagggggtagaggaagtaacgcgcgcgcgtcaggaaggccaggatgtcacctgtgaatcgtgcccgcactattttgtcctcgataccgatcagttcgaagagattggcaccctggcaaaatgttctccgccaattcgcgaccaggaaaaccagaaagggatgtgggaaaaactgtttaacggcgaaatcgactgcctggtatccgaccactctccatgccctccggaaatgaaagcaggcaatatcatgcaagcatggggcggaattgccggactgcaaaactgcatggacgtcatgtttgatgaagcggtgcaaaaacgcggtatgtcgttgccgatgtttggcaaattaatggcgaccaacgccgccgatatttttggtctgaaacataaaggacgtattgcccccggcaaagatgctgacctggtctttattcagcctgacagcagctatgttctgaaaaatgaagatctggaatatcgccataaagtcagtccgtatgttggccgtactattggcgcgcgtattaccaaaacgattttgcgcggcgatgttatttatgacatcgagcatggcttccctgtgccgccaaaaggtcagtttatccttaaacatcagcagtaa

SEQ ID NO: 3822 - protein, 453 aa, Citrobacter koseri
MSFDLIIKNGTVILENEARVIDIAVQGGKIAAIGENLGEAKNVLDATGLIVSPGMVDAHTHISEPGRTHWEGYETGTRAAAKGGITTMIEMPLNQLPATVDRETIELKFDAAKGKLTIDAAQLGGLVSYNLDRLHELDEVGVVGFKCFVATCGDRGIDNDFRDVNDWQFYKGAQKLGEMDQTVLVHCENALICDELGEEAKREGRVTAHDYVASRPVFTEVEAIRRVLYLAKAAGCRLHVCHISSPEGVEEVTRARQEGQDVTCESCPHYFVLDTDQFEEIGTLAKCSPPIRDQENQKGMWEKLFNGEIDCLVSDHSPCPPEMKAGNIMQAWGGIAGLQNCMDVMFDEAVQKRGMSLPMFGKLMATNAADIFGLKHKGRIAPGKDADLVFIQPDSSYVLKNEDLEYRHKVSPYVGRTIGARITKTILRGDVIYDIEHGFPVPPKGQFILKHQQ

SEQ ID NO: 3823 - DNA, 2022 bp, Raoultella ornithinolytica
atgcttaaactattttccgctttcagaaaagataaaatctgggatttcgacggtggtattcatccgcccgaaatgaagacccagtcaaacggcacgccgctgcgtcaggtgcctttagcgccgcgcttcgttatccccttaaaacagcacattggcgctgagggcgagttgtgcgttagcgtcggcgatcgcgtgctgcgcggccaggcgctgacccgtggacgtgggagaatgctgccggtacacgcgcccacctccgggacggttatcgctattgccccccactcgacggcacatccttcggcgctggcggagttaagcgtcatcattgatgccgacggcgaggaccgctggattgaacgcgagggctggtctgattaccgcgcccacagccgtgaagcgctcattgaacgcattcatcagtatggcgttgccgggcttggcggcgcagggtttcccaccggcgttaaattgcagggcggcggcgataaaatcaccacgcttattatcaatgccgcagagtgcgaaccttacattacggcggacgatcgtctgatgcaggactgcgccgcgcagattgtggaaggtattcgcatcctggcgcatattctgcaaccgcgtgaggtattaatcggcattgaagataacaaaccgcaggctatttccatgctgcgcgccgtactggctgacgctcacgacatttcgttacgtgtgatcccaaccaaatacccttccggcggcgcaaaacaactcacccaaatactgacgggaaaacaggttccccacggcgggcgctcctctgatattggcgtgctgatgcaaaacgtcggtacggcttatgccgttaaacgcgccgtggttgacggcgaaccgatcacagaacgcgtcgtcaccttaacgggtgaagcggtaagccgtccgggtaacgtctgggcgcggctcggcactcccgttcgtcatttgcttaacgatgccggattctgcccttctgctgaccagatggtcatcatgggcggcccgttgatgggattcccccttccctggcttgacgtaccggtcgtaaaaatcaccaactgcctgctggcgccatccgtgactgaaatgggagcgcctcaggaagagaaaagctgtattcgttgcagcgcttgcgctgacgcttgccctgccgaccttttaccgcagcagctttattggttcagcaaagggcagcagcatgacaaggctaccgctcaccatattgctgattgtatagaatgcggcgcctgcgcctgggtctgccccagtaatattccgctcgtccaatatttccgtcaggaaaaagcggagattaatgcgatcaggcttgaagaaaaacgcgccgccgaagccaaagcgcgttttgaggctcgtcaggcaagactggagcgcgaaaaagccgcccgccttgcacgtcataagagcgcagcggtacaaccagcggcaaaagatcaggatgccattgccgctgcgctggcgcgggtaaaagagaaacaggcgcaggccacgcaaccggtggttattcaggcgggtagtctgccagacaatagcgccgtcatcgcggcccgtgaagcgcgtaaagcgcaagcgcgcgctaaacaagccgctcatccggtggctgacagcgcgatatccggcggcgacccgcgtaaagccgcggtggaggcggccatcgcccgcgccaaagcccgcaaacaggagcagcaggccggaagcgaacctgccgaaccggtcgatccgcgcaaagccgcggtggaggcggccatcgcccgcgccaaagcccgcaagcaggagcagcaggccggaggcgaacctgccgaaccggtcgatccgcgtaaagccgcggtggaagcggccatcgcccgcgccaaagcccgtaagcaggagcagcaggccggaagcgaacctgccgaaccggccgacccgcgtaaagccgcggttgctgcggctatcgcccgcgttcaggcaaaaaaagcagcacagcagcaggttgttaacgaggattaa

SEQ ID NO: 3824 - protein, 673 aa, Raoultella ornithinolytica
MLKLFSAFRKDKIWDFDGGIHPPEMKTQSNGTPLRQVPLAPRFVIPLKQHIGAEGELCVSVGDRVLRGQALTRGRGRMLPVHAPTSGTVIAIAPHSTAHPSALAELSVIIDADGEDRWIEREGWSDYRAHSREALIERIHQYGVAGLGGAGFPTGVKLQGGGDKITTLIINAAECEPYITADDRLMQDCAAQIVEGIRILAHILQPREVLIGIEDNKPQAISMLRAVLADAHDISLRVIPTKYPSGGAKQLTQILTGKQVPHGGRSSDIGVLMQNVGTAYAVKRAVVDGEPITERVVTLTGEAVSRPGNVWARLGTPVRHLLNDAGFCPSADQMVIMGGPLMGFPLPWLDVPVVKITNCLLAPSVTEMGAPQEEKSCIRCSACADACPADLLPQQLYWFSKGQQHDKATAHHIADCIECGACAWVCPSNIPLVQYFRQEKAEINAIRLEEKRAAEAKARFEARQARLEREKAARLARHKSAAVQPAAKDQDAIAAALARVKEKQAQATQPVVIQAGSLPDNSAVIAAREARKAQARAKQAAHPVADSAISGGDPRKAAVEAAIARAKARKQEQQAGSEPAEPVDPRKAAVEAAIARAKARKQEQQAGGEPAEPVDPRKAAVEAAIARAKARKQEQQAGSEPAEPADPRKAAVAAAIARVQAKKAAQQQVVNED

SEQ ID NO: 3825 - DNA, 723 bp, Enterobacter sp. MGH 15
atgactgaattacccattgatgaaaacacgccgcgcattttgattgttgaagatgaacccaagctgggtcagctgcttattgactacttacgcgcggcgagttacgcccccacgctcatcaatcacggcgacaaggtactgccgtatgtgcgtcaaacgccgccggatctgattctgctggatctgatgctgccgggtaccgatggtctgacgctatgccgggagattcgccgtttttccgacatccccattgtgatggtcacagccaaaattgaagagatcgaccggctgctggggctggaaatcggcgccgatgattatatctgtaagccttacagcccgcgcgaagtcgtggcccgcgtgaaaaccattttgcgccgctgtaaaccgcagcgcgaactccagcagcaggatgccgaaagcccgttaatgattgatgaaagccgctttcaggcctcctggtgtggtaaagcgctggatttaacccccgctgaattccgcctgctaaaaaccttatcgcttgaaccgggtaaagttttttcccgcgagcagttgttaaaccacctctacgacgactaccgtgtggtgaccgatcgtactatcgacagccacattaaaaacttgcgccgtaaactggaatcgctggatgccgaacagtcatttatacgcgcggtctacggggtgggatatcgctgggaagcggatgcgtgtcgcctggtataa

SEQ ID NO: 3826 - protein, 240 aa, Enterobacter sp. MGH 15
MTELPIDENTPRILIVEDEPKLGQLLIDYLRAASYAPTLINHGDKVLPYVRQTPPDLILLDLMLPGTDGLTLCREIRRFSDIPIVMVTAKIEEIDRLLGLEIGADDYICKPYSPREVVARVKTILRRCKPQRELQQQDAESPLMIDESRFQASWCGKALDLTPAEFRLLKTLSLEPGKVFSREQLLNHLYDDYRVVTDRTIDSHIKNLRRKLESLDAEQSFIRAVYGVGYRWEADACRLV

SEQ ID NO: 3827 - DNA, 885 bp, Klebsiella michiganensis
atgtctatggaaacgcaggacattattaaacggtccgcaacaaacgccatcacgccgcctccgcaggcgcgtgattacaaagccgaagtcgcgaaactgatcgacgtctcctcctgtgtcggctgtaaagcctgccaggtagcctgttctgaatggaacgatattcgcgataacgttggtcattgtgtcggggtgtacgataaccctgccgatctcagcgccaagtcctggacggtgatgcgctttaccgaaaccgagcagaacggcaagctggagtggctgattcgtaaagatggttgtatgcactgtgaagatccaggctgtcttaaagcctgtccatctgccggggctatcatccagtacgcgaacgggattgttgactttcaatctgaacactgtatcggctgtggttactgtatcgccgggtgtccgtttaatattccgcgcctcaacaaagaggacaaccgcgtttataaatgtacgctctgcgtcgatcgcgtcagcgtgggccaggaaccggcctgcgtcaaaacttgtccgaccggggctattcacttcggcaccaaaaaagagatgctggaactgggcgagcaacgcgtggagaagttaaaagcgcgtggctttgaacatgccggtatctacaacccgcagggcgtcggcggcacgcacgtcatgtatgtgctgcaccatgccaatcagccggagttgtaccacggcttgccgaaagatccgcagatcgatacctcaatcaatctgtggaaaggggcgctaaaaccgctggccgcagcgggctttatcgccactttcgccggtctgatttaccactacatcggtattggcccgaataaagaaacggacgacgatgaggaggatcatcatgagtaa

SEQ ID NO: 3828 - protein, 294 aa, Klebsiella michiganensis
MSMETQDIIKRSATNAITPPPQARDYKAEVAKLIDVSSCVGCKACQVACSEWNDIRDNVGHCVGVYDNPADLSAKSWTVMRFTETEQNGKLEWLIRKDGCMHCEDPGCLKACPSAGAIIQYANGIVDFQSEHCIGCGYCIAGCPFNIPRLNKEDNRVYKCTLCVDRVSVGQEPACVKTCPTGAIHFGTKKEMLELGEQRVEKLKARGFEHAGIYNPQGVGGTHVMYVLHHANQPELYHGLPKDPQIDTSINLWKGALKPLAAAGFIATFAGLIYHYIGIGPNKETDDDEEDHHE

SEQ ID NO: 3829 - DNA, 882 bp, Citrobacter rodentium
atgacatcacaaaaagcaacgctaatagggcttgttgccatcgttctgtggagcacgatggttgggttaattcgcggcgtcagcgaaggtctcggaccggtaggcggcgcagccatgatctattcattaagcggtctgctgctgatttttaccgtcggattacctgatatccgccgtttcccggggcgatacctcatcgcaggcagcgtactgtttgtcagttatgaaatatgcctggcgctttctctcggttatgccgccactcgccatcaggctatcgaagtcggcatggttaactatttatggcccagcctgaccattctgtttgccattctttttaatgggcaaaaaactaactggcttattgttcctggattgcttattgcacttactggcgtttgctgggttctggggggcgagaatggtcttaatccaggagaaattatcagcaatgtcgccaccagtccgctaagttatttactggcatttcttggggcgtttatatgggcgacgtactgcaccgtcacaaataaatatgcgcgtggttttaacggtatcacagtctttgtgttactcaccgccgtggcgctgtggttccactattttcttacgccgcaacctgccatgatatttagcctaccggtgattgctaaactttttaccgcggcattaacgttagggtttgcctacgccgcatggaatgtgggcatacttcatggcaatgtgactatcatggccgtagggtcttattttacccccgtcatgtcctctgctctggccgcgctgttactcagctcaccactgtcattctccttctggcaaggcgcagtcatggtttgcgtaggttcgctactttgttggctggcaacgcggcggcgctaa

SEQ ID NO: 3830 - protein, 293 aa, Citrobacter rodentium
MTSQKATLIGLVAIVLWSTMVGLIRGVSEGLGPVGGAAMIYSLSGLLLIFTVGLPDIRRFPGRYLIAGSVLFVSYEICLALSLGYAATRHQAIEVGMVNYLWPSLTILFAILFNGQKTNWLIVPGLLIALTGVCWVLGGENGLNPGEIISNVATSPLSYLLAFLGAFIWATYCTVTNKYARGFNGITVFVLLTAVALWFHYFLTPQPAMIFSLPVIAKLFTAALTLGFAYAAWNVGILHGNVTIMAVGSYFTPVMSSALAALLLSSPLSFSFWQGAVMVCVGSLLCWLATRRR

SEQ ID NO: 3831 - DNA, 1338 bp, Salmonella enterica
atgtcttcggatgctgatgctcacaaagtgggcctaatccccgtcaccttaatggtatcggggaatattatgggttcaggggtattcttactccctgccaacctggcggccactggcgggattgcaatctacggatggctggtcactatcatcggcgccctggcgctgtcgatggtttatgccaaaatgtcgtccttagatcccagtcccggcggttcttatgcctacgcacgccgctgcttcgggccgtttttgggctatcaaacgaacgtgctgtactggctggcatgctggatcggtaatatcgcgatggtcgttatcggcgtcggctatctgagctatttcttcccgattctgaaagatccgctggtattaacgcttacctgcgtcgcggtgctgtggatttttgttctgctgaacatcgtcgggccgaaaatgattacccgcgtacaggccgtcgccaccgtactggcgctggtgcctatcgtagggattgcggtcttcggctggttctggtttaaaggcgaaacctatatggcggcctggaacgtgagcggcatgaataccttcggcgcgattcaaagcacgttgaacgttacgctgtggtcattcatcggggtagaaagcgcctccgttgcggccggtgtggtcaaaaacccgaaacgcaatgtgcctatcgccaccatcggcggggtactgatcgccgccgtctgctatgtgctctccacaacggcgattatggggatgatccccaacgcggcgctgcgcgtgtcggcatcgcctttcggtgacgcggcgcgtatggcgctgggcgataccgcaggggctattgtttccttctgtgcggcagcgggttgcctgggctctctcggcggctggacgctgcttgccggtcaaaccgcaaaagcggcggcggacgatggtctcttcccgccgatcttcgcgcgggttaataaagccggtacgccagtggctgggttgcttatcgtcggcgtgctgatgactatcttccagttcagcagtatgtcgccgaacgccgcgaaagagtttggtctggtctcctccgtgtcggttatcttcaccctggtgccttatctttacacctgtgccgcgctgttgctgttaggccacggtcactttggtaaagcgcgcccgctgtatctgctgattaccttcgtcgcgtttgtgtattgcatctgggcggtcatcggttccggcgccaaagaagtgatgtggtcgttcgtcacgttgatggtgatcaccgcgctgtatgcgttgaattacaaccgtattcacaaaaacccgtatccgctggatgcgccggttaaacaggattga

SEQ ID NO: 3832 - protein, 445 aa, Salmonella enterica
MSSDADAHKVGLIPVTLMVSGNIMGSGVFLLPANLAATGGIAIYGWLVTIIGALALSMVYAKMSSLDPSPGGSYAYARRCFGPFLGYQTNVLYWLACWIGNIAMVVIGVGYLSYFFPILKDPLVLTLTCVAVLWIFVLLNIVGPKMITRVQAVATVLALVPIVGIAVFGWFWFKGETYMAAWNVSGMNTFGAIQSTLNVTLWSFIGVESASVAAGVVKNPKRNVPIATIGGVLIAAVCYVLSTTAIMGMIPNAALRVSASPFGDAARMALGDTAGAIVSFCAAAGCLGSLGGWTLLAGQTAKAAADDGLFPPIFARVNKAGTPVAGLLIVGVLMTIFQFSSMSPNAAKEFGLVSSVSVIFTLVPYLYTCAALLLLGHGHFGKARPLYLLITFVAFVYCIWAVIGSGAKEVMWSFVTLMVITALYALNYNRIHKNPYPLDAPVKQD

SEQ ID NO: 3833 - DNA, 531 bp, Citrobacter koseri
atggccggggaaagctatattttaatgggtgtttcaggtagtggtaagtctttaataggcagcaaaattgcaacattattttctgcgaagtttattgacggcgatgatctccatccggcgaaaaacattgataaaatgtctcagggaataccgttaactgatgaagaccgcttaccctggctggaacgattaaatgacgcttcatacagtctttataaaaaaaatgagacgggatttattgtctgctcgtcattaaaaaaacagtaccgcgatattttacgtaagagcagccctaacgtacatttcctgtggctggatggcgattacgctaccattctgcagcgaatgcagcgtcgtgccgggcattttatgccgccagacctgctgcaaagtcagtttgacgcgctggagcgaccgtgtgccgatgaacatgatattgcgcgtatcgatgttaatcatgacatcgagcacgtgacggagcagtgccgacaggctgtacaggcttttcgtcaggcactcagcgcttcctga

SEQ ID NO: 3834 - protein, 176 aa, Citrobacter koseri
MAGESYILMGVSGSGKSLIGSKIATLFSAKFIDGDDLHPAKNIDKMSQGIPLTDEDRLPWLERLNDASYSLYKKNETGFIVCSSLKKQYRDILRKSSPNVHFLWLDGDYATILQRMQRRAGHFMPPDLLQSQFDALERPCADEHDIARIDVNHDIEHVTEQCRQAVQAFRQALSAS

SEQ ID NO: 3835 - DNA, 1032 bp, Citrobacter koseri
atggaagtaaaaactcaatcctgcgttgttgcgggtaagcgtgctgttgccgttacggaacaaaatattgaatggaataataaaggaacactcgtacaaattacccgtggcggcatttgtgggtctgacttacattattatcaggaaggcaaagtcggcaattttacagtaaaagcgccaatgattttaggtcatgaagtgattggcaaaatcgttcatagcgactcagatttattacgtgaaggacaaccggtagcgattaatccatcgaagccttgtggtcattgcaaatactgtctgcagcatgaagaaaaccactgtactgaaatgcgtttctttggcagcgccatgtattttccgcatgtcgatggcggttttacccgatttaaagctgtcgataccgctcagtgcattccctggccggaacaggcggacgaaaaagccatggcctttgccgaaccgctggcggttgccattcatgcggctcatgaggcgggcgatctgcagggcaaacgcgtctttatctccggcgttggccctatcggctgcctgattgttagcgcggtaaaaacgctgggcgcggcggaagtggtatgtgccgatatcagcgcccgttctctctcgctggcccggcagatgggcgcggatacgctggtgaacccacagcatgattctcttgatggctggaaagcagaaaaagggtatttcgatatcagttttgaagtctctgggcatccttcctctatctcaacgtgtctggaagtcacacgggccaaaggcgtgatggtgcaggttggcatgggcggcgcagtccccaacttcccgatgatgatggtaataagcaaagagatctccctgaaaggctctttccgttttactaccgaatttaatactgcggtttcctggcttgccaaccgcgttatcaatccgctgccgttactgagcgcggaatatccatttaccgacctggaagcggcgctgatctttgccggagacaaaacacaggcggcaaaagttcagctcattttctga

SEQ ID NO: 3836 - protein, 343 aa, Citrobacter koseri
MEVKTQSCVVAGKRAVAVTEQNIEWNNKGTLVQITRGGICGSDLHYYQEGKVGNFTVKAPMILGHEVIGKIVHSDSDLLREGQPVAINPSKPCGHCKYCLQHEENHCTEMRFFGSAMYFPHVDGGFTRFKAVDTAQCIPWPEQADEKAMAFAEPLAVAIHAAHEAGDLQGKRVFISGVGPIGCLIVSAVKTLGAAEVVCADISARSLSLARQMGADTLVNPQHDSLDGWKAEKGYFDISFEVSGHPSSISTCLEVTRAKGVMVQVGMGGAVPNFPMMMVISKEISLKGSFRFTTEFNTAVSWLANRVINPLPLLSAEYPFTDLEAALIFAGDKTQAAKVQLIF

SEQ ID NO: 3837 - DNA, 276 bp, Shigella boydii
atgcatctggcacgagtcacgggcgcggttgtctccacgcaaaaatcaccttctttgattgggaaaaagctgctgctggtgcgtcgggtcagcgccgatggcgaactccccgcctcgccaacctccggcgatgaagtggccgtggattccgtcggcgcaggcatcggcgagctggttctgctcagcggcggctccagcgccaggcacgttttttccgggccaaatgaggccatcgacctcgccgttgtcggcattgtcgatacgctttcacgttaa

SEQ ID NO: 3838 - protein, 91 aa, Shigella boydii
MHLARVTGAVVSTQKSPSLIGKKLLLVRRVSADGELPASPTSGDEVAVDSVGAGIGELVLLSGGSSARHVFSGPNEAIDLAVVGIVDTLSR

SEQ ID NO: 3839 - DNA, 762 bp, Citrobacter koseri
atgaaaaaaattcttactctgacgctttcttctttactcattattcccgcactcacccatgcggaatttaaaggcgggttcgccgatatcggcctccattacctcgactggacatcagacaccacggaaaaaaccagtaaaaaatcccataaagatgattttgggtacctggaactggaaggcggagcgaattttagctggggagaaatgtacgggttcttcgactgggaaaatttttacaatggccgccacgctaaaccaggcagcgaacagcgttacacctttaaaaataccaaccgtatttatctgggcgatacaggattaaacctctatctccatgcctacgggacgtacggttcacctcatcgcgctaatttccatgatgacatgtttctctatggtttaggctataacttcacaggtaacggttactggtttaaacccttctttgccaaacgttataccgatcagacctactacacaggcgataatggttatgtattaggttgggtggccggctatagcttctcgttgggtagtgagaaattcagcgtaacgaactggaatgagtatgagtttgaccgcgatgcgtcctacgctgcgggcaatggcgggaaagatggcattaatggcgcagtagcgctgtggtggaatgcgactcctcacctgaccgcaggagtacaatatcgttacgctgataataagttaggagaatccttcctgcaggatggcattatttattccatcaaatacctgttttaa

SEQ ID NO: 3840 - protein, 253 aa, Citrobacter koseri
MKKILTLTLSSLLIIPALTHAEFKGGFADIGLHYLDWTSDTTEKTSKKSHKDDFGYLELEGGANFSWGEMYGFFDWENFYNGRHAKPGSEQRYTFKNTNRIYLGDTGLNLYLHAYGTYGSPHRANFHDDMFLYGLGYNFTGNGYWFKPFFAKRYTDQTYYTGDNGYVLGWVAGYSFSLGSEKFSVTNWNEYEFDRDASYAAGNGGKDGINGAVALWWNATPHLTAGVQYRYADNKLGESFLQDGIIYSIKYLF

SEQ ID NO: 3841 - DNA, 834 bp, Citrobacter pasteurii
atgcctcacgctcttttttctcataatcctgagtattgtattgatattattcatgcacataaaccggcatttaccccgcgagtcgcgtttattttaggctccgggttgggtgctctggcggatcaaatcgaagatgcggtagccatttcttacgagaaattgccgggatttcccgtcagcaccgtacacggccatgctggtgaactggtgctcggccatctggcgggtgttccggtggcctgtatgaaaggtcgcggacatttttatgaagggcgtggaatggcggtgatgaccgatgccattcgcacgttgaaattactgggctgtgaagtgttgttctgcaccaatgcggcaggatctctgcgtccggaagtggggccgggtagcctggttgcgcttagcgatcacattaatacgatgcccggtacgccgatggtggggccaaacgatgatcgttatggcgatcgcttcttctcgctggctaatgcttatgacgcagattatcgcgccatgcttcagtccgttgcggcagaggagggattccccctcactgaaggcgtatttgtttcttatccgggtccgaacttcgaaacggcggcagaaatccgcatgatgcagattattggcggcgatgtggtcggaatgtccgttgtccctgaggtgattagcgcacgtcattgtggcctcaaagttgttgccgtctcagcgatcaccaatctggcggaagggctgggcgatgtaaaactctcccatgcgcaaacgctggcggcggctgaactttcccggcagaactttataaatctgatttgcggctttttacgtaaactggcctaa

SEQ ID NO: 3842 - protein, 277 aa, Citrobacter pasteurii
MPHALFSHNPEYCIDIIHAHKPAFTPRVAFILGSGLGALADQIEDAVAISYEKLPGFPVSTVHGHAGELVLGHLAGVPVACMKGRGHFYEGRGMAVMTDAIRTLKLLGCEVLFCTNAAGSLRPEVGPGSLVALSDHINTMPGTPMVGPNDDRYGDRFFSLANAYDADYRAMLQSVAAEEGFPLTEGVFVSYPGPNFETAAEIRMMQIIGGDVVGMSVVPEVISARHCGLKVVAVSAITNLAEGLGDVKLSHAQTLAAAELSRQNFINLICGFLRKLA

SEQ ID NO: 3843 - DNA, 255 bp, Escherichia coli
atgcacaagcacaagccgctaaatctgctgccactgctgctggcctgtctgccactgttagccagctgcgtaccgaagcaacaaagcttgccgcccgcctggacgccgcaaagcacacctcagatcttgccgctgccgtcagaagcaaaacagccggagccgacgccgcagtgctcgccgacatgctcggacgccttgcagaagaagctcgatattatgctgagcgatctgacgaaagctaccgcgcaggaatga

SEQ ID NO: 3844 - protein, 84 aa, Escherichia coli
MHKHKPLNLLPLLLACLPLLASCVPKQQSLPPAWTPQSTPQILPLPSEAKQPEPTPQCSPTCSDALQKKLDIMLSDLTKATAQE

SEQ ID NO: 3845 - DNA, 663 bp, Salmonella enterica
atggcgaagaaaacgaaggcggatgcgcttaaaacgcggcaacatttgattgaaaccgctattgcgcagttcgctttgcgcggcgttgccaacacgacgttgaatgatatcgctgatgccgctgatgtcacgcggggcgccatctactggcactttgagaataaaacgcagttgtttaatgaggtttggttacagcaaccacctttacgcgaacttattcaggataggcttacgggatgctggaatgataatcctttacaggatctacgagagaaatttattgcagccttacaatatattgcggcagtgcctcgtcagcaggcattaatgcagattttatatcataaatgtgaattccataatggtatgatatcggaacaggccattcgggagaagatgggtttccatcatcagtcgctgcttgaagtattacagcgatgtatggataaaaaactgatctcaggcagtcttgatctggatgtcatattaattattctgcatggtagttttagcggaatagtaaaaaactggttaatgaatcccacaagttatgatctttataagcaggcgcctgcattagtcgataatgtattaaaaatgctaagcccggatggcagtgtgaggcaattaatgccaaatgaacaacaggcggaagaagcctga

SEQ ID NO: 3846 - protein, 220 aa, Salmonella enterica
MAKKTKADALKTRQHLIETAIAQFALRGVANTTLNDIADAADVTRGAIYWHFENKTQLFNEVWLQQPPLRELIQDRLTGCWNDNPLQDLREKFIAALQYIAAVPRQQALMQILYHKCEFHNGMISEQAIREKMGFHHQSLLEVLQRCMDKKLISGSLDLDVILIILHGSFSGIVKNWLMNPTSYDLYKQAPALVDNVLKMLSPDGSVRQLMPNEQQAEEA

SEQ ID NO: 3847 - DNA, 480 bp, Salmonella enterica
atggccgatccattcaatctgcagaccgatgtggtcaggcagcatacggttccccgttttttactgaagcatttcagtacgccgggaaagggtaagcggcagcgcttatacgcctttgacaaggctgccgggcgcgcctatgccaccacgccggatgacgcgaccgtccgcaacacgttctacaacctcgataatcacccggaccgtctgagtcttgaaccactgctggggatttacgagcaccacgcggcaccggtaattgcagccctgctggcgcacagggatattcgcaggctgacagatgatgaacgctacaggctggccgtgtttgttgccgtgcagcgcgcacgaaccttcggtgaactggagcgtatctcaggcatgatttcggtgcttaccgataagatggaggccatcggctcgacgtataggaaattgaaaaaccagacgataccgctgtccacgccttatgccacgtga

SEQ ID NO: 3848 - protein, 159 aa, Salmonella enterica
MADPFNLQTDVVRQHTVPRFLLKHFSTPGKGKRQRLYAFDKAAGRAYATTPDDATVRNTFYNLDNHPDRLSLEPLLGIYEHHAAPVIAALLAHRDIRRLTDDERYRLAVFVAVQRARTFGELERISGMISVLTDKMEAIGSTYRKLKNQTIPLSTPYAT

SEQ ID NO: 3849 - DNA, 915 bp, Salmonella enterica
atgctctcaataaaaaaagtaaccatgctcttggggtgcctagtcctcacctgctcgatagcatttcaggcgagtgcagctgaaaaattcaaggtcattacaacttttaccatcatcgcagatatggccaaaaacgtggctggagatgctgcagaagtctcatccataaccaagcctggtgcagaaattcatgagtatcagcctacccctggcgatattaaacgtgcgcagggggcacaactgattctcgccaatggtatgaatctggaattgtggttccaacgcttttaccagcatctcaatggggttccagaagtaattgtctcttcgggtgtgacgccagtagggatcaccgaagggccctatgagggcaaacctaacccccatgcctggatgtcgccagataatgctctgatttacgtcgataatattcgtgatgcgtttataaaatacgatccggcaaatgcacaaacctaccaacgtaatgccgatacttataaagccaagattacccaaacccttgcccccctgcgtaagcagattgcggaactccctgagaatcagcgatggatggtcaccagtgaaggggctttttcttatctcgcacgcgatttggggctaaaagagctttatctgtggccgattaatgccgatcaacaaggaacaccgcagcaggtacgtaaggttgttgatatagttaagaaaaatcatatcccggcagtctttagcgagagtacgatttccgataaaccagcgcgtcaggttgcgcgtgaaaccggcgcgcactacggtggtgtgctctatgtcgattccctgagcacagaaaacggcccggtacctacgtatatcgaccttctgaaggttactaccagtacgctggtacagggaattaaagccggaaaaagggagaaataa

SEQ ID NO: 3850 - protein, 304 aa, Salmonella enterica
MLSIKKVTMLLGCLVLTCSIAFQASAAEKFKVITTFTIIADMAKNVAGDAAEVSSITKPGAEIHEYQPTPGDIKRAQGAQLILANGMNLELWFQRFYQHLNGVPEVIVSSGVTPVGITEGPYEGKPNPHAWMSPDNALIYVDNIRDAFIKYDPANAQTYQRNADTYKAKITQTLAPLRKQIAELPENQRWMVTSEGAFSYLARDLGLKELYLWPINADQQGTPQQVRKVVDIVKKNHIPAVFSESTISDKPARQVARETGAHYGGVLYVDSLSTENGPVPTYIDLLKVTTSTLVQGIKAGKREK

SEQ ID NO: 3851 - DNA, 828 bp, Salmonella enterica
atgatgcaatctgcaggcattgtcgttaatgatgttactgtcacctggcgtaacgggcacacagcactgcgcgatgcatccttcacagtaccaggcggatctattgccgctctggttggggtaaacggttccggaaaatcgacgttgtttaaagcgattatgggatttgtgcgtctgaccagcgggaagatatctgttctgggtattcccacacgacaggcgctacagaaaaacctggttgcctacgtccctcagtcagaagaggttgactggtcatttcctgtactggtggaagatgtggtgatgatgggccgctatgggcatatgggtatgttgcgtatcgccaaaaagagggatcgtcagattgtcaccgatgcgctggaacgtgtcgatatggtggattttcgccatcgacaaatcggcgagctttccggtggacaaaagaaacgcgtctttctggcgagagcgattgcacagcagggtgatgtgatcctgctggatgaaccttttaccggcgttgatgtgaaaaccgaagcgaaaatcatcagcctgttgagggagttacgcgcggaaggcaaaacgatgcttgtctcaacgcacaatctcggatccgtcacgacattttgcgattatacggtcatggtcaaaggcaccgtcctggcaagcgggccgacagacaccacttttacagccgagaacctggagctggcttttagcggcgtactgcgccatgtcacacttaacggctcggaagaaagcattattactgacgatgaacgcccttttgtggcacatcgaccgtcagcggtgcagagggaagaaagatga

SEQ ID NO: 3852 - protein, 275 aa, Salmonella enterica
MMQSAGIVVNDVTVTWRNGHTALRDASFTVPGGSIAALVGVNGSGKSTLFKAIMGFVRLTSGKISVLGIPTRQALQKNLVAYVPQSEEVDWSFPVLVEDVVMMGRYGHMGMLRIAKKRDRQIVTDALERVDMVDFRHRQIGELSGGQKKRVFLARAIAQQGDVILLDEPFTGVDVKTEAKIISLLRELRAEGKTMLVSTHNLGSVTTFCDYTVMVKGTVLASGPTDTTFTAENLELAFSGVLRHVTLNGSEESIITDDERPFVAHRPSAVQREER

SEQ ID NO: 3853 - DNA, 858 bp, Salmonella enterica
atgaacgcgctactggaacccttcagctatgaatatatgctcaatgcgatgtgggtctcggcgatggtcggcggtctctgcgctttcctgtcatgctatctgatgctaaaaggctggtcgctgattggcgatgcgctgtcgcactctattgtcccgggtgttgcgggggcatatatgctggggcttccgttttctctgggagccttcttttccggcggactggcagcgggcagcatgctgtttcttaaccaactcactcgcttaaaagaagatgccatcatcggcctgatcttctcgtccttttttggcctggggctgtttatggtgtcattgaacccgacatccgtgaacattcagaccatcgtcctgggcaatattctggcaatcgatccggcggatatcctgcaactcactatcattggcattctctcgatcatcgtgctttttttcaaatggaaagatcttatggtgacctttttcgacgagaatcacgcccgtgctattggattgcatccgggcagattaaaaatcctcttcttcaccctgctgtcggtttcgaccgttgcggcgctgcaaacggttggtgcctttctggtgatctgtctggtggtgactcccggtgcaacagcatggttgttaaccgatcgttttccccgcctgctcatgattgctgtaactattggcagtgtgaccagtttcctcggcgcgtgggtcagttactttctggacggcgcgacaggtggaatcatcgtggtggcgcagacactgctgtttcttttagcatttgtctttgcgcccacccatgggcttttggcaaatcgtcggcgtgcgcataaagcgctggaggatcgctcatga

SEQ ID NO: 3854 - protein, 285 aa, Salmonella enterica
MNALLEPFSYEYMLNAMWVSAMVGGLCAFLSCYLMLKGWSLIGDALSHSIVPGVAGAYMLGLPFSLGAFFSGGLAAGSMLFLNQLTRLKEDAIIGLIFSSFFGLGLFMVSLNPTSVNIQTIVLGNILAIDPADILQLTIIGILSIIVLFFKWKDLMVTFFDENHARAIGLHPGRLKILFFTLLSVSTVAALQTVGAFLVICLVVTPGATAWLLTDRFPRLLMIAVTIGSVTSFLGAWVSYFLDGATGGIIVVAQTLLFLLAFVFAPTHGLLANRRRAHKALEDRS

SEQ ID NO: 3855 - DNA, 858 bp, Salmonella enterica
atgatggcattattactggagccactgcagttcacctttatgagtcacgcactgctgatttcactggtagtttccataccctgtgcgctgctgtcggtctttctggtcctgaaaagttgggcactgatgggtgacgcgatgagtcatgcggtttttcctggcatcgtgcttgcctggattctggggttacctctggctacaggggcattcgtcgccggagtattctgtgcggtggcgacgggatacctgaaagacaacagccgaatcaagcaagatacagtgatggggattgttttttctggcatgtttgccgcaggtctgatcttgtatattgcagtcaaaccagacgtacatcttgatcatattcttttcggcgacatgctcgggataaccatcggcgatataatccagacggtgattattgccggactggttacacttgttattagcgtaaaatggcgggattttttgctgttcagctttgattatcaacaggcgcaggcaagcggtttgcatacgagatggctgcattatgggctgctgtgcatggtctccctgaccattgtggcgacgctgaaagcggtaggtatcattctctctatttctcttctcattgcgcctggtgccattgcggtactcctgacacaacgctttcatattgcgctcctgctggcaactggcatatcgatattggtctcaatgactggtgtctggctgtccttttttatcgacagcgcgccagctccgacaattgttgtcttattcgcggtcatgttcatcatgacgtttaccgttaccagcatcaacgcacgcacaaaggaaaatgccgaaccacgggatttgttatcatccgattag

SEQ ID NO: 3856 - protein, 285 aa, Salmonella enterica
MMALLLEPLQFTFMSHALLISLVVSIPCALLSVFLVLKSWALMGDAMSHAVFPGIVLAWILGLPLATGAFVAGVFCAVATGYLKDNSRIKQDTVMGIVFSGMFAAGLILYIAVKPDVHLDHILFGDMLGITIGDIIQTVIIAGLVTLVISVKWRDFLLFSFDYQQAQASGLHTRWLHYGLLCMVSLTIVATLKAVGIILSISLLIAPGAIAVLLTQRFHIALLLATGISILVSMTGVWLSFFIDSAPAPTIVVLFAVMFIMTFTVTSINARTKENAEPRDLLSSD

SEQ ID NO: 3857 - DNA, 1206 bp, Salmonella enterica
atgaatagttcgacaaagatcgcattggtaattacgttattcgatgccatggggattggccttatcatgccagtcttgccaacgttattacgtgaatttattgcttcggaagatatcgctaaccactttggcgtattgcttgcactttatgcgttaatgcaggttatctttgctccttggcttggaaaaatgtctgaccgatttggtcggcgcccagtgctgttgttgtcattaataggcgcatcgctggattacttattgctggctttttcaagtgcgctttggatgctgtatttaggccgtttgctttcagggatcacaggagctactggggctgtcgcggcatcggtcattgccgataccacctcagcttctcaacgcgtgaagtggttcggttggttaggggcaagttttgggcttggtttaatagcggggcctattattggtggttttgcaggagagatttcaccgcatagtcccttttttatcgctgcgttgctaaatattgtcactttccttgtggttatgttttggttccgtgaaaccaaaaatacacgtgataatacagataccgaagtaggggttgagacgcaatcgaattcggtatacatcactttatttaaaacgatgcccattttgttgattatttatttttcagcgcaattgataggccaaattcccgcaacggtgtgggtgctatttaccgaaaatcgttttggatggaatagcatgatggttggcttttcattagcgggtcttggtcttttacactcagtattccaagcctttgtggcaggaagaatagccactaaatggggcgaaaaaacggcagtactgctcggatttattgcagatagtagtgcatttgcctttttagcgtttatatctgaaggttggttagttttccctgttttaattttattggctggtggtgggatcgctttacctgcattacagggagtgatgtctatccaaacaaagagtcatcagcaaggtgctttacagggattattggtgagccttaccaatgcaaccggtgttattggcccattactgtttgctgttatttataatcattcactaccaatttgggatggctggatttggattattggtttagcgttttactgtattattatcctgctatcgatgaccttcatgttaacccctcaagctcaggggagtaaacaggagacaagtgcttag

SEQ ID NO: 3858 - protein, 401 aa, Salmonella enterica
MNSSTKIALVITLFDAMGIGLIMPVLPTLLREFIASEDIANHFGVLLALYALMQVIFAPWLGKMSDRFGRRPVLLLSLIGASLDYLLLAFSSALWMLYLGRLLSGITGATGAVAASVIADTTSASQRVKWFGWLGASFGLGLIAGPIIGGFAGEISPHSPFFIAALLNIVTFLVVMFWFRETKNTRDNTDTEVGVETQSNSVYITLFKTMPILLIIYFSAQLIGQIPATVWVLFTENRFGWNSMMVGFSLAGLGLLHSVFQAFVAGRIATKWGEKTAVLLGFIADSSAFAFLAFISEGWLVFPVLILLAGGGIALPALQGVMSIQTKSHQQGALQGLLVSLTNATGVIGPLLFAVIYNHSLPIWDGWIWIIGLAFYCIIILLSMTFMLTPQAQGSKQETSA

SEQ ID NO: 3859 - DNA, 594 bp, Salmonella enterica
atggaaaataaaaatcatcaacaagaaaattttaagagtacctatcaatcactggttaactcagcacgaatattgtttgttgaaaaaggctatcaagctgtttcaatagatgagatctcgggaaaagcgttggtgaccaaaggtgccttttatcatcactttaaaaataaaaaacaattactcagtgcctgttataagcagcaattaattatgattgatgcctacatcacaacaaaaactgatttaacaaatggttggtctgccttagaaagtatatttgaacattatcttgattatattattgataataataaaaaccttatccctatccaagaagtgatgcctatcattggttggaatgaacttgaaaaaattagccttgaatacattactggtaaggtaaacgccattgtcagcaaattgatccaagagaaccaacttaaagcttatgatgatgatgtgcttaaaaacttactcaatggctggtttatgcatatcgcaatacatgcgaaaaacctaaaagagcttgccgataaaaaaggccaatttattgctatttaccgcggctttttattgagcttgaaagataaataa

SEQ ID NO: 3860 - protein, 197 aa, Salmonella enterica
MENKNHQQENFKSTYQSLVNSARILFVEKGYQAVSIDEISGKALVTKGAFYHHFKNKKQLLSACYKQQLIMIDAYITTKTDLTNGWSALESIFEHYLDYIIDNNKNLIPIQEVMPIIGWNELEKISLEYITGKVNAIVSKLIQENQLKAYDDDVLKNLLNGWFMHIAIHAKNLKELADKKGQFIAIYRGFLLSLKDK

SEQ ID NO: 3861 - DNA, 861 bp, Salmonella enterica
atgagtattcaacattttcgtgtcgcccttattcccttttttgcggcattttgccttcctgtttttgctcacccagaaacgctggtgaaagtaaaagatgctgaagatcagttgggtgcacgagtgggttacatcgaactggatctcaacagcggtaagatccttgagagttttcgccccgaagaacgttttccaatgatgagcacttttaaagttctgctatgtggtgcggtattatcccgtgttgacgccgggcaagagcaactcggtcgccgcatacactattctcagaatgacttggttgagtactcaccagtcacagaaaagcatcttacggatggcatgacagtaagagaattatgcagtgctgccataaccatgagtgataacactgctgccaacttacttctgacaacgatcggaggaccgaaggagctaaccgcttttttgcacaacatgggggatcatgtaactcgccttgatcattgggaaccggagctgaatgaagccataccaaacgacgagcgtgacaccacgatgcctgcagcaatggcaacaacgttgcgcaaactattaactggcgaactacttactctagcttcccggcaacaattaatagactggatggaggcggataaagttgcaggaccacttctgcgctcggcccttccggctggctggtttattgctgataaatctggagccggtgagcgtgggtctcgcggtatcattgcagcactggggccagatggtaagccctcccgtatcgtagttatctacacgacggggagtcaggcaactatggatgaacgaaatagacagatcgctgagataggtgcctcactgattaagcattggtaa

SEQ ID NO: 3862 - protein, 286 aa, Salmonella enterica
MSIQHFRVALIPFFAAFCLPVFAHPETLVKVKDAEDQLGARVGYIELDLNSGKILESFRPEERFPMMSTFKVLLCGAVLSRVDAGQEQLGRRIHYSQNDLVEYSPVTEKHLTDGMTVRELCSAAITMSDNTAANLLLTTIGGPKELTAFLHNMGDHVTRLDHWEPELNEAIPNDERDTTMPAAMATTLRKLLTGELLTLASRQQLIDWMEADKVAGPLLRSALPAGWFIADKSGAGERGSRGIIAALGPDGKPSRIVVIYTTGSQATMDERNRQIAEIGASLIKHW

SEQ ID NO: 3863 - DNA, 1131 bp, Salmonella enterica
atggggctggttactggaattcctgctgggtcagatttttccggtaatgtaacgtcccctgctccggcaggaggcgtaccaggatttgaatctgattttttccaaacaactcatcaggttatctttgatatactaaataaaactgttgctggaaaattaaatgaatattcatctattgcttatgaattaggtaaatatggtgtttctatatatgtgctgtggtatgcgtttactgttttagttcgcaaacagcaatcgcctgttcctgattttatctggaatgtatgtaagttttatgtgatattgctcttcgtaaaaaactctggaggtatgctgatatctgcaacaaatgcaatcgatggactaagagaaagtcttgcaggaggtgatccttggttgtggatagatcaactttggacaaaagtaattcaagttgcaaaggttatttgggataaagatacatctactgttccaattgccggtggtttatcctctttatttgtatatttcggtggaatagtggcattgttattatgctcaatagtgtttttttctgccgaaattacgctcctgttgttatctgttacagcccctatatttgttttatgtatcgcttttggcttcctcaggcaaatgtttaatagctggttgcagcttaacttcagttcgttattaatatttctctttggagcactagcgttacgggctggtacatggcaactaaatgtaattctgagtgtaactattgcgtcagataaacaggatttacttcaggctggggctacagctttggcttcgggcttgtttatgggctttgttatctggcaggcgaaaagttatgcttcacagattgcaggtgtgggtgttgaaggtgccatgcagggcgcagccgctatggggattggtgctggcgttttcggtgcatcccgtatggcgcgtggcgcacttggtatgggcagaaatgccggtattggtgcatggaaaggtctgcgtcgtcaggaaggcgggtttggtcagtctccgggaataacgggtaagaccgctaacctggccggacagggcgttaatattggtgccaaaaagcttcgtcaggcagctattgagagggcaaagaaaatgtatggagggtga

SEQ ID NO: 3864 - protein, 376 aa, Salmonella enterica
MGLVTGIPAGSDFSGNVTSPAPAGGVPGFESDFFQTTHQVIFDILNKTVAGKLNEYSSIAYELGKYGVSIYVLWYAFTVLVRKQQSPVPDFIWNVCKFYVILLFVKNSGGMLISATNAIDGLRESLAGGDPWLWIDQLWTKVIQVAKVIWDKDTSTVPIAGGLSSLFVYFGGIVALLLCSIVFFSAEITLLLLSVTAPIFVLCIAFGFLRQMFNSWLQLNFSSLLIFLFGALALRAGTWQLNVILSVTIASDKQDLLQAGATALASGLFMGFVIWQAKSYASQIAGVGVEGAMQGAAAMGIGAGVFGASRMARGALGMGRNAGIGAWKGLRRQEGGFGQSPGITGKTANLAGQGVNIGAKKLRQAAIERAKKMYGG

SEQ ID NO: 3865 - DNA, 474 bp, Salmonella enterica
atgagtctgttagcaaaagtgcaggcgtttatcgagcttaatccggggctgacatcaaatgagattgccgatgcttttcctgaatacgcacgctttgatgtgcagcgttcagcgagcaagttgtatcggtgtaagcgtgttaaccgccgcctggatggagatgtatttcgctattacgcaggcaaggacgaggcagtgattttgacgctacgacagaaaaggtcaggtcgcacaggttcgggtgatccgatggtgctggcaaagctggtaagcctcgctgaagacctggaatccagagggttgtttaagcgcgcctcagcggtgtggctggaggcatttagcgaaagccagttgactggcgagcgcgaagcatttttgcgccagcgccagaggtgccttgatagttgcaaaaagccggtcagaccgggtgaacagatttatctggcagggcgatttgtggggaatgtggaatga

SEQ ID NO: 3866 - protein, 157 aa, Salmonella enterica
MSLLAKVQAFIELNPGLTSNEIADAFPEYARFDVQRSASKLYRCKRVNRRLDGDVFRYYAGKDEAVILTLRQKRSGRTGSGDPMVLAKLVSLAEDLESRGLFKRASAVWLEAFSESQLTGEREAFLRQRQRCLDSCKKPVRPGEQIYLAGRFVGNVE

SEQ ID NO: 3867 - DNA, 525 bp, Citrobacter braakii
ttgaaaccgatgctcaaaaaagattttttttcagctattgaaaaccttctcaaagctggctttcaacctcgcttttacactgttaacagtggacgaatcggtctcattacattcactgataaaaatggaacaaaacaggtcgaacaggtttattcctgcacttctttagccgccaatacttttggaaagcgcttcaccacatggttagaagaaatttttcaaaagcataatgaaaaaaaagtagctgattccgggatcgaggttggtagccgtgtctgggataaaatgatgtatacggtgcgcaccatttcagaaattcgtgctgggggtgtgctggtgctggataacggtgcacagcgtactctggatgaagttcaaaaaacggctcctgaagcaaaccaggtagagccaaaggaaatctcttcacttaaggagctgctgaacgcttccaaaaatctggagccgacttcgcctgaactaattgcggctcttaatgaggctcagtcaaccgccataaaacggtga

SEQ ID NO: 3868 - protein, 174 aa, Citrobacter braakii
MKPMLKKDFFSAIENLLKAGFQPRFYTVNSGRIGLITFTDKNGTKQVEQVYSCTSLAANTFGKRFTTWLEEIFQKHNEKKVADSGIEVGSRVWDKMMYTVRTISEIRAGGVLVLDNGAQRTLDEVQKTAPEANQVEPKEISSLKELLNASKNLEPTSPELIAALNEAQSTAIKR

SEQ ID NO: 3869 - DNA, 438 bp, Citrobacter braakii
atggcgatgaataaaaaagaacaagccgcctatgatgagctggtggcacaggccagaataaaccgcgctttacgctggtctgactatagcgttgaacgcgatatgcccgtaccagaggtctcgggggaataccaaaacggctggagcttcaacaccgccactggcactgtttatccgacatggagcggaactacggttcacggcacacgggaagagggagaggttgtcgatgcaacctcccgccgcatgcgaggcatgaatggtagccagaacggcataccacaatacagcaccaaagaacgcgccctgaaggcattacgctgttcgcttgaaatcaagtttgctatgcagctggatgccgtagataaagcaatcgcaaaagaattagagtcgtccaccgctcgccgggagagcgatacctcagatgccaaacggtaa

SEQ ID NO: 3870 - protein, 145 aa, Citrobacter braakii
MAMNKKEQAAYDELVAQARINRALRWSDYSVERDMPVPEVSGEYQNGWSFNTATGTVYPTWSGTTVHGTREEGEVVDATSRRMRGMNGSQNGIPQYSTKERALKALRCSLEIKFAMQLDAVDKAIAKELESSTARRESDTSDAKR

SEQ ID NO: 3871 - DNA, 258 bp, Citrobacter braakii
atgccaaacggtaaaccatcaaatcaggcccgtgatcagaggggccttaacgccctgaaagaggcggttccagcgacggcacaactacagatgcgggttacccctgatcggaaactgcgttacgtcaatcaggcaaaggccgaaggcctgggtctaacagactgggtccaaaagcatatggataacgtgtgtgatctggcaggccagcccgacacaaccatgtacaaagatgatggagaaacaagtggccaaaaataa

SEQ ID NO: 3872 - protein, 85 aa, Citrobacter braakii
MPNGKPSNQARDQRGLNALKEAVPATAQLQMRVTPDRKLRYVNQAKAEGLGLTDWVQKHMDNVCDLAGQPDTTMYKDDGETSGQK

SEQ ID NO: 3873 - DNA, 189 bp, Citrobacter braakii
gtggccaaaaataacaacagtctcaaacagcatgtcttcaatatgctgtcggctggcagcgaacttaaagaagtgaagcgttttctcaccagcaagcgccttaaagcccgcccagcagtgttaatgatccacgaacaggcgattgctgtgcagaacactgagtacctgaataaaccggcttatagctaa

SEQ ID NO: 3874 - protein, 62 aa, Citrobacter braakii
MAKNNNSLKQHVFNMLSAGSELKEVKRFLTSKRLKARPAVLMIHEQAIAVQNTEYLNKPAYS

SEQ ID NO: 3875 - DNA, 300 bp, Salmonella enterica
atggctgtagttctaaccaaagccttgattgaagccggccgcaccggaaatagtgggtacagaaaaaagcagttgcttgcgctgggcgtaagtaacccgccgaaaagcggctggatcgaacgactgatcggcactgaggtatctgacgagcagtacgaacgctttctggggcacagcacgagcaagctgcatattccggtcgaaaatgaacacctattccggtttaaaatgaacgctgattccggcttgcgtgtacaccgattccggacacctcagtgcacgtactctgatgtcagatga

SEQ ID NO: 3876 - protein, 99 aa, Salmonella enterica
MAVVLTKALIEAGRTGNSGYRKKQLLALGVSNPPKSGWIERLIGTEVSDEQYERFLGHSTSKLHIPVENEHLFRFKMNADSGLRVHRFRTPQCTYSDVR

SEQ ID NO: 3877 - DNA, 270 bp, Salmonella enterica
atggaatacctgtttatattccctatccttaaacaatgcgtaggcaaggagaagatctttttgacaaccatttttgaaaaatattttatttttattagtcttttaaatatggtattttgtgaacagtgcatctttcttgcaatttcacgctgcgtatacccttcaatagccaataaagtcaaaaacctattcatcattcatatcgcaaatataatttttggaaacttaagacctaattatttacttattacgttgcaatatttaccatag

SEQ ID NO: 3878 - protein, 89 aa, Salmonella enterica
MEYLFIFPILKQCVGKEKIFLTTIFEKYFIFISLLNMVFCEQCIFLAISRCVYPSIANKVKNLFIIHIANIIFGNLRPNYLLITLQYLP

SEQ ID NO: 3879 - DNA, 840 bp, Salmonella enterica
atgacagaaagaataattcgttttaatgatgtttatatttgcactgagagttttggagatactaatgatccaactatcttattaataatgggagctacttcatcaatgatttggtgggaagaagacttttgtaggaagctaagcaatcaagggtttcatgttatacgttatgataatcgggatgtaggcagatcaattacttacgagtatggtcatccagaatatacctttgaggatttggctgatgatgcaattcaggtactagatgcgtatagggttgataaggctcacatagtcggtatgtcgatgggtggaattattacgcagatagtagctcttaaacatcccgatagagttcttacaatttcactagttatgacatcgaattatgattctagtcttcctaagaaggatagcaaagtaacagaagtttttgccaaaattaacatcaataactgggaagataaagaggaagtgatcaagtatgttatggataggagtaaagtcctcgtaggaactaagcatccatttaatgaagagaaaataaggaaattagctgggaaggattttgatcgtgctagtaatatggagagcatggaaaaccatgaatatgtaaaaggatggggattatatttatctagaacccatgaaattaatgttcctacactagttattcatgggactgatgatcctattatacctcatgagcatggagcgcatctttctaaaattatatctaatgctgtgctagttaccctggatggtgctgggcatgagctacactatgatgattgggatgaaattattaatgctttatccaagcatgctgcaagtttataa

SEQ ID NO: 3880 - protein, 279 aa, Salmonella enterica
MTERIIRFNDVYICTESFGDTNDPTILLIMGATSSMIWWEEDFCRKLSNQGFHVIRYDNRDVGRSITYEYGHPEYTFEDLADDAIQVLDAYRVDKAHIVGMSMGGIITQIVALKHPDRVLTISLVMTSNYDSSLPKKDSKVTEVFAKININNWEDKEEVIKYVMDRSKVLVGTKHPFNEEKIRKLAGKDFDRASNMESMENHEYVKGWGLYLSRTHEINVPTLVIHGTDDPIIPHEHGAHLSKIISNAVLVTLDGAGHELHYDDWDEIINALSKHAASL

SEQ ID NO: 3881 - DNA, 657 bp, Salmonella enterica
atgcacactaacgagggcaaaaatataaatggagaaagattactatcaaaatcattgctagaagaatcctattcacctctacctggaagtcctaaatatggtcttggatggtctttaagttctgcaaatgttaaaccagcacgtatttctcatagtggggcgttatctacaattcaagcgcaacaagatattgtaccttcaagtggatatgctgtagccgtaatgcttaatagctttacgacaacttttgaacatgcttatgagataagttcgggtattataaaattgaccgaaggacaaaaacctaatattaaagttcctatgcctaaaataattgatttatttcttggtctaatgacattaatatacttattcttaggtataaaaggtattttgcgaagtaaggagtggtcgaatagaagaaaacttcatcctactttgagatattatcttcgtctaatgcctcaaataattccagttttgtttatagggtggttgttttttattgttccaaacctacaaaataatagttctacaattaaggatgctattggtatttggccagctgcaatgttatttttggcagtagttttcttaattggaactatagttacggttaggagagtatattatagagtaagattaaatagaaattga

SEQ ID NO: 3882 - protein, 218 aa, Salmonella enterica
MHTNEGKNINGERLLSKSLLEESYSPLPGSPKYGLGWSLSSANVKPARISHSGALSTIQAQQDIVPSSGYAVAVMLNSFTTTFEHAYEISSGIIKLTEGQKPNIKVPMPKIIDLFLGLMTLIYLFLGIKGILRSKEWSNRRKLHPTLRYYLRLMPQIIPVLFIGWLFFIVPNLQNNSSTIKDAIGIWPAAMLFLAVVFLIGTIVTVRRVYYRVRLNRN

SEQ ID NO: 3883 - DNA, 252 bp, Salmonella enterica
atgctgttatatatccttgagataaccttgctgctgccttttcaggcgtttggtattgcgctcgacacagtcaaaaccctggcctttgaaaccggcagcgatgtcaccactcagctcgattttgccccctggcaaatgaatgccattgccctgggctatcagttcgggtatctgatgttgccgtttattgccgctgccggcatatggatattgatgaacagggagctgctggacactttgcgctcgcaataa

SEQ ID NO: 3884 - protein, 83 aa, Salmonella enterica
MLLYILEITLLLPFQAFGIALDTVKTLAFETGSDVTTQLDFAPWQMNAIALGYQFGYLMLPFIAAAGIWILMNRELLDTLRSQ

SEQ ID NO: 3885 - DNA, 483 bp, Salmonella enterica
atgagaaccttgaaagtatcattgatagctgcgaaagcgaaaaacggcgtgattggttgcggtccagacataccctggtccgcgaaaggggagcagctactttttaaagcattgacctacaatcagtggcttctggtgggtcgcaagacgtttgaatctatgggcgcactccccaataggaaatacgcggtcgttacccgctcaggttggacatcaaatgatgacaatgtagttgtatttcagtcaatcgaagaggccatggacaggctagctgaattcaccggtcacgttatagtgtctggtggcggagaaatttaccgagaaacattacccatggcctctacgctccacttatcgacgatcgacatcgagccagagggggatgttttcttcccgagtattccaaataccttcgaagttgtttttgagcaacactttacttcaaacattaactattgctatcaaatttggaaaaagggttaa

SEQ ID NO: 3886 - protein, 160 aa, Salmonella enterica
MRTLKVSLIAAKAKNGVIGCGPDIPWSAKGEQLLFKALTYNQWLLVGRKTFESMGALPNRKYAVVTRSGWTSNDDNVVVFQSIEEAMDRLAEFTGHVIVSGGGEIYRETLPMASTLHLSTIDIEPEGDVFFPSIPNTFEVVFEQHFTSNINYCYQIWKKG

SEQ ID NO: 3887 - DNA, 630 bp, Salmonella enterica
atgccagtcactattagcatttccgatgatgtgtaccgcagattggaagcgttggctgtcggattcgacacaccagagagagttatcgagcgattgctcgactcggttgaggagggcggacccaagtcaagcgaaaacaaaccgtccctaacctttgtccctgatgagactgctttcaaaaatgagctgatagctcgcaagaaggcacaggtcgttcttcatttgaaaaacggtgaacgagatgtcattcattggaatgcgtctagattccaacccagttcaaatcttcgagctaatttatggtctggcattctgagaaactggaaggataaagggatcacctctgctgaactttcggttctacccaggagccacaatcatcccgacgacaatacagatctattaatagctattgccggagaagttcattggacgctcgaagaggtagagcagtacttcgttgattacgatctggtaggcagtgacgacggccatccttactattacctagcgacgttcagtgatgagacacctgacgagctgaagcgaattgcagggctgaacagctcaaatcaacttcacatgggtctaaacatagttccggatgaagatcagggagaattcgagtag

SEQ ID NO: 3888 - protein, 209 aa, Salmonella enterica
MPVTISISDDVYRRLEALAVGFDTPERVIERLLDSVEEGGPKSSENKPSLTFVPDETAFKNELIARKKAQVVLHLKNGERDVIHWNASRFQPSSNLRANLWSGILRNWKDKGITSAELSVLPRSHNHPDDNTDLLIAIAGEVHWTLEEVEQYFVDYDLVGSDDGHPYYYLATFSDETPDELKRIAGLNSSNQLHMGLNIVPDEDQGEFE

SEQ ID NO: 3889 - DNA, 585 bp, Salmonella enterica
atgaatcaaaaaattggctacgctagggtttcaaccgacgatcagaacctgcatttgcagagagatgcgttggctgctgctggttgcgagatcatttacgaggacaaggccagtgggaagaatgccgctagacccgaacttgataactgcttaaaggctcttagacctggggatacgttggtcgtttggaggctggataggttaggccgtagtttggcagacttggtgagcgttgttacccatctggttgatgagcgacggattggatttctgagcctacaagaacagattgaaacgaacagtgcttctggaaagctggtttttcatgtgtttgctgctttggctgaatttgagcgaaatttgattagcgaacgtaccaaggcgggattggaagccgcaagagctcgcggtcgcttgggtgggcggaagccaaagttacagaaaaaggatatcagggagattagggcattactcaaagatggttctattcctgtatctgatgttgctaggcgatatggtgtatctagaacgactatttataatcatgtaggggtggtgagtgtacaaaattctagaggggattaa

SEQ ID NO: 3890 - protein, 194 aa, Salmonella enterica
MNQKIGYARVSTDDQNLHLQRDALAAAGCEIIYEDKASGKNAARPELDNCLKALRPGDTLVVWRLDRLGRSLADLVSVVTHLVDERRIGFLSLQEQIETNSASGKLVFHVFAALAEFERNLISERTKAGLEAARARGRLGGRKPKLQKKDIREIRALLKDGSIPVSDVARRYGVSRTTIYNHVGVVSVQNSRGD

SEQ ID NO: 3891 - DNA, 990 bp, Salmonella enterica
atggctactgcggaacaactaaaagcgcttttaaagagtcacgctgaacgtgacgatcagcgtttttattctgttgcccttcaggttgctgccaaagaagctcgacaggggcataataagcttgcgagcgatattaaaaatcttgttgagaaatctcagcgttctaccaataagctgggtctagcatcgtctagaactataccttttgcgcaacagaatcaaagtgagttaaaaggtctattagagctcacgccacacagtgttcgcctaaatgagcttgttctttctgatgacatacaagaacgtatggagaaggtgatattagaacagcgtcagaaggataaactcagtcagtttggtttgcagccgcgtagaaaacttctttttactggttctcctggaactggtaagacaatgtctgcatctatgttggcaacagagttaaaattacctctttatacaatcgtcctagataatcttattactcgttttatgggagagactgctgcaaagttgcgtttgatctttgatcatataaggcaaacaagagctgtttatctttttgacgaatttgatgctataggaactcaacgaggtgcacccaatgatgttggggaaattcgtagggtgttaaactcatttttgttgtttgtagagcaagatgcatcagagagtattattgttgcagctacaaaccatccagagttactagaccaagcgctttatagaagatttgatgacatcattaagtttgaaaaaccaaaatttgatcaaatatgccttcttattcaaaaccgtctatcacttttcgataccgatgattttgattggaggatggttgctgaagctgcaaatggtttgagctctgctgagattacccgatcttgtgaagatgcagctaaagaagctgttttgaattttaatgcaaaaataacaagtgaaacactgttaaaggccttttctagaaggcagtcaggtaataacaaataa

SEQ ID NO: 3892 - protein, 329 aa, Salmonella enterica
MATAEQLKALLKSHAERDDQRFYSVALQVAAKEARQGHNKLASDIKNLVEKSQRSTNKLGLASSRTIPFAQQNQSELKGLLELTPHSVRLNELVLSDDIQERMEKVILEQRQKDKLSQFGLQPRRKLLFTGSPGTGKTMSASMLATELKLPLYTIVLDNLITRFMGETAAKLRLIFDHIRQTRAVYLFDEFDAIGTQRGAPNDVGEIRRVLNSFLLFVEQDASESIIVAATNHPELLDQALYRRFDDIIKFEKPKFDQICLLIQNRLSLFDTDDFDWRMVAEAANGLSSAEITRSCEDAAKEAVLNFNAKITSETLLKAFSRRQSGNNK

SEQ ID NO: 3893 - DNA, 2544 bp, Salmonella enterica
atggtttctaaaaggaagcatttagatgtggctcggtttttcattgacgaaccttttaaatctaaaaggcctggtcgaaattcaggtgttcctggtcgagatagaaaccaacatggaagttatttggctggtttatatcagaatttaataaatgcttacgaacaaaaaagaaaacaacaaattaatcctatcacagatgattctggtatttatgttgaaattatcggagttgatggatgcaagctcccattagatagtttagataacagagattttaaactctgttcttgccaaatgagaggagatagagagttcgcgttaatttttatacctgaagataaacgtgatacattccttaaaaaaatacaacagtatttagaccctcagaaagatggaaaaccaaataaggaaggcgtttcttttcctcgaaatcatacgttaatagatagtatttccgagatcaggcttgcaaatttggagtcattttggacagatcctatagatttatttcctgcagataggaatcttgatgtctggtgggaattatggttgaaaagtaacaccgtagacgacgttaaaaaaatagcagagtctcttgctgaaagagttgatggtcgcttaggaaacacatctctttcatttttcaattcttttgttgttcttattaaagcctcagttaataaacttgagaaagctcctgaattaatttcaaatttagaagaaattcggaaagcgaaggagacaccagttcccatcattagctcttcaccaaaagagcaacaagagtggctgaagagtatttctgatcgagtatctctttcagataatataacaaccagtgtgtcaatactggatactggtattaattacaataacatgctgttaagtaaagtgtgctgtgatgatttttctgtttcttgggatcctgattggcccaaatacgatcaatatcaagcactagcgccgtttaatgagcatggttctttgcaggcaggacttgcagcatttgggaatttgatggatgtcgtattaggaaatagcgctatccaactatcacatgttattgagtcagcaagaattttacctccgcaaggcaacaatgatccctttttatatggggctataacggtaggaacagcatccaaacttgaagtagataggccagatataaatagagtatatagccttgctgttacgtctgatcacgaaagagaaagtggcagaccttcttcatggtctgcagaaattgatcaattcacttctggtatgcaagatggaaagcggagactttttgttatttctgccggtaacaacttagatattcgtcctgaccaagactattgggatcaagtcaatctcgcgcagatagaagatccagctcaagcatggaatgctattactgttggggcatatacagaaatgaccacaaatgatgatccatattttgaaggttggtcaccatttgcaatggcgggtgatgttgctccatcaagtcgttcttcggtgaattgggcgtggagaaagcaagcaccatttaagccagatgtagttgccgaaggtggtaatcgacttttgtcacctgataagactgaactcagtaatgaagatactgttggattattaacaacatcaggaaaaactaccggtcaggtttttgagcggggtagtgatacaagcgctgcgtgtgcgttagtctcgagatgtgcggctcagttaacagccgagtatcctgaactttggcccgagactatacgaggtttgataattcactctgcggagtggactccacgaatgatggaacgatttggtttattaagtgcagtacatagtcctaaagtagcaaaagaaacattattgcgtacggttgggtatggtgtaacaaacattgacagagctagatatagtgctgaccatgcgcttactttgatcgctgaaggcgaaattcagccatttatcaaatcccaagatgctaatgcgtcatctgatcctaaactaaatcaaatgaaactttatcagttaccttggcctctcgcggaattgcaaaatttgccgccagagttagaagttaaactcaaagttactttatcttacttcatagaacctaatcctggtaggagaggttatcgtacaagatatagctatcaatctcatggtttaaggtttgaaactatcagacctggtcaatcaattgctaacttccgttcttacattaatggtttagcaaatatggatgattacgatggaccagaaggtgacaatgatgggtggtttttagggagtcaacttcgaacaagaggttcaattcattcagatcactggactggtagtgctcaagatttagctgatatgcatactatagctatttttccagtaggtggatggtggaaatataaaactgcagaagaacggtgggaaaatagagtgcggtttagccttcttattagtattgaagtacctgatgagagtgttgacatttactctgtaatagagaatcagattgaagttgcaatagaaaatcaggtcgcaatagaaattgtaacttga

SEQ ID NO: 3894 - protein, 847 aa, Salmonella enterica
MVSKRKHLDVARFFIDEPFKSKRPGRNSGVPGRDRNQHGSYLAGLYQNLINAYEQKRKQQINPITDDSGIYVEIIGVDGCKLPLDSLDNRDFKLCSCQMRGDREFALIFIPEDKRDTFLKKIQQYLDPQKDGKPNKEGVSFPRNHTLIDSISEIRLANLESFWTDPIDLFPADRNLDVWWELWLKSNTVDDVKKIAESLAERVDGRLGNTSLSFFNSFVVLIKASVNKLEKAPELISNLEEIRKAKETPVPIISSSPKEQQEWLKSISDRVSLSDNITTSVSILDTGINYNNMLLSKVCCDDFSVSWDPDWPKYDQYQALAPFNEHGSLQAGLAAFGNLMDVVLGNSAIQLSHVIESARILPPQGNNDPFLYGAITVGTASKLEVDRPDINRVYSLAVTSDHERESGRPSSWSAEIDQFTSGMQDGKRRLFVISAGNNLDIRPDQDYWDQVNLAQIEDPAQAWNAITVGAYTEMTTNDDPYFEGWSPFAMAGDVAPSSRSSVNWAWRKQAPFKPDVVAEGGNRLLSPDKTELSNEDTVGLLTTSGKTTGQVFERGSDTSAACALVSRCAAQLTAEYPELWPETIRGLIIHSAEWTPRMMERFGLLSAVHSPKVAKETLLRTVGYGVTNIDRARYSADHALTLIAEGEIQPFIKSQDANASSDPKLNQMKLYQLPWPLAELQNLPPELEVKLKVTLSYFIEPNPGRRGYRTRYSYQSHGLRFETIRPGQSIANFRSYINGLANMDDYDGPEGDNDGWFLGSQLRTRGSIHSDHWTGSAQDLADMHTIAIFPVGGWWKYKTAEERWENRVRFSLLISIEVPDESVDIYSVIENQIEVAIENQVAIEIVT

SEQ ID NO: 3895 - DNA, 1926 bp, Salmonella enterica
atgaaactgcacagtattcggatatcaaattttcaaagttttggtgctgaaccaatagaactgacactggaaaatattacctatctgattggccccaacgggtcaggcaagactgctgcactccaggctttgtgccgactgtttgcatttgatccatcattacgccgtattcagcgctcagacttccatgtcccgcacgatgaacaagaagcgcccgaagaaaggcagttatggattgaggcggacttcgtttttcccgagttggagggtgaagaagataactcaagcgttgctccccatttcagtcacatgcgccttgatgaccctgacggaattcctcgggtacggtatcgcctaagtgccactatgggcctagatggagatattgatgaagctttcgtgtatgtgcttgaagttggtccggacggctcacctataaatcctgaaacagttcctcgatctgaccgaaatcacatacaagtccactatctgccagccaggagagatcctactgaccacatagcatacggaacgagtgcgctgcttggccgcttgctacgtgccgtgaactgggaaaatgaacgagaaaaggtcaaagggttcaccgaccagattagtgagagcctggctgctaattcatcggttaatgcttttagctcccacctgaagaaaatatggggcaccctccataaaggcagctactttacagatcccaagattacttttgtggcatctgagatcgaggcgttgcttcgtcatttgtccgtatcattctcgcctggacatgatgacaatcttgtcgatttttctcgactcagtgacggtcagaagtcgatgctctatctatcgttggttctctcatctcaagctgttggtcgtgctgtccttgccggtgaggacgactcttttgaccctgaaaagttgcgtccgccagtctttactttaatagcccttgaggaaccagagaacagcctctcacctcactatttgggaagaattgttaacgctcttaactcaatgacgagtaacgaggatgctcaggccctagtcgctacgcatgctccgtcgatgttgcgacgtgtcgatccggaacatattcgatatcttcgacttactgaaacccggcaatcaagaattaagaaaatccaattacccgctaaaaccgatgaagcgcacaaatttgtacgtgaggctgtccaggcatttcctgagatctacttctctcgtttgattgtgttgggtgaaggggatagcgaagaaattgtattaccgcgccttttccaagcaaagggtgcgccagttgatgaatcagcggttacgattgctccgcttggaggtaggcatgtaaaccatttttggcgtctgttatccgaactgcaaatcccatttttgactcttctagatttagatgtgggcagatatcaagcgggctggggaagaataaagtatgtaaataaccaacttggtttgtatcaacctgaaaaggtactaccaactactttttctttatcagattggaatgatgacaaagtacctgttcgtacacatcatttctttgaaaacggcactaagagtgtatttttagagctggaaacacgtggtgtttttttctcatttccaatggatttagatttttcaatgcttcttgctttccctaatgcgtacggtgttcagcaggaggtttcagatgagtctacgattaaagccgttttgggtaagagccatcatggctcataccaatacagcggagacgagttaaatcttttctctacgtatcacaagctttttaaactgggtagtaagcccgctgcgcatatagatgctcttgctcaactgagcaacgaggaattgctggcgaacatgccaggatcatttggacgacttgcagatgccgtgatagccaagcttgcggagctgcccgagtga

SEQ ID NO: 3896 - protein, 641 aa, Salmonella enterica
MKLHSIRISNFQSFGAEPIELTLENITYLIGPNGSGKTAALQALCRLFAFDPSLRRIQRSDFHVPHDEQEAPEERQLWIEADFVFPELEGEEDNSSVAPHFSHMRLDDPDGIPRVRYRLSATMGLDGDIDEAFVYVLEVGPDGSPINPETVPRSDRNHIQVHYLPARRDPTDHIAYGTSALLGRLLRAVNWENEREKVKGFTDQISESLAANSSVNAFSSHLKKIWGTLHKGSYFTDPKITFVASEIEALLRHLSVSFSPGHDDNLVDFSRLSDGQKSMLYLSLVLSSQAVGRAVLAGEDDSFDPEKLRPPVFTLIALEEPENSLSPHYLGRIVNALNSMTSNEDAQALVATHAPSMLRRVDPEHIRYLRLTETRQSRIKKIQLPAKTDEAHKFVREAVQAFPEIYFSRLIVLGEGDSEEIVLPRLFQAKGAPVDESAVTIAPLGGRHVNHFWRLLSELQIPFLTLLDLDVGRYQAGWGRIKYVNNQLGLYQPEKVLPTTFSLSDWNDDKVPVRTHHFFENGTKSVFLELETRGVFFSFPMDLDFSMLLAFPNAYGVQQEVSDESTIKAVLGKSHHGSYQYSGDELNLFSTYHKLFKLGSKPAAHIDALAQLSNEELLANMPGSFGRLADAVIAKLAELPE

SEQ ID NO: 3897 - DNA, 1662 bp, Salmonella enterica
gtgattgctgtagatgcatggttgccttctgatgggctaacacttgaacccaatgctctgctggctgcgaaggaacaagcgcgctgtcttgcactgactgcggggccgggagcgggcaagacggaaatgcttgcacagcgagctgacttcctcctccgaaccggaacctgccgttatccgaagagaatactcgctatttctttcaaagttgacgccagcaaaaacttgaaggagcgaatccagcgacgctgtggacaagaattggcttcccgttttgatagctacacatttcatgcgtttgcaaagcgtattattgatcgcttccgagtagtgcttactggtaatgatgctctggatacggattattcgattggcgaaagaaaagtcacaagaaggcaaattacatttcatgatcttgtgccgctagcaattcaaattctcaaggcctctgttgtcgcaagaaatgccatacgccaaacttacagcgatgttttcttggatgaattccaagactgcacggatcagcaatatgaactcgttaaggtagctttccaaagtacaagcattcgtcttaccgctgtcggtgacaccaagcagaaaatcatgggatgggcaggagctttggacggaattttccaaacgttcgctaaggatttttcagccgtaccactaaacatgtaccgaaactttcgttcaaaaccacgcctgcttcggatgcagaacgagataattcgtgtgcttgatccagcttccgttatgccagatcaccaacttgctggtgaggagggagaggttttcgcgtggcaattcgagaatgcacagggggaagctgagtatttggccgatttgattgccgggtggataagaaatgaaaaggttccgttgtccgaaatcgccgtattagtgtccaaacaactagatctttatgccaaccacttgatgacggcattggaagttaggggaataccgtaccggaacgagcaggagatgcaggatattactgttgaacctgccgcgaggctcgttgttgactatttgtcctgcctctacggccagcgagagcccaaagcttgggttcggcttatgaatcaattgattccctttgctgatgatgaggtgcagtctagcgctaggcaaagcttccaacgcttcttcaaggagcagagaaaaatcatcaccatgaccgagctgttggatgagccgttttcgggatggtgggattctgtgtgtagctttctgaagaaaataggaatggagactcttgttgctctctcgcccgactatgagtcacatgctaggttaggtgaagttgtgagagataccaaagcgcgcattgaagaattgcttgaacttacccccgatttgcctcaagccttgactcgtttctctgatgatcaggctgtgcgtattctgactatccataagagcaaaggattggagttcgactcaacgataattatggccgttgagaacgaaatattctttggggatcaagatgctaatcggtgtgctttctttgttggtgtatcccgtgccaagcgtcggcttgttgttacatacgcaaaagagcgagataagcctgataattattcagggatatggcgaacgaatcgctctgctcagttagaatattttggatatacatctccttttgttaagtga

SEQ ID NO: 3898 - protein, 553 aa, Salmonella enterica
MIAVDAWLPSDGLTLEPNALLAAKEQARCLALTAGPGAGKTEMLAQRADFLLRTGTCRYPKRILAISFKVDASKNLKERIQRRCGQELASRFDSYTFHAFAKRIIDRFRVVLTGNDALDTDYSIGERKVTRRQITFHDLVPLAIQILKASVVARNAIRQTYSDVFLDEFQDCTDQQYELVKVAFQSTSIRLTAVGDTKQKIMGWAGALDGIFQTFAKDFSAVPLNMYRNFRSKPRLLRMQNEIIRVLDPASVMPDHQLAGEEGEVFAWQFENAQGEAEYLADLIAGWIRNEKVPLSEIAVLVSKQLDLYANHLMTALEVRGIPYRNEQEMQDITVEPAARLVVDYLSCLYGQREPKAWVRLMNQLIPFADDEVQSSARQSFQRFFKEQRKIITMTELLDEPFSGWWDSVCSFLKKIGMETLVALSPDYESHARLGEVVRDTKARIEELLELTPDLPQALTRFSDDQAVRILTIHKSKGLEFDSTIIMAVENEIFFGDQDANRCAFFVGVSRAKRRLVVTYAKERDKPDNYSGIWRTNRSAQLEYFGYTSPFVK

SEQ ID NO: 3899 - DNA, 276 bp, Salmonella enterica
atgtttatcatcattgtgcttgcagcgttttgctgctgcctgcgtttgtgcattccgcaagcgaccaggcttccatatcgcgatctggctgacagctatgtcgcgttcctggcgctcaattccgagcggccaaacacaagagggcctccctcatccgtcagaacgagtgctggatttccggcttactctatgctccaccccgtctctgtcgccgtaggcgtaaacagagacgggggtagagcccccgacggaagccttgagcctcaagggctctag

SEQ ID NO: 3900 - protein, 91 aa, Salmonella enterica
MFIIIVLAAFCCCLRLCIPQATRLPYRDLADSYVAFLALNSERPNTRGPPSSVRTSAGFPAYSMLHPVSVAVGVNRDGGRAPDGSLEPQGL

SEQ ID NO: 3901 - DNA, 318 bp, Salmonella enterica
atgtacttttctacgttcgttttgatcatgattgttaccgtgggcgttattgctttcggggctacgattgtcgccaaactactaaataaggcttcgattctggcatatcgatcattgataaaaacgcggcctgtacgggtcgttagcccattggtaactaatagcagttcattgtgtggtgaatggttgaaagctacctccggtagccatcaacctagagtctccgatgctgtcgaatgcgctccgcttgagggggagctggttgctgaacgcgctgtaataggttccaccaggaaattattgtcagctcaaagatga

SEQ ID NO: 3902 - protein, 105 aa, Salmonella enterica
MYFSTFVLIMIVTVGVIAFGATIVAKLLNKASILAYRSLIKTRPVRVVSPLVTNSSSLCGEWLKATSGSHQPRVSDAVECAPLEGELVAERAVIGSTRKLLSAQR

SEQ ID NO: 3903 - DNA, 138 bp, Salmonella enterica
atgcgtgtgttaatgctaatgtatgcatacattagcattaacatagagcagattctggcgcgttgcgcccgtagctcgctgacgctcacacgcgcagtacagcgccccgccatgctgcaatgcaccagggcggggtaa

SEQ ID NO: 3904 - protein, 45 aa, Salmonella enterica
MRVLMLMYAYISINIEQILARCARSSLTLTRAVQRPAMLQCTRAG

SEQ ID NO: 3905 - DNA, 351 bp, Salmonella enterica
atgaaaacgttaaaacaagccgcaatgcagtttgcatctgatctgcgtaataatcgctgttttaaagctgcttataatgatgctctgttagagcttgatcgggaagatttaaacgccattgtacaatgcacatttctttttgagccaaaacgaacattagccgaacttgataaattaattaaaaagatagaagtagaagaagattatgagttttgtgtatcccttgataaaggtaatggattacacgaagtcaggatatttaaaagtgagcgtgaggcgttggatgcttatcgcattttgactctttacggatacacagtaactatagaaaagaaggagggtaatgactga

SEQ ID NO: 3906 - protein, 116 aa, Salmonella enterica
MKTLKQAAMQFASDLRNNRCFKAAYNDALLELDREDLNAIVQCTFLFEPKRTLAELDKLIKKIEVEEDYEFCVSLDKGNGLHEVRIFKSEREALDAYRILTLYGYTVTIEKKEGND

SEQ ID NO: 3907 - DNA, 267 bp, Salmonella enterica
atgactaagcatgatgctatacgcatttcgcaacttcatcaaatctttccagaggttcagttaactgaacgacagaaagatattgcagtgatgtatgtaattggttgcacagttgaggaaattgcgtcagaaaaagggatcacgaccgatggtgttatgtatcatttgaatctggtaaaaagagccgtaggtagtgcaactctggtaggagtgcgcacaactgcgtttcttaggatgatggcaatcttattaacaagggagtcataa

SEQ ID NO: 3908 - protein, 88 aa, Salmonella enterica
MTKHDAIRISQLHQIFPEVQLTERQKDIAVMYVIGCTVEEIASEKGITTDGVMYHLNLVKRAVGSATLVGVRTTAFLRMMAILLTRES

SEQ ID NO: 3909 - DNA, 234 bp, Salmonella enterica
atgagttatatgaaaaaaacaagaattctttcgttggttttgttctcaattgcattgagtggttgtggtgaggacatcaagaccgttgattggtggcgaaatcatccggaggaagcgatctcgaaggttgaagagtgtaagaagtcaggcgacgtatcggataattgtaaaaacgccaagactgcgttgtacaagaatcagcaacaagatgcgcctgtgcctcaaattaattaa

SEQ ID NO: 3910 - protein, 77 aa, Salmonella enterica
MSYMKKTRILSLVLFSIALSGCGEDIKTVDWWRNHPEEAISKVEECKKSGDVSDNCKNAKTALYKNQQQDAPVPQIN

SEQ ID NO: 3911 - DNA, 534 bp, Salmonella enterica
atgagtgaatgttttacatctggttcgttatctcgctgggtaaaagcaaggcacatggcattggcgggttatatcacaaagataattatcctagagactggtttgacttataagcaagttcgcaggctgtacgctgagcttgaatattgcggatatgatgtgaaggataagaaatccaggacattccgtggtggagcgacgctgatccacagtcagacatctaaaattcaagcatcgcttttaatgcagctctattcaaatcttggaggggaaaaagttaagcgttctgtagatattagcgctctgaataaagcgtttaggatgtatcacgctatccgtaaagaagtaccaggtatgaagggaggaaaatgggagcccttcgacattacagatgcctggtgtcttgcctctgaactgcgcaatggagaagcaatgatagagcattgcgagcaatgccaatgcactttttttacgtcaattaatcagcgaacatgtgttgaatgcccattctgccgggtctcaaaagctgcctga

SEQ ID NO: 3912 - protein, 177 aa, Salmonella enterica
MSECFTSGSLSRWVKARHMALAGYITKIIILETGLTYKQVRRLYAELEYCGYDVKDKKSRTFRGGATLIHSQTSKIQASLLMQLYSNLGGEKVKRSVDISALNKAFRMYHAIRKEVPGMKGGKWEPFDITDAWCLASELRNGEAMIEHCEQCQCTFFTSINQRTCVECPFCRVSKAA

SEQ ID NO: 3913 - DNA, 447 bp, Salmonella enterica
atggaccggcgattggtccatggcgaaacggccgaccttgcgccgaccggcttcgggcaacaggtccgcgaagccatggaccagcgccgcgagcatcatatcgaacagcgcgacgccacgcgcaacagggacggccgaatcttctaccggcgcaatcttctcgccaccctgcgcgagcgggaagttgcgcgcgccggtgcggagatggccgagggcaaggcgctgccgttccgcgccgccaaggatggtgagagcgtcagcggcaagtttaccggaaccgtgcatctatcgagcggcaagttcgccgtggtcgagaaatcccatgagttcacccttgtcccgtggcggccgatcatcgaccgccaactcggccgcgaggttatgggcatcgtgcagggcgggtcggtgtcgtggcagttagggcggcagagggggctggaacgctga

SEQ ID NO: 3914 - protein, 148 aa, Salmonella enterica
MDRRLVHGETADLAPTGFGQQVREAMDQRREHHIEQRDATRNRDGRIFYRRNLLATLREREVARAGAEMAEGKALPFRAAKDGESVSGKFTGTVHLSSGKFAVVEKSHEFTLVPWRPIIDRQLGREVMGIVQGGSVSWQLGRQRGLER

SEQ ID NO: 3915 - DNA, 627 bp, Salmonella enterica
atgaccaaactggacaagggcaccgtgatcgcggcggcgctagagctgttgaacgaggttggcatggacagcctgacgacgcggaagctcgctgaacgcctcaaggttcagcagcctgcgctttactggcatttccagaacaagcgagcgctgcttgatgcgctcgccgaggcgatgctggcggaacgccatacccgctcgctacccgaagagaatgaggactggcgggtgttcctgaaagagaatgccctgagcttcagaacggcgttgctctcttatcgggacggcgcgcgtatccatgccggcactcgaccgacagaaccgaattttggcaccgccgagacgcaaatacgctttctctgcgcggagggcttttgtccgaagcgcgccgtttgggcgctccgggcggtcagtcactatgtggtcggttccgttctcgagcagcaggcatctgatgccgatgagagagttccggacaggccagatgtgtccgagcaagcaccgtcgtccttcctgcacgatctgtttcacgagttggaaacagacggcatggatgctgcgttcaacttcggactcgacagcctcatcgctggtttcgagcggctgcgttcatctacaacagattag

SEQ ID NO: 3916 - protein, 208 aa, Salmonella enterica
MTKLDKGTVIAAALELLNEVGMDSLTTRKLAERLKVQQPALYWHFQNKRALLDALAEAMLAERHTRSLPEENEDWRVFLKENALSFRTALLSYRDGARIHAGTRPTEPNFGTAETQIRFLCAEGFCPKRAVWALRAVSHYVVGSVLEQQASDADERVPDRPDVSEQAPSSFLHDLFHELETDGMDAAFNFGLDSLIAGFERLRSSTTD

SEQ ID NO: 3917 - DNA, 1176 bp, Acinetobacter baumannii
gtgcgcagctctgccatcattgccctgctgatcgtgggtcttgacgccatgggtctcggcctcatcatgcccgtccttccgacgcttctgcgtgagcttgtgccagcagagcaggtcgctggacactatggtgccttgctgtcgctctatgcattgatgcaggtcgtcttcgcgcccatgcttggacagctttcggattcttacggtcggcgtccggtacttctggcttctcttgcaggagccgcagtcgattacacgattatggcatcagcgccggtcttatgggtgctctatatcggccgactcgtgtccggcgtcacgggcgcaaccggagctgtagcagcctcaaccattgccgattcgacgggggaaggttctcgcgcacgctggttcggctacatgggggcctgttatggggcgggcatgattgccgggccagcacttggtggcatgctcggtggtatctctgctcatgccccgtttatcgccgccgcccttctcaacgggttcgcgttcctgcttgcctgcattttcctcaaggagactcatcacagccatggcgggaccggaaagccggttcgcatcaaaccattcgttctgttacggctggatgatgcattgcgcgggctaggtgcgcttttcgcagttttcttcattattcaactgatcggccaagtgcctgcagccctatgggtcatatatggcgaggaccgttttcagtggaacaccgcgaccgttggtttgtcgctcgcggcgtttggggcaacacatgcgatcttccaagcgtttgttaccggcccgctttcaagccggcttggagagcggcgcacgctgctgtttggcatggctgcggatgcgactggcttcgttcttctggcttttgccacgcagggatggatggtgttcccgattctgttgctgcttgccgccgggggtgttggcatgccggccttgcaggcaatgctctcaaacaatgtcagcagtaacaagcaaggggctttgcaaggaacgctaacgagcctcaccaatctaagctctatcgcaggaccgcttggcttcacagcactctattctgccaccgccggggcatggaacggttgggtttggattgtcggcgcgatcctctatttaatatgtctgccaatactacgcagaccattcgcaacttcattgtga

SEQ ID NO: 3918 - protein, 391 aa, Acinetobacter baumannii
MRSSAIIALLIVGLDAMGLGLIMPVLPTLLRELVPAEQVAGHYGALLSLYALMQVVFAPMLGQLSDSYGRRPVLLASLAGAAVDYTIMASAPVLWVLYIGRLVSGVTGATGAVAASTIADSTGEGSRARWFGYMGACYGAGMIAGPALGGMLGGISAHAPFIAAALLNGFAFLLACIFLKETHHSHGGTGKPVRIKPFVLLRLDDALRGLGALFAVFFIIQLIGQVPAALWVIYGEDRFQWNTATVGLSLAAFGATHAIFQAFVTGPLSSRLGERRTLLFGMAADATGFVLLAFATQGWMVFPILLLLAAGGVGMPALQAMLSNNVSSNKQGALQGTLTSLTNLSSIAGPLGFTALYSATAGAWNGWVWIVGAILYLICLPILRRPFATSL

SEQ ID NO: 3919 - DNA, 723 bp, Salmonella enterica
atgatgaccttagttcacactctcgctgtcgccgaatatctcaacttccgtcacgccgccaacgcgctcggcgttgcacagtccagcgtcagcgcccgcgtgaaggcactggaagaagacctcggcatcctcttgttcgagcgtcatgcgcgcggcgttcggctgaccgaggccggacgccatttcgtcgagcggatagccgtaggtattgaccaactcgaccatgcggtgaaaaccgccggcatggcggcagccggagaaagcggccggcttcgtatcggtatccatgccctgattccgcatagcttcctcgcaaagctgatcggccaataccgcaaggattaccccgatgttgaagtcgagatcgccgaaggcccggcccgtgaagcggtggtgcagcttcgcgccggcaggttggacgtggcgttcgtcgcgggcacgccccaaccacccgactgccattcccgtcgcacatggaccgaaccgctcttggcggtgctaccggaacggcatccgctcgccaagcggtcagccgtcacatggcccgatttggcaggcgagacgttccttgcgtataggaagttcaaacgcccttttcgggcagtctgctgggtaggcggcggtcgcgcaagccccgttttgggcacggatcggacgtctgtgagtgggatttcggcatcgcggggccacgcagcggcgttgtcagcagccatgcttcgctga

SEQ ID NO: 3920 - protein, 240 aa, Salmonella enterica
MMTLVHTLAVAEYLNFRHAANALGVAQSSVSARVKALEEDLGILLFERHARGVRLTEAGRHFVERIAVGIDQLDHAVKTAGMAAAGESGRLRIGIHALIPHSFLAKLIGQYRKDYPDVEVEIAEGPAREAVVQLRAGRLDVAFVAGTPQPPDCHSRRTWTEPLLAVLPERHPLAKRSAVTWPDLAGETFLAYRKFKRPFRAVCWVGGGRASPVLGTDRTSVSGISASRGHAAALSAAMLR

SEQ ID NO: 3921 - DNA, 210 bp, Salmonella enterica
atgaagcatttagatcgtgaaactgaaaagcgattaaacacagtcgttaaggcaatcggaacattgtttattctaagctttcttgctcacttggttatctcgtcgtggagagatgaccaatatggatttaccttactagcgttgattgcagggagcgcgttagtttcaatcaatctgggccgcagaaaaaaaggtaaggaggactactga

SEQ ID NO: 3922 - protein, 69 aa, Salmonella enterica
MKHLDRETEKRLNTVVKAIGTLFILSFLAHLVISSWRDDQYGFTLLALIAGSALVSINLGRRKKGKEDY

SEQ ID NO: 3923 - DNA, 522 bp, Citrobacter koseri
atgatttcacgctggaaatggatgctgaagcagacatttaaaaaactatggttcagggcaacgttattcgcaattgtcgcgataataacggcccttttatcaattctttttaaatcaatgattcctgagtcggtttccgtgaaggttggtgcggaagcagtcgataacattctgaacatactggcatcgagtatgctggcagtgaccacattttcgctgagtatcatggtcacagcctacggttcagccactactaatgtgattcccagagctacgcgtttagttgttgaagacgtcaccacacaaaatgtattggccaccttcatcggttcttttctcttcagtctggtagggattattgccctcaatatgggagcttatggagaaagggggagagtcattttattcattgtcacactggttgtcattgccttaatcctcatcacattgggggatgcggacgatttcctgaactgctttatcattccagcccgcattgttggcggtacatttcagggctga

SEQ ID NO: 3924 - protein, 173 aa, Citrobacter koseri
MISRWKWMLKQTFKKLWFRATLFAIVAIITALLSILFKSMIPESVSVKVGAEAVDNILNILASSMLAVTTFSLSIMVTAYGSATTNVIPRATRLVVEDVTTQNVLATFIGSFLFSLVGIIALNMGAYGERGRVILFIVTLVVIALILITLGDADDFLNCFIIPARIVGGTFQG

SEQ ID NO: 3925 - DNA, 264 bp, Enterobacter ludwigii
atgctcaatactcatcaggtcagttattacatgactcaacgtaaaaaaggtgtaaaccagcatatctcggccatgaaggctggtatctctgttcgttccggccgcaggatcgaaaaagatcagtgggcaaaaaatggtaatcgtcactggcggacgcgtaaagatccgcttgaggccgtctgggatagcgagcttgttcccctgttgaaggaaaggcccgctctgatgcccacaaccctgctggaaatgctgcaggtgcgataa

SEQ ID NO: 3926 - protein, 87 aa, Enterobacter ludwigii
MLNTHQVSYYMTQRKKGVNQHISAMKAGISVRSGRRIEKDQWAKNGNRHWRTRKDPLEAVWDSELVPLLKERPALMPTTLLEMLQVR

SEQ ID NO: 3927 - DNA, 1722 bp, Salmonella enterica
atgaatagctcgcttttacaaaacggtattttaagaagtgctttgaaagttggagttatttcatctatttttgctcaaatggcaagagttaatttagtatatgctggtgaagttagcggtgcctacattgatggaaatcgttatgggaaaggagaagtcggagagattttattaattgaaggacaacaatctatcgttttaggcagactgattgaggtcaaattacctgagcgcgaaagaggagagatatcagtagagtctcagggaaatagaaaagttgatgcaattggaactatacagcttcttggcacaattgatgcctcgagttttcgtgtcgactcggggataaaatgttaccctcgattaggtgatagagtatattctgcaccgttagatttcatttcattaatacccgaactaataaacagaagcttaagtgatgacggtgaaaaccgaataggtatagtgttaggaaatatatcaggaggttcaacaagcattgttactgttgagccagataaactatttggccgccactgcgcaatactaggagctacaggtggggggaaaagctggacaactgcaaaaatattagaagaatgtgcaaattataataattcaaagactataattctcgatgccacaagcgaatatagatcctttaactctgaggactgttatcattatcatttaggttcacctattaatcaagccaatgattctatagaatttagaatccccccaactgatttcatggaatcagattttatcgctatgtttgatccttcaggtaaagttcagggaccaaaactgaaggaagcgattaaaagtttaagattagttgcgatcgaccctactattgcaaccaatggtattctaaagaaaataaaacaacctaaaactgattatcgtcgctcaatgaatactggtaataattcaaaactagttgataatccctctcaaccatttgatatcactaaattaattcctcagatagttcaggagtgctgttttgataatggcgaagactcatggggtaatgcagccacgcaagatttgagctattgttcctctcttttaaccaggatacaagccgtaacatatgcaagctcactgaaagcggtttttcatggagatgaaaacgtcgcaaaactgggagatatattagaagactttttaagttcaaataaaagagttcttcgtttatgtctaagcgatgttagctatgaattttttgcaagagaaatattagccaatgtaattggtagaaaactattaactctcgctaggcttgaaaaattcagagaaaagccacttctagtcatcgttgacgaggctcataacttcttggggaaaagggttggatcagaagaccattctattaagcttgatgccttcgagatgattgcaaaggaaggaagaaaatatggcctaaatatttgcctaacaactcaaaggcctagagatataaccgagggtgtattaagccaaattggtacgttactagtacatagattaacaaacgatagagatcgagatgtagtggaaagagcatgtggtgaaatagataaatcagcggcttcatttttaccaagcttaaagcaaggtgaagttgcgcttgtaggagtagatttccccatccctatgacaattcaaatagcacagccgacttatccaccagagtccgattctccaggttaccgtaacgtttggaaaaaataa

SEQ ID NO: 3928 - protein, 573 aa, Salmonella enterica
MNSSLLQNGILRSALKVGVISSIFAQMARVNLVYAGEVSGAYIDGNRYGKGEVGEILLIEGQQSIVLGRLIEVKLPERERGEISVESQGNRKVDAIGTIQLLGTIDASSFRVDSGIKCYPRLGDRVYSAPLDFISLIPELINRSLSDDGENRIGIVLGNISGGSTSIVTVEPDKLFGRHCAILGATGGGKSWTTAKILEECANYNNSKTIILDATSEYRSFNSEDCYHYHLGSPINQANDSIEFRIPPTDFMESDFIAMFDPSGKVQGPKLKEAIKSLRLVAIDPTIATNGILKKIKQPKTDYRRSMNTGNNSKLVDNPSQPFDITKLIPQIVQECCFDNGEDSWGNAATQDLSYCSSLLTRIQAVTYASSLKAVFHGDENVAKLGDILEDFLSSNKRVLRLCLSDVSYEFFAREILANVIGRKLLTLARLEKFREKPLLVIVDEAHNFLGKRVGSEDHSIKLDAFEMIAKEGRKYGLNICLTTQRPRDITEGVLSQIGTLLVHRLTNDRDRDVVERACGEIDKSAASFLPSLKQGEVALVGVDFPIPMTIQIAQPTYPPESDSPGYRNVWKK

SEQ ID NO: 3929 - DNA, 1287 bp, Salmonella enterica
atgcctactacaccggatgggtatgtttcatatttaaaaccaagcagcaataaatggaaagcactaaacgacgactcatatctttattggcgagaccttcaggccaataaagttatacaggatgcaggagctcctgttcctcctgcgctaccattatctgaagtggaaaaaaaagacttaaaagaaaaccaagcatatataaatgaatttttgctaaaatcattacaattccctaacttatcatttttcgcaggcagcggtacttctctaggtgatgttggtgggccaagtatgtgggatctatggaagtgtgctatgtggatagatccaacaacagacgaagagggcaaactaaaaccaattgcattaagtgtatgtgaaaaagttaaatatcaagacattgaatatcctaacattgagcatttcctttcaaattgcgaagcttttctggcattccaccatgacggtgaagtgcttgcatttttaaatgaagttaaaacaataatattaaataagtgtagagatttcctagaaaatggaagtagcgatctatcctcatatgtaagtcttctccaaaaaatggggaggcggagagtaagagatccaaggttaaaagtattcacaactaattatgatttaacatttgagactgccgcatcagaattaggtatgatggttgtagatggactttcctatacaggcgttagaaggttcgatggtaaatattttaattatgatgtagttcatagagatgaaaatgaacatgaattcatagatggagtattcaatttattcaaattacatggttctgttagctggatacgaaaaaacggacaaatatatgaaaatcaaaaaccaacagcaacaaatgcctgtttgatctatccagcgaaaggtaaatatcaacaagcttttattcaacctcatcttgaattactttccaggcttcttgatttcctcagaaaaaagaatagctgtcttattatttctggctttggatttaatgatgaccatctttcagaacctatttattctgcgataaaatccaatcctagcatgagattaattgtggtggattttaaatgcgccacacatataaacaacaagggtgagaatgggtctagtaaatattggggtttacttaaagaactttcattatcgggctatgatattcattttttgaatgcctctttcaaagatttcgttaatttaatacccaacttaagagcactgacacctgcagaacagttagcaaaagctatcaagcaagtgggaggaaacaactaa

SEQ ID NO: 3930 - protein, 428 aa, Salmonella enterica
MPTTPDGYVSYLKPSSNKWKALNDDSYLYWRDLQANKVIQDAGAPVPPALPLSEVEKKDLKENQAYINEFLLKSLQFPNLSFFAGSGTSLGDVGGPSMWDLWKCAMWIDPTTDEEGKLKPIALSVCEKVKYQDIEYPNIEHFLSNCEAFLAFHHDGEVLAFLNEVKTIILNKCRDFLENGSSDLSSYVSLLQKMGRRRVRDPRLKVFTTNYDLTFETAASELGMMVVDGLSYTGVRRFDGKYFNYDVVHRDENEHEFIDGVFNLFKLHGSVSWIRKNGQIYENQKPTATNACLIYPAKGKYQQAFIQPHLELLSRLLDFLRKKNSCLIISGFGFNDDHLSEPIYSAIKSNPSMRLIVVDFKCATHINNKGENGSSKYWGLLKELSLSGYDIHFLNASFKDFVNLIPNLRALTPAEQLAKAIKQVGGNN

SEQ ID NO: 3931 - DNA, 276 bp, Salmonella enterica
atggctcggatttttttacgctatcccacggaatgtgtgaacgacgcggggcgaatggttatccgctatgcgccgcatgagatagccggatttaggtttgatgatggtcagtgggtaagcgccactgatatagcacgacttggtaattatgagattcgctgcaacaaatgcaagtctaacgactggacagaaaacggtcgattcatcaacgaatatgaatgcggctgctgcggtgcattcattgctgtggagcctaaaaacgaatggcaaaattaa

SEQ ID NO: 3932 - protein, 91 aa, Salmonella enterica
MARIFLRYPTECVNDAGRMVIRYAPHEIAGFRFDDGQWVSATDIARLGNYEIRCNKCKSNDWTENGRFINEYECGCCGAFIAVEPKNEWQN

SEQ ID NO: 3933 - DNA, 264 bp, Salmonella enterica
atggcaaaattaacgaagaaagaacaagcctggattgatgaggttaacgcggtgctggcccgttgcccgtcaccgaaaaaaatcggtttttacaccatcggcgattcgaatattcacctgtatgacctgcgcaaatacaacgaagttgaaaaggcgctggacactggcaaagcggcagactggtcccctgcgtgccgtgtagcaggtgcgcatattgaaggggctattgatttcccatctccagttgaaagcacggcaggctga

SEQ ID NO: 3934 - protein, 87 aa, Salmonella enterica
MAKLTKKEQAWIDEVNAVLARCPSPKKIGFYTIGDSNIHLYDLRKYNEVEKALDTGKAADWSPACRVAGAHIEGAIDFPSPVESTAG

SEQ ID NO: 3935 - DNA, 231 bp, Salmonella enterica
atgttgacgcgttttggcgatggcgttatggttatttcgctgcagcaaaatctgcagccgggcctcgcaatcccgaataaccagacgacgcacagcacgcgccagcgtgtttttttgtgtgtagcacctgtgcatatccagattatggtggctcaggcggggcagctttcgggctggccggtttcgtttggtaccggtattgcgaaccccgtctgggctaccacctcatag

SEQ ID NO: 3936 - protein, 76 aa, Salmonella enterica
MLTRFGDGVMVISLQQNLQPGLAIPNNQTTHSTRQRVFLCVAPVHIQIMVAQAGQLSGWPVSFGTGIANPVWATTS

SEQ ID NO: 3937 - DNA, 612 bp, Salmonella enterica
atgtatgccttagagccgttagaacgtgatgttattggtagctttgacaggtttgccgttcaattgagtgaagagaagccagaccaagatatttatgagttcgatttgactctgtggacactactgaagcttttatcagccaatgcgccatcccaggttagcaatcatttttctcttccagaagatcttgttaataaattggcgtcaactcctgacagttatctttcacaattagcgagtggagttcttctgagctttaaacttgaaacagatcaaatggaagtgatcgatactcttgccggtagctacgattctgtcatatgccttaaaaatgttgtggacgactttgacgcagcgtactggctattgcttaataagttagctagtagaaacttggacatggcgatgcaaatttttggtgtatcttctggtcttgcttcctcagtcgccgcctcctcaaacagccagttaaggtcgttatcgcatagggtcgttattagattttcattgagatttgatattggcgtactcgatcaattcttatcagcagctcttgccgatacaacgccgattttattaaaaaagattcagcaatctttggtgtggagataa

SEQ ID NO: 3938 - protein, 203 aa, Salmonella enterica
MYALEPLERDVIGSFDRFAVQLSEEKPDQDIYEFDLTLWTLLKLLSANAPSQVSNHFSLPEDLVNKLASTPDSYLSQLASGVLLSFKLETDQMEVIDTLAGSYDSVICLKNVVDDFDAAYWLLLNKLASRNLDMAMQIFGVSSGLASSVAASSNSQLRSLSHRVVIRFSLRFDIGVLDQFLSAALADTTPILLKKIQQSLVWR

SEQ ID NO: 3939 - DNA, 1578 bp, Salmonella enterica
atgcgccagaatttaccagtgacgggtcgaaacttagaactcccaaaagatgccaatattctttcgactacctcccctcaaagccatatcacgtacgttaatcctgacttcattaaaatcagtggtttcactgaggaagaactattaggccagcctcacaacatcgtaagacacccagatatgccgcctgctgcatttgagcatatgtggagtacattaaaatctggccgctcatggatggggctagtaaaaaatcgctgtaaaaatggcgaccactattgggtaagtgcttatgtaacgccaatagctaagaatggttcgattgttgaataccagtctgtaaggaccaagcctgaacctgagcaggttttggctgcggaaaaattatatgctcaattgagaagcgggaaggccgcgaggccgaaattggctgctagcttttccgtgaaaatactcttgctcatatggggtagtattatatcaagcgcaatggctgccggcatgcttactgatacatcaataagcagcttattgttagccactttaatgtcaggaagcttaagctctgttagtgttttggctattctctctcctcttggaagactggttgaaagagccaggaatatttccaataacccattaagtcaatccctctacactgggcgcaccgatgagtttggccaaatagagtttgctttacgaatgatgcaagctgaaacaggcgccatagtaggtcgcataggtgatgcatcaaatcggcttagcgaacacacccgaggcctactaaaggatattgagtcaagcaatgtacttacagttgagcagcaggcagagacagatcaaatagcaacggcagtaaaccaaatggtggcaagcattcaagaggttgcgagcaatgcacagcatgctgcagatgcggccggaagagcagacactgagacggcatctggccagcgtctggtagcccacacaagccagtcaatcactgcccttgaaggtgaaattaggcaagccactcaggttattcatgagcttgaaggtcaaagtaacgagatatcaaaagttcttgacgttatacgagggatcgccgagcaaacgaatttgttggcactcaacgcagcaattgaggccgcgcgtgctggtgagcaggggcgtggttttgctgttgtcgccgatgaggttcgcagtcttgctgctcgcacacagcaatcgacaacggatattcaaagcatgatcagcgctctacaagagcgagcgcaatccgctgttacagtcatggagcaaagtagtcggcaagcgcacacgagtgtagctcacgcagaggaagcagctacagctcttgatggaattggccaacgcgttaacgaaattaccgacatgaacgcgcaaatagcgactgcggtcgagcagcagggagcagtaagtgaagacataaaccgcagtattatcaatatacgcgatgctgctgataccaatgtacagaccgggcagaataatttgcaaagtgcgaaatctgtcgctcagttaactagcgctctgagcgaactggcaaaacagttttgggaaaaacgaggataa

SEQ ID NO: 3940 - protein, 525 aa, Salmonella enterica
MRQNLPVTGRNLELPKDANILSTTSPQSHITYVNPDFIKISGFTEEELLGQPHNIVRHPDMPPAAFEHMWSTLKSGRSWMGLVKNRCKNGDHYWVSAYVTPIAKNGSIVEYQSVRTKPEPEQVLAAEKLYAQLRSGKAARPKLAASFSVKILLLIWGSIISSAMAAGMLTDTSISSLLLATLMSGSLSSVSVLAILSPLGRLVERARNISNNPLSQSLYTGRTDEFGQIEFALRMMQAETGAIVGRIGDASNRLSEHTRGLLKDIESSNVLTVEQQAETDQIATAVNQMVASIQEVASNAQHAADAAGRADTETASGQRLVAHTSQSITALEGEIRQATQVIHELEGQSNEISKVLDVIRGIAEQTNLLALNAAIEAARAGEQGRGFAVVADEVRSLAARTQQSTTDIQSMISALQERAQSAVTVMEQSSRQAHTSVAHAEEAATALDGIGQRVNEITDMNAQIATAVEQQGAVSEDINRSIINIRDAADTNVQTGQNNLQSAKSVAQLTSALSELAKQFWEKRG

SEQ ID NO: 3941 - DNA, 633 bp, Salmonella enterica
atggcctggatagttggttttatttctcagaaaggtggtgtgggcaaaagcactaaagcgagagcgttagcgcgtgaagcatccgcctgtggtatcaaaacaaaattagctgatctcgacttggaacaggcaacgagtgctgagtggcatcgtagacgtctgtcagctggtttgtcaccggttgcttccgttgaagtgttttcaacagcaaagcaggcgatagaatctgccggcgattttgaccttctgattcttgatggccctgctcgtgcaagtaaaggtacttcagaaattgctaaggtcgccgaccttatcgtccagccaacgggagcctcccttgacgatcttgtcccggcaattaaagttttcaacgcgttggtaaaagaaggtataccacgttcaaaactggtcttcgctttaagccgggtaggtaccgaagcggaagagctggatgctcgtgcatatatcagtgaagcaggttatgaaactttatctggatgcctttttgagaagccagcatacagaaaagcgatgaattcaggactcgctgtgacagaaacacgttataaaggtttaaacgagagagctgatgaacttatccaggcactcatcgataagattggagaagagtaa

SEQ ID NO: 3942 - protein, 210 aa, Salmonella enterica
MAWIVGFISQKGGVGKSTKARALAREASACGIKTKLADLDLEQATSAEWHRRRLSAGLSPVASVEVFSTAKQAIESAGDFDLLILDGPARASKGTSEIAKVADLIVQPTGASLDDLVPAIKVFNALVKEGIPRSKLVFALSRVGTEAEELDARAYISEAGYETLSGCLFEKPAYRKAMNSGLAVTETRYKGLNERADELIQALIDKIGEE

SEQ ID NO: 3943 - DNA, 753 bp, Salmonella enterica
ttgaattatcaacttgaaaaaacaatcactgaagctgaggaaaggataattctcattagcccataccttaagcttagtaatcgcattaaagagctgatcgaagataaaaatagactaaaagttgacatcagaatagtttatgggaaatcagaactaaactctaaagaatatgaatggttaacaaacctgccttttgtacgccttagtttttgtaaaaacctccatgcaaaattatatgccaatgaaaatcaatgtattgtgtgcagtctaaacctttatgattttagtcagattaataaccatgaaattggagtgttaattattaaggagcaggagaaggatgcatacacttcatcgttaaatgaagctcagcgactgatcagaatcagcacagataacattcagccactaacaacagataaagaaacaacaggttcaaaagaaagtgaaaaaactaataaagagtcatccgacttcacttcagcctttcatgaagaaccattaagaaatcaaaatggattgattactgatttaaatacaaattcaaaactcacttcgacaaatctagcaaaaaatcataaaactgatttgttatctctatataaaaaattaatcgaagctggatatctcatggacgtagaaggaaaatacatattgactgatgctggcatagcggcaggggcagaagccaagccaaatcgatataaaaaaggagaaaactattttctgtggcctgataacctagcattatga

SEQ ID NO: 3944 - protein, 250 aa, Salmonella enterica
MNYQLEKTITEAEERIILISPYLKLSNRIKELIEDKNRLKVDIRIVYGKSELNSKEYEWLTNLPFVRLSFCKNLHAKLYANENQCIVCSLNLYDFSQINNHEIGVLIIKEQEKDAYTSSLNEAQRLIRISTDNIQPLTTDKETTGSKESEKTNKESSDFTSAFHEEPLRNQNGLITDLNTNSKLTSTNLAKNHKTDLLSLYKKLIEAGYLMDVEGKYILTDAGIAAGAEAKPNRYKKGENYFLWPDNLAL

SEQ ID NO: 3945 - DNA, 1047 bp, Salmonella enterica
atgataacgttttctatggatgaaagtggctatacgggttatgacttactccacaaagagcaaaaattccaaggcgcgtcatcaatattaataaaccatgatgacgccagtcgtctgataaaagaatatttccccaaacttcaagccgatgaattgaagtacagctcgctgaaaagaagagattccaaccgcaagccattatttgaattgcaaaagcatctcttatctaattacccatgtataacatgcgtaggtgataaacgctttttactaattcttatgttcatcgattatgctgttgaaccattctattatgattctgggattaatctttatgaagatggcggtaacttctcaatggcatcaatggtgtattacgttggaccagcgtattatggctctgcctttgatgatgttctgcttcagtttcaaaatgctatgaaagaaaaaacattagattcagtgagtttgctaataagcaaaataaggaggcttgattggcaaaggttaaaagagttttttggtcctttggcatttaaccacccagattgtattgatgccatcatgactgatggaattagcactgatgcctcatttactattttaaatgcattaatttctcgcacggaaatgatgtcctctggagagtatgcaattgagcatgatcgttctaaaaatctgctaacttacaatgaacgccttaactttttgatcaattgtgataaggaaggagagtttaaacattccgagatagcaactatctcattccctctaaaccttaaaaaagtctatcaaattgattcgaaagaaagcccaagcgtgcaattgtgtgatgttcttataggtgcatgtattgaatcagtttatcaattaatggactctaaggtgctcaatcaaaattccgttctttcactttaccaagatagccagttaatacatttcatacctgatatagattttgaaggacagaaaaaatttaggaaaggcagtcaaagtgaggagtatcttacgtttattcaaaatgaaatctactctagtaaactttaa

SEQ ID NO: 3946 - protein, 348 aa, Salmonella enterica
MITFSMDESGYTGYDLLHKEQKFQGASSILINHDDASRLIKEYFPKLQADELKYSSLKRRDSNRKPLFELQKHLLSNYPCITCVGDKRFLLILMFIDYAVEPFYYDSGINLYEDGGNFSMASMVYYVGPAYYGSAFDDVLLQFQNAMKEKTLDSVSLLISKIRRLDWQRLKEFFGPLAFNHPDCIDAIMTDGISTDASFTILNALISRTEMMSSGEYAIEHDRSKNLLTYNERLNFLINCDKEGEFKHSEIATISFPLNLKKVYQIDSKESPSVQLCDVLIGACIESVYQLMDSKVLNQNSVLSLYQDSQLIHFIPDIDFEGQKKFRKGSQSEEYLTFIQNEIYSSKL

SEQ ID NO: 3947 - DNA, 927 bp, Salmonella enterica
atggaacttcgccagttacgttattttgtccgtattgtggaaaccggcagtatgggcatcgcggcgcttgatctcgacatcggtgtctcagcgctcagtcaacagatgacaaggctggaaaatgaactcgccattcgtctgttgcaacgaacctcgcgtggtgtaacgccaactaactcgggtctggccttttactcacaggcacagctggcgttgcgtcatgctgatgatgccgttcttgctgcgcgcgatgcgcgtctgtccggacacgtcagcgtcggtatggcccccagtacagcctccgtcctgggtgtgccgtttattcatgccatgcgggcacattacgccgacgttcgcctgcatgtggtggaaagcctgtcaggtaatctggaacggatgatcaacacccgtcagattgatctggccgttgtttttcggaaagaaaagcacctgcgctggagcgccaggccagttctcgaagagcagctttttctgattggcacacatgatctgctgacggatattccggatgacagcataacccctgctcaactggcgaatattcccctgatcatgccaagctcaggccacggcttgcgcggcctactggaggctattagtcaggaacacgggctgaaggttgatatcgccacggaaattgacggcctggcgttactgatgcgcgccgttggcagcggactcggcgccacattacaacccggagcagccatttcgcatcttgagagtgaatcattaagagtgatcggcatccataatcccatactcagtcgccccaattttctggtcagcctatcggacgatgaactcccacccgccgctcttgcagcccgcgtgatacttacaaaagtcatgcgtaaacttgttgaaatcggccattggccgggcgcaaccatttacgctccctaa

SEQ ID NO: 3948 - protein, 308 aa, Salmonella enterica
MELRQLRYFVRIVETGSMGIAALDLDIGVSALSQQMTRLENELAIRLLQRTSRGVTPTNSGLAFYSQAQLALRHADDAVLAARDARLSGHVSVGMAPSTASVLGVPFIHAMRAHYADVRLHVVESLSGNLERMINTRQIDLAVVFRKEKHLRWSARPVLEEQLFLIGTHDLLTDIPDDSITPAQLANIPLIMPSSGHGLRGLLEAISQEHGLKVDIATEIDGLALLMRAVGSGLGATLQPGAAISHLESESLRVIGIHNPILSRPNFLVSLSDDELPPAALAARVILTKVMRKLVEIGHWPGATIYAP

SEQ ID NO: 3949 - DNA, 1140 bp, Salmonella enterica
atgaagcagcttgaaaaactgatcatcgaggccaaaattctcaccgagccagaagctgaagtcgagcgggtgatgcaggtgtgtaatgcctgtcgctattgcgaagggttttgcgccgtgttcccggcgatgactcagcgactggaatttggcaaagccgacattaactatctggcaaacctgtgccataactgcggcgcctgcctgcacgcctgccagtatgctccaccccatgagtttgcgatcaacgtgccgaaagcaatggcggaagtgcgtctggaaacgtatcaacactacgcgcaaccggcggccttcagggcgctgtatcgccaggctggcgtcacagtgacgctggcactggtctttagtctgatcctctttttactcctcgcgatggggatgaagggatcgctactccatccgccgctggccggtgatttctaccaaatcttcccgcacaacctgctggcatggatgtttggatcggttttcatgctggcgatcggtttactaatggcaggagtgatccgcttctggcgcgagatctctcccgtcgggccgcgtccggcggaaattgccgaagcgtcgcacaacgcgctgacgctgaaatacctcgacggcggtcatggcaaaggctgcaacgaggcggacgatgctttcacattgatgcgtcgtcgtttccaccatttcaccttctacggcttcatgctctgtttcgccgcgaccgtggtggcgacgggttaccactacttcgccggttgggaagccccctacccgttcttcagcgtgccggtcatgcttggcacgctcggaggaatcggtttaattgtcggcccggcaggcctgctgtggttaaaccttaagcgctcgccactgcatggcgacgcgcgacagaaaccgatggatcgcggttttattttactgctgctcctgaccagcctgaccggtataggtttgctggcgggaagagacacctcatggatggggatcctgcttgccatccatcttggcgtggttatggcgctttttttgaccattccatacggaaaatttgcccacggattttaccgctgcgcgtctttactcaaatgggcgattgagaagcgacgtggaaaacaggcgggggtcgcaggcgactaa

SEQ ID NO: 3950 - protein, 379 aa, Salmonella enterica
MKQLEKLIIEAKILTEPEAEVERVMQVCNACRYCEGFCAVFPAMTQRLEFGKADINYLANLCHNCGACLHACQYAPPHEFAINVPKAMAEVRLETYQHYAQPAAFRALYRQAGVTVTLALVFSLILFLLLAMGMKGSLLHPPLAGDFYQIFPHNLLAWMFGSVFMLAIGLLMAGVIRFWREISPVGPRPAEIAEASHNALTLKYLDGGHGKGCNEADDAFTLMRRRFHHFTFYGFMLCFAATVVATGYHYFAGWEAPYPFFSVPVMLGTLGGIGLIVGPAGLLWLNLKRSPLHGDARQKPMDRGFILLLLLTSLTGIGLLAGRDTSWMGILLAIHLGVVMALFLTIPYGKFAHGFYRCASLLKWAIEKRRGKQAGVAGD

SEQ ID NO: 3951 - DNA, 252 bp, Salmonella enterica
atgaaaattaaaaacattgtattggcaggaataatgtcattggtattttctgttcatgccagcgataagcagaatataaaaagggacccaatgccttatttagggtacgacgcagttacttcaaacatgtgcatagatgctggtggtttaactgatccagtggagatgagaaagaaagctactgaaacattactaatgattcttcacaaacagccaggtgataaactatctaaacaatcagaagctaggtga

SEQ ID NO: 3952 - protein, 83 aa, Salmonella enterica
MKIKNIVLAGIMSLVFSVHASDKQNIKRDPMPYLGYDAVTSNMCIDAGGLTDPVEMRKKATETLLMILHKQPGDKLSKQSEAR

SEQ ID NO: 3953 - DNA, 924 bp, Salmonella enterica
atgacaagacagcatcctttattgaaaattgcgcttaatagcgatggacatctttcgtggccaattttaccaggagagactcaccgctgcccaacgtgtctgcgacacgttactacgggcccggatggggatttggtgcattcgatggaggagggcggcaacgtctgcataccttcagcttctgttgttatttcaaaggcaattattgaaatgctcagcgcaggcgaacgtctctatgttaatccaatcaagaatgggaataaaaccctagcaccgtcatttatctttctgcatacagaccagcaactccgcccatttatcaattcggattatcagccagccggtgccagctggagaagtgataaaggtttcaggcttggccttttctttatgaatgagcgagcctctaaaattaataaagaccagtttgattttattgcagtaatagacccattgacctttcagtcagaatttgatgcgacatggtcccgtggtgaatttgatgaccctctaaaggcattacggtattcaattgtttctgaaaacttgtcttccgtctgggtgaaatggcccgtaaaaaacctgcaaccgaggaaagaaacggtgatggccgattactggtatgactattattcacctcattccccagctcagcaggctgcttgcacagcaacggtgactggaatagatgggaatgtatccggcgaaactatttacatgctccagatcgctttagagcggtcgacagttgagtaccagcttgtaaaatcgctaggggtcatattgctactggataatacaggaaatttggtatcggaggcgcagccgcactttgatataatcatcaaggcatgcatatcgggcgtcagagactttgttcttcagaatcctcggacgctgggttttgaaaagaaggttgcatag

SEQ ID NO: 3954 - protein, 307 aa, Salmonella enterica
MTRQHPLLKIALNSDGHLSWPILPGETHRCPTCLRHVTTGPDGDLVHSMEEGGNVCIPSASVVISKAIIEMLSAGERLYVNPIKNGNKTLAPSFIFLHTDQQLRPFINSDYQPAGASWRSDKGFRLGLFFMNERASKINKDQFDFIAVIDPLTFQSEFDATWSRGEFDDPLKALRYSIVSENLSSVWVKWPVKNLQPRKETVMADYWYDYYSPHSPAQQAACTATVTGIDGNVSGETIYMLQIALERSTVEYQLVKSLGVILLLDNTGNLVSEAQPHFDIIIKACISGVRDFVLQNPRTLGFEKKVA

SEQ ID NO: 3955 - DNA, 306 bp, Salmonella enterica
atgactgacaaagacctctacggcggtttgatccgcctgcacatccttcaccatgcagccgaggaacctgtctttgggctggggatcatcgaagagctacgccgacacggctacgagatgagcgctggcaccgtgtacccgatgctgcacggcctggaaaaaaaaggctatctgacctcacgccacgaacgcaccgggcgacgtgaacggcgtgtttatgacatcactgaacaaggcagaactgcacttgctgatgcgaaaacaaaggtcaaggagctgttcggagagttggtagaaggtggttga

SEQ ID NO: 3956 - protein, 101 aa, Salmonella enterica
MTDKDLYGGLIRLHILHHAAEEPVFGLGIIEELRRHGYEMSAGTVYPMLHGLEKKGYLTSRHERTGRRERRVYDITEQGRTALADAKTKVKELFGELVEGG

SEQ ID NO: 3957 - DNA, 513 bp, Salmonella enterica
atgaccatctttaaggagaatattgtggacacaagtctgattggaccgatccttacggcgctgcttgccgctgcggggttctactgtaagttttggtttacgcgttatcaggcctcccgtgatcaggcccagaaagtcagccgggcgatcgaggatgtcctgagcaaaatggccgcgctgttcggacagaagaaacctgcccggatactgagagaggaattttccgctgttattgcgccgcttcatcaggaaatgcgtatccttgacgatatgacgtcccgtctgccgctgaaatggctgcagcgcgaacagcgccacgttctttatcatgcccgatggctgcagcggtatctggattcgcgcaggggcggcagtgacggggactttttcctgctattgcacgatgtggcgatggggaccgattatcaggttgctgacattctggcatcgcagcatgactgtaagcagcgtcgtggatcacagctgccggttaacctgaaaacctgcccctaa

SEQ ID NO: 3958 - protein, 170 aa, Salmonella enterica
MTIFKENIVDTSLIGPILTALLAAAGFYCKFWFTRYQASRDQAQKVSRAIEDVLSKMAALFGQKKPARILREEFSAVIAPLHQEMRILDDMTSRLPLKWLQREQRHVLYHARWLQRYLDSRRGGSDGDFFLLLHDVAMGTDYQVADILASQHDCKQRRGSQLPVNLKTCP

SEQ ID NO: 3959 - DNA, 1134 bp, Salmonella enterica
atgcacttttatgtggatgaaacaggccagactggccgaaacctttttgacaaaacccagccagtcctctcctacggagtgctgtcgtctgatgctaatctggataaggttgctgaagcggatctagccgtaatacgcaaaacgcttggcgtgcagcgcctgcacgctgcggaactgggcttgcaccgcctttctgaccttgtagatacgctgctggttctgcagaaaaagcaccggatacggtttgacatctggcaggtagtaaagcgcgatcatgccattatttcgttcttcgaccaggtatttgatcagggaatgaatccagccgtaccctggtctgcatactggacccctctgcgctaccccctgctgctgaatctggccagcctgtttgatgatgaacttgcttcaaacgcatggacggcaaggctggaggcgcatgatgagcgtgcgtcggaacttttttgtaccgtcagtgatgaactgatcagcaggacggcagccagcgcgctggaccaccggtcgaagcagctgatcaccgatgccctgaactgggcgtcagccaattttgaacagttgggctataactgtaaaaccaacaaggaaaggctgcggattatgcccaatatgattggctttcagtccgtattgcacgggatctgttcccgactgggggcaccagaaagaaaggccagtatcattgttgaccagcagtcacagttcaacaccacccagcgtgaacttaacgagttttactaccagatacgggatatgccctgggaactggggcccggattacctgttatgaacatgaaaaatatgccggctgaaccacttgtattccagtccggtaccaagagtgcaggtctggagttggtagatatttatctctggacattcaagcgattcatggaagacaaggcgctgacaaagccactttcccgccttgtttataccaatctgaaaacagccaggaccaacagcgtgtcaatccagtcggttgccagtcgatttaaggaactcctgggtaaactcccggtaccaagcgcagagatcatgaggcaggcgcaggagctgcgggactttgatgaagccagacgcatgccatatgtggtgtcgggatcacccgactga

SEQ ID NO: 3960 - protein, 377 aa, Salmonella enterica
MHFYVDETGQTGRNLFDKTQPVLSYGVLSSDANLDKVAEADLAVIRKTLGVQRLHAAELGLHRLSDLVDTLLVLQKKHRIRFDIWQVVKRDHAIISFFDQVFDQGMNPAVPWSAYWTPLRYPLLLNLASLFDDELASNAWTARLEAHDERASELFCTVSDELISRTAASALDHRSKQLITDALNWASANFEQLGYNCKTNKERLRIMPNMIGFQSVLHGICSRLGAPERKASIIVDQQSQFNTTQRELNEFYYQIRDMPWELGPGLPVMNMKNMPAEPLVFQSGTKSAGLELVDIYLWTFKRFMEDKALTKPLSRLVYTNLKTARTNSVSIQSVASRFKELLGKLPVPSAEIMRQAQELRDFDEARRMPYVVSGSPD

SEQ ID NO: 3961 - DNA, 774 bp, Salmonella enterica
atgttgattctcgattgctcctcacgaactcaggcgttgcatacattatctgccgggtttggctgttcccctgaaaagctgaaaaaagtgctgctttcgctcgatcttgaaagtatctacgagcttaatcctcgccagttggttgatgcacctcagtatctgagagaatacgtctgtgcggaactgggcgaaccgggaccattcacccgggctctgtggtttcatggcacccggactttcgccggtaatacttttccggcggggttactggcgctaaatcagtcagaatccctcgccatgaaaatgctgcttgacctggccccgaatgagatggtccgtacacacctgaaggaatgggatgttccggggggcgttccggatgagatgtttcagctcagaaccggcgataaaatccactgggggccttttggccatttagtccgggaattacattttaacgccagtgaaaatggactgcatgattacctctggctgccggagctggtagaggatgtctgtaaggcctaccagaagaaatacggccacgatcttaaaccgcattatctgagcgtgcttcatccctgtattgtctggttcgaggcggatattgtttatgaaaaaggagttcttgaaacggctctgtcatatgcctatacatcagtccgtgacctcccgccggacggaaacgcaactttcggcatagactgtgacgggaaatctgtgtctaggtcggccattgccagaatcgagtttctgcagcccgggcagatgtaa

SEQ ID NO: 3962 - protein, 257 aa, Salmonella enterica
MLILDCSSRTQALHTLSAGFGCSPEKLKKVLLSLDLESIYELNPRQLVDAPQYLREYVCAELGEPGPFTRALWFHGTRTFAGNTFPAGLLALNQSESLAMKMLLDLAPNEMVRTHLKEWDVPGGVPDEMFQLRTGDKIHWGPFGHLVRELHFNASENGLHDYLWLPELVEDVCKAYQKKYGHDLKPHYLSVLHPCIVWFEADIVYEKGVLETALSYAYTSVRDLPPDGNATFGIDCDGKSVSRSAIARIEFLQPGQM

SEQ ID NO: 3963 - DNA, 501 bp, Salmonella enterica
atgggaaattattcagattttgagaccgattttgttcagcgaacactggcgcttatcgatcaatataacgaaatgattgaggtgctgggcaaaccattcagggagcagtacaactacacgttgaccctgaattgcctcctgggtcttatcgtgttaccgaaagagagagcgctctctttcctgcttgccgaccgtttaacgcggcaacttaaagctgaaatgggattacatgagtcacagctgcccggaccggaaatgaacctgcgggagttgatccataagatgcggaattcagttgctcatttctgcgtccaggtagagtcagccagcgatgcacaccttgtagactggattgttttcagggaatctcagaaagatggagaagtctacgccagcttcagcgctccggagcttttaccctttctgaaatattatgcgaccctgctgctcgacaatatggcccgccgtcgagcccccgatgttaacatattggatttgtaa

SEQ ID NO: 3964 - protein, 166 aa, Salmonella enterica
MGNYSDFETDFVQRTLALIDQYNEMIEVLGKPFREQYNYTLTLNCLLGLIVLPKERALSFLLADRLTRQLKAEMGLHESQLPGPEMNLRELIHKMRNSVAHFCVQVESASDAHLVDWIVFRESQKDGEVYASFSAPELLPFLKYYATLLLDNMARRRAPDVNILDL

SEQ ID NO: 3965 - DNA, 249 bp, Citrobacter freundii
atgcaatgtcttaaaaatgacggtgggtcacacaagttcatcagacaggtgctcatgacgttcgggcatcaggattatgccgctttcctcacagagaggaattatcgtagcattccccgtagtgatgccatgtggcaactggctgtccagctgggaaatagtggatttatcaggccgccgaaacttactcacgctgatacacgtattcgtatagagcccttttttaacgctgaaaatgaatacgactga

SEQ ID NO: 3966 - protein, 82 aa, Citrobacter freundii
MQCLKNDGGSHKFIRQVLMTFGHQDYAAFLTERNYRSIPRSDAMWQLAVQLGNSGFIRPPKLTHADTRIRIEPFFNAENEYD

SEQ ID NO: 3967 - DNA, 159 bp, Salmonella enterica
atggagacgttgagcaccaatctgcaactcgcccggctggttggcgttcaggggacgccggcaaccatcattggcgacgagatgatccccggcgcggtatcgtgggagacccttgaggcggtggtgaaagaaaaactggcggtggcccatgctcagtaa

SEQ ID NO: 3968 - protein, 52 aa, Salmonella enterica
METLSTNLQLARLVGVQGTPATIIGDEMIPGAVSWETLEAVVKEKLAVAHAQ

SEQ ID NO: 3969 - DNA, 507 bp, Salmonella enterica
atgctcagtaaactgcgccgctggctgcgtgaaggcgcgatcttactggttgtgctggctggcgtgataatcctgctggatgtctggcgttctccgcagatgccggccatgtttgacagcacgccgctgcatacgctggacggggaaaccgtaacgctggcgtcgatcagtgaagaacgcccggtgctgctctacttctgggcgagctggtgcggtatctgccgtttcaccacgccggatgtcgcccgtttgcagtcggaaggggagagcgtcatgaccatcgcgctgcgttccggtaatgacggggaggtttcccgctggttatcgcgtaaaagggtgacgttccccgtcgtgaatgatagcggcggtgagatatcacgaaactgggaaatcagcgtcacgccaacgctggtggtggtgtcgaaggggcaggtggtaactacgaccagcggctggaccagctactggggcatgaagttacgtctgtggcgggcagccatgttttga

SEQ ID NO: 3970 - protein, 168 aa, Salmonella enterica
MLSKLRRWLREGAILLVVLAGVIILLDVWRSPQMPAMFDSTPLHTLDGETVTLASISEERPVLLYFWASWCGICRFTTPDVARLQSEGESVMTIALRSGNDGEVSRWLSRKRVTFPVVNDSGGEISRNWEISVTPTLVVVSKGQVVTTTSGWTSYWGMKLRLWRAAMF

SEQ ID NO: 3971 - DNA, 762 bp, Salmonella enterica
atgcgcaagggtaaaattattgttgcatcaatgatggtgctttgtgtccttatttttgttgcggcggcggcatggtttatgctgttccagggagaaatgacggagccgacagaggaggaaaaacaggcggcaattttacacgctgcgggcctgatgaaatcagagacccaggataaaaaatcagtcgaaacgctctatcatcgttatattattcaacgccatgttaatttagattccggcgaactggtggctggcagcagcgcggacaccgcgcggcagaagtgtgaaaaacttgcccctgaacgcgacccagcgcaggttcgtcagcgctgtacggtggcggatgtgttctttgtgaaagataaaaataatgaaattcagcaggttatcattccagttaccggtaagggtgcgaaatccatgatgcatgcgtttcttgctctggggctggacggtcgtacggtgagaaatctgtattattatcagcaacgggaaacgccgtttctgggggctagggtggaagacgccaactggcgcaaacagtggccagggaaacgattattagataacagcggacatcctgcattgaaaatagtacaggataaacctgaacatgccgatgaatataccgttgacggtatttccggtgcgacgttgacatcaaccggcgttgagaaaagtattaactactggatggggccgcagggatatggtcaattcttacagcgtcttgccagcgatcgaaataaccttaatctttga

SEQ ID NO: 3972 - protein, 253 aa, Salmonella enterica
MRKGKIIVASMMVLCVLIFVAAAAWFMLFQGEMTEPTEEEKQAAILHAAGLMKSETQDKKSVETLYHRYIIQRHVNLDSGELVAGSSADTARQKCEKLAPERDPAQVRQRCTVADVFFVKDKNNEIQQVIIPVTGKGAKSMMHAFLALGLDGRTVRNLYYYQQRETPFLGARVEDANWRKQWPGKRLLDNSGHPALKIVQDKPEHADEYTVDGISGATLTSTGVEKSINYWMGPQGYGQFLQRLASDRNNLNL

SEQ ID NO: 3973 - DNA, 528 bp, Salmonella enterica
atgaccatgaagaaaaccctgattgccagcgcagtgatggccagcattttcattgcgccagccgcgtttgcttttaaagagtacccggcaggcgagcctgtcaccatgaatgaaatggagctggcggccgtttacctgcaaccgattgatatggaaccgcgcggcatgggcttaccggcagcaaaagccgatgttcaccttgaagcggatatccacgctgtagaaggcaataaaaacggctttggcgcaggggaatggatcccgtacctgaccatcagctacaccctggtcaacaacgacacgggcgaaaaacaggaaggcaccttcatgccgatggttgccagcgatggcccgcactatggcgcgaacatcaaaatgatgggcgtgggcaactataaagtgacctaccacattgaaccgccgtcaaaagccgggatgcatcgccatactgacagcgaaacaggcgtaggccgctggtggaaaccgtttgatgtgagctacgagtttaaatatgtcggtctgaactaa

SEQ ID NO: 3974 - protein, 175 aa, Salmonella enterica
MTMKKTLIASAVMASIFIAPAAFAFKEYPAGEPVTMNEMELAAVYLQPIDMEPRGMGLPAAKADVHLEADIHAVEGNKNGFGAGEWIPYLTISYTLVNNDTGEKQEGTFMPMVASDGPHYGANIKMMGVGNYKVTYHIEPPSKAGMHRHTDSETGVGRWWKPFDVSYEFKYVGLN

SEQ ID NO: 3975 - DNA, 1380 bp, Salmonella enterica
atgagttactttttcgtcacgacgctacaggtctttttctgcattgcgcttctttccggtgttctctggagtcgaaacgatcctccctctttacgtccgctgacctggacgctgctgaccgggctgattgccggcgtgctggcgggactgtttattcacggcagccaaccggtacaactgctgctggttggggcggaggtcatggtatcgctgctgtttgtcctcagtttctggtgggcttcaacgcgtatccgctatctgtggcaggggattctgattttcggcgctgcccgccattgggcgctggaccctaatctgggcgggctgaccagtacgcatgtgctgaatactgacctgctgttaaacctgacggccgtcgttctcgcttttgcgatcctctgtctggcgggcgtactctgcgcgatgctgctgcggcgtattcgcggcctgtactggccgttaacgctgattctgctggtgatgatctggctgccgctgagcggcaacctgctgttgttgctgatgaaattacaggttgttccgctgggaaaatcactgctgagcttcgtggcgaaagtcacaaataacacggcgctgtataactgggcgggagccgcgctgctgctggccctggcgctgtgctggcttccggcgctgttgcgggcttttcgacagacgcgggaaaccgaagaaccgattgctcaccgtctggcgctggcgcagcgtcgcaacgctttgcggctgtggttggtcacaatcggctgcgcggtggtcgttatcgcaggccaactgtggtgggataaagtggcctcgcagccgccgcaactctctgaagccgtgcccgtaacgctggggagcgatggcatggtgcgcctgccggttgaacagcttcgtgacggtaaactgcatcgtttcgtctgggtggcggacgatggcaaagcggtgcgcttcttcgtgattaaccgctatcccgacaagctgcgttttggcgtggtgttcgacgcctgcctgctgtgcggcgatcagggttatgtcatggagggcaatcaggttatctgcgtcgcctgcggagtgcatatttttattccgtctatcggcaaggccggtggctgtaacccggtgccgattgaaaactggcacaatgatgaaaaagagctggtgatccccggtaaagaactggcgacaggggtgaactacttctcgacggtcatgactattaaagtgaccgatccggtcgatggttcaacgttgaccaatacctcagccgattacaaatacagctatggcggcaagacctggttcttctcgtcagaggctaactatgaacgcttccgtgaaacgccggagcagtttgttcctgccgacatgagggaggaataa

SEQ ID NO: 3976 - protein, 459 aa, Salmonella enterica
MSYFFVTTLQVFFCIALLSGVLWSRNDPPSLRPLTWTLLTGLIAGVLAGLFIHGSQPVQLLLVGAEVMVSLLFVLSFWWASTRIRYLWQGILIFGAARHWALDPNLGGLTSTHVLNTDLLLNLTAVVLAFAILCLAGVLCAMLLRRIRGLYWPLTLILLVMIWLPLSGNLLLLLMKLQVVPLGKSLLSFVAKVTNNTALYNWAGAALLLALALCWLPALLRAFRQTRETEEPIAHRLALAQRRNALRLWLVTIGCAVVVIAGQLWWDKVASQPPQLSEAVPVTLGSDGMVRLPVEQLRDGKLHRFVWVADDGKAVRFFVINRYPDKLRFGVVFDACLLCGDQGYVMEGNQVICVACGVHIFIPSIGKAGGCNPVPIENWHNDEKELVIPGKELATGVNYFSTVMTIKVTDPVDGSTLTNTSADYKYSYGGKTWFFSSEANYERFRETPEQFVPADMREE

SEQ ID NO: 3977 - DNA, 1284 bp, Salmonella enterica
atgctgtggcggatgttacgacaatcctgggggcgcaatttacgccgcaaagtgctggcgataatcaccgtttttctggcctccagcctgatctcggcgctgctggcggtgtccattgatatcggcgacaaaatgtccagagagctgaagtcttatggtgcgaacattttgattgaacccgccggacaggctgcgctgcccgcgctgtttagtgagagcagtaatccgctttccggtcaggattttcttgatgaagccgagctgccgaacatcaaagatatcttctggcgaaacaacattgtcgggtttgcgccgatgctcggcggcgaagccagcgtggagggagaaccagtgcggattctgggcactttcttcagtcagccagtggatattcctgatgaagagggatatgagacggggcagaaaacggtcagcccatactggcaggtgaccggcgactggccgcaggaacccgcaggcgcagagccgcagaccttagtcgggcacgcgctggcgcggcaaatgggctggaaacccggtgataagctgacattacgtaccgaaggcgaagcagtgcaggtcaccgtcagcggtatcctctccagcggcggcgatgaagataaccaactggtgatgccgctaagcacggtacagcacctgctggggctccccggaaaagtgcaggcgattcgcgtctcggcgctgacggtgccggaaaacgaactgtcccgccgcgcgcgggaaaacctggacgcgctcaatgccgaagagtacgacctctggtattgcacggcctatgtgtcgtcgatcgcgcatcagctggaagaggcgatttccggtgcggaagtgcgcccggtatggcaggtcgcggcgtccgaaggggtggtgatcgataaaattcagttgctgatggcggtcgttaccgtcgcggcgctggtggcttccgcaatggggatcgcctcgctgatgaccagcaccattatggaacgcgccaaagagatcggtttgatgaaagcgctgggtgcgcgacagtggcaaattatgctgctgttctacctggaagcggcgtccagcgggctggctggcggtgcgctgggatgtattgccgggtgggggctggcgaaagcgattggcgtcatgctcttcgacgcgccgcttaattttgcctggattgtggtgccgtgcgtactggtgattgcggtactgattgcgttgatcggcacctggttcccggcccggcggattgcccggctgtatcctgtggaggtgctgtatggccgctaa

SEQ ID NO: 3978 - protein, 427 aa, Salmonella enterica
MLWRMLRQSWGRNLRRKVLAIITVFLASSLISALLAVSIDIGDKMSRELKSYGANILIEPAGQAALPALFSESSNPLSGQDFLDEAELPNIKDIFWRNNIVGFAPMLGGEASVEGEPVRILGTFFSQPVDIPDEEGYETGQKTVSPYWQVTGDWPQEPAGAEPQTLVGHALARQMGWKPGDKLTLRTEGEAVQVTVSGILSSGGDEDNQLVMPLSTVQHLLGLPGKVQAIRVSALTVPENELSRRARENLDALNAEEYDLWYCTAYVSSIAHQLEEAISGAEVRPVWQVAASEGVVIDKIQLLMAVVTVAALVASAMGIASLMTSTIMERAKEIGLMKALGARQWQIMLLFYLEAASSGLAGGALGCIAGWGLAKAIGVMLFDAPLNFAWIVVPCVLVIAVLIALIGTWFPARRIARLYPVEVLYGR

SEQ ID NO: 3979 - DNA, 1131 bp, Salmonella enterica
atggccgctaaacgtaccatgctctggctgctggtgtggcgggcgctgcgtctgcgttttcagcgggtcagcgtggtgtttgccgcgctgatggtgggggcgaccatcgtgacggcgctttctgccgtctggttcgacattaacaccaaaatgagcgaagaactgcgcaccttcggcgcgaatttttacatcgggccggggcacggttccagtatgccgcagcaggagttgcagagcattctcgatcaggcgccgcaggggctggtgcatggcgccagtccgtggttgtacggcatggcgcgtaccgagctggaaaaagtggtgatggttggcgtgtggttcgagtcgctgcaaaaaatggtgccgtactggcaggtcaccggtagctggattggcgtcagttttgacgaccgtaatgcgatgatcggcgtcaaactggcggaacgcctcaacgtgcagccgggcgacagcatcacgctggtggatcacaatcagcgtaagaatttgcagattaaaggcattgtggagtctggcgatgcgacggacaacatgctgatcgtcagcctcgacgtggcgcaggcctggctgcatcagccgggcaaaatcagccacggcttgctgagcgtcagtaacgatgtcggccaggtggagaactatgccagccggttgcaggcgcagtatcctgacctggagattcgtccggtgcgtaaggtctctgcttccgaagggcaggtgctggataaaattaaaggtctgatgggactggtctcgatcgtgattctggcgctctcttcgctgtgcgtgaataccacgctgatggcgattgtcggcgagcgggcgcgcgagtttgcgctgcaaaaagcgcttggttccagcaacggcgatatcgtgcggcaaattctgctggaaaccagcatcatcgcgctggcggcggtggcgtgcggctgggtgctgggatatttgctggcgcaactgttgggattaacggtgtttaatgccgccatatcactgcgtctgccggtgttgcccattactctggtgttgtctttactggtcgccattctggcggcgattgttccggtgcgacgcgcggtaagcgtcgagcctgctaaagtgctgaaaggagagtag

SEQ ID NO: 3980 - protein, 376 aa, Salmonella enterica
MAAKRTMLWLLVWRALRLRFQRVSVVFAALMVGATIVTALSAVWFDINTKMSEELRTFGANFYIGPGHGSSMPQQELQSILDQAPQGLVHGASPWLYGMARTELEKVVMVGVWFESLQKMVPYWQVTGSWIGVSFDDRNAMIGVKLAERLNVQPGDSITLVDHNQRKNLQIKGIVESGDATDNMLIVSLDVAQAWLHQPGKISHGLLSVSNDVGQVENYASRLQAQYPDLEIRPVRKVSASEGQVLDKIKGLMGLVSIVILALSSLCVNTTLMAIVGERAREFALQKALGSSNGDIVRQILLETSIIALAAVACGWVLGYLLAQLLGLTVFNAAISLRLPVLPITLVLSLLVAILAAIVPVRRAVSVEPAKVLKGE

SEQ ID NO: 3981 - DNA, 696 bp, Salmonella enterica
atgtccgttacgcatatccctcaggtggcgatcgaaacccgccacttatacaaacggttcggtgacgttaccgccctggatgacattaatctgcgcattgcgcagggtgaatttgtcgccattatgggcgcttctggttctggtaaaaccacgctgatgaatattctgacgtgccttgatacggcgacggaagggcaggtgtttcttgatggcaccgatgccgccgcgctggatgaagaggggcgccgtcgctttcgcgccgagaaaatcggcctggtatttcagcagttccatttgatcccgttcttaactgcgctggaaaacatcatgctcgcccagcattaccacagcgtggtggatgaagcggcggcgaggaaggtgctggaacaggtagggcttgggcatcgtgtgacgcacctgccgagccagctttccggtggtgagcagcagcgtgtgtgtatcgcccgggcgctggtcaacgaaccgccggttattttcgcggatgaaccgacgggcaacctggatgaagagaatgagcagcgggtgctggatctgctcaccgatctgcatcgtcaggggcgcacgattgtgatggtgacgcacaaccctgcgcttgggcagtttgccgaccgtattctgcggctgcaacacggtaaatatctgggtgaggaggccaatcaacatgcgctggcataa

SEQ ID NO: 3982 - protein, 231 aa, Salmonella enterica
MSVTHIPQVAIETRHLYKRFGDVTALDDINLRIAQGEFVAIMGASGSGKTTLMNILTCLDTATEGQVFLDGTDAAALDEEGRRRFRAEKIGLVFQQFHLIPFLTALENIMLAQHYHSVVDEAAARKVLEQVGLGHRVTHLPSQLSGGEQQRVCIARALVNEPPVIFADEPTGNLDEENEQRVLDLLTDLHRQGRTIVMVTHNPALGQFADRILRLQHGKYLGEEANQHALA

SEQ ID NO: 3983 - DNA, 555 bp, Salmonella enterica
atgaaaaaattgatactcgccgccgctgtggcaggggctgttttattgtcgtccgccgcgcaagcgcagacaacgccggaaggttatcaactgcaacaagtgttgatgatgagccgacacaacttgcgcgcgccgttggccaataatggcagcgtgctggagcagtccacgccgaatcagtggtcggagtgggatgtgcccggcgggcagctcaccacgaaaggcggtgtgctggaaatttatatgggccactacatgcgagaatggctggcggagctggggatggtcacgtcaggcgaatgcccgacgccggacacggtatatacctatgccaacagtctgcaacgcaccgttgcgacggcacaattctttatcaccggcgctttccctgggtgcgacattccggtacatcatcaggaaaaaatgggcacgatggacccaacgtttaatccggtgatcaccgatgactctgcggcgtttagccagaaagcggtgcaggcgatggaaaaagagcgcagccagatgcagcttgacgaggcactgttgcaaagttag

SEQ ID NO: 3984 - protein, 184 aa, Salmonella enterica
MKKLILAAAVAGAVLLSSAAQAQTTPEGYQLQQVLMMSRHNLRAPLANNGSVLEQSTPNQWSEWDVPGGQLTTKGGVLEIYMGHYMREWLAELGMVTSGECPTPDTVYTYANSLQRTVATAQFFITGAFPGCDIPVHHQEKMGTMDPTFNPVITDDSAAFSQKAVQAMEKERSQMQLDEALLQS

SEQ ID NO: 3985 - DNA, 234 bp, Citrobacter braakii
atgttatacatggctttatgcagttttatgatgatcctggcgctaagtgagatgttccgcacgatgacggcgatcggcaatggcagtttcgccggcaaccgcttcataccgctcgccttagttctgttaacgctggcgctggcatcacctttctttgccacattttatacgatgagccgttctgatttcatggcgacgacggcctgctacatggctgcgtgtggcaggtcttaa

SEQ ID NO: 3986 - protein, 77 aa, Citrobacter braakii
MLYMALCSFMMILALSEMFRTMTAIGNGSFAGNRFIPLALVLLTLALASPFFATFYTMSRSDFMATTACYMAACGRS

SEQ ID NO: 3987 - DNA, 210 bp, Salmonella enterica
atgaaagatgaaattcgccacgaaaaacccgttgaagtgaatatacagctgacacacagagaagcgcaggctctggcgcaactggttaagcgtctgggattcagtgactgccgcggcctggcgacgtcagatattgaggcatatctgatgatggatggaatcaaccagatcatgaaagcactggctgaagagggctatgcaccacgataa

SEQ ID NO: 3988 - protein, 69 aa, Salmonella enterica
MKDEIRHEKPVEVNIQLTHREAQALAQLVKRLGFSDCRGLATSDIEAYLMMDGINQIMKALAEEGYAPR

SEQ ID NO: 3989 - DNA, 219 bp, Salmonella enterica
atgttcagcatcatttatcacgccggcgcagccgtccttttcctggtcatgagcctggcggccggcgccggcctcctgcttcatggccatgaatatacgacaggtcatttctggaacatgacggggctgtgcattgtgtcaactctcgtctggatctgggctgtagctcaggcaaaagaagcctggtacatttcacgaaacatcaaaaaaggactctga

SEQ ID NO: 3990 - protein, 72 aa, Salmonella enterica
MFSIIYHAGAAVLFLVMSLAAGAGLLLHGHEYTTGHFWNMTGLCIVSTLVWIWAVAQAKEAWYISRNIKKGL

SEQ ID NO: 3991 - DNA, 207 bp, Salmonella enterica
gtgccggcactgcatgatgcggccactcagctgattatcgtgacctcacagggctatcgtggtccgctgcagccgtttctgaaaagaagccgcgcggacatgatggcgcccctgaaatcgaacatgacgtgcctgaatattgcctgcgccggcgccctgattgacgccatgatgcaggcagacgcccggcaggcggcgaccatttaa

SEQ ID NO: 3992 - protein, 68 aa, Salmonella enterica
MPALHDAATQLIIVTSQGYRGPLQPFLKRSRADMMAPLKSNMTCLNIACAGALIDAMMQADARQAATI

SEQ ID NO: 3993 - DNA, 213 bp, Salmonella enterica
atggcaaccacgatcagtctgctggagccggttatagccgcactgctggccgttgtgctcgtcggtgaaaggctgccgccttccggatgggcaggcgtcggactgatagttgcgtgtctggggctcatcaccgttccggctggaaagttacgtttcagtctgttccggcaacggaaagaaaactttgaaatcgcaaaaaggaaagaattatga

SEQ ID NO: 3994 - protein, 70 aa, Salmonella enterica
MATTISLLEPVIAALLAVVLVGERLPPSGWAGVGLIVACLGLITVPAGKLRFSLFRQRKENFEIAKRKEL

SEQ ID NO: 3995 - DNA, 609 bp, Enterobacter cloacae complex
gtgaacacccatccaaagcatctgccggccgatgaacgtcgtgccgtaactgtcgagtccgtcgtggcgcttgccggttcacaaaacccaagcgagataaccactgcggctatcgctaaacacatgaacttgacccagggtgcgctgtttcggcacttcccgaacaaggaagccatttggcaggcggtcatggagtgggtagcagagcgcctattagccagaatcgatcgatccgcacaaggaatcgagtcgcccttggcagccatggaggcgatgttcatgagtcatatcgaattcgtagctgagcacccaggcgtgccaagaatgatgtttggtgagcttcagcgtgccgaatcgacaccggccaagcgcatggtgcaaaccttgattcagcgctacggcgaacgtttgcatcgtctcatcgagaaaggcaaggccagcggcgagttgtctccctcgcttgacaacgaggcggcggcaacgctgttcattggcacgatccagggcttggtcatgcaatcgctgttggcgggtgatgtgggacgcatgcaccgcgatgcgccgcgcgtctttgcaatttatcggcgtggcataaggagtgcgcaatga

SEQ ID NO: 3996 - protein, 202 aa, Enterobacter cloacae complex
MNTHPKHLPADERRAVTVESVVALAGSQNPSEITTAAIAKHMNLTQGALFRHFPNKEAIWQAVMEWVAERLLARIDRSAQGIESPLAAMEAMFMSHIEFVAEHPGVPRMMFGELQRAESTPAKRMVQTLIQRYGERLHRLIEKGKASGELSPSLDNEAAATLFIGTIQGLVMQSLLAGDVGRMHRDAPRVFAIYRRGIRSAQ

SEQ ID NO: 3997 - DNA, 1152 bp, Salmonella enterica
atgaaaaagttacccttgcaaggccgcaccctggcactgcttgccgtcatcattcctttgctggtgctttttatttatgtcggtctgcgatcagggccgctcgccccggtcgctgtgacggtggcaagcgtggaatcacgggctatcacaccggcgctgttcggcatcggcacggtggaggcgcgctacacctacaagatcgggccgacgtttgccgggcgcgtcaaacgcctggaggtgcatgtaggcgaccaggtcaaggccggacaggtgctcggcgagatggagccggtcgaccttgatgatcgggtgcgctcacaggagtctgtattcaagcgggcggaagcggctttgcgcgaggcagaagcccggcaagcctacgcgcaaacccaggcgcgccgctatgagcaattgtttgcggtgcgctcgaccagcgaggaaatcgtcaccaccaagcggcaggaactgcagatcgccgatgccgccctatccgccgctcgggaagatattgcccgggcacgctccgaccgcgaagcactcgtcgcgcagcggagcaatctgcgcctgatcgcgccggtcgacggtgtagtcgccgtgcgcgatgccgatcccggcacgaccatcgtcgcgggccaggccgtggtggaagtgatcgaccccaagagtttgtggatcaatgtgcgcttcgaccagatcagcgcatcggggctggctggggggctgccggctcatatcgtcctgcgttcgcgtggtggccagaccttgaaaggtcgcgtgctgcgggtggaacccaaggccgacgcggtaaccgaggaaacgcttgccaaggtgacattcgataacaaaccagaacctttgccaccagtgggtgaactggccgaagtcacggttgacttgccggcgctcccggccgctccactgatccccaacgctgccgtccagcgtgaaggcgataaagttggtgtctggcaaatcgtggatggtgatctgcatttctccccggtcaagctcggcacttccgacctcaatggttacgtgcaggtgcgcgaagggctcaagaatggggaccaggttgtgacctatagcgaaaaggcactgacggcgcgcagccgcatccatgtggtcgagcatatcccgggagtttcacgatga

SEQ ID NO: 3998 - protein, 383 aa, Salmonella enterica
MKKLPLQGRTLALLAVIIPLLVLFIYVGLRSGPLAPVAVTVASVESRAITPALFGIGTVEARYTYKIGPTFAGRVKRLEVHVGDQVKAGQVLGEMEPVDLDDRVRSQESVFKRAEAALREAEARQAYAQTQARRYEQLFAVRSTSEEIVTTKRQELQIADAALSAAREDIARARSDREALVAQRSNLRLIAPVDGVVAVRDADPGTTIVAGQAVVEVIDPKSLWINVRFDQISASGLAGGLPAHIVLRSRGGQTLKGRVLRVEPKADAVTEETLAKVTFDNKPEPLPPVGELAEVTVDLPALPAAPLIPNAAVQREGDKVGVWQIVDGDLHFSPVKLGTSDLNGYVQVREGLKNGDQVVTYSEKALTARSRIHVVEHIPGVSR

SEQ ID NO: 3999 - DNA, 1206 bp, Salmonella enterica
atgatcagcctggccggccgcgacattctccatgcctgggggaaattcgtcttcaccggcatcggtctgggtctgctgatcggcgtcaccctagtcatggctggggtgtaccgaggcatggtggacgacggcaaggcgttgctcgacaacagtggcgctgacctttgggtggtgcaaaaggatactctgggtccttatgcggagtcgtccagcctcaacgatgacgtgtatcgcgccattctcgccatgccgggagtctcacaggcagcgaacgcgacctacctgaccatgcaggtacgcaagggcgagagtgatgtacgcaccatggtggtcggcatcgcgcccggtgcgttgggggctacaccaggatggcctccttatctcgtcgctggacgccagatcacgcgcggtcactacgaggctgtggccgacatcgccaccggcttcaaactgggagatcgtcttgccattcgccgcaatcattacaccgtcgtggggctgacacggcgcatggtgtcgtccagcggcgacccgatggtattcattccgctcaaagatgcccaggaggcccagttcctcaaggacaacgatgccatctggcaaagccggcgtcgcaccgaagccaacccggtcttcaatcgacccggtgatccaggtttgctggatgccgtgattgcttcacagagcagcaacgcgttcgtcaatgccgtgctggtcactctgaaacctggtcatgcgccggacgaggttgccgaatccatccagcgctggaagcgtttgacggtctacacccgggcacagatggaagacatcctcgtcggcaagctgatcgccacctcggccaagcagatcggcatgttccttgtgattctggccatcgttagcgcggccatcgttgccttcatcatctattcgctgacgatggacaaaatccgtgagatcgcggtgttgaagctcatcggcacacgcaaccgaaccatcgccgcgatgatcatgcagcaggcgctcgccctgggcgtgattggcttcgtggtcggcaagatcacagccaccttttcagcaccggcttttccaaaatatgtcctgctcacgccaatggattctgtcgccggtttttttgccgtgctcgtgatctgcgttctagctagcctcgtcgccattcgcatagcactcaaggtcgatccggccgaagccattggaggttga

SEQ ID NO: 4000 - protein, 401 aa, Salmonella enterica
MISLAGRDILHAWGKFVFTGIGLGLLIGVTLVMAGVYRGMVDDGKALLDNSGADLWVVQKDTLGPYAESSSLNDDVYRAILAMPGVSQAANATYLTMQVRKGESDVRTMVVGIAPGALGATPGWPPYLVAGRQITRGHYEAVADIATGFKLGDRLAIRRNHYTVVGLTRRMVSSSGDPMVFIPLKDAQEAQFLKDNDAIWQSRRRTEANPVFNRPGDPGLLDAVIASQSSNAFVNAVLVTLKPGHAPDEVAESIQRWKRLTVYTRAQMEDILVGKLIATSAKQIGMFLVILAIVSAAIVAFIIYSLTMDKIREIAVLKLIGTRNRTIAAMIMQQALALGVIGFVVGKITATFSAPAFPKYVLLTPMDSVAGFFAVLVICVLASLVAIRIALKVDPAEAIGG

SEQ ID NO: 4001 - DNA, 711 bp, Salmonella enterica
atgagtggcaaagggatacacatcgaaagtttaagcaagcggtatggcgatggtgacaccgctgtctttgccttgagagacgtgaatatgcatgttgcgcctggtgaagtggtgggactgatcggcccttccgggtccggcaagagcacgctgctcaagtgtctgggtgcggtgatcgaaccgaccgccggtcgcatgacgctgggcgatgaagtgatctacgccgatggctggaaagtccgcgacctgcgcgccttacggcgtgacaagattggtttcgttttccaggcgccgtacctgattccgtttctcgatgtcaccgacaacgtggcgctgctgccgatgcttgcaggcgtcgcgaatggagagtcgcgcgcgaaggcactggaattgctcacagcgcttgatgtgcaacaccgagctcgcgcaatgccctcgcaactctccggtggcgagcagcaacgggtcgccatcgcgcgcggactggtcaatcgtccgccggtgatcctggccgatgaacccactgcgccgctggattccgagcgcgccatggctgtaatccgcatcctcaacgacatggcccggaagttcgagaccgccatcatcgtcgtcacccatgacgaaaagatcatccccacattcaagcgcatctaccacatccgcgacggcgtgacccatgaggaagctggcgaagggcgggagttcgaatga

SEQ ID NO: 4002 - protein, 236 aa, Salmonella enterica
MSGKGIHIESLSKRYGDGDTAVFALRDVNMHVAPGEVVGLIGPSGSGKSTLLKCLGAVIEPTAGRMTLGDEVIYADGWKVRDLRALRRDKIGFVFQAPYLIPFLDVTDNVALLPMLAGVANGESRAKALELLTALDVQHRARAMPSQLSGGEQQRVAIARGLVNRPPVILADEPTAPLDSERAMAVIRILNDMARKFETAIIVVTHDEKIIPTFKRIYHIRDGVTHEEAGEGREFE

SEQ ID NO: 4003 - DNA, 4254 bp, Salmonella enterica
atgagatcgagaccttcccttttactgatgcgaaacctgcggtcattggccgttgtggtgctcgcaactttgccatgcgttgcttttgcacaatggcgggttgtagccgtgagcaccgaagtagacaaaatgcgcttcaacaccatcatagacgcgcattccttcatgaagaattatcgctctggtgaggagcaagggaagggaacgccagttggggatgcgctttatccggttgccagttatggtgatggccgttatgtctccaggatctgttttaagtatctaggtgctactggcgattatgaccccactacctgcactggcgacccagctacggtctactggcgctcaacctatgttctgccgggtgagatggataaaacaccgttcctggacagggatctcggcttaccaacaacgaccatgtgtgtagggaaccctatccatcttggcaccggcaacaagttccaggctgaactggattatcaaagcggaggctccgaccctttcacattcaccagatactacaatagccaccttcctgatgaagagctcggcggctggcggcatacctactcgcggagcgtcgaggtcaacgcctcgaagtacggtgagaacatggttgtcctgcaccggccagaagggcaacaactcgcgttctacaactcgtcctctgtctgggtgccaacatggaaaaccgatgataccttgacgaaggatgctaccggctggcgctacactcaatctgacggggtagtcgaggcctatgatgaaaccggacgactgaccggcatcgagaagcccaacggcaatcacatcaccctgagctatctgaacggagagctatcctcgatcactgacggctttggccgcaccatccagttccagtatcaagatggccgcatggtcagtgtcaccgatcctgctggtggcagtattcagtaccagtacaacagcgctggcaagctggcggaagtgatctaccaggacaatacgagccgcagctatctctacgatgacccgaatgcaccgggtttgctctctgggctggtggacgagaacggcaaccgtttcgccacatggggatatgatactcaggggagagcggttctaagcgaacacgccgggggcgcagagaaaactcaggtaagctacaacgctgacggaagcgtctctgtcaccaatgccctcggccacgttcagcgatacacctacagtcgccacaatgggatgctcaagcctgatgtggttgagggtgcgccgtgtaccggctttgtgggcggcaaggaaacctacgtctacgacagcaaaggcctcgtctccagcattactgaccgcgctgggcagaagcgcacgttcacccataacgaccggggattggaaaccacccagatagaccaggacgggggtaaggttacgaccgactggcttccttccaagtcgctcccggcaaaaatcacagaaccaaccaggatcactgagctcacctacgacactcatctccgggtgataagccgcaaggtcactgatcgcagctcgggcgcttcccggacatggacctacacctatgcccctgttggtacaggaaagccgagcctgttggcctcggttgatggtccgcgcaccgacgtcagcgatgttacgacatttgactacgatgaccagggcaacctgatccggacaacgaacgcgctggggcaggtgacgcagtttggtgactacgacgcgaacggtcgcgccgggaccattcagggtgtcaatggtgtaacccaaaccctcacctatgacgccagaggaagacttgtcagctccactgggccagaaggaaccacggtctacaactatgatgctgtgggcctcctgagttcgctgaccaagccaaatggtgcaaccgtcagctatgagtacgacgctgcacatcggctggtggcggaaacagatgcacagggcaaccggcgcgagcttgagctcaatgacctcgggaacccagtagaagagcgactgctcgatgcgctgggccagacccgttggatagagcgccggatcttcaacgaaatcggctggctctccagtgtctccgacgcctatagcaatcagtcatcgttttcctacgatgtggtggcaaacctgatacaggagaccagtccctctggtaacacacactcctacaagtacgacggcttccatcaccggacacaaacgaccgatcccctcgggaaggtcacgcaggtgctctacaaggataccggcgatgtttaccgtgtctccgaccctcgttcgcgcctgacctactacagctacaacggctttggcgaagtgacccaggtccggagcccggacaccggcaccaccgacattacctatgacgaagccggtaacgtggcaacgcgcaaaacggccaaggggcaaaccacaagctacagctatgacgcgctgaaccggatcatcgaaacctccagcgatgtcgctggcgaatcgccaattctgtacgggtacgacgaagcaacctcaccatacggcataggccgcttgacctcagtcgatgatggcaacggtgtccggagatttggctacacccccgaaggatggctggcttacgaaacctgggaaacccacgggcagagcctgactacccagtaccaatacgatggtgcaggcctcgtcacgaagatcacgtatcccagtggccgtgaggtctcctacacccgtgactcagccggtgacgtcatcgaggtgacaacgacacaagcaggcaccacaacaaacctggcaagccagattgagcgagcgccctttggccccgtcaccagtatggtcagagggaacggcatttcagaaagccgcactctggatctcgattaccgtgtcaccggcatcgacgctgctagggtgcattcgctggtctatcggtacacgccagactcgttgatttcagccatagacgacaatctcagctcatcagtcaatcagtcactcggttatgacgcggttggccgcatcacctctgctgaggggatctatggcgttttgggctatggctatgacgccaccggcaacaggacctcgatcacgaccgatggcctgagccaaagctacaccatcaactacatgaacaactggttggtgaaggccgggcaaacctccagaagctatgacgccaatggcaacctgacgaagcagggggcggataccttcacctatgacagccagaaccggctggtggccgcaacggtcgcgggagtgactgtaagctacacatacaaccatctggatcagcgtgtaaccaagaccctaaacgggcatacccggctgctggtttacgacctggcaggaaacctcatcgaggagctggacgcggccactggagacgtgctggcggagtacatctggctcgatgggacacccttgggctttgttcagtcaggacagacctaccaagtccacgtcgatcacctgggcaccccgaaggcactgaccgacgtcagcggccaagtcgtttggaaggcgagctacagcccgttcggtaaggccagcatcatcatccaggggccaaccttcaacctgcgattcccaggacagtattacgacgcggagaccgggttccactacaactggcggcgttactacgacccagcgaccgggcggtacattaccagcgaccctcttggcctgatcgatggagtaaacacctacgggtatgtgcatggaaaccctatgtccaataccgacccgacgggtgaatttgcgtttgttggtgcaggtattggagctgggttggagctacttagccaactaatcgaaaataatgggagttggaaatgtgttagttggtcaaaagttggaatcgccggagcgattggggctataggtggcggctgggcgtcaggagttttcagacatgccagctccggtaaatcgtggttcaaattaagccaaaaatggagcaatgtctcacccagagtaaggaaagttcaaggggttccacgaggtaatgagcttcaccattgggctattcagagaaatggcaagtttggcaaatatgttcctgactcaataaaaaaccatccttggaacttgaagtccattccaagagatattcaccaaaacattcacggcaatggacctaccccatatagcgcatttggtcgttggtggcacgggacgcctgaatgggcaaaagtagctcaagcctctcctgttagtggtggtttagctgattcaataaatgatgagggatgcggttgtgcaaattga

SEQ ID NO: 4004 - protein, 1417 aa, Salmonella enterica
MRSRPSLLLMRNLRSLAVVVLATLPCVAFAQWRVVAVSTEVDKMRFNTIIDAHSFMKNYRSGEEQGKGTPVGDALYPVASYGDGRYVSRICFKYLGATGDYDPTTCTGDPATVYWRSTYVLPGEMDKTPFLDRDLGLPTTTMCVGNPIHLGTGNKFQAELDYQSGGSDPFTFTRYYNSHLPDEELGGWRHTYSRSVEVNASKYGENMVVLHRPEGQQLAFYNSSSVWVPTWKTDDTLTKDATGWRYTQSDGVVEAYDETGRLTGIEKPNGNHITLSYLNGELSSITDGFGRTIQFQYQDGRMVSVTDPAGGSIQYQYNSAGKLAEVIYQDNTSRSYLYDDPNAPGLLSGLVDENGNRFATWGYDTQGRAVLSEHAGGAEKTQVSYNADGSVSVTNALGHVQRYTYSRHNGMLKPDVVEGAPCTGFVGGKETYVYDSKGLVSSITDRAGQKRTFTHNDRGLETTQIDQDGGKVTTDWLPSKSLPAKITEPTRITELTYDTHLRVISRKVTDRSSGASRTWTYTYAPVGTGKPSLLASVDGPRTDVSDVTTFDYDDQGNLIRTTNALGQVTQFGDYDANGRAGTIQGVNGVTQTLTYDARGRLVSSTGPEGTTVYNYDAVGLLSSLTKPNGATVSYEYDAAHRLVAETDAQGNRRELELNDLGNPVEERLLDALGQTRWIERRIFNEIGWLSSVSDAYSNQSSFSYDVVANLIQETSPSGNTHSYKYDGFHHRTQTTDPLGKVTQVLYKDTGDVYRVSDPRSRLTYYSYNGFGEVTQVRSPDTGTTDITYDEAGNVATRKTAKGQTTSYSYDALNRIIETSSDVAGESPILYGYDEATSPYGIGRLTSVDDGNGVRRFGYTPEGWLAYETWETHGQSLTTQYQYDGAGLVTKITYPSGREVSYTRDSAGDVIEVTTTQAGTTTNLASQIERAPFGPVTSMVRGNGISESRTLDLDYRVTGIDAARVHSLVYRYTPDSLISAIDDNLSSSVNQSLGYDAVGRITSAEGIYGVLGYGYDATGNRTSITTDGLSQSYTINYMNNWLVKAGQTSRSYDANGNLTKQGADTFTYDSQNRLVAATVAGVTVSYTYNHLDQRVTKTLNGHTRLLVYDLAGNLIEELDAATGDVLAEYIWLDGTPLGFVQSGQTYQVHVDHLGTPKALTDVSGQVVWKASYSPFGKASIIIQGPTFNLRFPGQYYDAETGFHYNWRRYYDPATGRYITSDPLGLIDGVNTYGYVHGNPMSNTDPTGEFAFVGAGIGAGLELLSQLIENNGSWKCVSWSKVGIAGAIGAIGGGWASGVFRHASSGKSWFKLSQKWSNVSPRVRKVQGVPRGNELHHWAIQRNGKFGKYVPDSIKNHPWNLKSIPRDIHQNIHGNGPTPYSAFGRWWHGTPEWAKVAQASPVSGGLADSINDEGCGCAN

SEQ ID NO: 4005 - DNA, 423 bp, Salmonella enterica
gtgcaaattgaatttccagcgctgcttgtgagcagcaagaaaaggtcgctcttcgtagtggcatcagaatccgagttcgggaaatgtactattcagtctttgaggaacggttattttgagctgatggacatttatgattcggaaggtcgtcactacaaaatagacgaggttgcgagctacaagccgctaagtccattctggtactggcctgtagaaattgtgatgtatggttctcgactgtttaaggctaatttcaatgctgttcttatctctaatctggattgcaaggagttaaaatctgaactttgtgatttggctaaaaagtacagaagtaatttggattccggcgtcggaattgaaaagattatggaggaaatggagtctgccagaacaattaaagaattgataaaggtttttggctag

SEQ ID NO: 4006 - protein, 140 aa, Salmonella enterica
MQIEFPALLVSSKKRSLFVVASESEFGKCTIQSLRNGYFELMDIYDSEGRHYKIDEVASYKPLSPFWYWPVEIVMYGSRLFKANFNAVLISNLDCKELKSELCDLAKKYRSNLDSGVGIEKIMEEMESARTIKELIKVFG

SEQ ID NO: 4007 - DNA, 603 bp, Salmonella enterica
atgtataagagccttgaagatctgatggcgggtatttacgagatggcagcgccagatggcatcatctgtaacgaggtttccaaattccttgcggccaaccaggtcaagccggaagacataagctctgggatctggtttttcctgtggctgaaatcagctcccaaggatgcgaagccaatccaaaaagaaatccccggatttggagttgttctcaacatgccgacttatggcggaacgctcaacgaagcaatcacagggttgatcgagaacgagtgccgtcaaatagagctcgctgagggacatccgagccttgaggcttgggttgaatcagtattagccggtcgagatgacggagaggaaaatgaagctgcggccaatatcgtggatctgcttaatgggtgtcacgacctactggatacagcaataatcaattacctttttaaggtgggaaaaatcaacgagcaagagattttgtcgctcatctattatggagagctatgtgaccactctcttgtcggtacgcctttttcaacgttacatatcccgagtgaaaataacgtccacgaacgtaacatcatccccattaaaaaaggagccagttag

SEQ ID NO: 4008 - protein, 200 aa, Salmonella enterica
MYKSLEDLMAGIYEMAAPDGIICNEVSKFLAANQVKPEDISSGIWFFLWLKSAPKDAKPIQKEIPGFGVVLNMPTYGGTLNEAITGLIENECRQIELAEGHPSLEAWVESVLAGRDDGEENEAAANIVDLLNGCHDLLDTAIINYLFKVGKINEQEILSLIYYGELCDHSLVGTPFSTLHIPSENNVHERNIIPIKKGAS

SEQ ID NO: 4009 - DNA, 288 bp, Salmonella enterica
atgttaaacaaaaacaaatttgagaaagttttaaagagaatcctcgataagaactttgagcgctgctctatttgcaggaaaccattccctggaccgtgccatacttttgctggtttggattcggacaataaagttcagaacgtaggttcttgctgtcggaccagtattgtggacttgcggcatggaggtgtgtatacgaccgctcctgtagatactcaagaggggcaaagtcaggcgcatgagctactcgcaacacatccttgtaaggggatgatggggcatgcttag

SEQ ID NO: 4010 - protein, 95 aa, Salmonella enterica
MLNKNKFEKVLKRILDKNFERCSICRKPFPGPCHTFAGLDSDNKVQNVGSCCRTSIVDLRHGGVYTTAPVDTQEGQSQAHELLATHPCKGMMGHA

SEQ ID NO: 4011 - DNA, 492 bp, Salmonella enterica
atgacagaacaatcctacggcgaaagcctcaaatttttctcagactggcagaaggaccccgcgaaacgcaccggcctgaatgtgcaacacacgctaaccagaggtgaatatcctacggtcagcatcgagattgcgccgatcagggcatcggggtccagcccagactggaaaagcaagatcacggtgcagctcactcgcggcgaactgacggcgttttgcagcgttctctttggtttgcgtagcaaggctgagggttcctatcacggcgacgcgaagaataagagctttgcggtttacaacaacggcaaggccggtgttgcgatcatccttagtgagcgaggaaaccagctccagaatttcatcaatgatgacgaccgaatggagctcgcagtcttcgcagttcgccagctttccaacgcatggaaagttaccccttctgatgccatcgcgctgctacgccaatcagcgtggatggaccgaaatttgtcctaa

SEQ ID NO: 4012 - protein, 163 aa, Salmonella enterica
MTEQSYGESLKFFSDWQKDPAKRTGLNVQHTLTRGEYPTVSIEIAPIRASGSSPDWKSKITVQLTRGELTAFCSVLFGLRSKAEGSYHGDAKNKSFAVYNNGKAGVAIILSERGNQLQNFINDDDRMELAVFAVRQLSNAWKVTPSDAIALLRQSAWMDRNLS

SEQ ID NO: 4013 - DNA, 243 bp, Klebsiella aerogenes
atgattgatgaatttcatgtgatgtatatgtataaaaaaatccaagcagaagcctcaacaacagatatgaaaacacttgaacagcttttgaagaagttccgtaaagtcgtggcagagcgccgggaagaatactatcaggaaattggtgagaaaaaagcacgtaagttgaaaatgaaaagagcacaaagattgcttgagaaaatggcgtgtgacctggtttcaccagaagatctcattgactga

SEQ ID NO: 4014 - protein, 80 aa, Klebsiella aerogenes
MIDEFHVMYMYKKIQAEASTTDMKTLEQLLKKFRKVVAERREEYYQEIGEKKARKLKMKRAQRLLEKMACDLVSPEDLID

SEQ ID NO: 4015 - DNA, 336 bp, Citrobacter freundii
atggatttacacaccgcagcaaacgcacttcgagaactgggccacccgacacgtctccgcatataccgggagctggtcagggctggtcatgaaggcctgccggttggcgaactgcagaagcaccttgagattcctgcctccacgctcagccatcatctttcagcgctgatgtccgctggactcataagccaggaacggcagagtcgtaccttgttctgcagaccttgctatgcgcagcttgagcagctgatggcttttctcactgaagagtgctgcgccggtggcagtagctgcagcctgtctaccgagatttcccataaagagactccattgtga

SEQ ID NO: 4016 - protein, 111 aa, Citrobacter freundii
MDLHTAANALRELGHPTRLRIYRELVRAGHEGLPVGELQKHLEIPASTLSHHLSALMSAGLISQERQSRTLFCRPCYAQLEQLMAFLTEECCAGGSSCSLSTEISHKETPL

SEQ ID NO: 4017 - DNA, 180 bp, Salmonella enterica
atgagtaatacagtgtgtagcaacgagagttgtaagaaggagttcatctactgggaacatagtggaggatttcccggcggaaaagagaaagaacctattgtctgtccttactgtggtcatataaacggttatgaaatgacaagtggtttgatttcaagcaagaaactagaagatcggtag

SEQ ID NO: 4018 - protein, 59 aa, Salmonella enterica
MSNTVCSNESCKKEFIYWEHSGGFPGGKEKEPIVCPYCGHINGYEMTSGLISSKKLEDR

SEQ ID NO: 4019 - DNA, 207 bp, Klebsiella oxytoca
atgctgaacctcgattgtgttcctatctcaacttattgcaaagaaactggcgaaactcctgaagcaataaacaaacgagtacaacgcggtgtttggcgtgagggcattcaggttttaaaggttgaaggcgttaaggagaggtggattgatcttagtgaggttgcaaaatgggccagacaaaactgctcaaactaccgcgcggcgtaa

SEQ ID NO: 4020 - protein, 68 aa, Klebsiella oxytoca
MLNLDCVPISTYCKETGETPEAINKRVQRGVWREGIQVLKVEGVKERWIDLSEVAKWARQNCSNYRAA

SEQ ID NO: 4021 - DNA, 1686 bp, Salmonella enterica
atgaaaaataatataaaacaccacattaaaaatacactgacatctattaattggttgaattttacttttctttttctgagcttttcatattcaatttatttactgttaatctttggtgctcttgctcaaggctatataagctcattcggaatttattcatgtgaaaactgctttactgaagttgaggatttcacaaagattattagcaataaacctgacatttattacctcaccatgtcgatgattattttcatattttcattggcatttaaacaaaggattaaaatacttattacaacttggctggcggcagcatttactattacagtatttgacgtcaccttagcaaaggaaaatataagtttaattccttacaccattgaaaacttgatgtttaatagttttggtggattttttctttccctattcgttttattaaaccttgcgagcattagttatttattgaaaaataccaaaactagcattggtattgctacaatcattccactatcctcctccttcgtacttagctttatgatttatgggtttttatatctaatttatgaaagaagtcctgttcatatagatgcgcttttcaatgaaaaattattaggttcgatacatactgcggatgatgagggttttggtttcctcactgcctcaaaaacgataaatgatgagataaccatacagtcctatttaaataacaattttacatggaggtctggcgatcaaagttatgatgtcgaagcttatctattctctgattgtattttaaactcaacatcactcaataagtacaaacaacaacctgtgaaattaactgatgtaaaaacattagagttttcatctgacagaccagtgatctatttcatcaagggagaaaaactttcaacatcaattcaaaactcaaaagaggtcaactatagcaacaaagacaaaataagaagtcaaattgaggatggttcagctaaatttaaaagtacttatttgccatttacattaatggttaacatagcaccatttgatgaaaaatcatttttagaaaaaacagaatacaaattaaccatcaacaagcaagaaaatttaatcaccaatattgtgcaacagtacaatataataaataaaaaagaattaaaatgtcgtcaaatagttacaccagataatagaattcctactaagaataacattactggtgttgcatcaattgcttttagattcattcctaaaggtcacctcactttatctaacgtcccacttttgacaattaatataaaaaacggtgacttcacgaaaacaaaggacagtaaagcccctctttcggatattagtaatggctatctaaaacacattaatttgatcgggcttgaagaactaaaggttaacaataagaagatagatgtttctgactccgaccttctatatgcaaccggaaataaccttgttggatttgtcaccaaaaataacaaaattaaaatttttggtactgcggaaaaactagcccttaacactaagattatgaatttaaagcccatatccactttaaacagcaaactatcttattttaacacctctttaatagatgttttaaaagtgatatttggaatgggggttgttatattcatttccaactattttgttaagttcataaaaagaaaggaagaaattagagtattacgaaagtag

SEQ ID NO: 4022 - protein, 561 aa, Salmonella enterica
MKNNIKHHIKNTLTSINWLNFTFLFLSFSYSIYLLLIFGALAQGYISSFGIYSCENCFTEVEDFTKIISNKPDIYYLTMSMIIFIFSLAFKQRIKILITTWLAAAFTITVFDVTLAKENISLIPYTIENLMFNSFGGFFLSLFVLLNLASISYLLKNTKTSIGIATIIPLSSSFVLSFMIYGFLYLIYERSPVHIDALFNEKLLGSIHTADDEGFGFLTASKTINDEITIQSYLNNNFTWRSGDQSYDVEAYLFSDCILNSTSLNKYKQQPVKLTDVKTLEFSSDRPVIYFIKGEKLSTSIQNSKEVNYSNKDKIRSQIEDGSAKFKSTYLPFTLMVNIAPFDEKSFLEKTEYKLTINKQENLITNIVQQYNIINKKELKCRQIVTPDNRIPTKNNITGVASIAFRFIPKGHLTLSNVPLLTINIKNGDFTKTKDSKAPLSDISNGYLKHINLIGLEELKVNNKKIDVSDSDLLYATGNNLVGFVTKNNKIKIFGTAEKLALNTKIMNLKPISTLNSKLSYFNTSLIDVLKVIFGMGVVIFISNYFVKFIKRKEEIRVLRK

SEQ ID NO: 4023 - DNA, 291 bp, Salmonella enterica
gtgactggaaaagaaatcatcctggaatatctgaaaactcatgaacaattctccccacatgaattagcactgatcaccggaataccaaataacagaatcgctcaagcagcaaggcatatggtgaaacaaggacatttgagtgttgttgagcgtaagtggaagacggttatttatgcaaaacgcaaagtgaagaaggagccaattaaaagaaatccagatggtacggggtggggatgtgcaaatccaatgacggcgtttattaatagggcgcttatggaggtaaggcaatga

SEQ ID NO: 4024 - protein, 96 aa, Salmonella enterica
MTGKEIILEYLKTHEQFSPHELALITGIPNNRIAQAARHMVKQGHLSVVERKWKTVIYAKRKVKKEPIKRNPDGTGWGCANPMTAFINRALMEVRQ

SEQ ID NO: 4025 - DNA, 693 bp, Salmonella enterica
atgccattaagttttccaaatgtatatttaaatacccgtgggagaatagagacattaccttcggatattctcgacagtatacgtaatgcatccagacctcctgatggcgtgactgggccgactgaaatacaggtgcaactacgtgatgtgttataccaggtacgtcatagccccgacgaaggagcatttgaggtggttccatggcgtgagccggggcaggtttatagtgatattcgcaggaattatccagaaaggtttagcaatgcagaaaggctggcaagccaactaaattgtacatggaatatgcctgcaccacctacatttttaacgtttgctgaacaccagaacgccagatatcgtttcaatactcaaccttccaacataaatcattcattacctgccaggattaatctatgtagttttcaggttgaagcaggaagttttgcatgttctgaagaacatttaacttgtccgataacgctggatattccaacagaaggtgtttttgttaaagtatcatcacagtcagatgtttgttgcttatttgatagagaggcattcctcaacctggtgcgccaggaattaaaacaccctttgagtcgggagtctatctgtatgggtatgatagttagaaagagcgaatgtttttttaataccgagcgtgataagtttaccttgatagtatctgattaa

SEQ ID NO: 4026 - protein, 230 aa, Salmonella enterica
MPLSFPNVYLNTRGRIETLPSDILDSIRNASRPPDGVTGPTEIQVQLRDVLYQVRHSPDEGAFEVVPWREPGQVYSDIRRNYPERFSNAERLASQLNCTWNMPAPPTFLTFAEHQNARYRFNTQPSNINHSLPARINLCSFQVEAGSFACSEEHLTCPITLDIPTEGVFVKVSSQSDVCCLFDREAFLNLVRQELKHPLSRESICMGMIVRKSECFFNTERDKFTLIVSD

SEQ ID NO: 4027 - DNA, 162 bp, Salmonella enterica
atgatggcgatggtgatcgcgttacaccagaacagcaaagtgtgctggcagatgcaggtattacaattactattcacgactctatgcctgatgtgttgttatggaatcgtcagaataatagcctttgggttatcgaagctgttacaagcgatggtgaggtag

SEQ ID NO: 4028 - protein, 53 aa, Salmonella enterica
MMAMVIALHQNSKVCWQMQVLQLLFTTLCLMCCYGIVRIIAFGLSKLLQAMVR

SEQ ID NO: 4029 - DNA, 231 bp, Salmonella enterica
atgtttcctcagttcggctttatgcctctcaacattcgcgcggttgtcctcggcatatccgcttatccaatactccagcgcctccctgacggttactggcttcagtgtttcgcttttggtgagcttcaactgaaatttgggatcgcgtccatcagccagccaggaacgacactggtcacgaagatccctggcctgcttcagactaatatcagggtacttacccaaagttag

SEQ ID NO: 4030 - protein, 76 aa, Salmonella enterica
MFPQFGFMPLNIRAVVLGISAYPILQRLPDGYWLQCFAFGELQLKFGIASISQPGTTLVTKIPGLLQTNIRVLTQS

SEQ ID NO: 4031 - DNA, 1266 bp, Klebsiella pneumoniae
atgcttattgaattcaatgttgagaactatctctcaatcaaaaacaaacaaacattttcacttattgctaacaaaagtaatgagttagaagagaatatctttacagttgaaggaaacgttaaccttaatgttctcaagtcagctgttatttacggtgctaacgcagcgggcaagtcgaatgtgcttctcgctgtcagagctatgatggatattgttactcaatctgcatctaacactcaggctggcgaagaggttcctgtattccctttcaagcttgattcagattcaattaaaaatcctactgaatttgaagttacttttattgcagagggcattcggtatcagtttggtttttctgctacaaatgaaagaattattgatgaatggctttttgcatacccaaaaggaagacctcaaaaatggtattttagagcttgggatgaagagaagcaggaatatgagtgggattttggcgcatcactacttggtgaaaaacaagtttggcagcgctcaactagaaataatgccttgttcttatctacagctgttcaattgaatagtgagcagcttaagcctgtatttacttggtttaaaaaaacactgagactttctgggattaaaggatgggccaatacattctccgccaaacgctgcactgaggatacgaagaaagatatcttgaatttcttgaaagctgcagacattggcatcgatgatgttttagttaaaaaagaaaagtttaatccagacgatttgccatctgatatgccagatgatttcaaaaaaatcgttatttctaacatgaaggataaagatatcctcgatgttactaccgtccattataatgataaaggtgagccggttagtttttctcttgaggaagagtctcatggcactcagaagcttttttctttagctggcccatggttggatgcgctcgataatggatatgtactatttatcgatgagcttcatgatacattgcatcctaagctggttagttttttggtaaatctttttaatagtcatgatactaataaaaaaggtgctcagttaattttctcaacgcatgaaacatccattctgaatcaaagcatttttagacgagatcaagtctggttttgtgagaaaaatgaactcagtgaaactaatctatatccattgactgattttagcccaagaaaaggaagggaaaatctagaagccgcatacctagacggtaggtatggagcattgccgttcatcaagaaattgacgggaatttga

SEQ ID NO: 4032 - protein, 421 aa, Klebsiella pneumoniae
MLIEFNVENYLSIKNKQTFSLIANKSNELEENIFTVEGNVNLNVLKSAVIYGANAAGKSNVLLAVRAMMDIVTQSASNTQAGEEVPVFPFKLDSDSIKNPTEFEVTFIAEGIRYQFGFSATNERIIDEWLFAYPKGRPQKWYFRAWDEEKQEYEWDFGASLLGEKQVWQRSTRNNALFLSTAVQLNSEQLKPVFTWFKKTLRLSGIKGWANTFSAKRCTEDTKKDILNFLKAADIGIDDVLVKKEKFNPDDLPSDMPDDFKKIVISNMKDKDILDVTTVHYNDKGEPVSFSLEEESHGTQKLFSLAGPWLDALDNGYVLFIDELHDTLHPKLVSFLVNLFNSHDTNKKGAQLIFSTHETSILNQSIFRRDQVWFCEKNELSETNLYPLTDFSPRKGRENLEAAYLDGRYGALPFIKKLTGI

SEQ ID NO: 4033 - DNA, 720 bp, Klebsiella pneumoniae
atgggaagcgaggatttatttaaaaagaaacgtggtcctaaaactgctaaggatctggcaagacgtaaggcagttaaatcccctctcgctaaaatattaattgtttgtgagggtaagaaaaccgaaccaaactactttgaggatttgattaaccattttgaattacttacagcaagtgtaattgatgtaactggtgagtgtggctctagtccaatgtgtgttgttcgtcatgcaaaagaacagtataaaaaaatggctgaacagggggctccttatgatcaaatctttgtagtgatagataaggatgcccacactgactatgtggcagcactcgatgctctcaggagaagtaaaccaagttcaagttggtttactgtgaattcagtaccttgttttgagtattggttacttctacattatacctattcgacaaaggcatttagaaatttaccgggtaacagttcggggaatcaaattgtcagtgagttaaaaaaacatattaagaactatgagaaaggctcaaaagggatttttcatgaaaccctaaatgctttaaagtcaaaagatttaaatgaagtagtccttagggctaagagaagtttacaggcagctgaagctagcgatactgataatccaagtacaaaagtttttgagttggttgaaagacttatccagcttaaaaaacaaatagagtcaaatcgtaaacagaaacgatcttaa

SEQ ID NO: 4034 - protein, 239 aa, Klebsiella pneumoniae
MGSEDLFKKKRGPKTAKDLARRKAVKSPLAKILIVCEGKKTEPNYFEDLINHFELLTASVIDVTGECGSSPMCVVRHAKEQYKKMAEQGAPYDQIFVVIDKDAHTDYVAALDALRRSKPSSSWFTVNSVPCFEYWLLLHYTYSTKAFRNLPGNSSGNQIVSELKKHIKNYEKGSKGIFHETLNALKSKDLNEVVLRAKRSLQAAEASDTDNPSTKVFELVERLIQLKKQIESNRKQKRS

SEQ ID NO: 4035 - DNA, 231 bp, Enterobacter cloacae
atgattcatgtcagtaagaaaagtgcccagaaaacgcacacacccgatttgcagggcaataccaagtcgattgtgatcaccccggcttttcccgataaattctttatccgcttcatcaagatgaaaataacgcgccagctgaagttcatcgggttcgccagtgaacctgccataactctcaacctgctcagtggtcaaaaaatcaacgggcatatcggcctccctgcctga

SEQ ID NO: 4036 - protein, 76 aa, Enterobacter cloacae
MIHVSKKSAQKTHTPDLQGNTKSIVITPAFPDKFFIRFIKMKITRQLKFIGFASEPAITLNLLSGQKINGHIGLPA

SEQ ID NO: 4037 - DNA, 285 bp, Citrobacter amalonaticus
atgacaatcgtgccaccggctccaggtcttatcgaacagctcagacacatggtccaaatgctggtcgatccgttcggccagtttttcgatggcctcttgcttgagcttgtcactttccctgaactcgatgttcaaggccctggccacctggttgaggttccggccgatagctccaagctgccggcacgattcccgtacggtgttcacttcttcatcagtgaggaccggcatccggttcaacgaccgcagtcatttctgtacctaaacagtcctgcgaatatgtga

SEQ ID NO: 4038 - protein, 94 aa, Citrobacter amalonaticus
MTIVPPAPGLIEQLRHMVQMLVDPFGQFFDGLLLELVTFPELDVQGPGHLVEVPADSSKLPARFPYGVHFFISEDRHPVQRPQSFLYLNSPANM

SEQ ID NO: 4039 - DNA, 459 bp, Shigella boydii
atgtccagtaaaacaaaagctcttctgctttccgtcctgatcctgccgacaacggtcgcggccagcaccatcagcaacatgcaacagaataaccggcaactccaggtggaacagattcaggaagaaactgcactgtatgaagccatgctggcaagagaaaaggtgcgacatgaactcagaaccctggagcagggagaaccagctgagcctgtgcattcacaggaaagcagttcagccgtcacgacagatacccctgcccccattaccggtattccccggctgacagagatatccggagttcacccccagataaccgccaggatacaactgccgggcggacaaactgctgatgtaaaagaagggcaacacattcccggcaccacattccgcgtggaaaagatcaccactgacagtgttgtccttgaacaaaatggtatcagaacaacactacaaccctga

SEQ ID NO: 4040 - protein, 152 aa, Shigella boydii
MSSKTKALLLSVLILPTTVAASTISNMQQNNRQLQVEQIQEETALYEAMLAREKVRHELRTLEQGEPAEPVHSQESSSAVTTDTPAPITGIPRLTEISGVHPQITARIQLPGGQTADVKEGQHIPGTTFRVEKITTDSVVLEQNGIRTTLQP

SEQ ID NO: 4041 - DNA, 1509 bp, Shigella boydii
atgctggcacctgcagaccagccacctgatgacattctggattacgtggttgttgatacagataaaacaggacaaattcatgtcagagtggtggaaggaaaaaaacaccttcgtgccgtccaggattatctgacccgcctgtgctcccgctatccgggtaaagtatccccgtttgagttcaccacacttgatgtgatcgcccgactcaggcaggagacggtcatttccggggtggaaaacggaattaaccccgtacagcaaaaaatgctcgggtatatcagccatgcggccaccctcagcgcctcagatcttcacatcacgccggggcgtgacagtacggatttcacgtatctggaggcccgtgtccacggagagctggagctgctcgatatcgtcagaaaagatgaggggctggaattactgggggccacctattccggaatgactgacgtcataaagggaacacagtttgatcccggtgtcccccaggatgcccgtctggctgaaagattcctgaaactggccggactgtttggtgcgcgctactcccactatccgtgtgtgggcggactctatgccgtactgcgtctgatcaaggatgacagtcagcatataccgacattcagtatgctggggtatcaccctgagcaggagcgcgctgtccgaaggatgctgcagcgaccggagggcatcgtgatcctctctggccccaccggttccggaaaatccaccacgctgaggacggcttctgccgcctatctggaacagtatggcttcaacgataccggagggatcctgctcccccggcgacgtctgttcacaatagaatcaccaccagaggggcgtatccccggtgcaattcagacggccgttatggataccgctcagggctgggtcgattctgttaagtccgccctgcgccttgatcctgacgctatcctgaacggggagatacgtgaccatgcctccgccatcacggcgataaaagccgccatgaccggtcacctgatgctgaccacccttcatgctaacgacccgataaatattcttgagcgtctggaaatggagggcgttcaggcaaggatgattgcagatccgcagttatttatcggcctgctcagccagcgtctggttcaggtgatatgtccccactgccgcctcccctggcatgaggtggagagctcccggacggatgaagaacgacgcctggtggaaaacttctgccagcccgatgccgtgtatcttcgtaaccataacggctgcccacactgctggcgtggagtgaacggccggaccgtcattgcagaagtgatttccccggatgcgaagtttttccagatttaccgggaaaaaggccggattgaggcaaaaacctactggcaccgggagctcggcggtatgacacgaaatcagcacctgctgggcaaaatcaacagtggtcaggtcgatccgctggctgcgcattacatatcccctgtagacgaggacagctatacgctgctgcactga

SEQ ID NO: 4042 - protein, 502 aa, Shigella boydii
MLAPADQPPDDILDYVVVDTDKTGQIHVRVVEGKKHLRAVQDYLTRLCSRYPGKVSPFEFTTLDVIARLRQETVISGVENGINPVQQKMLGYISHAATLSASDLHITPGRDSTDFTYLEARVHGELELLDIVRKDEGLELLGATYSGMTDVIKGTQFDPGVPQDARLAERFLKLAGLFGARYSHYPCVGGLYAVLRLIKDDSQHIPTFSMLGYHPEQERAVRRMLQRPEGIVILSGPTGSGKSTTLRTASAAYLEQYGFNDTGGILLPRRRLFTIESPPEGRIPGAIQTAVMDTAQGWVDSVKSALRLDPDAILNGEIRDHASAITAIKAAMTGHLMLTTLHANDPINILERLEMEGVQARMIADPQLFIGLLSQRLVQVICPHCRLPWHEVESSRTDEERRLVENFCQPDAVYLRNHNGCPHCWRGVNGRTVIAEVISPDAKFFQIYREKGRIEAKTYWHRELGGMTRNQHLLGKINSGQVDPLAAHYISPVDEDSYTLLH

SEQ ID NO: 4043 - DNA, 1095 bp, Shigella boydii
atgaaaattctggaaagactcaacaatacggaactggaactgtccggccttaaccgctggctgggcaaaaagacgttcaggcggactacgttttacgagtcccttgcaggcatgatccgggacggcacaccggttatgcgggcactggagttcatctgcgatgtggaaacggattttggtaaaaagaaagggcagtccggcctgtattttctggcgacagactgtatcgccagcatacgcagcagtggtcagctctctccggccctgaaggactgggtacccaaagatgaaattgccctgatccgtaacggtgaagaacgaggtgatatcgctgaagccatgtttcaggtcgtcaaaacggcaaaaggacgacaggagatgattagcagtctggtgagtgtctgcctctatccgctcatcctgctgacactctgtgtggtgaatatgtataacgttcatacccgggttattccgatgatcagcgcctttgcaccggaagaacgctggtcagtacagatggtcattctggccaaatcctccgagctggttatcggttatggtttgtggctgctggcaggactgctgctgctggcaattctcatcaggatgtcattcagtctgtataccggtccccgacgacggtatcttgatcgcatcccgccatggtccctgtatcagactttccatggcgtgaattacctttttaatatttcatccatgctgcagataaatattcctttatctcatgcccttaccagaatagaaaaacatgcagaacataaccgatggttaaaatcacgaataagtgctatcagaaaaaatgtcttatccggtcagtcactggcactggccatgaaaaactgtggttatgactttccgtcaaaatcctgtgtgaataatcttcttttaaattcagaaagggaggacagtgttgccagtatggcgctttatgcagaccgctggctggaagaagcaaaaaagaatgtcagaaaaagcggcattattattactgctatatcaggtctgctggtatttctcttcatcatcaatatggtcagtgccatttacggcatcagtgacatgctgaagcagtaa

SEQ ID NO: 4044 - protein, 364 aa, Shigella boydii
MKILERLNNTELELSGLNRWLGKKTFRRTTFYESLAGMIRDGTPVMRALEFICDVETDFGKKKGQSGLYFLATDCIASIRSSGQLSPALKDWVPKDEIALIRNGEERGDIAEAMFQVVKTAKGRQEMISSLVSVCLYPLILLTLCVVNMYNVHTRVIPMISAFAPEERWSVQMVILAKSSELVIGYGLWLLAGLLLLAILIRMSFSLYTGPRRRYLDRIPPWSLYQTFHGVNYLFNISSMLQINIPLSHALTRIEKHAEHNRWLKSRISAIRKNVLSGQSLALAMKNCGYDFPSKSCVNNLLLNSEREDSVASMALYADRWLEEAKKNVRKSGIIITAISGLLVFLFIINMVSAIYGISDMLKQ

SEQ ID NO: 4045 - DNA, 537 bp, Shigella boydii
atgagcgtcataacctcttcgtattcagaacataatattcgtcaccttcagaacgatgataaaggcatgaccctgctggaagttctcggtgttctggtcgtcgctgccattgttattggtgccgtgatgggactgatgtccgataccctgtcctcttcagacaaccagaaggaactcaaaaacctgcagacaatcgccaccaaaatgaaagcccagaaattccaggggcagtatacaggtactgactacgtcaaaatcctgaccgaaagtggtggcctgcctgccgatatgatcgccggtggtaataaggcgaaaaatgcctggggtggtgcggtaaccatcaaagtcagttcagataaatactcctacgttattgaatccagcaatgtgccgaagaaaaactgtattgatctggtcaccagcctgcgcagttcatccatgtttacaaaaatcaacggcaatgtgacgaataaagttgacccgtctacagtatgtaacgcagataaaactactatcaaactggaaaccaacagttaa

SEQ ID NO: 4046 - protein, 178 aa, Shigella boydii
MSVITSSYSEHNIRHLQNDDKGMTLLEVLGVLVVAAIVIGAVMGLMSDTLSSSDNQKELKNLQTIATKMKAQKFQGQYTGTDYVKILTESGGLPADMIAGGNKAKNAWGGAVTIKVSSDKYSYVIESSNVPKKNCIDLVTSLRSSSMFTKINGNVTNKVDPSTVCNADKTTIKLETNS

SEQ ID NO: 4047 - DNA, 486 bp, Shigella boydii
atgaacaggttatttatcctgacagtgattttttcactgttatgctcacttccttccgcacaggcatccccacaggacaaacaatatgatcgttgttttattaccgccggaaaacgttattccattgatccaggattactcaaaattattgcccgcagggaaagcagtctgaatccccgggccattaatcataacaggaatgacagaggaaaaattatcagtaccgattacgggataatgcagattaactccacacatattcccgggctgaaaaaaatgggcattatccggagtgagaaagatctgttgaataatgtctgcctgaatattcagaccggagcatggatcctcgcccggcattttcagcgatgcggcgtaaactgggaatgcctcggcagttataacgccggcttcagtaaaagtaacactcaccgccggatgaaatacgcccggcagatttacagcgcttacatgcagggacgttag

SEQ ID NO: 4048 - protein, 161 aa, Shigella boydii
MNRLFILTVIFSLLCSLPSAQASPQDKQYDRCFITAGKRYSIDPGLLKIIARRESSLNPRAINHNRNDRGKIISTDYGIMQINSTHIPGLKKMGIIRSEKDLLNNVCLNIQTGAWILARHFQRCGVNWECLGSYNAGFSKSNTHRRMKYARQIYSAYMQGR

SEQ ID NO: 4049 - DNA, 627 bp, Shigella boydii
atgctccagataatcccggcactgctggtcgccataaccgtggtaatacagtgtctggccgttcagatgagtcgctatcgactctcccggatgaatgcccgcccccctcaccatgggctggcgctgatgagcgggatgcttgcagctgccgccattatcctgcgtctttatcagaatgacagcgctgtcggggtgctgtttatgacgataatgaccggatgtatgacactgatgaccctgacggatgctgcatcctgccgtcttccccggcccttcaccatcatgtatctgataagcggcagcgcatttcgtctctggcagggagactggctgacaggcctgtgcagtgcagggttctggttcctgctgttgcttctgttcaggcaatacacctcttaccgcaggaaaacagaaaccataggcctgggcgatgtttttctgattgccggtattgccatctggtccccgccgggagacatcccctggattgtcgcaacggcagcaggcggagccttactttatctgtggtgtaacagacaacgacgcattaccagagaacttccctttgggccgtttctctgcgcgtcacagtacgcatttactttttatcccggtggcctttggtaa

SEQ ID NO: 4050 - protein, 208 aa, Shigella boydii
MLQIIPALLVAITVVIQCLAVQMSRYRLSRMNARPPHHGLALMSGMLAAAAIILRLYQNDSAVGVLFMTIMTGCMTLMTLTDAASCRLPRPFTIMYLISGSAFRLWQGDWLTGLCSAGFWFLLLLLFRQYTSYRRKTETIGLGDVFLIAGIAIWSPPGDIPWIVATAAGGALLYLWCNRQRRITRELPFGPFLCASQYAFTFYPGGLW

SEQ ID NO: 4051 - DNA, 390 bp, Salmonella enterica
atgaagtcttgttttgatactgacaaagcttttcatatgtcttttgatgaagtcactttcaacgctgacagaattcgctcaaaactggaactattatccgaagaactaatgccccgttgtggtcttgtttatgagctatatcagcgacgtttgagtgctgctattgataattttgtggccacattgccgacagaacaacatctactggtcctggaactggcccgtgaggagtttgattacctttccgcagaagagattgctgaagaaatacgccgtgactcagaacgcggctattgttgtcatggctttgaacgcaattgctgtcctctcggttgtggggatttgggcgatgattgctgcgatgctgctgatttgatggaggaaccgtga

SEQ ID NO: 4052 - protein, 129 aa, Salmonella enterica
MKSCFDTDKAFHMSFDEVTFNADRIRSKLELLSEELMPRCGLVYELYQRRLSAAIDNFVATLPTEQHLLVLELAREEFDYLSAEEIAEEIRRDSERGYCCHGFERNCCPLGCGDLGDDCCDAADLMEEP

SEQ ID NO: 4053 - DNA, 165 bp, Escherichia coli
atgatggcggggaaaatccccgctttttttctgccggtccccggacagagcacaaaggaagtcgccgccggctccgctttacccggccatgcaggcatggccttgtgggttttcagttatgtggccgccgtgtcgtgtgcgggctgtgccgtgcctccatcttag

SEQ ID NO: 4054 - protein, 54 aa, Escherichia coli
MMAGKIPAFFLPVPGQSTKEVAAGSALPGHAGMALWVFSYVAAVSCAGCAVPPS

SEQ ID NO: 4055 - DNA, 165 bp, Salmonella enterica
gtgtggataacagtggataagatccaagggtatgtggggacgttgcacggcaacctatgggaacgctgcacggcaacctatgggtttgttgcacggaataaatatgaaaacaccagtaatatcaatgtgttgagtggtgatttagaacgcctaacctgtctttaa

SEQ ID NO: 4056 - protein, 54 aa, Salmonella enterica
MWITVDKIQGYVGTLHGNLWERCTATYGFVARNKYENTSNINVLSGDLERLTCL

SEQ ID NO: 4057 - DNA, 306 bp, Salmonella enterica
atgcggcgcactaaccatcgaaacctcgtgaatgtcggtatcctgtctggcaggataccgctcatttcccttgttcagttcatcgccgtcgccgagcatctgaattttcggcatgcggccaaggcacttggtatcagccagtcgagcgtcagcgcgcgtgtgaaagcgctggaggataaccttggtgtcctgctatttgagcgccatgcgcggggcgttcggctaacagacgcaggcaggcacttcatggagcgtgtcacggcgggtgtcgatcaactcgatcacgcagtgaagaccgcggagtga

SEQ ID NO: 4058 - protein, 101 aa, Salmonella enterica
MRRTNHRNLVNVGILSGRIPLISLVQFIAVAEHLNFRHAAKALGISQSSVSARVKALEDNLGVLLFERHARGVRLTDAGRHFMERVTAGVDQLDHAVKTAE

SEQ ID NO: 4059 - DNA, 231 bp, Salmonella enterica
atgaaaaatagcttgtttagtactgattcgaatactggggtcacctttaccatctcgcctcacggccagggatgtaaactgtctgtagagcctgaatatcgtcgcaaaggaacacaaaattacgatggctggttccctcgatattacactaagccacaatacgctaaagcagcattgacacggtttcttggggaacctgttaattggttggattgtaatgaccataattag

SEQ ID NO: 4060 - protein, 76 aa, Salmonella enterica
MKNSLFSTDSNTGVTFTISPHGQGCKLSVEPEYRRKGTQNYDGWFPRYYTKPQYAKAALTRFLGEPVNWLDCNDHN

SEQ ID NO: 4061 - DNA, 255 bp, Salmonella enterica
atgacacaatatccgaccgggtcccgggcagagggaaataacggcaacgttaagctgccgctcatccgcccactcatggtgaaaggagtatacggagcacgacaggacacacgtgagagggctcacagccaattagcaatgaaaacgggtcaattcagcagcgaggcctggaggtacacctgcgaacgcctgtcgtgccagtgcagaaaattccctgcgaagcaggacagaaattgtgaagccagggggagataa

SEQ ID NO: 4062 - protein, 84 aa, Salmonella enterica
MTQYPTGSRAEGNNGNVKLPLIRPLMVKGVYGARQDTRERAHSQLAMKTGQFSSEAWRYTCERLSCQCRKFPAKQDRNCEARGR

SEQ ID NO: 4063 - DNA, 324 bp, Salmonella enterica
atgactattatctttaacagcgataaacaaactgatagcgagtcagctttcgagaaatggttgcttcaccatcctgatggctttgttgttaatttgaggaaagctgctaatggtttgtcgggtaaaagtgataaacataaaacttttattcacagtgctagttgtcattgtctctcttctacgaaaggtggatttactaatggagaatatcagaaaatatgctcatcttcttttgagaaagcagaggcgttagctaaatatatgactgggctagatgagataaaacgttgcagcttctgctttggtaaagataaagagtgctaa

SEQ ID NO: 4064 - protein, 107 aa, Salmonella enterica
MTIIFNSDKQTDSESAFEKWLLHHPDGFVVNLRKAANGLSGKSDKHKTFIHSASCHCLSSTKGGFTNGEYQKICSSSFEKAEALAKYMTGLDEIKRCSFCFGKDKEC

SEQ ID NO: 4065 - DNA, 258 bp, Klebsiella oxytoca
atgggcacaaccctaagcgaggctctggttttcaaattgttccggactgagaccgccacaggcactgtgacgacgccaccgattgtaatcacactcaatataattaaacactgctgtccgcattatttcccggctgacaaagtcctctccgtggatacattccaccttcagcgtatggaagaagctttccgcacaggcattgtcgtaacaacaacctctggcgctcatacttccccgcagattatggcgtttcagtaa

SEQ ID NO: 4066 - protein, 85 aa, Klebsiella oxytoca
MGTTLSEALVFKLFRTETATGTVTTPPIVITLNIIKHCCPHYFPADKVLSVDTFHLQRMEEAFRTGIVVTTTSGAHTSPQIMAFQ

SEQ ID NO: 4067 - DNA, 465 bp, Citrobacter freundii
ttgtgccagcggcagtggctgccgggagcacgttccagtcggaacagaaatcggttgtcgcgtagtaccaccacgagacagttatccggcgtgcagaaacgtcgggcaagctcatcggggtctgtcggtgttttcgttgaaaacagcctgcgtttgcagtgcgtgtcgacgaccagtacctgtagtcgtccgggatgttgctgtggcatcaaagactcctttcggaacgggaaaagaagcagctgtaccgtcgtaactgcacgtaccggttgcgaaaaaacggcacaagcgagtagtgacagaaagaatgtcggaaacggcaggaagggcggtacaggctgcgaagactggaaacggggtatgccggggattacacatcctcagtgtaatgtgatagtcgtctgttcctgtgttgcaccccagacgtcttctggcaagctgggcagcccgataaatagggtgtga

SEQ ID NO: 4068 - protein, 154 aa, Citrobacter freundii
MCQRQWLPGARSSRNRNRLSRSTTTRQLSGVQKRRASSSGSVGVFVENSLRLQCVSTTSTCSRPGCCCGIKDSFRNGKRSSCTVVTARTGCEKTAQASSDRKNVGNGRKGGTGCEDWKRGMPGITHPQCNVIVVCSCVAPQTSSGKLGSPINRV

SEQ ID NO: 4069 - DNA, 654 bp, Salmonella enterica
atgatagaacaactacagagtgattttttattctggatatttatttacttcctgatagtaggtttgcttatcagaaacattcatcttaccagaaaaattaaatccatcgaaaaaaacaaaatgttcccagcggaggaatatgctgtcctggacattgaacagcatatgtccaataaatatattgggcggctagtaacccgttttatgaagagaactaatggtgcacctttgttaattgtgtttccagaatacgataaaggagacaacaatgaagacaaaaattctccaccattccaacttgtaaaactaacatccaacatcaacaatattaaagaaatttattccaatgatgacttaaactgttttctgaataatatttcggcacaaaaaaatttatatacaacgcactctggacctagccaggcatggattgaacatgcatatcctttgcaacaagtaactattctcttacaaggcactcgtcatagtgaaagggaagatataatcagtcaacttaagattattctttccagactaaaaaatggagaaaatacaggttttgagcatgacgatgattttggatattcatttcagtatgatgccgcagcagtaggaaaatcatcatttttcgatgaagcggcaggaagaaaataa

SEQ ID NO: 4070 - protein, 217 aa, Salmonella enterica
MIEQLQSDFLFWIFIYFLIVGLLIRNIHLTRKIKSIEKNKMFPAEEYAVLDIEQHMSNKYIGRLVTRFMKRTNGAPLLIVFPEYDKGDNNEDKNSPPFQLVKLTSNINNIKEIYSNDDLNCFLNNISAQKNLYTTHSGPSQAWIEHAYPLQQVTILLQGTRHSEREDIISQLKIILSRLKNGENTGFEHDDDFGYSFQYDAAAVGKSSFFDEAAGRK

SEQ ID NO: 4071 - DNA, 1677 bp, Salmonella enterica
atgtatgtaattaatcaacagacaagggacaataatattcttacgttgcatgatgtttttaaaatctatcaaaatacaggggggcttcgtcttgtaaaaacagaggagaatgaaaagtatatctccattatcatttgtggcgtttttcgtattagaaaaaacaaaaagaataacaaaatcactttgtggggatacaagctaagagataagcacactggggtatggaccagaagaaattcatttcctggtaagatttttttattctggtctaaaaaatctgcatacgacatggacgactggttaaaatatgcgattagctacatcatcaaatcattgattgaggctggatattcaattgaagacaaactctatttgttccgcgttggagatgaagaggaacacagtgagagtcgttatgtttccacactatatccactcagtgtatataactcgtattcttatggaagatatggcattattcattgccttggtaaaacagcatcattcaactaccccgataacgtacaatatatcagcagacatgatttactcgaagagataaaaaacaaaatttatcacagagcattaaaaattataggggtggataatgagcttaatgcttcaaaagcattgagcaaagccatatggataatggtagataaaaagatatttgcacaatattccagagcttcacattgttcgatagcttacaattcaattcgtcaggcattatttgaggactatctggatttttcaaagcgaatccatattctggatgatatagatttttgcggattgtggcctatggttggtcttctaagacaacaacataaaaagggtcagtttatgctatcaggaaagacaaaagagttatatgaaagactttgttttccctatgagcttagttatggtgagttcagaagtttacgacatgttagtttatcattagtatatgctttaatttataaccatgataatgcatcattcagattaacagtcagattattacgccatccacttatcaagaactatcctgtaagagcaatttactggattatcgattatattagcattcgagcttacccagaaaaagaaaatgatatttatcgtatatgctcaaaatggcttgaatatcatcgtgatttatttaaaaacattggcttttatgatcgtaatactgaatccaggcaaacatcacgctgggaaatggaaacgaatcagttgtgtcatgcaattgactggttgttagcagaagaacggttaattcataaaaaccaggagtggccttctttctggagactatctgatgaatggacgcgacaagtgaagaataacgttattcccgtaatcccaaaatggaaaggaactgggataaactggcagaaagttgataacggtgtaaatgaattaattacatttgatgctctgtgtcaggaaggtcaggagatggaacattgcgttgccagttatgcagactggtgtgcatctggagaatatattgcaatttcagtcctgatggataatgaaagagccactcttggactttcacgaaaagaacatgatttaacctatcagtttgaccagatgagaggtattcgtaatcaggctgtttccagaaacatgctaattaaaggcaggcatattttaaaaataatcaactcatcactaaaaagataa

SEQ ID NO: 4072 - protein, 558 aa, Salmonella enterica
MYVINQQTRDNNILTLHDVFKIYQNTGGLRLVKTEENEKYISIIICGVFRIRKNKKNNKITLWGYKLRDKHTGVWTRRNSFPGKIFLFWSKKSAYDMDDWLKYAISYIIKSLIEAGYSIEDKLYLFRVGDEEEHSESRYVSTLYPLSVYNSYSYGRYGIIHCLGKTASFNYPDNVQYISRHDLLEEIKNKIYHRALKIIGVDNELNASKALSKAIWIMVDKKIFAQYSRASHCSIAYNSIRQALFEDYLDFSKRIHILDDIDFCGLWPMVGLLRQQHKKGQFMLSGKTKELYERLCFPYELSYGEFRSLRHVSLSLVYALIYNHDNASFRLTVRLLRHPLIKNYPVRAIYWIIDYISIRAYPEKENDIYRICSKWLEYHRDLFKNIGFYDRNTESRQTSRWEMETNQLCHAIDWLLAEERLIHKNQEWPSFWRLSDEWTRQVKNNVIPVIPKWKGTGINWQKVDNGVNELITFDALCQEGQEMEHCVASYADWCASGEYIAISVLMDNERATLGLSRKEHDLTYQFDQMRGIRNQAVSRNMLIKGRHILKIINSSLKR

SEQ ID NO: 4073 - DNA, 207 bp, Salmonella enterica
atggtgaatggtttgttgcttttcgctgttagtgtattagtttttttagtgataatcctgatgttacatttgagaacagccagtcttctttctgaatgctctgaatatcgcacgaaatgtgataatctctatcatctatgccagatgcaagagaaagagttagaacatctacgtgcactcattgatgcgcataacatagattattag

SEQ ID NO: 4074 - protein, 68 aa, Salmonella enterica
MVNGLLLFAVSVLVFLVIILMLHLRTASLLSECSEYRTKCDNLYHLCQMQEKELEHLRALIDAHNIDY

SEQ ID NO: 4075 - DNA, 339 bp, Salmonella enterica
atgaaatttattattttaaaaaaggataaagatagcacaattgccagaaacgactctgttttccctgttaacaatttctttgtcgttttaactaccgtgtcttccgtggctaactctttcggaatagtgtcttccctggctaaatctatcggaatatcttttcccacgggcaatgttattgagacgtgttttttcggtatgttttcactattactggctgctttcagttttgtaagtacaatggggctggcgaacgcagtcccccccattaaaaatgtgtttccgcttttgtttttcgttcttgtcttaattactaattataatatttacttccgataa

SEQ ID NO: 4076 - protein, 112 aa, Salmonella enterica
MKFIILKKDKDSTIARNDSVFPVNNFFVVLTTVSSVANSFGIVSSLAKSIGISFPTGNVIETCFFGMFSLLLAAFSFVSTMGLANAVPPIKNVFPLLFFVLVLITNYNIYFR

SEQ ID NO: 4077 - DNA, 207 bp, Salmonella enterica
atgaaaacaaaacaagactggctctttcagttaagacgttgctcaacactcgacacacttgaaaagattattgaaaaaaaccaaaacagcctccctccttctgagcttgagtcgtttaatgccgccgccgatcacaggcttgcagaactcacaatgaataaactctacgataaaatccccccatccgtctggaaatatgtatattag

SEQ ID NO: 4078 - protein, 68 aa, Salmonella enterica
MKTKQDWLFQLRRCSTLDTLEKIIEKNQNSLPPSELESFNAAADHRLAELTMNKLYDKIPPSVWKYVY

SEQ ID NO: 4079 - DNA, 432 bp, Salmonella enterica
atgtttttcctctacgatacctacaatttcttctactacctgataaagttaattgtcattcagccacaatatatttgtgtctatatgatattcttttttttcaatgcagggatagcatatagcatcaccaatgatatcgaggatcaagtatgtcgatggcttttattcgtaagtatgttacatgctctgatgattccccttgcaattatcatgccaccacaggaaatacttcaggaaacagagaaaaggcaggaactacatgaatcaatacccaaaacatgcaaattaaaggcactggatgctcaacaaggtggtttattcggcgttgataaagatgaatgggtattccctgacaataaatcattctatctgcctgaaaagtaccgtccagaaaacaggattacggaactagccatgatgaaagaaggataa

SEQ ID NO: 4080 - protein, 143 aa, Salmonella enterica
MFFLYDTYNFFYYLIKLIVIQPQYICVYMIFFFFNAGIAYSITNDIEDQVCRWLLFVSMLHALMIPLAIIMPPQEILQETEKRQELHESIPKTCKLKALDAQQGGLFGVDKDEWVFPDNKSFYLPEKYRPENRITELAMMKEG

SEQ ID NO: 4081 - DNA, 168 bp, Salmonella enterica
atgaagatattcaaattgtttgttctttgtatcccccttctgtttagtctttttttcgctggctacggcattttgtcaaaaaatccatttgaaacactaccgtgtctgtccgccagtgctttttgcctttttctgtttgacatactgaggcgatcatttatgaagtga

SEQ ID NO: 4082 - protein, 55 aa, Salmonella enterica
MKIFKLFVLCIPLLFSLFFAGYGILSKNPFETLPCLSASAFCLFLFDILRRSFMK

SEQ ID NO: 4083 - DNA, 3201 bp, Enterobacter cloacae
atgatgcgccgcgccctgctgctgctgttcctgtggtgcggtctggcgcaggcggcggagccggtgcgctatcagctggtcagcaatctgaatacccccgagaatatgctgatcgtcggcgagaaaaacccctggcgcgaccgtacgctgcgcgtcggcatcgtcagtgagaacaccagcccgtacaacatcatcgtggatgacgatctgtatgggctgaatgccgactacctcggctatatccagcaggtgaccggcattcgcttcgccatttacggctttgccgatctgacgcagctggagcaggcgctgcacgacggcaagatcgatctgctgtacggcatcccgcagagtgaggcgctgcacggcctggcgatctctcagccctattacgtcagcaacctgcgcgtattgcgcgatcgcagcaacgatcggccggtgatgctcaactccgccaacgcccgcgtcgcgatcggcgcgctgaccgacatgcagtccggcggcgctctgcaggcggtcgcgtcgcagatccagcgctacgacaacaatctgcaggcggtctactcgctgctcaacggcagcagcgactactttatcgccgacgaggccagcgccagctttatcatcgatcagctgcagctcggccagctctatcagattgaaagcaacgagaacctgggcaacctgtccttcgtgttcgccgccgacgactcgcggctgatagacacgctggacaccgccatcgccgacgcgccgatggagctgatgaacgccctgcagggccgctggagcaagaagatccccagctacctcgacaccggcaatgccgatctgacgacgatggagaagaattgggtggcgagccaccgcgtggtttactacgccgccatcgaaaacaacttcccgttcgcctaccgcggctccgacggccagccgcgcggctacgccatcgacattctcaacatcatcgcgcaaaacaccgggctgcgtttcgcgccgctgtgggcgcgcaacgccgagcaggccgatctgctggtgcagtccggccaggccagcttccgcgccgccctgccgctggcgcgcggcgtcaaggcgcgctacggcgccagcatgccgatccaccgttcgctgtggggggtttacgtcggccagcacgccaacggcatttccacctggagcgatttggccggcaagcgcatcggcgtgctgcagggcgatttggcgcaggggctggtgccggaacaggagcaaaccatcagcttcgccgacagcaagtcgatgtacgacgcgctggccaacggccagctggatgcgctggtggataacgtcatctccgccaactttttggcgctgtcgcgctattccggcgccatcaagctggcctttgccgccaacaacatcccctacccggtggccttcggcgtgcgccgcgatcaacctcttctgttggcgatccttgataagaacctgatgcagatcccggcggacaccctgcaatcgctgcgcgacgagtggatcgtcgatcgcagcaacctgatcgacgcggtgaacgacaaccgcatgccgccgcagaccacctggctgctggcgctgctggccgccgccaccgtgctgctgctggcgctgacgctgcgccgtttcatgctgcagcgccgtgaaaaacgcgaacgcgaagaactcgagcacgcgcgccgccgcgccgaagcggaaaaccgcatgaagagcaaattcctcgccaccgtcagccatgagctgcgcacgccgatgcacgccatcctcggcctgctggagctggagctcaaacgccaacccgcgccggaaggcctgccggtgatatacagctcggcctcatcgctgctcaacctgctcaacgacctgcaggatcacgcgcggttggaaaccggctcgctgacgctggcaccgaaaccggtggtgctgcgcccctgggtagcgcgcatcgacgccctctaccggccgctgatcggcgagcggccgttgacgctgagcgtggtggcggatccggcgctgccggaggcggtgattattgatggtgagcgtttacttcaggtggctaacaacctgataaacaacgcgataaagtttacgccgcgcggcgccattcaggtcgagatcggctggcgcgcgcaggatgagcggcagggggaattgcatctgacggtgaacgacagcggctgcggtatcgccgccgatgaaatagacaagctgttccaaccgttttaccgcgcgcgcggcgcgcaacgcatctcggtgcagggcaccggtttagggctgtcgatctgcaaagagatcgtcgaacagatgggcggccgcatcgagctgcgctcgcagccgggcgtcggcacccgcgtcgaggtcgcgataccggtcgagctgagcggcgcggcgccggttgccgccccggaggaaagcccctttgctatgccgtcttccgccttgcgtaccgcgctgatcgacgatcatcccaccaatctgttgctgatggaacgccaactgcgccacttcgggctgcaacccgcccgcttcgaacaaggctatacgctgttgaaggcccagcgccgtcaaccgttcgatctgctgtttatcgactataacatgccgcgcccggacggcctgacgctggccaggctgatccgccgcgacgaacagcggctgcaacgctcgccttgccgcatcgtgctctgttcggcagacgtgcaggagtttacccgcattcctccggggctggtggcgatcgaccacttcctgaccaaaccgatttcactggcggcgatcggccaggtgttggctcagcaaccgcaggtgcaggaagcaaagtcagtccttactgacctgcgacaaacgctggccgaaatggcgggtggcgatcgcgccatgctgcagcggctggcgcagacgctcggcgatacgctgcggcaagaccggcagcggctcgcggacgccgtcgccgcgaacgactggccgcgcctggagcaggcggcgcaccgcatcaagggcagcctgctgatgctgcaactgccggaagccgcgcagctgtgccagcagctggtggaaaccgcacgtcggggcgcgcttgccgccgccgcttatactaaattaaaggcgttagtggcgcagatagtgccggagctggacgctctgctcgccgccgccccctctttggctatgcataaggatgaataa

SEQ ID NO: 4084 - protein, 1066 aa, Enterobacter cloacae
MMRRALLLLFLWCGLAQAAEPVRYQLVSNLNTPENMLIVGEKNPWRDRTLRVGIVSENTSPYNIIVDDDLYGLNADYLGYIQQVTGIRFAIYGFADLTQLEQALHDGKIDLLYGIPQSEALHGLAISQPYYVSNLRVLRDRSNDRPVMLNSANARVAIGALTDMQSGGALQAVASQIQRYDNNLQAVYSLLNGSSDYFIADEASASFIIDQLQLGQLYQIESNENLGNLSFVFAADDSRLIDTLDTAIADAPMELMNALQGRWSKKIPSYLDTGNADLTTMEKNWVASHRVVYYAAIENNFPFAYRGSDGQPRGYAIDILNIIAQNTGLRFAPLWARNAEQADLLVQSGQASFRAALPLARGVKARYGASMPIHRSLWGVYVGQHANGISTWSDLAGKRIGVLQGDLAQGLVPEQEQTISFADSKSMYDALANGQLDALVDNVISANFLALSRYSGAIKLAFAANNIPYPVAFGVRRDQPLLLAILDKNLMQIPADTLQSLRDEWIVDRSNLIDAVNDNRMPPQTTWLLALLAAATVLLLALTLRRFMLQRREKREREELEHARRRAEAENRMKSKFLATVSHELRTPMHAILGLLELELKRQPAPEGLPVIYSSASSLLNLLNDLQDHARLETGSLTLAPKPVVLRPWVARIDALYRPLIGERPLTLSVVADPALPEAVIIDGERLLQVANNLINNAIKFTPRGAIQVEIGWRAQDERQGELHLTVNDSGCGIAADEIDKLFQPFYRARGAQRISVQGTGLGLSICKEIVEQMGGRIELRSQPGVGTRVEVAIPVELSGAAPVAAPEESPFAMPSSALRTALIDDHPTNLLLMERQLRHFGLQPARFEQGYTLLKAQRRQPFDLLFIDYNMPRPDGLTLARLIRRDEQRLQRSPCRIVLCSADVQEFTRIPPGLVAIDHFLTKPISLAAIGQVLAQQPQVQEAKSVLTDLRQTLAEMAGGDRAMLQRLAQTLGDTLRQDRQRLADAVAANDWPRLEQAAHRIKGSLLMLQLPEAAQLCQQLVETARRGALAAAAYTKLKALVAQIVPELDALLAAAPSLAMHKDE

SEQ ID NO: 4085 - DNA, 606 bp, Enterobacter cloacae
atgccctctctgttattagttgatgaccacccggtggttcatgtcgcactggaagcggcgctaatgaaatcatcccgcccctaccgcctgcaggcggcgcaggacgacgtccaggcgctggccctgctggccgaggccgctttcggcctggtgatcctggatatcggcctgccgcaggtcgacgggctgcagctgttgaaaaaaatccgccgccgctacccgcagcagccgatcctgatctataccgcgcaggaggccgaggtctatgcgcgcatggcgcatgccgccggcgccaacggtttcgtcaacaaaggcagctcgttggcagagttgttgcaggcgatcgagcaggtgctggacggtgaaacccacttccccgccgccgcgctggctgaagaggcgccgacggcggacggcgggctgctcacccccaaagagctcgaggtgctgggcttgttgagccaggggctgtccaacctgcagatcgccgatcggctgcacatcagcaacaagaccgtcagcacccacaagaagaacatccagcgcaaaaccggcgccggcaacctgctggagctggtggcggtgtttaaagagctggcgccatga

SEQ ID NO: 4086 - protein, 201 aa, Enterobacter cloacae
MPSLLLVDDHPVVHVALEAALMKSSRPYRLQAAQDDVQALALLAEAAFGLVILDIGLPQVDGLQLLKKIRRRYPQQPILIYTAQEAEVYARMAHAAGANGFVNKGSSLAELLQAIEQVLDGETHFPAAALAEEAPTADGGLLTPKELEVLGLLSQGLSNLQIADRLHISNKTVSTHKKNIQRKTGAGNLLELVAVFKELAP

SEQ ID NO: 4087 - DNA, 1221 bp, Enterobacter cloacae
atgacctattcctttcaggacgaaagaattatgacaagcaatacctcgcagccgctggggctgcaccggattaaattccatgggaaaggcggcgagtacttcgcgatttggttggttaacgcattattgaccatcgtgacgctgggcatctattccgcctgggcgacggtgcgccgccgccgctatttttacggcaacacggaattggacggcgatcgtttcgactaccatgcgcagccgctgcaaattctgaaagggcggctgttggtgatcggcggcctcatcgtattttatatcctgttggcggtaacgccactgctggggctgctggctttgctggtgttgcttgccctgctgccgtggatcgttatccgcagctggcgctacaatgcgattatgtcgagctatcgcggcgtgcgttttaattatgtttgccgcaccgggcgcgcttattgggcgttactgttctgcccgctgttactgattatcgggctttatgtcgccttaatcattttgctcagcattggcagcggttttgacagcatcaacgccatcggcctgatgttggtgttgacgctgctgttggccgtgccggcattcgccgccgtcaacggtattattagcgcgctgcagcacgatctgtacgttaataacctgtttttcgggaatacgccgtttattgccgagctgaaaaagtcggcctttatcaaatttgccttgatcggcctgctcattttcctgccgtttatgttggcggcgctggtgtgtatggggtcgttcattctgtcgctgtaccaaatggtattgatgggcatgctgacggatgaaaccgccgatttgctggtgttggaaaatattggcagtctgctgctgatgatggtggtgctgctgattggcgccttgatcgccggcagctatcaggtcgtcgcccaacgcaactatctgtttaatcaggcgacgctgaacggcaacgttaaactgcgctcttccatgcaaacgctgccgtatatggggctgttgatcaccaataccctgatcaccctgttctcgctcggtttcgccgtgccggtggcggaagtgcgccacgcccgttatctggcggagtgcacggcggttgaaggcgatctggcgttgctggacatcgcggcacatcaggaaaccgccaacagcgcggtggccgaagaagcggtgcaggcgctggatctgggcggcagcttctga

SEQ ID NO: 4088 - protein, 406 aa, Enterobacter cloacae
MTYSFQDERIMTSNTSQPLGLHRIKFHGKGGEYFAIWLVNALLTIVTLGIYSAWATVRRRRYFYGNTELDGDRFDYHAQPLQILKGRLLVIGGLIVFYILLAVTPLLGLLALLVLLALLPWIVIRSWRYNAIMSSYRGVRFNYVCRTGRAYWALLFCPLLLIIGLYVALIILLSIGSGFDSINAIGLMLVLTLLLAVPAFAAVNGIISALQHDLYVNNLFFGNTPFIAELKKSAFIKFALIGLLIFLPFMLAALVCMGSFILSLYQMVLMGMLTDETADLLVLENIGSLLLMMVVLLIGALIAGSYQVVAQRNYLFNQATLNGNVKLRSSMQTLPYMGLLITNTLITLFSLGFAVPVAEVRHARYLAECTAVEGDLALLDIAAHQETANSAVAEEAVQALDLGGSF

SEQ ID NO: 4089 - DNA, 1035 bp, Enterobacter cloacae
atgatcctcgagggcgcctatcagttgccggggcgggccgcacgtgaggcggctcgcctgctggtgaacgaaagcggcgagggcgtgacgctgcagcggcaggatgagcaacgttacatccccttggccgacattaccgtctctgcggcgctgggcaatatcccgctgacgctgaccttcaaggatggcgcgcgctttgtgccggatgacgatgcggcctttcgccgctggttctatcagcgtcgttcgccgggctgggtgcatcgcctggagcgccacaaacgcggcgtcgccgtggcgctgctgatgacgctgctggcggtcgtggcctacgttaacgtcgtgctgccgtgggcgagcagcgagatcgccatgcgcatccctacctcggtggaacagacgctgggcgaacacacgcagacgtttttgagccaaagcggctttgaaccctccgcattgccggccgagcggcagcaggcgttgcagcagctgttccggcaggtgatgccggccgagatgcgccaggagcgtacgccgctgtcgttgaagctgatggcggcgcccggtgcgccgaacgcctttatgttgccggacggcacgctggtgctcagcgatgggctggtcgccctgtcgaaaaacgacgatgggctggcggcggtgatgctgcatgagatggggcatcacgcttatcgccatccgatgcgcatgctggtgcgttcgtcactggtggcgttgacgctgatgtggatgaccggcgacgtcagcggcatcggcgacacgctgctgcagtctgcgtccttcgtgaatgagatgcagttttcccgcggcatggagcgtgaggcggatgcgtttgcgatagcggaaatgcagcgccaggggcgttcgctggcgcaaatggcggcgatctaccgcgcgttggcgcaggcgcctgaacgcgaaacggctgacggctgggcgctgccggcctggctcagcacccatccggcgatgcaggaacggctggacgcggtgaacgaggcgatggcgcagcagtaa

SEQ ID NO: 4090 - protein, 344 aa, Enterobacter cloacae
MILEGAYQLPGRAAREAARLLVNESGEGVTLQRQDEQRYIPLADITVSAALGNIPLTLTFKDGARFVPDDDAAFRRWFYQRRSPGWVHRLERHKRGVAVALLMTLLAVVAYVNVVLPWASSEIAMRIPTSVEQTLGEHTQTFLSQSGFEPSALPAERQQALQQLFRQVMPAEMRQERTPLSLKLMAAPGAPNAFMLPDGTLVLSDGLVALSKNDDGLAAVMLHEMGHHAYRHPMRMLVRSSLVALTLMWMTGDVSGIGDTLLQSASFVNEMQFSRGMEREADAFAIAEMQRQGRSLAQMAAIYRALAQAPERETADGWALPAWLSTHPAMQERLDAVNEAMAQQ

SEQ ID NO: 4091 - DNA, 348 bp, Enterobacter cloacae
atgcgtctgattactgcacttccattgctggcgggcttaatgctgagcaccaatctgatggcggccgacgcgacgacggcgacgaaaacgccttcgccggcgcaggcggctcaacagaaacgcatgaccgactgcaaccagcaggcatccaccaaatcgctgaaaggcgccgatcgttccaccttcatgagcacctgtctgaaatccgaaggctccgccgcgacgggcaaaaccctgacgccgcagcagcagaaaatgaagaactgcaacgccgacgccaagaccaaagatctgaagggcgacgcgcgtaaaaccttcatgagcaactgcctgaaaaaatcggcctga

SEQ ID NO: 4092 - protein, 115 aa, Enterobacter cloacae
MRLITALPLLAGLMLSTNLMAADATTATKTPSPAQAAQQKRMTDCNQQASTKSLKGADRSTFMSTCLKSEGSAATGKTLTPQQQKMKNCNADAKTKDLKGDARKTFMSNCLKKSA

SEQ ID NO: 4093 - DNA, 1152 bp, Enterobacter cloacae
atgagcctgaaaccgcttacccattccctgtttaccgaacacttcggctacgcgccggcgttgaccatccaggcgccggggcgggtgaacctgatcggcgagcataccgattacaacgacggcttcgtgctgccctgcgccatcgattaccaaaccgtcatcgcctgcgccaagcgcgacgaccgccagatccgcgtgctggccgccgattatcagcatcagcaggatcaattctcgctcgacgatccgatcgtcagccaccccgatcagcgctggtcggactatgtgcgcggcgtggtgaagcaccttcagcgccgcaacaccgacttcggcggcgcggatctggtgattgccggcaatgtgccgcagggcgcggggctcagctcctccgccgcgctggaagtggcggtgggccaggcgctgcaggcgctctatcagctgccgctggacggcgtagcgctggcgctgaacggccaggaagcggagaaccagttcgtcggctgcaactgcggcatcatggaccagctgatctccgcgctcggccggcgcgacagcgcgctgctgatcgactgccgctcgctggaaacccgtgcggtgccgatgccggacaacgtcgcggtggtgatcgtcaactccaatgtgcaacgcgggctggtggacagcgaatacaacccccgccgcaaacagtgtgaagacgcggcgcggttcttcggcgtcaaggcgctgcgcgacgtcagcctggaacagttcgaagcgcgtcaacatcagttggatccgctggtggccaaacgcgcgcgccatgtcatcagcgagaatgcccgcacgctggcggcggccgacgcgctggcggcaggcgatctgcaacgcatgggccagctgatggcggagtcccacgcctcgatgcgcgacgactttgaaatcaccgttccgccgatcgataagctggtcgagatcgtcaaagcggcgatcggcccgcgcggcggcgtgcgcatgaccggcggcggctttggcggctgtgtcgtcgcgctgatgccgcaggatctcgtggagacggtgcgtgccgccgtggcgcacgagtatccgcggcaaaccggcggattacaggaaaccttctatgtctgccaggcttcgcaaggcgccggcctatgctga

SEQ ID NO: 4094 - protein, 383 aa, Enterobacter cloacae
MSLKPLTHSLFTEHFGYAPALTIQAPGRVNLIGEHTDYNDGFVLPCAIDYQTVIACAKRDDRQIRVLAADYQHQQDQFSLDDPIVSHPDQRWSDYVRGVVKHLQRRNTDFGGADLVIAGNVPQGAGLSSSAALEVAVGQALQALYQLPLDGVALALNGQEAENQFVGCNCGIMDQLISALGRRDSALLIDCRSLETRAVPMPDNVAVVIVNSNVQRGLVDSEYNPRRKQCEDAARFFGVKALRDVSLEQFEARQHQLDPLVAKRARHVISENARTLAAADALAAGDLQRMGQLMAESHASMRDDFEITVPPIDKLVEIVKAAIGPRGGVRMTGGGFGGCVVALMPQDLVETVRAAVAHEYPRQTGGLQETFYVCQASQGAGLC

SEQ ID NO: 4095 - DNA, 1053 bp, Enterobacter cloacae
atgacagaatttaaccctatcgatcatccgcaccgccgctacaacccgctgagcggccaatgggtgctggtctcaccgcaccgcgccaagcgcccctggcagggccagcaggaggccgtcccgacggaaacgctgccggcgcacgatcccgactgtttcctgtgcccgggcaacgcgcgcatcaccggcgatcgcaatccggattatcgcggcacctacgtcttcgccaatgatttcgccgcgctgctgagcgatacgccgccggcgcccgacagccaggatccgctgatgcgcagccagagcgcgcgcggcgtcagccgggtgatctgcttctctcccgatcacagcaagaccctgcccgaactgacgctgccggcgctggagcaggtgatcgccgcctggcaggcgcaaaccgatgagctgggcaagcactacccctgggtacagctgttcgaaaacaaaggcgcagcgatgggctgctccaacccgcacccgcacgggcaggtctgggccaacagttttctgccgaacgaggccgaacgcgaagatcgcctgcagtacgagtattttcaagaacatgcctccccgctgctgctggactacgcgcagcgcgagctggccgccggcgaacgcatcgtggtgaacaccgagcactggctggcggtggtgccctactgggccgcctggccgtttgaaacgctgctgctgccgaaagcggcggtgcagcgcattaccgatctcagcgcggcgcaaagccaggatctggcgctggcgctgaagaagctgaccagccgctacgacaacctgttccagtgctccttcccctattcgatgggatggcacggcgcgccgttcaacggcgccgacaaccgacactggcagctgcacgcccatttctatccgccgctgctgcgttcagccagcgtgcgcaaatttatggtcggttacgagatgctggcggaagcccagcgcgatctgaccgccgaacaggccgcagagcgtctgcgcgccgtcagcgatattcattaccgtgaagccggagcccaagcatga

SEQ ID NO: 4096 - protein, 350 aa, Enterobacter cloacae
MTEFNPIDHPHRRYNPLSGQWVLVSPHRAKRPWQGQQEAVPTETLPAHDPDCFLCPGNARITGDRNPDYRGTYVFANDFAALLSDTPPAPDSQDPLMRSQSARGVSRVICFSPDHSKTLPELTLPALEQVIAAWQAQTDELGKHYPWVQLFENKGAAMGCSNPHPHGQVWANSFLPNEAEREDRLQYEYFQEHASPLLLDYAQRELAAGERIVVNTEHWLAVVPYWAAWPFETLLLPKAAVQRITDLSAAQSQDLALALKKLTSRYDNLFQCSFPYSMGWHGAPFNGADNRHWQLHAHFYPPLLRSASVRKFMVGYEMLAEAQRDLTAEQAAERLRAVSDIHYREAGAQA

SEQ ID NO: 4097 - DNA, 819 bp, Enterobacter cloacae
atgtggggcgtactggctgcttcgttatttttcttgccgtttaaccggctgatagcctgggttatcctggccgcctcggcgggcatggggctttatcatggggtgttgacgccgctcagcctgggttgcctgttggccatcgtggcgctggcggggctgcgtcaccattttcgcgagcggcgtagtctggcgatcgcgttcgaagggttggtggtcgccggctgcgtggcgctgttcttgcacctggtgccgggcatccacaatcaactgatgatcgacggtgaaaaagccggcccgctcagcgcgccgttcactatgtattacaacttcgacaaggcgatggtgcccttcctgctgttcgcctgcttgcccacgctgttttccgctgaacgcggcggcaacgtcggcaaagcgggctggattgcgctgctgctggccgtgccggcgctgttgctgctggccgtggcgctgggcggcttaaaaatcgagctgcatgcgcccgcctggatcctgcctttcgtgatggcgaacctgttcttcgtctgtatggccgaagaagcgctgtttcgcggctacctgcagcagcgcctcagccagtggctgggcgcctggccggcgctgatcgtcgcttctctggtgttcggcgccgcgcatttggctggcggcatgctgatggtaatcttcgcgacgctggccggggtgatctacggcctggcgtggatgtggagcggccgcctgtgggtgccgattctgttccatttcgggcttaatctgacccatctgctgttctttacctacccgctgtatcagcatccttaa

SEQ ID NO: 4098 - protein, 272 aa, Enterobacter cloacae
MWGVLAASLFFLPFNRLIAWVILAASAGMGLYHGVLTPLSLGCLLAIVALAGLRHHFRERRSLAIAFEGLVVAGCVALFLHLVPGIHNQLMIDGEKAGPLSAPFTMYYNFDKAMVPFLLFACLPTLFSAERGGNVGKAGWIALLLAVPALLLLAVALGGLKIELHAPAWILPFVMANLFFVCMAEEALFRGYLQQRLSQWLGAWPALIVASLVFGAAHLAGGMLMVIFATLAGVIYGLAWMWSGRLWVPILFHFGLNLTHLLFFTYPLYQHP

SEQ ID NO: 4099 - DNA, 573 bp, Enterobacter cloacae
atgtccgctgcgttgattatcatcgacctgatcgaggatctgatcgggcccaaagggcgcgccaaccactgccgcgaacaggtgacggcaagccacctgctcgccaacgtcaatgccgccgcggcctacgcccgggtgcgaaaaatcccggtgatttgggtgcggacgggatttgccgacgattatcatgacatcccgctccactcgccgctgttcaaccatttgaaacagataggcgcgctgcggctaaacggcccgggctgccgctgggcgcccgatctgcatcaggaggagaccgatctgcagtttgataaaacggcggtcagcgccttctccggtaacaatttgttagcctggctgcggcaacatcggtgccatcatctgctgctggcgggcgtcagcacgtcgctcgccatcgagagcaccgcgcgtcaggcgcacgacgccggcttccaggtgaccgtgctgcacgatctgtgcgcagcccccacgcaggagctccaccagcagagcctggacaccctgcaaaacctggcggaagtcgcccgttcgcaggcctggatgcaaggctga

SEQ ID NO: 4100 - protein, 190 aa, Enterobacter cloacae
MSAALIIIDLIEDLIGPKGRANHCREQVTASHLLANVNAAAAYARVRKIPVIWVRTGFADDYHDIPLHSPLFNHLKQIGALRLNGPGCRWAPDLHQEETDLQFDKTAVSAFSGNNLLAWLRQHRCHHLLLAGVSTSLAIESTARQAHDAGFQVTVLHDLCAAPTQELHQQSLDTLQNLAEVARSQAWMQG

SEQ ID NO: 4101 - DNA, 2163 bp, Enterobacter cloacae
atgagtacgacacgccggcgtcttgtcacgcccagaaaatcgttatgccttgccgccgcctgggtcggcggcgcactgacggcgccgttggctttcgccgccgactgcgataaatcccgcaatgccacgggatgcgaagaacagctcaccgtggaggcggcggcccccgccgggcgctacgatgcgttgagcgccgtgagccgcagcgcttcgcagcttgggctgaccgctcgggagacgccgcgcagcgtcgatatcatcagcgcaagagcgatccaacagcggggcgatcgctcgctggccgccgccgtcgagcacgccactggcctgtccggcgtcgcttcgccgacgctgtccaacaacttttccgcgcgcggtttccggccgatcgcctggctgtataacggcgtggagatgcccggcagcacgctgcagctgggcgatccggcgcattacgacagcatcgagatactgcgcgggccgggatcggccttgaacggcctgagcgccgcgggcggcagcgtcaacctgatctcgcggcggccgaccttcagccgccagccgcttgagctcgattatggcttcggcagctaccgcagccagcgtctgcatctgggggccggcggcgcgctggtggacgatgcggtggcgtaccggctggacgtcagcggcaacgacagcggcagcaacgtgcagtacgaacgcgatcggcagaagcgggtttccggctcgctgctgtttaagctgacggacgatgcgctgttgacgctgagcctggaccgcatgctcaaccgcaccaacaacccttactacggcacgccgctgctggacgggcgcattgccggcgagctgcgcgacatcaattacaacaacctgaccgacagccgcatccagagcaacgccaccgcatttcaggccagtctggactggtttatgacgcccgaagtggagtggcataaccaattctattactacagcggctttcgcgagtggcgcaacgtcgaacgctttcgcgtcgcggcggcggcccggcccggcgacgtcaaccgcgactccttcggcgccctggcgcacgacgacgatctgatcggcaaccgcagttcgctggtgttcgatcgcgccatcgccggtttcgataaccggttgctggtcggcctcgatctgagcaagcggcattttcagtactactccaacggcttccccggatccgaagacgtgccgcttggcgcgccgccccgagagccgttcgcccagggaaccgaccgccaacgcgcgccggtgcgccacgttacccagaaccagtacgccgcctttcttgaagatcgcttcagcctgaccgagcgtttagcgctgctgggccagctgcgctacaaccatatgaacatggactggcgcttccaggggccgcaggaagagagccgcgcgcatacctacgttttcagcacctggagcctgggccccagctatgcattgaccgataacctcacgctctacgccaactacaccaccggccaggagccgggcaacgatctgttcttcctcagcccaacgcagaccgatctgccgctgacgcgagcgcgccagtgggaggccggcgctaaagggcagttctggggtaacaaaggcgaggcaacgctggcgctgtacgaactgcgcaaggacaacctgtttgtgcccgacgcgcagcggccggatgcgttgaacgcggtaggcaggcagacgtcgcgcggcatcgagcttggcgtggtgctgcgtcccgacgagcgctgggagctggccggcaacgccgcctacacgcatgcccgctacgacgactatcgcggcggcagcccgctgcgcagctacaacggcaatcgcccggcctatatcccggactggactgccaacctcagcgtgcattatcaggcgacggagcgcctggggctggcttcttcgctgcgctacgtcggcagcagttacaacgacgacgccaaccggcgcaagatgcgcgcgtacaccacgctcgatctggcggcggactatcagctgacgccgatcgtcgatgtcggttttcgcattcgcaacgccaccaaccagctgtacgcctaccagcgcacttacccggatcaggcgctgatcgcgccgccgcgcagttatgaaaccttcgtgtcggtcaggttctga

SEQ ID NO: 4102 - protein, 720 aa, Enterobacter cloacae
MSTTRRRLVTPRKSLCLAAAWVGGALTAPLAFAADCDKSRNATGCEEQLTVEAAAPAGRYDALSAVSRSASQLGLTARETPRSVDIISARAIQQRGDRSLAAAVEHATGLSGVASPTLSNNFSARGFRPIAWLYNGVEMPGSTLQLGDPAHYDSIEILRGPGSALNGLSAAGGSVNLISRRPTFSRQPLELDYGFGSYRSQRLHLGAGGALVDDAVAYRLDVSGNDSGSNVQYERDRQKRVSGSLLFKLTDDALLTLSLDRMLNRTNNPYYGTPLLDGRIAGELRDINYNNLTDSRIQSNATAFQASLDWFMTPEVEWHNQFYYYSGFREWRNVERFRVAAAARPGDVNRDSFGALAHDDDLIGNRSSLVFDRAIAGFDNRLLVGLDLSKRHFQYYSNGFPGSEDVPLGAPPREPFAQGTDRQRAPVRHVTQNQYAAFLEDRFSLTERLALLGQLRYNHMNMDWRFQGPQEESRAHTYVFSTWSLGPSYALTDNLTLYANYTTGQEPGNDLFFLSPTQTDLPLTRARQWEAGAKGQFWGNKGEATLALYELRKDNLFVPDAQRPDALNAVGRQTSRGIELGVVLRPDERWELAGNAAYTHARYDDYRGGSPLRSYNGNRPAYIPDWTANLSVHYQATERLGLASSLRYVGSSYNDDANRRKMRAYTTLDLAADYQLTPIVDVGFRIRNATNQLYAYQRTYPDQALIAPPRSYETFVSVRF

SEQ ID NO: 4103 - DNA, 834 bp, Serratia fonticola
atggctcaggcactgttaaaattggcacagcacgactttccagggcagcacgccgccgcatcccgcaaagtattatcggtaaagggactcggcaaggcctacaaagcgcagcagcgcgtgctggatgacatcaatttcgatctgcacgccggcgaattcgtggcggtgatcggccgttccggcgcgggcaagtccacgctgctgcacaccctgaacggcaccattccttccagctgcggcgagatgctgcacttcgaagacgatggcgcggcgcaggatatcgcccagttggtcggccgccagatgcgccagtggcgcgcgcgctgcggcatgatcttccaggacttctgcctggtgccgcggctggacgtgatgaccaacgtgctgctgggccgcctgagccacacttccactctgaaatccttcttcaaactgttcgatgacgccgaccgcgcgcgcgccatcgagctgttgcagtggctcaacatgctgccgcacgcgctgcagcgcgccgagcacctctccggcggccagatgcagcgcgtcgccatctgccgcgcgctgatgcaaaacccgcaaatcctgctggccgatgagccggtcgcgtcgctcgatccgaaaaacacccgccgcatcatggacgcgctgcaaaaaatcagcgaagacggcatcgcggtgatggtgaacctgcactcggtcgaactggtgaaagagtattgctcgcgggtgatcggcatcgcccacgggaagatcgtgtttgacgggcatccttcgcaactgaacgaacggatcctgcaccagctgtatggcgaagaagccaatcagatccattga

SEQ ID NO: 4104 - protein, 277 aa, Serratia fonticola
MAQALLKLAQHDFPGQHAAASRKVLSVKGLGKAYKAQQRVLDDINFDLHAGEFVAVIGRSGAGKSTLLHTLNGTIPSSCGEMLHFEDDGAAQDIAQLVGRQMRQWRARCGMIFQDFCLVPRLDVMTNVLLGRLSHTSTLKSFFKLFDDADRARAIELLQWLNMLPHALQRAEHLSGGQMQRVAICRALMQNPQILLADEPVASLDPKNTRRIMDALQKISEDGIAVMVNLHSVELVKEYCSRVIGIAHGKIVFDGHPSQLNERILHQLYGEEANQIH

SEQ ID NO: 4105 - DNA, 3627 bp, Serratia fonticola
atgaatatgtttactaccgtactgatcgctaaccgcggcgaaatcgcctgccgcgccattcgcaccctgaaacgcctgggcgtcaccagcgtggcggtttattccgacgccgaccgcaatgcgccgcacgtcaccgaagccgacagggcggtggcgctcggcggcgacaaggccgccgacagctacctgagcatcgacaagatccttgcggcggcggcagccaccggcgcgcaggcgatctaccccggctatggcttcttgtccgagagcgccgagtttgccgacgcctgcgaggcggcgggcatcgcctttatcggcccgacggcggcgcagatgcgcgagttcggtctcaagcaccgggcgcgcgagctggcggcgttggccggggtgccgatgacgccgggcaccggcttgctggagagcgtggagcaggcggttgccgccgccgcgcgcatcggctacccggtgatgctgaaaagcaccgccggcggcggcggcatcggcctgacgcgctgtgacgacgaggcggcgctgcgcgaggcgtacgacagcgtcaaacggctgggagagcagttcttccgcgacgccggcgcgtttatcgaacgcttcgtcgatcgggcgcgtcacgtcgaggtgcagattttcggcgacggccaggggcgggtggcggcgctcggcgagcgcgactgctcgctgcagcgccgcaaccaaaaagtggtggaggaaaccccggcgccacacctgccggcggcgacccgccaggcgctgcatcgggcggcggtggcgctgggcgaatcggtgaattaccgcagcgccggcaccgtggaatttatttacgacgccgcgcgcgacgagttttacttcctcgaagtgaacacccgcttacaggtcgagcacccggtcaccgagatggtcaccggcctggatctgatcgaatgcatgctgcaggtggcggcgggcgatgcgctggattgggcggcgttgcaacgcgcgccgcagggcgcggcgatcgaagtgcgtctctacgccgaagatccgctgaaaaacttccagcccagccccggcgtgctgaccgaggtgcatttccccgccgacgtgcgcctcgacggttgggtggcgaccggcagcgaagtctcggcgttttacgacccgatgatcgccaagctgatcgtacacggcgctgaccgcgcgcaggcgctggaaaaactgcgcgtggcgctggcggcgacccgtttgcacggcatcgccaccaacctcgattatctgcggcaggtgatcgccacgccgcaatttcagcgcggcgacgtttggacgcgcctgctggacgatttgcattaccagccgcactgcctcgaagtgctgcaacccggcacctacagcagcgtgcaggactatcccggccgcctcggctattgggacatcggcgtgccgccgtccggcccgatggacgacttcgcgttccggctggccaaccgcatcgtcggcaaccacccggcggccgccgggctggagttcaccctgcaggggccgacgctgcgctttcactgcgacgccaccatcgcgctgacgggtgccagctgcccggccgatctggacggcgaagcggtcgcctactggcggccgatcgcggtgcgggccgggcaggtgctgacgctggggcgcgccacgcacggttgccgcacctatctggcggtacgcaacggcttcgacgtgccggtgtatctcggcagccgttccaccttcgcgctcggccagttcggcggccacgccgggcgcaccttgcgcgtggcggacatgctggcgatcgctcaaccggaattggccgccagcaccacgccggcgccgatcgccgcgccgcaggcgatggacgacagcctgatcccgcactacggcgaccagtggcacatcggcgtgctgtacgggccgcacggcgcgccggactttttcaccgccgaatcgatagacgccttcttcgccaccgactggcaggtgcattacaactccaatcgcctcggcgtgcgcctgtcgggtccgaagcccgagtgggcgagagaggacggcggcgaagccggtttgcatccttccaatgtgcacgactgcgagtacgccatcggcgcgatcaatttcaccggcgacttcccggtgatcctgacccgcgacgggccgagcctcggcggcttcgtctgcccggtgaccatcgccaaggccgagctgtggaaagtggggcaggtgaagccgggcgaccgcatccggttccatccgatcggttttcgccaggcgcagtcgctggaacaggcgcagctcggcagcatcgaagcgctggcggcggtgaaggccatcaccctgccgccgccggatctggccccggcggataccgtttccgccgcggtgctggcggcgctgccagcggcggaagggcgcccggcggtggcgtatcgccaggcgggagacggctacatcctgatggagtatggcgacaacgtgctcgatctggcgctgcggctgcgcattcatctgctgatgcagtcgctgcggcaggaggcgataccgggcgtggcggagctggcgccgggcgtgcgttcgctgcagatccgctacgacagccggctgataagtcaggccgatctgctgcagcgcctgctggcgcgcgaacgggcgctgggggacgtcagccgcctgaaggtgccgacgcgcaccgtctggctgccgatggcgttcgaggattcggccacgctgggggcggtcgatcgctatcagcagacggtgcgcgcttcggcgccctggctgccgaacaacgtcgatttcattcagcgtatcaacggcctgagccgacgcgagcaggtgcgcgacatcctgttcgacgccagctacctgatcctagggctgggagacgtctacctcggcgcaccctgcgcggtgccgctcgatccgcgccatcgcctgctgagctccaaatacaacccggcgcgcacccacaccgccgaagggacggtcggcatcggcggcatgtacatgtgcatctacggcatggattcgccgggcggttaccagctggtggggcgcacgctgccgatctggaacaaattcctcaaaaacccgcagttcaccgccggtgaaccctggctgctgcgcttcttcgatcaggtgcgcttctacccggtcagcgagcaagaactggacgagcagcgcgaagcgttccgcgaagggcgcatgcaggtgcgcatcgaagagagcgaattcgacttcgccgcctacaccgatttcctggccgacaacgccggggcgatcgccgacttccagcatcgccagcagcaggcgttcaacgccgaagtggcgcgctggcgcagcgatgacgacgaggccgaggcgcagctgttgccgccggttgaagaagacgtgatcgacggcgatctggtcagcgccgatctgaacggcagcgtgtggaagatcctggtggagccggggcaggcggtggcggccgggcagccgctgatcgtggtcgaggcgatgaagatggaattggcggtcaccgcgccgcgcgccgggatcgtcaaacgcatcagctgccggcaggggcggccggtcgggccgggcgacgccctgctgtggctggaaaaagcgatctga

SEQ ID NO: 4106 - protein, 1208 aa, Serratia fonticola
MNMFTTVLIANRGEIACRAIRTLKRLGVTSVAVYSDADRNAPHVTEADRAVALGGDKAADSYLSIDKILAAAAATGAQAIYPGYGFLSESAEFADACEAAGIAFIGPTAAQMREFGLKHRARELAALAGVPMTPGTGLLESVEQAVAAAARIGYPVMLKSTAGGGGIGLTRCDDEAALREAYDSVKRLGEQFFRDAGAFIERFVDRARHVEVQIFGDGQGRVAALGERDCSLQRRNQKVVEETPAPHLPAATRQALHRAAVALGESVNYRSAGTVEFIYDAARDEFYFLEVNTRLQVEHPVTEMVTGLDLIECMLQVAAGDALDWAALQRAPQGAAIEVRLYAEDPLKNFQPSPGVLTEVHFPADVRLDGWVATGSEVSAFYDPMIAKLIVHGADRAQALEKLRVALAATRLHGIATNLDYLRQVIATPQFQRGDVWTRLLDDLHYQPHCLEVLQPGTYSSVQDYPGRLGYWDIGVPPSGPMDDFAFRLANRIVGNHPAAAGLEFTLQGPTLRFHCDATIALTGASCPADLDGEAVAYWRPIAVRAGQVLTLGRATHGCRTYLAVRNGFDVPVYLGSRSTFALGQFGGHAGRTLRVADMLAIAQPELAASTTPAPIAAPQAMDDSLIPHYGDQWHIGVLYGPHGAPDFFTAESIDAFFATDWQVHYNSNRLGVRLSGPKPEWAREDGGEAGLHPSNVHDCEYAIGAINFTGDFPVILTRDGPSLGGFVCPVTIAKAELWKVGQVKPGDRIRFHPIGFRQAQSLEQAQLGSIEALAAVKAITLPPPDLAPADTVSAAVLAALPAAEGRPAVAYRQAGDGYILMEYGDNVLDLALRLRIHLLMQSLRQEAIPGVAELAPGVRSLQIRYDSRLISQADLLQRLLARERALGDVSRLKVPTRTVWLPMAFEDSATLGAVDRYQQTVRASAPWLPNNVDFIQRINGLSRREQVRDILFDASYLILGLGDVYLGAPCAVPLDPRHRLLSSKYNPARTHTAEGTVGIGGMYMCIYGMDSPGGYQLVGRTLPIWNKFLKNPQFTAGEPWLLRFFDQVRFYPVSEQELDEQREAFREGRMQVRIEESEFDFAAYTDFLADNAGAIADFQHRQQQAFNAEVARWRSDDDEAEAQLLPPVEEDVIDGDLVSADLNGSVWKILVEPGQAVAAGQPLIVVEAMKMELAVTAPRAGIVKRISCRQGRPVGPGDALLWLEKAI

SEQ ID NO: 4107 - DNA, 1332 bp, Serratia liquefaciens
atgtcgacgcacattggcgagccgcaagactcgtatattgaagagatcccgcaggatgaacggcggtttacccggatgggctggctggtcgtgggaattggtctgttcggatttttggcctgggcagcgttcgcgcctctggataaaggggtggcatcgccgggatcggtaaccgtttccggcaaccgcaaaacggtgcaggccccggccagcggcatcatcaagaatatcgcggtgaaagacggcgacaaggtgaaagccggagaagtcctggtgcagttgagccaggtgcaggcacaggcgcaggtcgattccctgcgcgaccagtactacaccacgctggccaccgaagggcgtttactcgccgagcgcgacggtctgagcaacgtcactttttcccctatttttgcccagatcaaaactcagccgcgcgtggctgaaatcatcgcgttgcaaacgcagctgttcgcctcccgccgccaggggctgcaaagtgaaattgacggttataagcagtcgatggacgggattcgtttccaattgaaaggcctgcaggattcgcgcgccaacaagcagattcaactttccagcctgcgtgagcagatgaacagcatgaagcaactggcggcggacggctacctgccgcgcaaccgctacctggaagtgcagcgtcagtttgccgaggtgaacagcagcatcgatgaaaccgtcgggcggattggccagctgcaaaagcagctgcaggaatctcagcagcgtatcgaccagcgtttcgccgactatcagcgcgaggtcagaacgcaactggcgcaaacccaaatggacgccagcgagtttcgcaataagctgcaaatggccgatttcgatctgggcaacactgccatcacctcaccggtggacggcaccgtggtcggattgaatatcttcactcaggggggcgtcgtgggagcgggtgaccacctgatggacgttgtacccagccaggcgacattggtggtggattctcgcctcaaagtcgacctgatcgataaggtgtacaacgggttgccggtggatctgatgtttaccgccttcaaccaaaacaaaaccccgaaaattcctggaacggtcacgttggtttccgccgatcgcctggtcgacaaagccaacggcgagccttactaccagatgcaggtcacggtctcgccggagggcatgaagatgctcagtggcgaggacatcaagccggggatgccggtggaggtgttcgtgaaaacggggtcgcgctcgctgctgagctatctgtttaaacctattttggatcgcgctcatacttcattaaccgaggaataa

SEQ ID NO: 4108 - protein, 443 aa, Serratia liquefaciens
MSTHIGEPQDSYIEEIPQDERRFTRMGWLVVGIGLFGFLAWAAFAPLDKGVASPGSVTVSGNRKTVQAPASGIIKNIAVKDGDKVKAGEVLVQLSQVQAQAQVDSLRDQYYTTLATEGRLLAERDGLSNVTFSPIFAQIKTQPRVAEIIALQTQLFASRRQGLQSEIDGYKQSMDGIRFQLKGLQDSRANKQIQLSSLREQMNSMKQLAADGYLPRNRYLEVQRQFAEVNSSIDETVGRIGQLQKQLQESQQRIDQRFADYQREVRTQLAQTQMDASEFRNKLQMADFDLGNTAITSPVDGTVVGLNIFTQGGVVGAGDHLMDVVPSQATLVVDSRLKVDLIDKVYNGLPVDLMFTAFNQNKTPKIPGTVTLVSADRLVDKANGEPYYQMQVTVSPEGMKMLSGEDIKPGMPVEVFVKTGSRSLLSYLFKPILDRAHTSLTEE

SEQ ID NO: 4109 - DNA, 1317 bp, Enterobacter cloacae
atggtgtgttcccacaacaatcatcagcagcatagtcattccgcaccttcggcggagcaccaggataacctgatgctgtgcccgcagtgcgacatgctggtggcgctgccgccgctggcctatggcagcaaagcggtctgcccgcgctgcaaaaccacgctcagcgcccgctgggacgaaccgcgcaagcggccgatcggttacgccctcagtgccctgttcatgctggtgctggccaacattttcccgtttatcaacatgcgcgtcgccggcatcggcaatgaaatccggctgattcaaattccggaagtcatggtggcggaagactacgccagcatggccacgttgtttatggtgttcgtgcagctgatcccggcattttgcatggtggcgatcattctgctgtgcgccaaagtgcgtttgccgctggggctgaaagagtggatggcccgggtgctgttccagttcaagacctggtgcatggtggaaattttcctcgccggggtgctggtcagcttcgtcaagctgatggcctacggcgatatcggcatcggcagcagcttcgtgccttattgcctgttctgcctgctgcaggtgcgcgccttccagtgcgtggatcggcgctggctgtggcaggacatcgaaccggcgccgcgcctcgatcgcccgctgacggtggggcgcaccggcatgcggcagggcgtgcgctcttgcgcctgctgcacggcgatcctgccggccaatcaggtgcgctgcccgcgctgccacaccaacggctacttgcgtcgccgccacagcctgcagtggacgctggcgctgctggtgacctccgtcatgctgtacattccggccaaccttatgccgatcatggtgaccgaggcgctgggcaacaaaatgaactccaccatcatggcgggggtgatcctgctgtggggcgacggctcttatccggtggcgctggtgattttcatcgccagtatcatggtgccgtcgctgaaaatgctggcgatcggctggctgtgctgggatgccaacggcaggaagaaaccgcgcgccgacagcgagcgcatgcatctgatttatgaagtggtcgaattcgttggccgctggtcaatgatcgacgtgtttgtgatcgccgtattgtcggcgctggtgcgaatggggcagttgatgagcatttaccccgcgacgggcgccgtgctgttcgcgctggtggtgatcctcaccatgttcgccgccatgacatttgatccccggctgacctgggatcgcgcaagtgaaacaatcaacaaggagccgcaaggtgacggaaaataa

SEQ ID NO: 4110 - protein, 438 aa, Enterobacter cloacae
MVCSHNNHQQHSHSAPSAEHQDNLMLCPQCDMLVALPPLAYGSKAVCPRCKTTLSARWDEPRKRPIGYALSALFMLVLANIFPFINMRVAGIGNEIRLIQIPEVMVAEDYASMATLFMVFVQLIPAFCMVAIILLCAKVRLPLGLKEWMARVLFQFKTWCMVEIFLAGVLVSFVKLMAYGDIGIGSSFVPYCLFCLLQVRAFQCVDRRWLWQDIEPAPRLDRPLTVGRTGMRQGVRSCACCTAILPANQVRCPRCHTNGYLRRRHSLQWTLALLVTSVMLYIPANLMPIMVTEALGNKMNSTIMAGVILLWGDGSYPVALVIFIASIMVPSLKMLAIGWLCWDANGRKKPRADSERMHLIYEVVEFVGRWSMIDVFVIAVLSALVRMGQLMSIYPATGAVLFALVVILTMFAAMTFDPRLTWDRASETINKEPQGDGK

SEQ ID NO: 4111 - DNA, 1566 bp, Enterobacter cloacae
atgacaacccaaggcaaattcaagaagcagcttacgctcaccgatctgacgttcatcggtctgggcgccatcttcggctccggttggctgttcgccgccagccatgtctcctccatcgccggcccggccggcatctattcctggctgatcggcggcctggcggtgctgctgctcggcatcgtctactgcgagctgggcgccgccctgccgcgcgccggcggcatcattcgctatccggtcttctcacacggcgaactgatgggttatctgctgggatttatcacgctgatcgccttctccagcctgatcgccatcgaagtcgtcgccgcccggcagtacgccgccgcctggttcccgttcctcagccagccgggttccggcgacccgaccccggtcggctggctggtgcagttggcgctgctgtgctttttcttcgcgctcaactattacagcgtaaaaaccttcgccaaatccaataacctgattagcgtgctgaagtttctggtgccgctgctggtgatcgtggtgttgttcagctttttcaaaccggaaaacctgcacagccagggctttgcccccttcggttccgccggcgttgaggccgccatttccgccggcggcatcatctttgcctacctcggcctgacgccgatcatttcggtcgccagcgaggtgcaacggccgcagcgcaccattcccatcgcgctgatcctgtcggtggtgctgtccaccatcatctatgtgctgctgcagatagcgtttctcggcagtatccccagcgagatgctgagcggcggctgggccggcatcagccaacagttctccctgccgttccgcgacatcgccatcacgctcggcatgggatggctggcgtttctggtggtcagcgacgcgatcgtttcgccgagcggcaccggcaacatctatatgaacgccacgcctcgcgtgatctacggttgggcacgcgccggtaccttcttcaaactgttcacccgggtggatggcgactccggcatcccccgcccggcgctgtggttgaccttcgctctctcggtattctggacgctgccgttcccgtcgtgggaaaagctgatcggcgtggtgtccgccgccctggtgctgagctacgccatcgccccggtcaccgccgccgggctgcggcgcaatgcgcccgatatgccgcgtccgttccgggtgcgcggtttctgcgtgctcggcccgctgtcgtttatcatttcggcgctgatcgtcttctggtccggctgggacaccgtctcctggctgctcggcttgcagatcctgatgttcttcatctacatcctgttcaagaatcaggtgccgacccatgccgttagcctccggcagcaaatttggtcctcgctgtggctgatcgtcttctatgcgctggtgatcgggctttcctatctcagcagctttggcggcatcggcgctattgcccacccgtgggacaccctcaccatggcggtgattgcgctggcgatttactactggggcgcctatacctgtttaccccaggccaattttatcggcgatgaagaagaatga

SEQ ID NO: 4112 - protein, 521 aa, Enterobacter cloacae
MTTQGKFKKQLTLTDLTFIGLGAIFGSGWLFAASHVSSIAGPAGIYSWLIGGLAVLLLGIVYCELGAALPRAGGIIRYPVFSHGELMGYLLGFITLIAFSSLIAIEVVAARQYAAAWFPFLSQPGSGDPTPVGWLVQLALLCFFFALNYYSVKTFAKSNNLISVLKFLVPLLVIVVLFSFFKPENLHSQGFAPFGSAGVEAAISAGGIIFAYLGLTPIISVASEVQRPQRTIPIALILSVVLSTIIYVLLQIAFLGSIPSEMLSGGWAGISQQFSLPFRDIAITLGMGWLAFLVVSDAIVSPSGTGNIYMNATPRVIYGWARAGTFFKLFTRVDGDSGIPRPALWLTFALSVFWTLPFPSWEKLIGVVSAALVLSYAIAPVTAAGLRRNAPDMPRPFRVRGFCVLGPLSFIISALIVFWSGWDTVSWLLGLQILMFFIYILFKNQVPTHAVSLRQQIWSSLWLIVFYALVIGLSYLSSFGGIGAIAHPWDTLTMAVIALAIYYWGAYTCLPQANFIGDEEE

SEQ ID NO: 4113 - DNA, 855 bp, Enterobacter cloacae
atgagatccacttcagactatcagcctccggtttctctctcgccgccttcactcgtggggctgccggaacaggaggacgtttttgccgtcgaacatctgtcacgcctgtgcgacgggctggcgcagcagcgcccgaacaacctgcgcgatctgctgaatacgctggcgctgatcgcgccgttgctgaacgcgatccccaacgtggtgttctttatcaaagacgcccaggcccgctacctgctggccaacctcacgctggccaggcgctgcggtttcaaaaccgtcacgccgctgctgggcaaaacctccgccgacgtttttcccgctcagctcggatccgactataccgagcaggatctgcgggtattgcgccacggcgtgctgatccaggatcagctggaaatgcacctgtacaacggccgagaaaccggctggtgcctgacgcaaaagctggcgctgtatgatgcacagggaaaaatcatcggtatggcgggtatttctcacgatctgcaggaggccagggccaatcacccggcctaccaacggctggcggcgatcgacgtgcacatccgccgccactatgcccggccgatcgcgcttgaggagctgacggcactgaccgggttgtcggtggcgcagatcgaacgctactgcaaacgtatcttccacctcaccccgcgccagatgatccataaagtgcggctggaaaaggccactgaactgctggccggcgatctgccgatcaccgacatcgcgctgcagtgcggctacaccgatcacagcgccttcagccgtcagttcaaagcgatgaccggctccacgccgcgcgatttccgcctgacgctttccgcttaa

SEQ ID NO: 4114 - protein, 284 aa, Enterobacter cloacae
MRSTSDYQPPVSLSPPSLVGLPEQEDVFAVEHLSRLCDGLAQQRPNNLRDLLNTLALIAPLLNAIPNVVFFIKDAQARYLLANLTLARRCGFKTVTPLLGKTSADVFPAQLGSDYTEQDLRVLRHGVLIQDQLEMHLYNGRETGWCLTQKLALYDAQGKIIGMAGISHDLQEARANHPAYQRLAAIDVHIRRHYARPIALEELTALTGLSVAQIERYCKRIFHLTPRQMIHKVRLEKATELLAGDLPITDIALQCGYTDHSAFSRQFKAMTGSTPRDFRLTLSA

SEQ ID NO: 4115 - DNA, 549 bp, Enterobacter cloacae
atgcaattgaatataccgacttggcttaccctgtttcgcgtagttctgatcccattctttgtgctggcgttttatctgccgttcaactgggctccgatggtttgcgccgttatctttgtgttcgccgccgtcaccgactggtttgacggctttctggcacgccgctggaaacaaacgacgcgcttcggggcgtttttggatccggtcgcggacaaagtgatggtggcggtggcactggtgctggtggcggagcactaccacagctggtggatcacgctgccggcggccaccatgatcgcccgtgaaatcatcatttcgtcgctgcgcgagtggatggcggaaattggcaagcgcagcagcgtggcggtatcctggatcggcaaagtgaaaaccatggcgcagatgatgtcgctggtgggtttgctgtggcggccggatcgctccgtagagtatgtggcgattggcttgctgtatatcgcggcggtgctgactttctggtcgatgttccaatatttgaaagcggcgcgcaacgatctgctggaaccgtga

SEQ ID NO: 4116 - protein, 182 aa, Enterobacter cloacae
MQLNIPTWLTLFRVVLIPFFVLAFYLPFNWAPMVCAVIFVFAAVTDWFDGFLARRWKQTTRFGAFLDPVADKVMVAVALVLVAEHYHSWWITLPAATMIAREIIISSLREWMAEIGKRSSVAVSWIGKVKTMAQMMSLVGLLWRPDRSVEYVAIGLLYIAAVLTFWSMFQYLKAARNDLLEP

SEQ ID NO: 4117 - DNA, 867 bp, Enterobacter cloacae
atgagtctaagcagattccagctacagtttcacctggagaaacaggccaacaacatcaggcagtcaccggcatttcataccgccatcgtcaaacacggggaattattgaaggagacctacaagaaacatccgctgttttacaaaatcatcttcaggaacagccggttcatcatttgttccaccatcctgtccatttactaccaccagcccgccgccgggctgaaagacatcaaagccttttttaaagggaagaacatcatcagcgagaactccctggactcctttctgttctttttgcgggtcggccgccggctggaggtcaaaccctgtgaacatgacaagcgccagctgcgctataaacctacgccgcacgcgctggcggaaacccaggcgctgatcgcctcgatggcgcggccctaccaggcgctggcgccacagatgcctatcgcggcgctgctggcggcgcccgactttctgcccacctttttcgccgcctacgggcagctgatgctcaaggagatttacctgatcgatctggtgccgcaatccgggctgtttatcagcaaggacgccggccacatggtgctgctgatgctgcatatcgaaagcatccggcaggactccccctttctgctgctctcctcggcgaaaatcgccaagtcgtgctccgtctcacgcgcgcacgtgaatcgcattctgcaggcggcggaaaaatccggtctgctgaccaccaccaataacgtggtgatcgaactcaacagttcgttctttatcatggcggagcgctatttcagcctctatttcgcgatggtcgaattcgggcttgaacgggtttggcacacgccgcaggccgccgagccccgctga

SEQ ID NO: 4118 - protein, 288 aa, Enterobacter cloacae
MSLSRFQLQFHLEKQANNIRQSPAFHTAIVKHGELLKETYKKHPLFYKIIFRNSRFIICSTILSIYYHQPAAGLKDIKAFFKGKNIISENSLDSFLFFLRVGRRLEVKPCEHDKRQLRYKPTPHALAETQALIASMARPYQALAPQMPIAALLAAPDFLPTFFAAYGQLMLKEIYLIDLVPQSGLFISKDAGHMVLLMLHIESIRQDSPFLLLSSAKIAKSCSVSRAHVNRILQAAEKSGLLTTTNNVVIELNSSFFIMAERYFSLYFAMVEFGLERVWHTPQAAEPR

SEQ ID NO: 4119 - DNA, 753 bp, Enterobacter cloacae
atgactcgctccctttatcggttcacgtttatgccgcagataacccgctccgcccgccgatgggccgccctgtcgctttgcctgatgagttttgccgctacccacgcctcggccagcgtgacgctgctcggcaaccgcgtgatctaccccgccgaggcgcgggaaaaaacgctgcagttcaccaacgacgacggcaccccggcgctgatgcagatctggctcgacatcaataatcccaaatccacgccggaaaacgccgatgcacctttcgtcgcctcgccgcagatcttccgcatgaatccgcacagcgggcagatggtgcggctgtcgttcgtcggccagccgctgccgcgcgatcgcgaatcgctgttctatctcaacttcctgcaggtgcccgccgtgcgccagacggacagcgacaagaacaaactgctgctggtggtcaccaatcggctgaaggtgttctatcgccccgccgggctggccggcgacgccaaccacgtcatcgatcggctcagcctgcgccaggccggcaacgcgctgcgcgtcgacaacccgaccggctactacgccaacgttagccaggccgcgatcctgagcggcgcgaagcgcatcgccatcccgcaggcggatctgatcccgcctttttcacaggccagttggccggtgaatggggaggtgcggcaggtcgcactgcgcgtcatcaatgactatggggtggaaatctcacgcaccctggacgtcgcgcgctga

SEQ ID NO: 4120 - protein, 250 aa, Enterobacter cloacae
MTRSLYRFTFMPQITRSARRWAALSLCLMSFAATHASASVTLLGNRVIYPAEAREKTLQFTNDDGTPALMQIWLDINNPKSTPENADAPFVASPQIFRMNPHSGQMVRLSFVGQPLPRDRESLFYLNFLQVPAVRQTDSDKNKLLLVVTNRLKVFYRPAGLAGDANHVIDRLSLRQAGNALRVDNPTGYYANVSQAAILSGAKRIAIPQADLIPPFSQASWPVNGEVRQVALRVINDYGVEISRTLDVAR

SEQ ID NO: 4121 - DNA, 564 bp, Serratia marcescens
atgagcctgacccgttttagcttcgccgcgctgccggtcagcccgtggcgcaacggcggtggggaaacccgtgaaatcgtcagctggccgccgggtgcgcaggattttgactggcgcgccagcatcgccaccatcgcgcaggacgggccgttttccgcctttacgggcatcgaccgctcgatcactttgctggaaggcgacggcgtgaggctgttcagcgccgggcatatcgaccatcaactggcgcgtgtcggggaaccgtttgccttttccggcgatgtggcgctggaagcgacgctgctgggcggcgccagccaggatttcaacatcatgacgcgccgtggccggcaggcggccgaggtgcggcgcagcacctcgcccgtcaccctgccaccctaccaggcgggcgtgctgtatgtgctgagcggggtctggtcgctgccggggggcggcgaactgcgggcgcgcgagggcgtctggtgggcggcgcaggcggcgggcggtgaagtggcgccgctgacggccgacggcgttctcctgtgggcgaacatcacagcctgctaa

SEQ ID NO: 4122 - protein, 187 aa, Serratia marcescens
MSLTRFSFAALPVSPWRNGGGETREIVSWPPGAQDFDWRASIATIAQDGPFSAFTGIDRSITLLEGDGVRLFSAGHIDHQLARVGEPFAFSGDVALEATLLGGASQDFNIMTRRGRQAAEVRRSTSPVTLPPYQAGVLYVLSGVWSLPGGGELRAREGVWWAAQAAGGEVAPLTADGVLLWANITAC

SEQ ID NO: 4123 - DNA, 1395 bp, Enterobacter cloacae
gtgagtgactctgtagcggcgtcgccgatccatgcgcgggatttggcggccagaatcgacgccttgcccgcgtcggccggcctgtggcgctttatcattctgctgtcgctgggcggctttttcgaactctacgatctgttccagaccggctatatcagcaccggccttatcgccgacggcattttccacaccggcgcgcagggcgtcttcggcgtgtcggatcaggcggccttcgcctccgccacctttctcggcctgttcgtcggcgccagcctgctgagtccgtacgccgatcgcttcggccgccgcgccaccttcatgttcgccctgatctggtatggcgccttctcgctgctgctggcgtttcaacagcaggcggagtgggtgatctttctgcgctttctggtgggcgtcgggctcggcattgagctggtgaccatcgatacctacctgacggagtgggtgcccgcgcatctgcgcacccgggctttcgccttcgcgttcttcgtgcagttcctgtcggtgccggcggtggcgctgatgtcctggtggctggtgccgcagacgatttggggcctgagcggctggcgctacgtggtgatcgccggtgcgctggcttcgctggtgatttggctggtgcgcaaggggctgccggagtcgccgcgctggctggtgcagcagcggcgctatgcgcaggcccggcaggtgatgcgggatatggagcggcgctgcggcgtggcggccgcggacttcccgtcgcgcccggtggacgatgccgagggcgcgccgctgcgcggccgctttcgcgatatctgggcgccgcagtatcgcgatcgcacgctgatgctggtggtgatgaatttctttcaggccatcggcttcttcggcttcggcaactggctgccggcgctgctgtcgggcaagggcgcttcggtcacccacagcctgctgtacgctttcttcatcacgctggcctacccgctgggctcgctgctgtgcagcttctacgccgacaagatggagaacaagtggcagatcgtgttgtcttgcctggtgacggtgatcttcggctcgctgttcgcgctgcagaacaacccgctgtggctgatcctgtgcggcttcttcatcacctggtccaacgcctggctgacctacagctaccactcgtatcaatccgagatcttcccgacccacatccgcgcccgcgccgtcggtttctgctactccttcagccgcctgtcgacggtgttcagcagcatcattatcggcattatcttgcagtacggcggctcgctgggggtgatcgcgtttatcgtcgccagcatgctgatcgtgatgctggtgattgggctgttcggcccgaaaacgcgcggcatcgatctggaaaacatctga

SEQ ID NO: 4124 - protein, 464 aa, Enterobacter cloacae
MSDSVAASPIHARDLAARIDALPASAGLWRFIILLSLGGFFELYDLFQTGYISTGLIADGIFHTGAQGVFGVSDQAAFASATFLGLFVGASLLSPYADRFGRRATFMFALIWYGAFSLLLAFQQQAEWVIFLRFLVGVGLGIELVTIDTYLTEWVPAHLRTRAFAFAFFVQFLSVPAVALMSWWLVPQTIWGLSGWRYVVIAGALASLVIWLVRKGLPESPRWLVQQRRYAQARQVMRDMERRCGVAAADFPSRPVDDAEGAPLRGRFRDIWAPQYRDRTLMLVVMNFFQAIGFFGFGNWLPALLSGKGASVTHSLLYAFFITLAYPLGSLLCSFYADKMENKWQIVLSCLVTVIFGSLFALQNNPLWLILCGFFITWSNAWLTYSYHSYQSEIFPTHIRARAVGFCYSFSRLSTVFSSIIIGIILQYGGSLGVIAFIVASMLIVMLVIGLFGPKTRGIDLENI

SEQ ID NO: 4125 - DNA, 1464 bp, Enterobacter cloacae
atgtcccaaacccaggaaaagatctggaaagcgatagcgccgctggcggtgctcgcgatcctgttattgataccggtgcccgacggcatgccgccacaggcgtggcactacttcgccatctttgtggcgatgatcgtcggcatgattctggagccgatcccggccaccgccatcagctttatcgcggtgaccgtcagcgtgctcagcgccaactgggtgcttttcggcgcgcaggaactggcggagccgggcttcaaggccggtaaagaggcgctgaaatgggggctggcgggcttctccagcaccaccgtctggctggtgttcggcgcctttatcttcgcgctgggctacgaggccaccgggttggggcggcgcatcgcgctgttcctggtgaagttcatgggcaagcgcacgctgacgctgggctatgcggtggtgatcatcgatatcctgctggcgccgttcacgccgtccaacaccgcgcgcaccggcggcacggtgttcccggtggtgaaaaacctgccgccgctgttcgattccttccccaacgatccctcctcgcgccgcatcggcggttacctgatgtggatgatggtggtcggcaccagcatcagctcctcgatgttcgtcaccggcgccgcgccgaacgtgctgggcatcgagttcgtcggcaagatcgccggggtgcacatcagctggatgcagtggttcctggcgttcctgccggtcggcctgctgctgctgatcgttgcgccgctgatctcctactacctgtacaaaccgggcgtgacccacagcagcgaagtggccgcctgggcggataccgcgctgggggaaatgggcaagctgacgcgcaaggaatacaccctgatcggcctggtgctgctcagcctgtgcctgtgggtgttcggcggcaaaatgctggatgccaccgcggtgtgcctgctggcggtgtcgctgatgctggcgctgcacgtggtgtcgtggaaagagatcaccaaatattccagcgcctggaatacgctggttaacctggcgacgctggtggtgatggccaacggcctgacgcgttccggctttatcgactggttcgcccagaccatgagcacccacctggacggcttctcgccgaacatgacggtggtggcgctggtgctggtgttctacttcgcccactacctgttcgccagcctctcggcgcacaccgccaccatgctgccggtgatcctggcggtcggcaaagggctgccgggcgtgccgatggagcagctgtcgatgttgctggtgctgtcgatcggtatcatgggcgtgctgacgccgtacgccaccggcccgggggtgatcatctacggctgtggctacgtgaagtcgaaagactactggcgcctgggcggtattctcggcgtggtgtacatcgccgcgctgctgctgatcggctggccgatcatgagcctgtggtactga

SEQ ID NO: 4126 - protein, 487 aa, Enterobacter cloacae
MSQTQEKIWKAIAPLAVLAILLLIPVPDGMPPQAWHYFAIFVAMIVGMILEPIPATAISFIAVTVSVLSANWVLFGAQELAEPGFKAGKEALKWGLAGFSSTTVWLVFGAFIFALGYEATGLGRRIALFLVKFMGKRTLTLGYAVVIIDILLAPFTPSNTARTGGTVFPVVKNLPPLFDSFPNDPSSRRIGGYLMWMMVVGTSISSSMFVTGAAPNVLGIEFVGKIAGVHISWMQWFLAFLPVGLLLLIVAPLISYYLYKPGVTHSSEVAAWADTALGEMGKLTRKEYTLIGLVLLSLCLWVFGGKMLDATAVCLLAVSLMLALHVVSWKEITKYSSAWNTLVNLATLVVMANGLTRSGFIDWFAQTMSTHLDGFSPNMTVVALVLVFYFAHYLFASLSAHTATMLPVILAVGKGLPGVPMEQLSMLLVLSIGIMGVLTPYATGPGVIIYGCGYVKSKDYWRLGGILGVVYIAALLLIGWPIMSLWY

SEQ ID NO: 4127 - DNA, 2373 bp, Enterobacter cloacae
atgcaaaataaagcgtcactatcgccgcttatcgtcataacggcgctatttgccgcgctgagcgggctttatctgctcggcggcggcatttggctggccaagttgggcggttcgctgtattacatcatcgccgggctggtgctgctggcgacctcctggctgctgttccgccgccgcgccaccgcgctgctgctgtacgcggtattcctgctgggcaccactatttgggccctgtgggaagtcggcccggacttctgggcgctgacgccgcgcctggacgtcaccttcttcttcggcctgtggctggtgctgccgtttatctaccgtaagctggtcgccaacggcaagttcgcctacggtgcgctgagcgcggcgctggcaatcaccgtcatcgcgctggcctatgccgtattcaacgatccgcaagagatcaacggcactctcgacgccgcgcaggtgcagccgaaagacgccaacggcgccgactggccggcctatggccgcacccaggaaggcacccgttactcgccgctgagccagatcaacgacaaaaacgttggccagctgcaagaggtttggcgtttccagaccggcgatctgaagaccgccaacgatccgggtgagatcaccaacgaagtcacgccgatcaagatccgcgataccctttacatgtgtacgccgcaccagaagctgttcgcgctggatgccgccaccggtaaagaaaagtggaaatttgatccgcagctgaagtacaacccgaccttccagcacatcacctgccgcggcgtgtcttaccacgaaaccgctgcagccgcgggcgccgccggcgatgccgcaccggcgatgtgcgcgcgccgcatcattctgccggtcaacgacggccgcctgttcgcgctggacgccgacaccggcaaaccgtgcccggacttcgccaacaacggcgagttgaacctgcagagcaacatgccgtatgcgacgccgggccactacgagccgacttcgccgccggtgatcaccgataaagtgatcgtcatcgccggcgccgtgaccgacaactactccaaccgcgagccttccggcgtcattcgcggcttcgacgtcaacagcggcaagctgctgtgggccttcgatccgggcgcgaaagatccgaacgccatcccggcggacgagcatcacttcgtgccgaactcgccgaactcctgggcgccggccgcctatgacgccaagctggatatcgtctatctgccgatgggcgtttccacgccggacatctggggcggcgatcgcaccccggaaatggagcgctacgccagcggcctgctggcgctgaacgcctcaaccggcaagctggcctggttctatcagacggtacaccacgacctgtgggatatggacgtgccggcgcagccgaccctggcggacattaccgacaagagcggtaaaaaagtgccggtcatctacgtgccgaccaaaaccggcaacatcttcgtgctgaaccgcaccaacggcgagttggtggtgccggcgccggagaaaccggtaccgcagggcccggccaaaggcgaccgcctgtcgccgacccagccgttctccgagctgaccttccgtcctgagaagaaactgacgggtgcggacatgtggggcgcgaccatctatgaccagctggtctgccgcgtgatgttccacagcctgcgttacgaaggcaccttcaccccgccgtccgagcagggcacgctggtgttcccgggtaacctcggcatgttcgagtggggcggcctggccgtcgataccgatcgcgaaatcgccatcgccaacccgatcgcgctgccgttcgtgtccaagctgatcccacgcggcccaggcaacccgattgagccgccggaaggcgacaagggcggcagcggcaccgagtccggcgtgcagccgcagtatggcgtaccgttcggcgtgaccctgaacccgttcctgtcaccgttcggtctgccgtgcaaacagccggcctggggttacatttccgccgtggatctgaaaaccaacgacatcgtgtggaaaaaacgcatcggcaccgtgcgcgacagctccccgctgccgctgccgttcaaaatgggcatgccgatgctgggcggcccggtgaccaccgccggtaacgtgttcttcatcggcgccaccgcagacaactacctgcgcgccttcagcgtgaccaacggtgaaaaactgtgggaagcacgcttgccggccggcggccaggcgacgccgatgacctatgaggtcaacggcaagcagtacgtgctgatcttcgccggcggccacggttccttcggcaccaagctgggtgactatctggtcgcttacgccctgcccgaccagaagtaa

SEQ ID NO: 4128 - protein, 790 aa, Enterobacter cloacae
MQNKASLSPLIVITALFAALSGLYLLGGGIWLAKLGGSLYYIIAGLVLLATSWLLFRRRATALLLYAVFLLGTTIWALWEVGPDFWALTPRLDVTFFFGLWLVLPFIYRKLVANGKFAYGALSAALAITVIALAYAVFNDPQEINGTLDAAQVQPKDANGADWPAYGRTQEGTRYSPLSQINDKNVGQLQEVWRFQTGDLKTANDPGEITNEVTPIKIRDTLYMCTPHQKLFALDAATGKEKWKFDPQLKYNPTFQHITCRGVSYHETAAAAGAAGDAAPAMCARRIILPVNDGRLFALDADTGKPCPDFANNGELNLQSNMPYATPGHYEPTSPPVITDKVIVIAGAVTDNYSNREPSGVIRGFDVNSGKLLWAFDPGAKDPNAIPADEHHFVPNSPNSWAPAAYDAKLDIVYLPMGVSTPDIWGGDRTPEMERYASGLLALNASTGKLAWFYQTVHHDLWDMDVPAQPTLADITDKSGKKVPVIYVPTKTGNIFVLNRTNGELVVPAPEKPVPQGPAKGDRLSPTQPFSELTFRPEKKLTGADMWGATIYDQLVCRVMFHSLRYEGTFTPPSEQGTLVFPGNLGMFEWGGLAVDTDREIAIANPIALPFVSKLIPRGPGNPIEPPEGDKGGSGTESGVQPQYGVPFGVTLNPFLSPFGLPCKQPAWGYISAVDLKTNDIVWKKRIGTVRDSSPLPLPFKMGMPMLGGPVTTAGNVFFIGATADNYLRAFSVTNGEKLWEARLPAGGQATPMTYEVNGKQYVLIFAGGHGSFGTKLGDYLVAYALPDQK

SEQ ID NO: 4129 - DNA, 1083 bp, Enterobacter cloacae
atgatgaaacgcagtgtattagccttagctgtcgccctcggggcgatcacctccttcgccaacgcggctgaaatctacaataaggatggcaataaactcgacctgtacggccgtgttaacgccaagcattatttcagcgacagtaaatccaacgacggtgatatgacctatgttcgcctgggcttcaaaggcgaaacgcaaatcaatgatcagttgaccgggtacggccagtgggaatacaacgtccaggccaatcatgacgaagcgcagggcactaccggcaccaaaacgcgtctgggcttcgcggggctgaaattcggcaactacggttctttcgactacggccgcaactatggtgtggtctatgacgccgaggcttacaccgacatgctgccggagttcggcggcgactcctacagctataccgataactttatgaccgcccgttccaacggtttggccacctaccgcaaccgtgatttcttcggtttggtggacggcctgaatctggcggtgcagtaccagggtaaaaacgatggcgacggccgcagcgtgaccaagcaaaacggcgacggttacggcctgtctctggactatcaggacatcggcggttccggcatcggcgtagcggcggcgttctccgactccaaccgcaccagcgctcaaaaagcgctgcagtacggtaaaggcgacagcgccaccgcatggaccactgcggtgaaatacgatgccaaccaggtttacctggctgcgatgtatgccgaaacccgcaacatgacgccgatcagcgtcaacggcacttccggtttcgccaataaaacgcaaaacttcgaagttgtggcccagtatcaattcgagaacggtctgcgtccttccgtggcttacgtgcagtccaaaggcaaggatatcgaagggatcggtgatgccgacctggtgaagtacgtggaagtgggggcgacttactacttcaacaaaaatatgtacacctacgttgattaccaaatcaaccagctgagcgacgataacaaactgaaactggccaacgatgatattgttgccgtcagcctgacgtatcgcttctaa

SEQ ID NO: 4130 - protein, 360 aa, Enterobacter cloacae
MMKRSVLALAVALGAITSFANAAEIYNKDGNKLDLYGRVNAKHYFSDSKSNDGDMTYVRLGFKGETQINDQLTGYGQWEYNVQANHDEAQGTTGTKTRLGFAGLKFGNYGSFDYGRNYGVVYDAEAYTDMLPEFGGDSYSYTDNFMTARSNGLATYRNRDFFGLVDGLNLAVQYQGKNDGDGRSVTKQNGDGYGLSLDYQDIGGSGIGVAAAFSDSNRTSAQKALQYGKGDSATAWTTAVKYDANQVYLAAMYAETRNMTPISVNGTSGFANKTQNFEVVAQYQFENGLRPSVAYVQSKGKDIEGIGDADLVKYVEVGATYYFNKNMYTYVDYQINQLSDDNKLKLANDDIVAVSLTYRF

SEQ ID NO: 4131 - DNA, 645 bp, Enterobacter cloacae
gtgggccaatctctgttggatctttccggctttatcaagttctttgtcggtctgtttgcgctggtcaacccggtgggcatcttgccggtgtttatcagcatgaccagctaccaggcggaagcggggcgcaataaaaccaacctgaccgccaacctgtcggtcgccatcattttgtggacgtcgcttttcctgggcgaagggatcctgcggatgttcggcatctctatcgattcgttccgcatcgccggcggtattctggtggtgaccatcgccatgtcgatgatcagcggcaagctgggggaagacaagcaaaacaaacaggagaaatcggagagcgcgatccgcgaaagcatcggcgtggtgccgttagcgctgccgctgatggcggggccgggggcgatcagttccaccatcgtgtggagttcccgttatcacaactggcaaagcctgctcggctttacggtggcgatcgccttgttcgccttttgttgctggctgttgttccgcgccgcgccgctgttggtgcgtttgctggggcagaccggcatcaacgtgatcacccgtatcatgggtctgctgctgatggcgctcggcatcgagtttatcgttaccggcattaaggcgatattccccggcctgttgtaa

SEQ ID NO: 4132 - protein, 214 aa, Enterobacter cloacae
MGQSLLDLSGFIKFFVGLFALVNPVGILPVFISMTSYQAEAGRNKTNLTANLSVAIILWTSLFLGEGILRMFGISIDSFRIAGGILVVTIAMSMISGKLGEDKQNKQEKSESAIRESIGVVPLALPLMAGPGAISSTIVWSSRYHNWQSLLGFTVAIALFAFCCWLLFRAAPLLVRLLGQTGINVITRIMGLLLMALGIEFIVTGIKAIFPGLL

SEQ ID NO: 4133 - DNA, 1188 bp, Enterobacter cloacae
atgaaacaacttcctgtgaccgtgctttccggctttctcggcgccggcaagaccacggtgctgaaccacatcctgaacaaccggcagggcatgcgcgtggcggtgatcgtcaacgacatgagcgaagtgaacatcgacgccgcgctggtggaaaatgccgtgcatctcgatcgccaggaagagaagctggtggagatgagcaacggctgcatttgctgcacgctgcgcgaagacctgctggtatcggtgcgtgagctggcgcaggacgggcgtttcgattacctgctgatcgaatcgagcggcatctccgagccgctgccggtggcggaaacctttaccttcgaggacgaaaagggcgaaagcctgtcgcagttcgcccggctggatactctggtgacggtggtcgacggggtgaatttcatccagcagtaccagcgggcgcaaagcctgcaggaggccggccaaagcctgggcgaggacgatctgcgcagcgtggcggatctgttgattgagcaaattgagttctgcgacgtgatcctggtcagcaagaccgatctgttgacgccagcccagcagggcgaagtgatggcgctgttggccagcctgaaccccgatgcccgcattgtgccgatcgcgccgggtaagctgccgctggaggcggtgcttaataccggcagcttcagctttgaaaaggcgcagcaggcgcccggctggctgaaagagctgcgcggcgaacacgtgccggaaacggaaaactacggcatcagcagcttcgtctatcaggcgcggcggccgtttgcgcctgacaagttttaccgcgtgatcaacggcgactggggcggcggcaagctgctgcgctcgaaaggctttttctggctggcgacgcggccgcggcaggccgggcagtggagccaggcagggggcatcgcccactacggcctggcgggcaccttttggcgcgccatcccgcaaaagaactggccgcaggatcccgaagcgcgggcgcacattcaggaaaaatgggtggagccgttcggcgacatgcgccaggagctggtgtttatcggccagcatttgcagcaggcgacgatcgtgcgtttgctggacgaatgcctactgagcgacgatgaaatggccgccggcgtggactactggctggacatggctgacccgttccctgagtggtaa

SEQ ID NO: 4134 - protein, 395 aa, Enterobacter cloacae
MKQLPVTVLSGFLGAGKTTVLNHILNNRQGMRVAVIVNDMSEVNIDAALVENAVHLDRQEEKLVEMSNGCICCTLREDLLVSVRELAQDGRFDYLLIESSGISEPLPVAETFTFEDEKGESLSQFARLDTLVTVVDGVNFIQQYQRAQSLQEAGQSLGEDDLRSVADLLIEQIEFCDVILVSKTDLLTPAQQGEVMALLASLNPDARIVPIAPGKLPLEAVLNTGSFSFEKAQQAPGWLKELRGEHVPETENYGISSFVYQARRPFAPDKFYRVINGDWGGGKLLRSKGFFWLATRPRQAGQWSQAGGIAHYGLAGTFWRAIPQKNWPQDPEARAHIQEKWVEPFGDMRQELVFIGQHLQQATIVRLLDECLLSDDEMAAGVDYWLDMADPFPEW

SEQ ID NO: 4135 - DNA, 1305 bp, Enterobacter cloacae
atgagaaaacttttcgtccagttcttcctgttgctattcgtctgttttctggtgatggcgatgctggtcggcctggtgtacaaagtgaccgccgagcgcgccggccgccagtcgatggacgatctgatgaaaagttcgctgtacctgatgcgcagcgagctgcgcgaaatcccgctgaaggactggaacaagaccatcgccacgctggatctcaacctgtcgttcaagctgcatatcgagccgctcggcaaacaggagctgagcgaggatctgaaaaagcggctgcggctgggggaaatcatcgccctcgacgatcagtacacctttatgcagcgcattccgcgcagccactatgtgttggtggtcggccccattccttatctgttctacctgcatcagatgcgcctgctggatctggtgttgctggtgtttatcggcatgtcgctggcgctgccggtgtttctgtggatgcggccgcactggcaagacctgctcaagctggaaaacgccgcccagcggctcggcgccgggcatctggatgaacgcacccacttcgatcccacctccagcctgagccggctcggcgtggcgttcaaccagatggccgacaacgtcaataccctgatcgccagcaagaaacagctaatcgacggcatcgcgcacgagctgcgcacgccgctggtgcgcctgcgctaccggcttgaaatgagcgataacctgtccgacagcgagcagcaggcgctgaaccgcgatattggccagttggagtcgctgatcgacgagctgctgacctatgcccgtctggatcgtccgcaggttgcgttaaacattgaacccatcgatctgccaaagtggctcgaggacaaggtcgatgatatccgcctgatccatcaggatcgcgacatccagctcgatatcccgcacgtcggcgacttcggcggcgtcgatctgcgcctgatggagcgcgtgctcgacaacctggtcaacaacgcgctgcgctattccgaacagcggctgcgcgttggcctgtggtttgacggcgacctcgcctgcttgcaggtcgaggatgacgggccgggtattccgccggaagagcgcgaacgggtgtttgaacctttcgtccgtctcgatcccagccgcgatcgcgctaccggcggctgcgggctggggctggccatcgtccattccatcgccgtcgcccaccagggacaggtgttcgtcgaaggcagttcgctcggcggcgccagcttccgtttctgctggccggtgaagccgacattcagtttaaaagccgatctggcgtaa

SEQ ID NO: 4136 - protein, 434 aa, Enterobacter cloacae
MRKLFVQFFLLLFVCFLVMAMLVGLVYKVTAERAGRQSMDDLMKSSLYLMRSELREIPLKDWNKTIATLDLNLSFKLHIEPLGKQELSEDLKKRLRLGEIIALDDQYTFMQRIPRSHYVLVVGPIPYLFYLHQMRLLDLVLLVFIGMSLALPVFLWMRPHWQDLLKLENAAQRLGAGHLDERTHFDPTSSLSRLGVAFNQMADNVNTLIASKKQLIDGIAHELRTPLVRLRYRLEMSDNLSDSEQQALNRDIGQLESLIDELLTYARLDRPQVALNIEPIDLPKWLEDKVDDIRLIHQDRDIQLDIPHVGDFGGVDLRLMERVLDNLVNNALRYSEQRLRVGLWFDGDLACLQVEDDGPGIPPEERERVFEPFVRLDPSRDRATGGCGLGLAIVHSIAVAHQGQVFVEGSSLGGASFRFCWPVKPTFSLKADLA

SEQ ID NO: 4137 - DNA, 726 bp, Enterobacter cloacae
atgcataaaattgtttttgtggaagacgatcccgaagtcggcaaactgatcgccgcctatctgggcaaacacgacatcgaggtgttgatcgaaccgcgcggcgacagcgcgcaggcgcgcatcgcgcacgagcaacccgatttggtgctgctggacatcatgctgcccggcaaagacggcatgacgctgtgccgcgatctgcgccccaccttccccggcccgatcgtgctgctcacctcgctcgacagcgacatgaaccatatcctgtcgctggagatgggcgccaacgactatatcctgaaaaccacgccgccggcggtgttgctggcacgcctgcgtttgcacctgcgccaacacggccaacagccgaaagaagagtcggttcagccgctcacccagcacaatgcgctgcatttcgggctattgtgcatcgatccggtcaaccggcaggtcacgctgggcgaagaaactgtcacgctgtccacctcggatttcgatctgctgtgggagctggcgacccacgccgggcagatcatggatcgcgaggcgctgctgcaaaacctgcgcggcgtgagctatgacggtatggaccgcagcatcgatgtggcgatctcccgcctgcgccgcaagctgtacgacaacgcgctggagccgttccgtatcaagaccgtgcgtaataaaggttatctgttcgcccctaacgcctgggcatcggtgcaacaatga

SEQ ID NO: 4138 - protein, 241 aa, Enterobacter cloacae
MHKIVFVEDDPEVGKLIAAYLGKHDIEVLIEPRGDSAQARIAHEQPDLVLLDIMLPGKDGMTLCRDLRPTFPGPIVLLTSLDSDMNHILSLEMGANDYILKTTPPAVLLARLRLHLRQHGQQPKEESVQPLTQHNALHFGLLCIDPVNRQVTLGEETVTLSTSDFDLLWELATHAGQIMDREALLQNLRGVSYDGMDRSIDVAISRLRRKLYDNALEPFRIKTVRNKGYLFAPNAWASVQQ

SEQ ID NO: 4139 - DNA, 1434 bp, Enterobacter cloacae
atgtatccggatactcaactgtatatcgatggacaatggcgcaacgcactggccgggaaaaccctgccggtcaccaaccccgccaccgacgagataatcggtcaagtggcgcacgccgccacagaggatctcgatctggcgctggccgccaccgagcgcggatttaacgtctggcgcgacaccgccgcgcaccagcgcgccaacctgatgcgcaaagcggcggcgctgctgcgcgaacgcgccaacgccatcgccgccgtcatgacgcaggaacagggcaaaccagcagcgcaggccaaagtcgaaattctcaacgccgccgacgtcatcgactggttcgccggcgaagccacccgcacctacgggcagatcattccgtcccgcgcccgcgacgtgcagcagcaaaccctcaagctgccggtcggcccggtggccgccttcacgccgtggaacttcccgatcaaccagatcgtgcgcaagctgtccgccgcgctggccgcgggctgctccatcatcgtcaaaggcccggaagaaacgccggcctcgccggctgagctgatcaaagccttcgccgacgccggcatcccggccggggtgatcgcgctggtgtacggcaccccggcggaaatctcggaatacctgatcccgcatccgaccattcgcaagatctccttcaccggctctacccgcgtgggcaagcatctggcggcgctggccggccagcatatgaaaaaggccaccatggagctgggcggccacgcgccggtgttgatcttcgacgacgccgatctcgacgcggcggccaaagagctggcgcagtccaagttccgcaacgccggccaggtctgtatcgccccgacccgcttcctgatccagcaaggcgtttatgaagacttcgtggagaaattcaccgccgccgtgcgtgaactcaagctcggcaacggtctggaagacggcatcaccatggggccgatggtgctgggccgcagcgtcgacaatatcgaggcgctggtgcaggatgccgtcgcccacggggcaaaagcctgcaccggcggcaagcgcgtggcgggcaaaggcaacttcttcgagccgacggtgctgcgcgacgtgccgctgagcgcccgcgccatgtcggaagagccgtttggcccggtcgccctgctgcgcccgttcgccacctatgacgaggcgatcgccgaagccaaccgcctgccgtacggcctggccgcctacgcttacagccgcaacatcgccaccgtcaatgcgctggggcgcgacgtggagagcggcatgctgagcatcaaccacatcggtttcggcctgccggaaacgccgtttggcggcgtgaaggactccggtcacggcaccgaaggcggcagcgaagcgatcgaatcctacctggaaacccgcttcgtcaccgtcgccggccgttaa

SEQ ID NO: 4140 - protein, 477 aa, Enterobacter cloacae
MYPDTQLYIDGQWRNALAGKTLPVTNPATDEIIGQVAHAATEDLDLALAATERGFNVWRDTAAHQRANLMRKAAALLRERANAIAAVMTQEQGKPAAQAKVEILNAADVIDWFAGEATRTYGQIIPSRARDVQQQTLKLPVGPVAAFTPWNFPINQIVRKLSAALAAGCSIIVKGPEETPASPAELIKAFADAGIPAGVIALVYGTPAEISEYLIPHPTIRKISFTGSTRVGKHLAALAGQHMKKATMELGGHAPVLIFDDADLDAAAKELAQSKFRNAGQVCIAPTRFLIQQGVYEDFVEKFTAAVRELKLGNGLEDGITMGPMVLGRSVDNIEALVQDAVAHGAKACTGGKRVAGKGNFFEPTVLRDVPLSARAMSEEPFGPVALLRPFATYDEAIAEANRLPYGLAAYAYSRNIATVNALGRDVESGMLSINHIGFGLPETPFGGVKDSGHGTEGGSEAIESYLETRFVTVAGR

SEQ ID NO: 4141 - DNA, 1170 bp, Enterobacter cloacae
atgctatcgcgtcgtgatatattgaaagtctccgccgtcagcgcggccgccgccggcatgatcggcggcatcgtaaaaaatgccgctgccgacgatcatcgcaatatcgtcccccccagcagctatcagccgcctgccgatgcgcagcatctctataaatacaaattcaccgacagcaagaagcgcagcctgcccagcggctgggcgcgcgaagccaccgtcgagcaattcccgatctccgaaggcgtggcgggcgtggacatgacgctggagccgggcggcgtgcgcgagctgcactggcacgccatcgccgccgaatgggcgtttatgctggaaggccatgcgcgcatcaccatcctcgatcccgagggcaaatgcgaagtggcggatttcggccccggtgacgtgtggtatttcccgaaaggctatggccattccattcaggcgctggcagatggcgcgcattttattctggcgttcgataacggccatttctccgagttcggcaccttcagcattaccgattgggtggcgcatatgccgaaagaggtattggaaaaaagcgtcaacatgccggcggcggtattttccaaggccaaacagggcgaggcttatattgtcgacggcgccgttccgcccaccttgccattgccgaaaaacgacggcggattaaataacaccccgctgacccaccgctatgaattaatgaagcaaaaaccgttctttgaaaatgacgccggcagcgtccatttggtgtcatcgaaagaatttcccatttccaccaccatgaccggcatcatcgagatcgtgaaacccggcgcgatccgggaattgcactggcaccccaatgccaacgaatggcaatactatattgccggcaaaggccggatgacggtgttcagctcacacggccacgcgcagacggaagagtacgccccttcggacgtcggttacgtgccgcagggcttcggccattacatcgagaacatcggcgatgaggatttgaaggtattgatcgtgatggacaacggcatttatcaggacatttcgctatccgactggctggcgaaaaccccggcctacctgctggcggacaacttcaataatcagattgaggactggcaggatagaccgaaagacaaacgggtgatgtcgcgccgcagccgctga

SEQ ID NO: 4142 - protein, 389 aa, Enterobacter cloacae
MLSRRDILKVSAVSAAAAGMIGGIVKNAAADDHRNIVPPSSYQPPADAQHLYKYKFTDSKKRSLPSGWAREATVEQFPISEGVAGVDMTLEPGGVRELHWHAIAAEWAFMLEGHARITILDPEGKCEVADFGPGDVWYFPKGYGHSIQALADGAHFILAFDNGHFSEFGTFSITDWVAHMPKEVLEKSVNMPAAVFSKAKQGEAYIVDGAVPPTLPLPKNDGGLNNTPLTHRYELMKQKPFFENDAGSVHLVSSKEFPISTTMTGIIEIVKPGAIRELHWHPNANEWQYYIAGKGRMTVFSSHGHAQTEEYAPSDVGYVPQGFGHYIENIGDEDLKVLIVMDNGIYQDISLSDWLAKTPAYLLADNFNNQIEDWQDRPKDKRVMSRRSR

SEQ ID NO: 4143 - DNA, 1305 bp, Enterobacter cloacae
atgagcaacgccttgaaagggctgttatggctgattatcgccgtggtggtgttggcgggaggatatgcgctgtacacgctgctgcggcccaccggcgcggagcctgcggcgccgatcgccggagcgccggccggcatcaccgataaactggcgcgcggcgagtacctggcgcgcgccgccgactgcgtggcgtgccacaccgcgccgggcggcacgccttatgcgggcggcttcgccttcaaactgccgttcggcaccatttacggcaccaacatcaccgccgacaaggagaccggcatcggcaactggagcgacgatcagttcgtgcgcgcggtgcgtgagggcatcggcccgcagggcaacctgtatccggcgatgccgtacacctcctacaccgggctgagccgcgacgacgtgctggcgatcaaagcctatctgttcagcctgccgccggtgaagcaggccaacccacaaaacgatctgtcgttcccgttcaatcagcgttggggcatgaaattctggaacctggcgttcttccatgagcaacgctttacgccggatctcaacaaggacgagcagtggaaccgcggcgcctatctggcaactgcgctgggccactgcggcgagtgccacacgccgcgcaatctggggttcggcctcaaccagagcaagcacctgagcggtgaagtggtgcagggctggttcgccgccaacatcacgccggacaaacagaccggcatcggcggctggagcgaccaacagctgtcgcaatatctggccaccggccatgcgccggggcgcagcagcgccgccggcccgatggcggaagcggtggaaaacagcctgcagttcctgacgccggaagataatctggcgctggtgaaatacctgcgcgatatcgaaccgatcgccggcgacgccgccgcggcggtgaatctgcagccgaagggcgcgggggcttccaccccgatcctgccgggcgggcaagagcagtcgctcgggcggcgggtgttcgccaacgactgcagcggctgccaccagtggaacgggccgggccgccagagcgagtatgcgtcgctggtgggcagcacggcggtgaacgatccgcaggggcgcagcgtggtgcaggccatcctgaaggggacgagcatcagcatcggcgatcggcatgaaatgatgccggcgttcggcagcgcctattccgacgaagaagtggcggcggtcgccaacttcgtggtcggccacttcggcgataagcagggcaacgtcaccgccaaacaggtggcggagcaacgcaagcagtag

SEQ ID NO: 4144 - protein, 434 aa, Enterobacter cloacae
MSNALKGLLWLIIAVVVLAGGYALYTLLRPTGAEPAAPIAGAPAGITDKLARGEYLARAADCVACHTAPGGTPYAGGFAFKLPFGTIYGTNITADKETGIGNWSDDQFVRAVREGIGPQGNLYPAMPYTSYTGLSRDDVLAIKAYLFSLPPVKQANPQNDLSFPFNQRWGMKFWNLAFFHEQRFTPDLNKDEQWNRGAYLATALGHCGECHTPRNLGFGLNQSKHLSGEVVQGWFAANITPDKQTGIGGWSDQQLSQYLATGHAPGRSSAAGPMAEAVENSLQFLTPEDNLALVKYLRDIEPIAGDAAAAVNLQPKGAGASTPILPGGQEQSLGRRVFANDCSGCHQWNGPGRQSEYASLVGSTAVNDPQGRSVVQAILKGTSISIGDRHEMMPAFGSAYSDEEVAAVANFVVGHFGDKQGNVTAKQVAEQRKQ

SEQ ID NO: 4145 - DNA, 3573 bp, Enterobacter cloacae
atgactgattcccgtccctcatcgccgagccaggccgaattgctgcagcgcgacggcgtgctgctgatcgtcgacagcgtgcaaccgccttcggggccggtgcccaaagggcaagcgccggtgctgaagcccagggagcaggggctgtttatcgccctgtgcgacagcggcgaaatctatgcctttaacggccatgtcgatctcggcaccggcgtgcgcaccgcgctcggccagatcgtcgccgaagagctgtacctgcgcatggatcaggtgcaaatggtgttgggcgataccgagcgcgcgccgaatcagggcgccaccatcgccagcgccacgctgcagatctccgccgtgccgctgcgcaacgccgccgccgaagcgcgccgttggctgttgcgccaggcggcgcagcgcttcgatgcgccggtggaacagctgacgctggaggagggcgtgatccgcagcccgcaggggcaggcgctgagctacgccgagctggtggccggcggtcatgtcgagctgtcgatttccggcgacgcgccgctcaaaccgcaggcggagtatcgcctggtgggcaccagcgccgcgcgcgtcgatattccggccaaggcgaccggcgaaaccacctacgtacacgatatgcgcctgccgaacatgctgcacggccgggtggtgcggccgccctatgccgggtacgacagcggcgaattcgtcggcaccagcctgctggcggtggacgaaacctcgatcgcgcatattcccggcatcgtcaaactggtggtgatcggcgatttcatcggcattgtcgccgagcgcgaagagcaggcgatcaaggcggcgcaggcgctgcaggtcagctggaaagactggcggcgcaatttgccgcagatgaccgacgtggcgcaggcgctgcgcgacaacccgcactcgacccgggtggtgcacgataccggcgatgtggacgcggcgctggcggcggccgacaggcgtttcacccgcagctacctgtggccgtatcagctgcatgcctcgattggcccttcctgcgcgctggcggactaccggccggagcgcctgcaggtctggtcgggcagccagaacccgcacctgctgcgcgccgatctggcctggctgctggaatacccggaagcgcagatcgagatcgttcgcatggaggcggccggttgctatggccgcaattgcgccgatgacgtctgcgccgacgcggcgctgctgtcgcgtgcggtgggcaggccggtgcgggtgcagctgacccgcgagcaagagcatgtgtgggaaccaaagggtaccgcgcagctgatggaggtggacggcgggctggacgccgccgggcatccggtcgcctacgattttcgcacctattatccttccaacggcgcgccgacgctggcgctgctgctgaccggccgggtcgagccgctgccggtggcctatgaaatgggcgaccgcacctcggtaccgccttacgaatatccggcgctgcgcgtcagcatcgaggacatggcgccgatcgtgcgcgcctcctggatgcgcggcgtttccgccttgccgaacaccttcgcccacgaatcttatatcgatgagctggcccacgccgccggcgtcgatccgctggaatatcggctgcgctatatcgatgacgaacgcgccagtgagctgatgcgcagcacggcagaacgcgccggctggacgccgcataccgaaccgatgcagaccccggcggaagacggcgtgctgcgcgggcgcggctttgcctacgcccgttacatccacagcaagtttcccggctttggcgcggcctgggccgcctgggtggccgacgtggcgatcgacaaagccagcggcgaagtggcggtgacgcgcatcgtggtcggccacgacgcgggcatgatggtcaacccggacggcgtgcgccaccaaattcacggcaacgtattgcaatcgaccagccgggtattgaaagagcgcgtgacctttgaggaatcgacggtctccgccaaagaatggggagcttacccgatcctgaccttcccggaggtgccggaagtggacgtggtgatgatgccgcgcccttacgatccgccgctgggcgccggggaatcggcgtcggtgcccagcgcggcggccatcgccaacgcggtattcgacgctaccggcattcgttttcgcgagctgccgatcacctcggacaaactgcgcgaggcgctgaacgggccggacaccgagcggcaggccgccccgcccaagaaaaagaagcgcggcaaatggtggttcggcggcgcggcggggctgttcggcgcggtgctgggcatcgccggcagcgccttgccgtggcgggcggagatcgcgccggtggcgacgcccggcgccggcacctggtcggcggccacgctggagcgcggccgccagttggccgctgccggagactgcgcggtttgccataccgcgtcggaaggggcgaccaacgccggcgggctggcgatggcgacgccgttcggcacgctctacagcaccaacattaccccggacgtggcaaccggcatcggcaactggtcgtttaccgcgttcgatcgggcgatgcgccagggcatcgcccgcgacggccgccatctgtatccggcatttccttacaccgccttcagcaaaatgaccgacggcgacatgcaggcgctgtacgcttatctgatgtcgcaaccggcggtgcgccagagcaatccggccaatcagatgcgcttcccgtttaacctgcggccgctgatggccggctggaacgcgctgttcctgcgtcagggggaatttcaacccgatccgcaacaaagcgcgcagtggaaccgcggcgcctatctggtcaacgggctcggccactgcgccgcctgccattcgccgcgcaatctgctgggggcggaaaagggcggcgcggctttcctggcggggggaatggtggacgggtgggaagcgccggcgctgaatcaattggccaatgcggacaagccctggaccgaggaacagctgtttcagtacttccgcagcgggcattccgccgagcacggcgtggcggccgggccgatggggccggtggtcagcgaactggcgacgttgccgcagagcgatctgcgggcgatggccaactatgtgatgtcgctgagcaccaaggcgacgctgaatgtggaaccgcaggcgcagttggcggcccgcgccttgccggcggcggggcaactggccggcgagcggttatttcagggcgcttgccaggcctgccacagcgccgccgccggcgggccgcagctgttcggcgtcagtcccgatctggccaataacaccaatatcttcagcgatcgccccgataacctgatcaaggtgatcctgcaagggatccccaaaccggctaccgccgaattgggctttatgccgggctttaaggacagcttttccgatcggcaggtgacggcgctggtgaattatctgcgccaacgctatgccggcgacaaaccggcctggcgcgacgtggaggagcaggtggcgcggctgcgcgcggagccgggaaatcattaa

SEQ ID NO: 4146 - protein, 1190 aa, Enterobacter cloacae
MTDSRPSSPSQAELLQRDGVLLIVDSVQPPSGPVPKGQAPVLKPREQGLFIALCDSGEIYAFNGHVDLGTGVRTALGQIVAEELYLRMDQVQMVLGDTERAPNQGATIASATLQISAVPLRNAAAEARRWLLRQAAQRFDAPVEQLTLEEGVIRSPQGQALSYAELVAGGHVELSISGDAPLKPQAEYRLVGTSAARVDIPAKATGETTYVHDMRLPNMLHGRVVRPPYAGYDSGEFVGTSLLAVDETSIAHIPGIVKLVVIGDFIGIVAEREEQAIKAAQALQVSWKDWRRNLPQMTDVAQALRDNPHSTRVVHDTGDVDAALAAADRRFTRSYLWPYQLHASIGPSCALADYRPERLQVWSGSQNPHLLRADLAWLLEYPEAQIEIVRMEAAGCYGRNCADDVCADAALLSRAVGRPVRVQLTREQEHVWEPKGTAQLMEVDGGLDAAGHPVAYDFRTYYPSNGAPTLALLLTGRVEPLPVAYEMGDRTSVPPYEYPALRVSIEDMAPIVRASWMRGVSALPNTFAHESYIDELAHAAGVDPLEYRLRYIDDERASELMRSTAERAGWTPHTEPMQTPAEDGVLRGRGFAYARYIHSKFPGFGAAWAAWVADVAIDKASGEVAVTRIVVGHDAGMMVNPDGVRHQIHGNVLQSTSRVLKERVTFEESTVSAKEWGAYPILTFPEVPEVDVVMMPRPYDPPLGAGESASVPSAAAIANAVFDATGIRFRELPITSDKLREALNGPDTERQAAPPKKKKRGKWWFGGAAGLFGAVLGIAGSALPWRAEIAPVATPGAGTWSAATLERGRQLAAAGDCAVCHTASEGATNAGGLAMATPFGTLYSTNITPDVATGIGNWSFTAFDRAMRQGIARDGRHLYPAFPYTAFSKMTDGDMQALYAYLMSQPAVRQSNPANQMRFPFNLRPLMAGWNALFLRQGEFQPDPQQSAQWNRGAYLVNGLGHCAACHSPRNLLGAEKGGAAFLAGGMVDGWEAPALNQLANADKPWTEEQLFQYFRSGHSAEHGVAAGPMGPVVSELATLPQSDLRAMANYVMSLSTKATLNVEPQAQLAARALPAAGQLAGERLFQGACQACHSAAAGGPQLFGVSPDLANNTNIFSDRPDNLIKVILQGIPKPATAELGFMPGFKDSFSDRQVTALVNYLRQRYAGDKPAWRDVEEQVARLRAEPGNH

SEQ ID NO: 4147 - DNA, 543 bp, Enterobacter cloacae
atggcgatatctgaagtgcagtcgcccagggaaggcgcgaaaaccacgctgacggagcatccgctgatgctgtcggtgaacggcgaacagcttcatgcgcaggtgatggcggatacgccgctcttgctggtactgcgcaacgatctggcgctcaacggcccgaaatacggctgcggcctgggcgaatgcggcgcctgtaccgtgttgatcgacggcgtggcggcgcgctcctgcgtgatcccggcgctcggcgtgtccggccgggcgatcgtgaccctggaaggccttggcgatcgccagcgcccgcacccggtgcagcgcgcctttatcgaagagcaggcggcgcaatgcggctactgcctcaacggcatgatcatgaccaccaaagccctgttggatcgcaatcccgccccgagcgaggcggagatccgtcaggcgctgtccggcaacctgtgccgctgcggcacccatctcgaaatcctgcgtgcggttcagcgcgccatcattctctgccgcgatgagggcgcccacgcttatgactga

SEQ ID NO: 4148 - protein, 180 aa, Enterobacter cloacae
MAISEVQSPREGAKTTLTEHPLMLSVNGEQLHAQVMADTPLLLVLRNDLALNGPKYGCGLGECGACTVLIDGVAARSCVIPALGVSGRAIVTLEGLGDRQRPHPVQRAFIEEQAAQCGYCLNGMIMTTKALLDRNPAPSEAEIRQALSGNLCRCGTHLEILRAVQRAIILCRDEGAHAYD

SEQ ID NO: 4149 - DNA, 474 bp, Enterobacter cloacae
atgacgccccccgaatacccgtcagccgtgagcggccaacccgaaaattatcattttaccgagcaagtcgggcacctgctgcgcaaggtttatcagcgccacctggcgatttttcagcaaaacgtcggcgattcgcagctgacggcggtgcagttcatcaccctgtgcgcggtgcgcgatatggggccgagctcgctgaccgagctggtgcaggtgacggcggtggatcaggccaccatacgcggcatcgtcgagcggctaaaggcgcgcgatctgatcacggtgacgccggatccggtggatcggcgcaaggtggtggtcggcctgaccgacgccggcgccgtgctgctgacggaaacggtgccgcaggcggcgaaaatcacagagctgacgttcggcacgctcaacccggccgaacggatagcgctgatattcctgctgaataaaatgctggaagatccgcccaccggctga

SEQ ID NO: 4150 - protein, 157 aa, Enterobacter cloacae
MTPPEYPSAVSGQPENYHFTEQVGHLLRKVYQRHLAIFQQNVGDSQLTAVQFITLCAVRDMGPSSLTELVQVTAVDQATIRGIVERLKARDLITVTPDPVDRRKVVVGLTDAGAVLLTETVPQAAKITELTFGTLNPAERIALIFLLNKMLEDPPTG

SEQ ID NO: 4151 - DNA, 978 bp, Enterobacter cloacae
atgaaaaaggtgctggccctgtgcctgagcggctattccgcgctggcgatcgccggctttgacgtggtggcgctcggcgtcgacggcggcgtcagcgacggcaacctgacctcctacctgatccgcagcgacaatcagccgcggtatgtggcgctggacgccggttcgctgttgccgggcattgccaaagggctggagaagggcagcttcccgcaggtgacgcccgagctggccgcgccttacacgccgcagggctatgtgttccggcagttgatcggcagctactttatcagccacggccacctggaccacgtggcggggctgatcctcggctcgcccgaggacaataaaaaaaccgtttacgcccaggcggacaccgtactgaccctgcgtaatcactacttcaactggaaggcgtggccgaactttaccgacgccggcaacggctcgcggctgggcacctaccggctgcaaacggtgcggccgcagcagcggtttaccctcggcctgaccggattgaccggcgtgatgtacccgctcagccacgatcgctatccgtcgtcgatgctgctgatttccaacggcaatgagttcttcgcctacttcggcgataccgggccggataaggtggagcagtcgcgcgatctcgataccgtctggcgcgcgctggggccgcttgtcgagcagaagaagctcaagggcatgattatcgaaacctcttaccctaacggggtggaggataaacatctgtacggccatttgacgccggcctggctgctgaaggagctgaagaacctgacgcagtacagcggcggcgaaggctcgctgaacggtttgccggtggtgatcagccacatcaagcccagcctgaagcagggcgaagatgtgcgcgccgccattgcgcaacagctggcgcagggcaacgatctgggggtgaaattcatcctgatggcgcagggcgaccggcagacattttga

SEQ ID NO: 4152 - protein, 325 aa, Enterobacter cloacae
MKKVLALCLSGYSALAIAGFDVVALGVDGGVSDGNLTSYLIRSDNQPRYVALDAGSLLPGIAKGLEKGSFPQVTPELAAPYTPQGYVFRQLIGSYFISHGHLDHVAGLILGSPEDNKKTVYAQADTVLTLRNHYFNWKAWPNFTDAGNGSRLGTYRLQTVRPQQRFTLGLTGLTGVMYPLSHDRYPSSMLLISNGNEFFAYFGDTGPDKVEQSRDLDTVWRALGPLVEQKKLKGMIIETSYPNGVEDKHLYGHLTPAWLLKELKNLTQYSGGEGSLNGLPVVISHIKPSLKQGEDVRAAIAQQLAQGNDLGVKFILMAQGDRQTF

SEQ ID NO: 4153 - DNA, 210 bp, Enterobacter cloacae
atgtctacgacctatcacgcttattcactgcatcggattctcctgcgccgcagcgcagtggttatcgcgggcattttggccctgccggtgatgctgttccgcagcgatcgcgggcgtttttacagctacctgcaccgcgtctggtcaaaaaccagcgataagccggtctggctgcagcaggcggaactggcgtcctgcgatttctactga

SEQ ID NO: 4154 - protein, 69 aa, Enterobacter cloacae
MSTTYHAYSLHRILLRRSAVVIAGILALPVMLFRSDRGRFYSYLHRVWSKTSDKPVWLQQAELASCDFY

SEQ ID NO: 4155 - DNA, 273 bp, Kluyvera intermedia
gtgaataagtcacaactgatcgacaagattgccgcaggtgctgatatttccaaagcggcagcgggacgtgctttagacgcagtaatcgcttccgttaccgactctctgaaagcaggggatgacgtggctctggtaggtttcggttccttcaccgtgcgtgaacgttcggctcgtaccggccgcaacccgcagaccggtaaagagatcaaaatcgcggcagccaaagtaccggccttccgtgcagggaaagcgctgaaagacgctgtaaactga

SEQ ID NO: 4156 - protein, 90 aa, Kluyvera intermedia
MNKSQLIDKIAAGADISKAAAGRALDAVIASVTDSLKAGDDVALVGFGSFTVRERSARTGRNPQTGKEIKIAAAKVPAFRAGKALKDAVN

SEQ ID NO: 4157 - DNA, 1713 bp, Enterobacter cloacae
atgcagaaaaaaacgttggcggtggcgttgagcggcgccttatcgggcctggcgcagggggcggacgccgatcgccccaatgtgctgatcattctggtggacgacatgggctactccgacatcagcccgttcggcggtgagataccgacgcccaacctgcaggcgttggccgaacggggcgtgcgcatgagccagtactacacctcgccgatgtcggcgccggcgcggtcgatgctgatgaccggcaacaccaatcagcaggccggcatgggcggaatgtggtggtatgagagcaccgccgcgcagccgggctatgaaatgcgcctgaccgaccgcgtgaccacgctgccggagcgttttcgcgatgcgggttacgccaccatgatggcgggcaaatggcatctgggctatgtcgacggcgccaaaccgaccgatcgcggcttcgagcgcgccttcgcctttatgggcggcggcaccagccatttcgacgatgcgaaaccgctgggcaccgtggaggcgttccacaccttctacactctgaacggcaaacgcgtgtcgttgcccaaagatttctattccagcaaggcctatgccgatcaactggaacagtggatccgcgatacgccgcaaaataagcccgtcttcgcctatctggccttcaccgcgccgcacgatccattgcaggcgccggatgactggatcgccaaattcgacggcaaatacgacgccggttaccagcaggcctatcagcagcgcattcagcgcctgaaagcgctgggattgatttccgaacgcacgccgatgccgacgctggcgctggataaggcctggaacgcgctgacgcccgagcagcaaaaatatgaagccaagaccatgcaggtgtacgcggcgatgatcgcttacatggacgatcaggtcggcgcggtgctgaacaccctgaagcagaccggccgcgaccaaaatacggtgatcgtgttcgccaccgacaacggcgccaaccccgccagcggcttctactacggctcgaagccggagtattggcggcagttcgacaacagctacgccaacctcggccgcaagggctcgttcatctcctacgggccgcactgggccaacgtcagcaacgcgccgtacgccaattaccacaaaaccaccagcgcgcagggcggcatcaataccgatttcatcatctccgcgccgcggctgaaggggcgcggcggcatcgaccgcacgccgatggcggtgtatgacatcgccccgacgctgtatgactatgccggcatcgacgccaacaaaccgctgaaggccaaaccgaccctgccgatggtcggcgtcagcttcaaacgctatttcagcggcgaggccgacggcgtgccgcgcgcgacctacggcgtggagctgcataaccaggccgcctatgtggacggcgtctggaagctgcggcggttggtgaaggccgggccgacggcgcagatggcgccgtgggggctgttcaacctgcatgacgatccgctggaaacgcgcgatctggccgccgccaacccggagcgagtcaaacggctgagcgaggcgtatcgccgctttgcgcagcagggcatggtcattgaagccaaaggcgcagcgatcgactacctcggcgtcgacgccagcaccggcgactacatcggcctggatccgttgactcacaaaccgttgccgcaggcggcgccatga

SEQ ID NO: 4158 - protein, 570 aa, Enterobacter cloacae
MQKKTLAVALSGALSGLAQGADADRPNVLIILVDDMGYSDISPFGGEIPTPNLQALAERGVRMSQYYTSPMSAPARSMLMTGNTNQQAGMGGMWWYESTAAQPGYEMRLTDRVTTLPERFRDAGYATMMAGKWHLGYVDGAKPTDRGFERAFAFMGGGTSHFDDAKPLGTVEAFHTFYTLNGKRVSLPKDFYSSKAYADQLEQWIRDTPQNKPVFAYLAFTAPHDPLQAPDDWIAKFDGKYDAGYQQAYQQRIQRLKALGLISERTPMPTLALDKAWNALTPEQQKYEAKTMQVYAAMIAYMDDQVGAVLNTLKQTGRDQNTVIVFATDNGANPASGFYYGSKPEYWRQFDNSYANLGRKGSFISYGPHWANVSNAPYANYHKTTSAQGGINTDFIISAPRLKGRGGIDRTPMAVYDIAPTLYDYAGIDANKPLKAKPTLPMVGVSFKRYFSGEADGVPRATYGVELHNQAAYVDGVWKLRRLVKAGPTAQMAPWGLFNLHDDPLETRDLAAANPERVKRLSEAYRRFAQQGMVIEAKGAAIDYLGVDASTGDYIGLDPLTHKPLPQAAP

SEQ ID NO: 4159 - DNA, 594 bp, Enterobacter cloacae
atgaacaaaacttcccgtaccctattctctctgggcctgctgagcgcagccatgttcggcgtttcgcaacaggcgaatgctcacggttatgtcgaatcgccggccagccgcgcttatcagtgcaaactgcagctcaacacccagtgcggcagcgtgcagtatgaaccgcagagcgtcgaaggcctgaaaggcttcccgcaggccggcccggctgacggccacatcgccagcgccgacaagtccaccttcttcgaactggatcagcaaacgccgacgcgctggaacaagctcaacctgaaaaccggcccgaactcctttacctggaagctgaccgcgcgtcacagcaccaccagctggcgctatttcatcaccaagccgaactgggacgcttcgcagccgctgacccgcgcctcctttgatctgacgccgttctgccagttcaacgacggcggcgccatccctgccgcacaggttacccaccaatgcaatataccggcagatcgcagcggttcgcacgtgatccttgccgtgtgggatatagccgacaccgccaacgccttctatcaggcgatcgacgtcaacctgagcaaataa

SEQ ID NO: 4160 - protein, 197 aa, Enterobacter cloacae
MNKTSRTLFSLGLLSAAMFGVSQQANAHGYVESPASRAYQCKLQLNTQCGSVQYEPQSVEGLKGFPQAGPADGHIASADKSTFFELDQQTPTRWNKLNLKTGPNSFTWKLTARHSTTSWRYFITKPNWDASQPLTRASFDLTPFCQFNDGGAIPAAQVTHQCNIPADRSGSHVILAVWDIADTANAFYQAIDVNLSK

SEQ ID NO: 4161 - DNA, 651 bp, Enterobacter cloacae
atggagtactacggatatattttgctcaaatttgttattggctttgtcattgttatcacccacttgaacttgtccggaaagacccagctatcgcaaatgacccctgtggattttatcggcaactttgtgctcgggggcattattgggggcgttatctatagcgatagcatccccttgtaccagtatgtcgttgtactgcttatcggtgtaggactaatttctctgttgaatgcaatcagtaaacactgcaacttctttcgttcggtcactatcggcaacccgataccaattataaaaaacggccgctttttaatggaaaatattttggccaagaaaaataaaatcgatatcttgaacgtttcctcacagctgcatgcgcaggggattcacgcttttcaagagattgtctatgcgcaaattgagccgggcggtcagatcaccgcggtatgtgagggaaatgagctgccttcgattatcattatgaaaaatggcagggccaggccttatgagctgcaggagattaataaagatgaggagtggttgagccaaactatccgtgaacacggtatagagccgaaagatatttttattgctgagttttgggacgggagaactgcgttcattcttaatgacggacgcatggtcaaatag

SEQ ID NO: 4162 - protein, 216 aa, Enterobacter cloacae
MEYYGYILLKFVIGFVIVITHLNLSGKTQLSQMTPVDFIGNFVLGGIIGGVIYSDSIPLYQYVVVLLIGVGLISLLNAISKHCNFFRSVTIGNPIPIIKNGRFLMENILAKKNKIDILNVSSQLHAQGIHAFQEIVYAQIEPGGQITAVCEGNELPSIIIMKNGRARPYELQEINKDEEWLSQTIREHGIEPKDIFIAEFWDGRTAFILNDGRMVK

SEQ ID NO: 4163 - DNA, 621 bp, Enterobacter cloacae
gtgcaaaaaaaattagactcgctgctcgcggcagcaggcattgagctgcccgatcagcagaaacagcagctgctgggctatgtcggcatgctggataagtggaacaaggcttataacctcacgtcggtgcgcgatccgcagcaaatgctggtgcgccacatcctcgatagcatcgtggtcaacccgcatctgcagggctcgcgttttatcgatgtcggcaccggccccggcttgccgggcattccgctggcgatcgtgcgcccggacgcgcatttcacgctgctcgacagcctgggcaagcgcgtgcgtttcctgcgtcaggtgcagcatgagctgggcctgaacaatatcgagccggtgcagagccgcgttgaggagtttccggccgagccaccgttcgacggcgtgatcagccgcgcgttcgcttcgctgcaggatatgctgtcctggtgccatcacctgccggcgaaagggcaggggcgtttttacgcgttgaaaggcgtgcgcccggatgaagagctggcgcagctgccggcgggcgttagcctggaatccatcgtgcggttgcaggtgcctgaattggaaggcgaacgccatctggtgattcttaaggcaaactga

SEQ ID NO: 4164 - protein, 206 aa, Enterobacter cloacae
MQKKLDSLLAAAGIELPDQQKQQLLGYVGMLDKWNKAYNLTSVRDPQQMLVRHILDSIVVNPHLQGSRFIDVGTGPGLPGIPLAIVRPDAHFTLLDSLGKRVRFLRQVQHELGLNNIEPVQSRVEEFPAEPPFDGVISRAFASLQDMLSWCHHLPAKGQGRFYALKGVRPDEELAQLPAGVSLESIVRLQVPELEGERHLVILKAN

SEQ ID NO: 4165 - DNA, 912 bp, Enterobacter cloacae
atggccagttcccttccgccgctttacgccctgcgcgccttcgaaagcgccgcccgcaccggctcgttcacgctggccgccgaggagctgcatctcaccccgagcgccgtcagcaagcacatcaaaacgctggagcagcacttcggctgtcgactgttccagcgcaacggcccgcgcatcgaggtcacgccgcaggggaaaatcttcgccgccgagctgcagcaaggttttggccgcatcgagcaagcctgcgagctgttcagaagccaccgcgatctgctgcggctgaaggcgccctccacgctgaccctgcgctggctgctggactgcctgagccggttccggcaaacggcgcaggcgttcgaggtgcaggcagccagcgtctggatggacatcgacagcgtggattttttcagcgaaccctacgactgcgccatcctgctcggcaacggccacttcggcgccaacaccgccgccgccaagctgttcgacgaatggctgatcccgatttgcgcccctgcactgctcgccgacgggcagcgcgatctcgccgcctgtccgctgatccacccttcgcccgatcggcgcgactggcggcgctggctgcaaaaaagcggcatcgcggccccgatcgatctcacgcgcggccaggtatttgattcgctggaacagggcaacacggcggccatcgccgggcacggcgtctcgatcggcgatctggcgctgagcctgcggacgattgaggaggggttattggcgctgccctgtgacgccgccgtgcgtaccggcgacggttactatctggtttggccggaagaatcggcgaaacggccgctgatcgaacgcttacaggcgtttctgaccgcccagacgcccgacgtcagccgggccgccgtcagatttatcgggtag

SEQ ID NO: 4166 - protein, 303 aa, Enterobacter cloacae
MASSLPPLYALRAFESAARTGSFTLAAEELHLTPSAVSKHIKTLEQHFGCRLFQRNGPRIEVTPQGKIFAAELQQGFGRIEQACELFRSHRDLLRLKAPSTLTLRWLLDCLSRFRQTAQAFEVQAASVWMDIDSVDFFSEPYDCAILLGNGHFGANTAAAKLFDEWLIPICAPALLADGQRDLAACPLIHPSPDRRDWRRWLQKSGIAAPIDLTRGQVFDSLEQGNTAAIAGHGVSIGDLALSLRTIEEGLLALPCDAAVRTGDGYYLVWPEESAKRPLIERLQAFLTAQTPDVSRAAVRFIG

SEQ ID NO: 4167 - DNA, 1608 bp, Serratia marcescens
atgacacgttccttgggtaaatcgggggttctgaaattcggcattgggctgatcgcgctgaccgtggcggccagcgtacaggccaagacgttggtttactgttctgaaggttccccggaagggttcaacccgcagctgtttacctccggcaccacctacgacgccagctcggtaccgatttacaaccgcctggtcgaattcaaaatcggcaccaccgaactgcagccgggcctggctgagaagtgggacgtcagcgaagacggcaaaacctacaccttccacctgcgcaaaggcgtgaagtggcagagcagcaaagacttcaaaccgacgcgcgatttcaacgccgacgacgtggtgttctcctttgaacgccagttggatgcgaacaacgcctatcacaaagtgtccggcggcagctacgaatactttgaaggcatggacatgcctaagctgatcgccaagattgaaaaagtggacgacaacaccgtgcgcttcgtgctgaaccgcccggaagcgccgttcctggctgacctgggtatggacttcgcgtccatcctgtccgccgaatacgccgacgtgatgatgaaagccggcacgccggagaaagtcgacctgaacccgatcggcaccggcccgttccagctgctgcaataccagaaagactccaagatcctgtacaaggcattcgacggtttctggggcaccaagccgaagatcgatcgcctggtgttctccatcacgcctgacgcctccgtgcgctacgccaaactgcagaaaaacgaatgtcaggtgatgccgtacccgaacccggccgatatcgcccgcatgaagcaagacaagtccatcaacctgatggaacagccgggcctgaacgtgggttacctgtcgttcaacgtcgagaaaaaaccgctggataacctgaaggtgcgtcaggcgttgaccatggcggtcaacaagcaggcgatcatcgacgcggtttatcagggcgcgggccaggcggccaagaacctgatcccaccgaccatgtggggctataacgacgcggtgcaggattacgcttacgatccggccaaggcgaaagagctgctgaaagaagcgggcatggccgacggtttcagcatcgacctgtgggcgatgccggtacagcgtccttacaacccgaacgcgcgccgcatggcggaaatgatccaggccgactgggccaagatcggcgtgaaagccaaaatcgtgacctatgagtggggtgaatacctcaagcgcgccaaagcgggcgagcaccagacggtgatgatgggttggaccggcgacaacggggatccggacaacttcttcgccacgctgttcagctgcgcggcggcgaaagacggctccaactactcccgctggtgctacaagccgtttgaagatctgattcaaccggcgcgcgccgaatccaaccacgacaagcgcatcgaactgtacaagcaggcgcaggtggtgatgcacgatcaggctccggcgctgattgtcgcacactccaccgtgtacgagcctgtgcgtaaggaagtgaaaggctacgtcgtggatccgctcggtaagcatcacttcgagaatgtctctgtagactga

SEQ ID NO: 4168 - protein, 535 aa, Serratia marcescens
MTRSLGKSGVLKFGIGLIALTVAASVQAKTLVYCSEGSPEGFNPQLFTSGTTYDASSVPIYNRLVEFKIGTTELQPGLAEKWDVSEDGKTYTFHLRKGVKWQSSKDFKPTRDFNADDVVFSFERQLDANNAYHKVSGGSYEYFEGMDMPKLIAKIEKVDDNTVRFVLNRPEAPFLADLGMDFASILSAEYADVMMKAGTPEKVDLNPIGTGPFQLLQYQKDSKILYKAFDGFWGTKPKIDRLVFSITPDASVRYAKLQKNECQVMPYPNPADIARMKQDKSINLMEQPGLNVGYLSFNVEKKPLDNLKVRQALTMAVNKQAIIDAVYQGAGQAAKNLIPPTMWGYNDAVQDYAYDPAKAKELLKEAGMADGFSIDLWAMPVQRPYNPNARRMAEMIQADWAKIGVKAKIVTYEWGEYLKRAKAGEHQTVMMGWTGDNGDPDNFFATLFSCAAAKDGSNYSRWCYKPFEDLIQPARAESNHDKRIELYKQAQVVMHDQAPALIVAHSTVYEPVRKEVKGYVVDPLGKHHFENVSVD

SEQ ID NO: 4169 - DNA, 1020 bp, Klebsiella oxytoca
atgttgcagttcatactccgacgtttggggttagttatcccaacgtttatcggcattacattgctgacttttgcattcgtccatatgatccccggcgacccggtgaccatcatggccggggaacgcggtatctccgccgagcgccacgcgcagctgatggcggaaatggggctggacaagccgctctatcaacaatatttctcctacgtgtccaacgtgctgcaaggcgatctgggcacctccctcaaaagccgcatctccgtctggagcgagttcgttccgcgctttcaggccacgctggaactgggcatttgcgcgatgatcttcgcggtgctggtaggcatcccggtcggggtgctggcggcggtcaaacgcggctcggtcttcgaccataccgcggtgggcatctcgctgaccggctattcgatgccgattttctggtggggcatgatgctgatcatgctggtgtcggtgcagcttaacctgacgccggtgtcggggcgcatcagcgacacggtcttcctcgacgacagccagccgctgaccggcttcatgctgatagacaccctgatctggggcgagccgggcgacttcgtcgacgcggtgatgcacatgatcctgccggccatcgtgctgggcaccatcccgctggcggtgatcgtgcgcatgacccgttcctcgatgctggaggtgttgggcgaagactacatccgcaccgcgcgcgccaagggcgtgagccgcatgcgggtgatcgtcgttcacgcgctgcgcaacgcgctgctgccggtggtgacggtgattgggctgcaggtcggcaccatgctggccggcgccattctgaccgaaaccatcttctcctggccggggctgggccgctggctgatcgacgcgctgcagcgccgcgactacccggtggtgcagggcggggtgttgctggtcgcctgtatgatcattctggttaacctgctggtagacgtgctctacggcgtggtcaacccgcgtattcgccacaagaaataa

SEQ ID NO: 4170 - protein, 339 aa, Klebsiella oxytoca
MLQFILRRLGLVIPTFIGITLLTFAFVHMIPGDPVTIMAGERGISAERHAQLMAEMGLDKPLYQQYFSYVSNVLQGDLGTSLKSRISVWSEFVPRFQATLELGICAMIFAVLVGIPVGVLAAVKRGSVFDHTAVGISLTGYSMPIFWWGMMLIMLVSVQLNLTPVSGRISDTVFLDDSQPLTGFMLIDTLIWGEPGDFVDAVMHMILPAIVLGTIPLAVIVRMTRSSMLEVLGEDYIRTARAKGVSRMRVIVVHALRNALLPVVTVIGLQVGTMLAGAILTETIFSWPGLGRWLIDALQRRDYPVVQGGVLLVACMIILVNLLVDVLYGVVNPRIRHKK

SEQ ID NO: 4171 - DNA, 903 bp, Citrobacter koseri
atgtctcaaatcactgagtctgcagttaaaggtgcgccgaagccgatgaccccgtttcaggagttctggcactatttcaagcgcaataaaggggccgtggtcggcctggtgtatatcgttctgatgctggtgatcgcgctcggcgccggcgtgctggcgccgcatgcgccggcggaccagttccgcgacgcgctgctcaagccgccggtgtggcaagagggcggcagctggcaatatatcctcggcaccgacgacgtgggccgcgacgtgctgtcgcgcctgatgtacggtgcgcgcctgtcgctgctggtcggctgcctggtggtggtgctgtcgctgatcatgggcgtgatattcggcctgctggccggttacttcggcggcgtggtggacgcgattatcatgcgcgtcgtcgacatcatgctggccctgccgagcctgctgctggcgctggtgctggtggcggtattcgggccgtcgatcgtcaacgcctcgctggcgctgaccttcgtcgccctgccgcactatgtgcgtctgacgcgcgcagcggtgctggtggaggtgaaccgcgactacgtcaccgcttcgcgggtggcgggcgccggcgcgctgcgccagatgttcgtcaatattctgcctaactgcctggcgcctttgatcgtgcaggcttctctcggtttctcgaacgccattctggacatggccgctctcggctttctgggcatgggcgcgcagccgccgacgccggagtggggcaccatgctctccgacgtgctgcagttcgcgcaaagcgcctggtgggtggtgaccttccccggcgtggcgatcctgctgacggtgctggcattcaacctgatgggggacggtttgcgtgacgctctcgaccccaaactcaagcagtaa

SEQ ID NO: 4172 - protein, 300 aa, Citrobacter koseri
MSQITESAVKGAPKPMTPFQEFWHYFKRNKGAVVGLVYIVLMLVIALGAGVLAPHAPADQFRDALLKPPVWQEGGSWQYILGTDDVGRDVLSRLMYGARLSLLVGCLVVVLSLIMGVIFGLLAGYFGGVVDAIIMRVVDIMLALPSLLLALVLVAVFGPSIVNASLALTFVALPHYVRLTRAAVLVEVNRDYVTASRVAGAGALRQMFVNILPNCLAPLIVQASLGFSNAILDMAALGFLGMGAQPPTPEWGTMLSDVLQFAQSAWWVVTFPGVAILLTVLAFNLMGDGLRDALDPKLKQ

SEQ ID NO: 4173 - DNA, 981 bp, Serratia marcescens
atggctttattgaatgtagacaagctttcggtgcacttcggtgacgaaggcaccccgttccgcgcggtagaccgcatcagttacagcgtggagcaaggtcaggtggtcggcatcgtcggtgaatccggctccggcaaatccgtcagctcgctggcgatcatgggcctgatcgatttccccggcaaggtgatggccgacaagctggagttcaacggccaggatctgcgcaagatctccgaaaaagagcgccgccagctggtgggctccgaagtggcgatgatcttccaggatccgatgaccagcctgaacccgtgctataccgtcggttatcagatcatggaggcgctgaaggtgcaccagggcggcaaccgccgcactcgccgccagcgcgctatcgacctgctgacccaggtgggcattcccgatccggcctcgcggctggacgtatacccgcaccagctttccggcggcatgagccagcgcgtgatgatcgccatggccatcgcctgtcggccgaagctgctgatcgccgatgagccgacgaccgcgctcgacgtgaccatccaggcgcagatcatcgaactgctgctggatctgcagcagcgcgaaaacatggcgctgctgctgatcactcacgatctggcgctggtggcggaagccgcgcaccacatcatcgtgatgtacgccggccaggtggtggaatccggcaaggcggcggagattttccgcgccccgcgccacccgtacacccaggcgctgctgcgcgcgctgccggagttcgccgccgacaaggcgcggctggcttcgctgccgggcgtggtgccgggcaagtacgatcgcccgaccggctgcctgctcaacccgcgttgtccctacgccaacgagcgctgccgcaacgaggagccggaactgcgcagcattcccggccgtcaggttaaatgtcacacaccgctggatgatgcggggaggccgaccgtatga

SEQ ID NO: 4174 - protein, 326 aa, Serratia marcescens
MALLNVDKLSVHFGDEGTPFRAVDRISYSVEQGQVVGIVGESGSGKSVSSLAIMGLIDFPGKVMADKLEFNGQDLRKISEKERRQLVGSEVAMIFQDPMTSLNPCYTVGYQIMEALKVHQGGNRRTRRQRAIDLLTQVGIPDPASRLDVYPHQLSGGMSQRVMIAMAIACRPKLLIADEPTTALDVTIQAQIIELLLDLQQRENMALLLITHDLALVAEAAHHIIVMYAGQVVESGKAAEIFRAPRHPYTQALLRALPEFAADKARLASLPGVVPGKYDRPTGCLLNPRCPYANERCRNEEPELRSIPGRQVKCHTPLDDAGRPTV

SEQ ID NO: 4175 - DNA, 375 bp, Enterobacter cloacae
atggggctgctcgatcaatgggcggaacgccatatccttgatgcccaagataaaggcgagttcgacaatctgcccggccagggtcaaccgttggcgctggaagatgacagcgcggtgccggctgaactgcgcgccggttaccgtttgctgaaaaatgccggttacctgccgccggagctggaagatcgcaaagaggcgttgaccgttgctcgtttgctgcaagggattaacagtgagcatcaggactatgtcgaactcagcaaacgcatggcgctgctggagcaccggttgcgtcaggctgggatgagtacggatttcttgcatggtgaatatcagcgtgcattggacggtaaattcacccgggaggagaagtaa

SEQ ID NO: 4176 - protein, 124 aa, Enterobacter cloacae
MGLLDQWAERHILDAQDKGEFDNLPGQGQPLALEDDSAVPAELRAGYRLLKNAGYLPPELEDRKEALTVARLLQGINSEHQDYVELSKRMALLEHRLRQAGMSTDFLHGEYQRALDGKFTREEK

SEQ ID NO: 4177 - DNA, 1035 bp, Enterobacter cloacae
atgacagttcggaaacaatcatccggtaagtggttatgtgagtgctaccctgctggccgagaaggtcgcagggtacgtaagcagttcgcaaccaaaggtgaagccttggcatttgagcgcttcactatggaacaggtggacaataagccgtggttaggtgaggcaattgaccgccgcaagctgagcgatatcgccaaactttggtacaacctacacggacaatccctcaccgctggtgaacgtacctacaaaaaactatgccttgtcatcgaagccctaggcgatcctcctgctaccaccttcaccgcaaaagacttcgcgcattatcgtgataagcgtctgtccggtgaaatctacttttcagagaagtggaaaaacggcgcagaacctgtgaccgtcaatcttgagcaaagctacctaagcggcatgtttagcgagttggcacggctaggcgaatggaaccagcccaatccgttggaaaacatgcgcaagtttaccgttgcagaaaaggaaatggcgtggctgacgcactcacaaatcacagagttgtttgcagcctgcagcaaaggcgattctgatttgccgctcgtggtcgaggtatgcctcagtactggtgctcgctggcgagaagcggaaaacctcacccggtcacagataacaccgcataaaatcacgttcatccgaaccaaaggcaaaaagaatcgcagcgttccgatcagtaaagcactgtacaagaagttggtaacgcggggcgatgatcgtctattcagcgaatgctattttcgctttatggccgcgcttgagaacaccagcattcaattgcccaaaggtcaactaacgcatgtgctacgccatacctttgcggcgcactttatgatgtctggcggcaacattctggtgttgcaacgcatcctcggccatcatgatatcaaaatgactatgcgttatgctcaccttgcaccggagcacctcgaaacagccctgcaattcaatccgctggcgactatgctaggtggcgacaaagtggcggcatag

SEQ ID NO: 4178 - protein, 344 aa, Enterobacter cloacae
MTVRKQSSGKWLCECYPAGREGRRVRKQFATKGEALAFERFTMEQVDNKPWLGEAIDRRKLSDIAKLWYNLHGQSLTAGERTYKKLCLVIEALGDPPATTFTAKDFAHYRDKRLSGEIYFSEKWKNGAEPVTVNLEQSYLSGMFSELARLGEWNQPNPLENMRKFTVAEKEMAWLTHSQITELFAACSKGDSDLPLVVEVCLSTGARWREAENLTRSQITPHKITFIRTKGKKNRSVPISKALYKKLVTRGDDRLFSECYFRFMAALENTSIQLPKGQLTHVLRHTFAAHFMMSGGNILVLQRILGHHDIKMTMRYAHLAPEHLETALQFNPLATMLGGDKVAA

SEQ ID NO: 4179 - DNA, 687 bp, Serratia plymuthica
atgttcaacttttcacaccttttcgatagcgctaaagccaaaggcgcaaacggcggtgacgacaccgagatcaagtttgttgacgatgagccggtcaaagtagccaaacccgctcagcacagccgtgaacataacgtagcggtttctgacgaagcgaaagctaacccggtgctggccatccggctgctgaaggatactgacctctcatccaagaaaattaaggcgaaactggcttcggcgccacaggcactctccaagttcacgcagaacttcatggaagagaacgatcctacctgggaattccagagcgatgaagagaaggcccgaactgcgctgacttattctgtgcagaacagcgataagaacggttacagtgctgccagtatcagcgctaccaaggcactgaagaaaatggaagagccactcaccgaggacgaagttaaggcactggcagagcgcacgactcaactgctaaacgactccaaccctaacactccagataacgttaatgctcgccgacaggctgatgaggattataagcaggaagtggcacaggcaatggctcgtcgcaatgatcgtattcgcgccactggtcagatgttgcctggtgatgccaagcgcgtaaacggcaaggtagaaggtcccgcaggcgaaattgaccgccttaagtcgcagatctccctctaa

SEQ ID NO: 4180 - protein, 228 aa, Serratia plymuthica
MFNFSHLFDSAKAKGANGGDDTEIKFVDDEPVKVAKPAQHSREHNVAVSDEAKANPVLAIRLLKDTDLSSKKIKAKLASAPQALSKFTQNFMEENDPTWEFQSDEEKARTALTYSVQNSDKNGYSAASISATKALKKMEEPLTEDEVKALAERTTQLLNDSNPNTPDNVNARRQADEDYKQEVAQAMARRNDRIRATGQMLPGDAKRVNGKVEGPAGEIDRLKSQISL

SEQ ID NO: 4181 - DNA, 600 bp, Serratia marcescens
atgaaccagtcagattttgccaaacttcacggcgtcagccgaaagacggtaacgacctggaaggcccgcggctggctggttctggccggagacgatattgacgttgaagcgtcgaatgcaaacatcgagcgcttccgaaaaactgttacccgaccagagaaaaaaccggcaggtaacaagcagggtaacaaaacaggtaacagatcctcgggtaacaagtcaggtaacaaaaacgataaggatctggccgagtctccgacgagaaccgttgagcggatgatcgccgagcacggcgtgacgatgacgcttgatgaagcgcgccagatgaaagaaaacttcctcgcgttgcttacccagctcgagtacgacattaaatccgggcaggtgctgccgtacaaagacatgatcgaggccgtaggtaatgaatacgcccgcatgcgcacccgtctcattgcgattgctcctgaacatggcccccggttacgggtgctggcttctaccaccaacgacgcggagtttgtccaggcactgcaggaggtggtttacgaggcgatggaggaattgagccttgatgcagataacaaccgaggagagaactaa

SEQ ID NO: 4182 - protein, 199 aa, Serratia marcescens
MNQSDFAKLHGVSRKTVTTWKARGWLVLAGDDIDVEASNANIERFRKTVTRPEKKPAGNKQGNKTGNRSSGNKSGNKNDKDLAESPTRTVERMIAEHGVTMTLDEARQMKENFLALLTQLEYDIKSGQVLPYKDMIEAVGNEYARMRTRLIAIAPEHGPRLRVLASTTNDAEFVQALQEVVYEAMEELSLDADNNRGEN

SEQ ID NO: 4183 - DNA, 315 bp, Serratia liquefaciens
atgaaaaagcttctggtatgttgtttgtttggtaatacagcaaattctctcgccaaaaggatgcagttgctggcagaaaaaaaggactacaatctcattattagcgctgtgggtctggataattttgccagtgtagctcccgcttttgacggttttctgattgcaccacacattcagtacaaggtctccgagattgaaaaaattgtcggggactctcgttcaattgcaattaatgaaagtctgccctatgcgtcactcaacgcggagaaagttttagcgtttgtgatggaacagatgcctgaactgacattctga

SEQ ID NO: 4184 - protein, 104 aa, Serratia liquefaciens
MKKLLVCCLFGNTANSLAKRMQLLAEKKDYNLIISAVGLDNFASVAPAFDGFLIAPHIQYKVSEIEKIVGDSRSIAINESLPYASLNAEKVLAFVMEQMPELTF

SEQ ID NO: 4185 - DNA, 678 bp, Klebsiella oxytoca
atgctaattacatggaatgtattacatgacagacctctcagtgattttaacaaaaatgtacttcaaaaaataccaagtctgatggctaaacggttcaggaaattaaggaattttgtacgtcacgacggtcactttatttcctcattcaccgaatttggtaatgaggctatagataatgacagattcactgccatatatgaatcgattccaactgaagaaaaggaaatatttagggataagttcatccagtataggaacctggcaagaagtatttaccctagtttttgtgctgaactacaccgtccgctattggatgtttcaaatttatttgaaacagctaatgatatctatattgtgttgggaaaggatgaggagtcaatatcattcattctaagtaaatatggtttaaacatacccgcgaataaaatttatgggaggatgaccgataaaaacaagactctcaccttgctaaaatcgatagccttcgataaaaacgaggagattatatttattgatgacaatatccaaaatgttattgatgcattagatcatggcattcaatcattttgggctaattggggatacaacatccctgagcataaattaatggcccttcaaaaaggaattaatgaatttaataccgaggatctcttgaaattagtcaagaaaccctcctaa

SEQ ID NO: 4186 - protein, 225 aa, Klebsiella oxytoca
MLITWNVLHDRPLSDFNKNVLQKIPSLMAKRFRKLRNFVRHDGHFISSFTEFGNEAIDNDRFTAIYESIPTEEKEIFRDKFIQYRNLARSIYPSFCAELHRPLLDVSNLFETANDIYIVLGKDEESISFILSKYGLNIPANKIYGRMTDKNKTLTLLKSIAFDKNEEIIFIDDNIQNVIDALDHGIQSFWANWGYNIPEHKLMALQKGINEFNTEDLLKLVKKPS

SEQ ID NO: 4187 - DNA, 894 bp, Citrobacter koseri
atgcttaaaacctggaatgatttagaaagttatacccaatatgtctactcgaccttgcttaacccacgagataatggagtggaagttagtcgtaacgttatccttaagggattaaaaggtgaatatcaaattgatgtatattaccaatttgaaaatgcaggttttatacatcgtgtagcgatagagtgtaaatatcacaatcgcccgcttgatcgcgatactattatgccattttgcaacaaaatcacagatattgggaatattatcggggtaatagtcagtaagtctggttaccaaagtggcgcacaagaatacgcagaaaaacatggcattactttactgacaactgatgatttaccaaaatttaacatattggttgccgattacttgataaattcaactttacctacaaaagactggatcggcgagcctttttggattttgatggaaagagaggaagataatgtttcaggttcatactacaagtttgcacaaaaacataacggaagagatgtaataccattattcttttcaaagcgtgaagcaattgactttctaaatgaatctgagcagtcactgcattttgcaataagaggtgttccacaacattatttgaaacggttgatagcaataacagagcggttaaaacctttattcttcttaatgcttcctgctttgaatgaagaacaagccaaaggtttattaattgaaccaactgaattaatgaaaagatatctactatcagaaatatcacctgaagaatatcaagagttttacgttaaaaggaagtcgcgttacaagaatgagcttactctttttaaaatattaaaagcaatgaaaggtaaaattggtgcagaattggctgaaaaaattttaaaaaataaaaaaacgtaa

SEQ ID NO: 4188 - protein, 297 aa, Citrobacter koseri
MLKTWNDLESYTQYVYSTLLNPRDNGVEVSRNVILKGLKGEYQIDVYYQFENAGFIHRVAIECKYHNRPLDRDTIMPFCNKITDIGNIIGVIVSKSGYQSGAQEYAEKHGITLLTTDDLPKFNILVADYLINSTLPTKDWIGEPFWILMEREEDNVSGSYYKFAQKHNGRDVIPLFFSKREAIDFLNESEQSLHFAIRGVPQHYLKRLIAITERLKPLFFLMLPALNEEQAKGLLIEPTELMKRYLLSEISPEEYQEFYVKRKSRYKNELTLFKILKAMKGKIGAELAEKILKNKKT

SEQ ID NO: 4189 - DNA, 753 bp, Serratia liquefaciens
atggatagagcccaacaacttatcgtgttccaatcccaaacaaaaaacgttaaagaattggatcgcgcttggcgtattgctaagattagtttgaatcttgctttaaaaaatgatcgagatactgaggcaagaatccatacgaaaactctttcgctaatttattccgcctggactgaagcattattctcaaaattaattcacacaccttatggttttgaattaagcgaaatagagaatataaaaaacataaaaggaatggaagctaaatggcgtagatgcttaaaactagctaaggctaaagttttattagcaccaacattcaattctgttcaattatcttctgctgagatttatattaaacaattaatcattgactatgtgaaaacgccaagcacactcaggaataggattgctcatgggcaatgggttgtcgcttttcagggtgatagtgtgacagatataagttctgacttgacgctagccattgaagagttaaatgtcgtcgatctagataatttaaaaatgggttttaaagggttagctgatattatagaagctatgattgagtcaccaaacaatgcttttgtgaaagactatactaaagttgaatccgatttgaaaagtaacttatcaagacgtagtggatacacattggcagggcatattcagagtttaaaaaagaaatatacttatcgacttttaaaaccgatacggctagcaaattgtatttgtgctattcaagatgatggctaa

SEQ ID NO: 4190 - protein, 250 aa, Serratia liquefaciens
MDRAQQLIVFQSQTKNVKELDRAWRIAKISLNLALKNDRDTEARIHTKTLSLIYSAWTEALFSKLIHTPYGFELSEIENIKNIKGMEAKWRRCLKLAKAKVLLAPTFNSVQLSSAEIYIKQLIIDYVKTPSTLRNRIAHGQWVVAFQGDSVTDISSDLTLAIEELNVVDLDNLKMGFKGLADIIEAMIESPNNAFVKDYTKVESDLKSNLSRRSGYTLAGHIQSLKKKYTYRLLKPIRLANCICAIQDDG

SEQ ID NO: 4191 - DNA, 561 bp, Serratia liquefaciens
atgatatctggtgctagtcctaatattggtaaaacttttgttagcattaacttagctgctgttattgctcaaacagggcaaagggttcttattatagatgccgatatgcgaaaaggttattcgcatagtttgctgggcttcgaagggacaaatggtttatcagatattttagctgggaaaataggaatagagagctcgataaagaaaactgacatagaaggaatggacttcatttctcgtggccaggttccacctaaccctgctgaactattgatgacctcgcgctttggagaccttgttgattgggctactaaaaattatgatctcgtgcttatcgatacgcctccgattttagctgttactgatgcagctatcataggtcaccacgttggaacatctttaatggttgccagatttgcgatgaataccgttaaagagatcgaagtaagtatgaggcgttttgagcaaaatggcattgaagttaaaggtattattttgaatgctgttgagcgacgggctactaactattatgattattatcaatatgagtataaaagctag

SEQ ID NO: 4192 - protein, 186 aa, Serratia liquefaciens
MISGASPNIGKTFVSINLAAVIAQTGQRVLIIDADMRKGYSHSLLGFEGTNGLSDILAGKIGIESSIKKTDIEGMDFISRGQVPPNPAELLMTSRFGDLVDWATKNYDLVLIDTPPILAVTDAAIIGHHVGTSLMVARFAMNTVKEIEVSMRRFEQNGIEVKGIILNAVERRATNYYDYYQYEYKS

SEQ ID NO: 4193 - DNA, 585 bp, Serratia marcescens
atggcccacagcgtaaccgagtggcaggatgccttgcagcagatgatgccgcgcggtcgagcctggccgcgtgaggaaaccgccaatttaaccgcgttgataaggggcgttagccaccgtttaaatcggcttgaaattaacgccgacttattgctggcggaaatgcgcccggaaactaccgttcagctcctgcctgagtgggaaaattatttgggattgccggagtgcaatattcccaataatgattttttatcgcgccgggctgcggtggttgagaaatatcaccgcaaaggcgggttagcaccgtggcaaattcaaaacgtggcgcacgcgctgggattcgatattacggtgcgggaaatattaccgcatcactgtctgcgtaattgcatggcgcgtatttacccaaagcgctaccggtttttactgtccattacggtacatgacacgccggtcactcggtttaccgtggtggaagatgtgctgacgccattgattgaataccacacccaaatgctggagtgcgtattaaccaaatatcgcctggctggctacggctacgaatatatttttgaggtgaattaa

SEQ ID NO: 4194 - protein, 194 aa, Serratia marcescens
MAHSVTEWQDALQQMMPRGRAWPREETANLTALIRGVSHRLNRLEINADLLLAEMRPETTVQLLPEWENYLGLPECNIPNNDFLSRRAAVVEKYHRKGGLAPWQIQNVAHALGFDITVREILPHHCLRNCMARIYPKRYRFLLSITVHDTPVTRFTVVEDVLTPLIEYHTQMLECVLTKYRLAGYGYEYIFEVN

SEQ ID NO: 4195 - DNA, 840 bp, Serratia marcescens
atggctgataacgacattgtccccaaggaggccctggcctggttcaaggccaagaagctcaaacccggctttgattatcgtgatgtgtggcttgaggaacacagcgccgcatttaccgtggcgaagatgacgcagctcgatttgctcagtgatgtgaaagccctggtcacccaggcgctggccgagggccagacctttcgcgactttcagaaagtattggagccgctgttggtcaaacgcggatggtggggagtgcgggagatggacgacccgctgaccggcgaaacccgcgtcgtgcagctcggcagcgatagccgcctgcgcaccatctacaacaccaacatgcgcactgcccgcagcgccgggcagtggctgcgtattgagcgaaccaagcgcgcgatgccgtacctgatttataccctggggccgtccagggagcaccgcgtggatcatctccaatgggccaacacttgcctgcctgtcgatcacccgttctggttgactcacatcggcccgaacggctggggctgcaaatgcggtgtgcgccaggtcagtaaatatgagtacgaccagatggtgcaaaatggtgtgacggagaccgcgccggtgttcgacggtaacggccaacccaccggacaggtcagtcgctccagggtgccattgaaaacgcaggctccgccagtcaaaaacgtcaaatggttgaacaagcgcaccggcgaggaggaactggtgccggagggcatcgacccggggtggaactacaaccccggcatcagccgccaggccgcactggagcgtcagctccaggccaagcagcaggcttttgatgccggtcgctga

SEQ ID NO: 4196 - protein, 279 aa, Serratia marcescens
MADNDIVPKEALAWFKAKKLKPGFDYRDVWLEEHSAAFTVAKMTQLDLLSDVKALVTQALAEGQTFRDFQKVLEPLLVKRGWWGVREMDDPLTGETRVVQLGSDSRLRTIYNTNMRTARSAGQWLRIERTKRAMPYLIYTLGPSREHRVDHLQWANTCLPVDHPFWLTHIGPNGWGCKCGVRQVSKYEYDQMVQNGVTETAPVFDGNGQPTGQVSRSRVPLKTQAPPVKNVKWLNKRTGEEELVPEGIDPGWNYNPGISRQAALERQLQAKQQAFDAGR

SEQ ID NO: 4197 - DNA, 1569 bp, Serratia marcescens
atgctaacagccagcttaaacgccattgcgaccggcattaacggcggggaggacttcgatgaaaacgaagtcctccttggttatcagcggcgttggatcgccgacgactcaccgctgaagattgcggagaaatcccgccgaaccggtatcacctgggcggaagcggcagacgccgctttaacggcatcgaaagccaaagccgccggtggcaccaatcacttttacgtcggctccaacaaggagatggcacgcgagtttatcgatgcggcggcgatgtgggccaaagcctacgacctggccgcggcggacgtttgcgaagaagtcctggccgatgacgataaggacattctgacgtttgtcatctacttcgccagcggattcaaggtgcaggcgctgtccagcaaccccagcaacctgcgcggtatgcaaggcaacgtgaccatcgacgaagcggcgttccatgaacgcctggcggaggtgctgaaggcggcgctggcgctcaccatgtggggcgcaaaagtccgccttatcagcacccataacggcacggacaatctgttcaacgagttgatccaggacagtcgcgccgggaagaaacgctattccgtccataccatcacccttgatgatgcgtgccgcgatggcttgtacaaacgcatctgccaggtgaaaaagcgcgaatggagccagcccgccgaagaccaatggaaagccgatctgttgcgcgataccgccacgcaggatgacgcgctggaggaatactattgcgtgccgaagaacggcagcggcacctacctggcccgctcaatccgagagcgtgccgcacgtggtgacggccccgttctgcgctttaccggctcggcggagttcaacgccctgccggaagggatgcgggcgctggatatgcgggaatggctggagcacaccgtgctgccggtacttaaccagctccccgataaacgtcacgcgctgggcgaagacttcgcgcgctccggtcacctgacggtctttgcgccgatcactatcaacgatgacaccacgcgaacggtgccgttcctggtcgaactggcgaacgtcccctataagcagcaggagcaggcgctgttcttcatctgcgaccgtttgccacatcgtgacggcatcaagcttgatgggcgcggcaacggcaactacctggccgagcaggccgccgaacgctacggtgccgaagtggaagtcgtgatgccgtctgtcgcccactaccgcgagaacatgccgcgcttcaaggcagcgtttgaagacgatgaactggtcgtgccgaagcatgaggatgttgttaacgacctggggcagattgtcgtcttgcgcggcgtgccgggtatcgatgaccgggagaataccggcagcgatggccacaagcggcacggtgacagcgcctatgcgattttcctggcctatctggccagtaaagaggattgccgccgttatgagctgcaccgactcaatcaacccgaacggccggaggagcgcgatgagcgccgccaaatgcgcatcacgcgcgggctgaaaaatcaacgagggctactgtaa

SEQ ID NO: 4198 - protein, 522 aa, Serratia marcescens
MLTASLNAIATGINGGEDFDENEVLLGYQRRWIADDSPLKIAEKSRRTGITWAEAADAALTASKAKAAGGTNHFYVGSNKEMAREFIDAAAMWAKAYDLAAADVCEEVLADDDKDILTFVIYFASGFKVQALSSNPSNLRGMQGNVTIDEAAFHERLAEVLKAALALTMWGAKVRLISTHNGTDNLFNELIQDSRAGKKRYSVHTITLDDACRDGLYKRICQVKKREWSQPAEDQWKADLLRDTATQDDALEEYYCVPKNGSGTYLARSIRERAARGDGPVLRFTGSAEFNALPEGMRALDMREWLEHTVLPVLNQLPDKRHALGEDFARSGHLTVFAPITINDDTTRTVPFLVELANVPYKQQEQALFFICDRLPHRDGIKLDGRGNGNYLAEQAAERYGAEVEVVMPSVAHYRENMPRFKAAFEDDELVVPKHEDVVNDLGQIVVLRGVPGIDDRENTGSDGHKRHGDSAYAIFLAYLASKEDCRRYELHRLNQPERPEERDERRQMRITRGLKNQRGLL

SEQ ID NO: 4199 - DNA, 576 bp, Serratia marcescens
atggccgatgaaaagccgacccgtggccgtccgtcaaagattgacctgttgccggagaacatccgtgacgcgctgcaccagatgctgcgcgacaaacgccacactcaggaagaaatccgcgaggctatcaacacgctgattgaccagcatgagttgccggacgacatgcagctcagccgtaccggcctgaatcgctacgccagccgcatggaggccatcggctccaaaattcgcgcctcccgcgagatggcggaaatttgggccgccaagctgggttccgcgccgacgtctgacgtcggcaaattgttgatggagtttgtgaaaaccctggcgtttgaaacgtcaatggcattggccgagaccgagaaaaccgttgagcctaaggcgctaggccaattggcattggtcgcgcagcgtatcgaggccgcgcagatggtcagccacaaacgcgagaaagagatccgccaggcattcgcggaagaagcggctgccacagcggagaaaatcgtgtctcaggcgggactgtctgcggataaggcagcagatatcaaacgccagatattggggattgcatga

SEQ ID NO: 4200 - protein, 191 aa, Serratia marcescens
MADEKPTRGRPSKIDLLPENIRDALHQMLRDKRHTQEEIREAINTLIDQHELPDDMQLSRTGLNRYASRMEAIGSKIRASREMAEIWAAKLGSAPTSDVGKLLMEFVKTLAFETSMALAETEKTVEPKALGQLALVAQRIEAAQMVSHKREKEIRQAFAEEAAATAEKIVSQAGLSADKAADIKRQILGIA

SEQ ID NO: 4201 - DNA, 288 bp, Serratia marcescens
atgcgagaaattcttgatagcgatcagcgactggtcatcctgcgctccttgctggagtgcggtgacagcgcgaacgaatccgtgctgcaaacctgccttgaggcgtatggccacagtacatcccgtgatgtggtacgcacacatctggcctggctggcggagcagcgacttgtcagcctgcgcgatgtggccggatgttatgtcgcgacgatcaccggtcgcggtgacgatgtagccaacggccgggccgtcgtgcctggtgtcaaaaagccacgggcacgggggtaa

SEQ ID NO: 4202 - protein, 95 aa, Serratia marcescens
MREILDSDQRLVILRSLLECGDSANESVLQTCLEAYGHSTSRDVVRTHLAWLAEQRLVSLRDVAGCYVATITGRGDDVANGRAVVPGVKKPRARG

SEQ ID NO: 4203 - DNA, 303 bp, Serratia marcescens
gtggattgggaagtcgttaaaggcaactgggccatcatttgggcgttgttcatgtctgccgtcaacgtgatccagttactgctcgccaaaacttatgtgaagcgtgaggagctggagttgttccgcacacgtctgcaatcgatggagaacaccatcgccgggctaccgagtcaaaaagacctgcaccagttgcagcttgaaatgagcaatttacggggagacctacgagaactcggcccggccattcgccaggtgaaacacgtcagcgatctcctactggaaaacgaattgaaggataagtga

SEQ ID NO: 4204 - protein, 100 aa, Serratia marcescens
MDWEVVKGNWAIIWALFMSAVNVIQLLLAKTYVKREELELFRTRLQSMENTIAGLPSQKDLHQLQLEMSNLRGDLRELGPAIRQVKHVSDLLLENELKDK

SEQ ID NO: 4205 - DNA, 615 bp, Serratia marcescens
atgagtaacgaaatcgaacaagcaggataccgtaaaaatgcccaggggcatctggtaccggagaacttgatccgcccggtcgataagctgcgcgacgatgtcgtgctgaatatcgtcgaagccgccaaggtgttgcgccaggcgatggtagatttcaaagctgcatctatgcaacaaatcggtgacttcatcgacctgtcatcgaatgagtacggcgtggagtatggtggtaccaagggcaacgttaccctgccgagctttgacgggcaatttaaaatcctacgcgccgttggcgaccatcgcgtctttgatgagcgcattcaggcggcgaaaaagctgattgatgactgtgtcatcgcctggtcagacggtgcgaacgacaacctgaaagcgctggttgaccatgcttttcgcgtcaacaagcaaggccgcattgatgtgaatgaagtgttgggtctgcgacaggttgaaatcgatgacgcacgctggcaagaggcgatggacgccatcgccgattctatccgggtcacaggtaccagtcagtacctgcggatttacgagcggcagccaaacggcaagtacgagcaaattagcctagatattgccggggtctga

SEQ ID NO: 4206 - protein, 204 aa, Serratia marcescens
MSNEIEQAGYRKNAQGHLVPENLIRPVDKLRDDVVLNIVEAAKVLRQAMVDFKAASMQQIGDFIDLSSNEYGVEYGGTKGNVTLPSFDGQFKILRAVGDHRVFDERIQAAKKLIDDCVIAWSDGANDNLKALVDHAFRVNKQGRIDVNEVLGLRQVEIDDARWQEAMDAIADSIRVTGTSQYLRIYERQPNGKYEQISLDIAGV

SEQ ID NO: 4207 - DNA, 198 bp, Serratia marcescens
atgattaacccaaccaagttggtaaacgcgctgggctggctgcaacgccgcaacgtggaaatcaaaaatgtaaatgtcagccgcgcccatcccatcgttgaggtgaccgcaccggatgctgacctgaaacgtaaagcgcacaactatcactcagtctatgccgccacaattcaggggtgcgttatttactggaaataa

SEQ ID NO: 4208 - protein, 65 aa, Serratia marcescens
MINPTKLVNALGWLQRRNVEIKNVNVSRAHPIVEVTAPDADLKRKAHNYHSVYAATIQGCVIYWK

SEQ ID NO: 4209 - DNA, 786 bp, Serratia marcescens
atgaacgtttcaactgacagcagcaacatatcgattgcagaactcaaagaagaatttatacccggtcttatgcttaatgccggggcaataggccattacggggactcggctttatcttcaaaggctatggataaatattcaaatcttctggagaaagacgcagttaccgctttatcagaagcattgagccgtatcgtaagtgccttagcggaggcagatccacgttctatcagtagcaatccatcctggttttcccgctttacgggcaaacaccttgaaaagcgcgttcgttaccaacacgcacgtgagaaggtggaaaatcttattaatgaggggaacggatatctgacacatgtgaatgagacgctactggttttagaagagctgcttgaaacatatgtgtcagaaatcaaacgccttaaaatttttatccaggcaggccgtgagttccttagggattcgaccgacgaaaaaaataatgacgatccaagccttgtcttcgataaaccgagggaaagatttgccagacgtttagctaacctggcaacactgcttgcgtctcacgaaatggccgccatacagatggaaatcactcgcgggtcttgtatagatattgctgaccgctttaacgaaactataaaagtcctggttccagtatggcggcaacacacactttcgctgttaacagtaaataacactgaccctacgattgtacgaaaagctaatcaggcgcacgaggctcttctaaaaagcctgcgacaaaatttagagggattccaaaaatga

SEQ ID NO: 4210 - protein, 261 aa, Serratia marcescens
MNVSTDSSNISIAELKEEFIPGLMLNAGAIGHYGDSALSSKAMDKYSNLLEKDAVTALSEALSRIVSALAEADPRSISSNPSWFSRFTGKHLEKRVRYQHAREKVENLINEGNGYLTHVNETLLVLEELLETYVSEIKRLKIFIQAGREFLRDSTDEKNNDDPSLVFDKPRERFARRLANLATLLASHEMAAIQMEITRGSCIDIADRFNETIKVLVPVWRQHTLSLLTVNNTDPTIVRKANQAHEALLKSLRQNLEGFQK

SEQ ID NO: 4211 - DNA, 282 bp, Serratia marcescens
atgaaaatcatccagctggaatccgggatgcaggtttggtctgtaacccgtaccaaaatgggaaataccaccattacaacggtcattgtccaccccgttgtcattattgaaattcatgataaccatgtgattgctcgctggaacggcaatgcaccacgtcggtttggagaaacggctatcaggggctggaagaaggagaagcccctgcttgtccgtgagcctttcggaaatgttcgcctggccgcccgtgcagaaaaaaccgctatgcaggaaaaagagtaa

SEQ ID NO: 4212 - protein, 93 aa, Serratia marcescens
MKIIQLESGMQVWSVTRTKMGNTTITTVIVHPVVIIEIHDNHVIARWNGNAPRRFGETAIRGWKKEKPLLVREPFGNVRLAARAEKTAMQEKE

SEQ ID NO: 4213 - DNA, 249 bp, Serratia marcescens
atgctgtgggaggaagtagtgaacagagttactgagcgccaggaacagaagagtaacccggagttccagagagagtaccggaaccgtatccgggaaacacacgaccagttaaacctttatctccccaaagatgcaaaaagaatgttgatagagatcacaaaagtgaaaaagctcactcaggctgaagttattgaatttcttgttaaaagctattatgacggattaaaatttgacgattcggaagagtga

SEQ ID NO: 4214 - protein, 82 aa, Serratia marcescens
MLWEEVVNRVTERQEQKSNPEFQREYRNRIRETHDQLNLYLPKDAKRMLIEITKVKKLTQAEVIEFLVKSYYDGLKFDDSEE

SEQ ID NO: 4215 - DNA, 462 bp, Serratia marcescens
atgatgaagaaaccacttattgccggcatcttgctggttgtggcgcacaccgccggcgctgcgcagggtgatgataccgatctgcagcagatttatacagaggcgggcattcaggggatatgcagcgccgggatgctggctgtgccggaagaggccagggatgaagttgtcccgcagaacgtcagacacctcttggttcagtgtgcccatttcgacgagcagcagttgcgccggcatgccgacctgccagctcagacatttagccactggcgtgaccgcaatgcggtccttaatctgtcgtctgaccaggtatctgatgcgctctggctgtcagcgtggcgtgatttccgggcacaactggcctcggcctacccggccacgacggaaaaaaaggcacaggggaaagaggccgtatccgccagcatgaagcccggcactgagcatgggagtgcggcggattga

SEQ ID NO: 4216 - protein, 153 aa, Serratia marcescens
MMKKPLIAGILLVVAHTAGAAQGDDTDLQQIYTEAGIQGICSAGMLAVPEEARDEVVPQNVRHLLVQCAHFDEQQLRRHADLPAQTFSHWRDRNAVLNLSSDQVSDALWLSAWRDFRAQLASAYPATTEKKAQGKEAVSASMKPGTEHGSAAD

SEQ ID NO: 4217 - DNA, 405 bp, Serratia marcescens
atggctcagcctatggtgcttcttggtgctgcacaccctgtagcgggttatctttttcttgaagtgatccctgacagtgaggttggctacgttgatatatatcagctgaccgatagtctttatgtcggcgattatctggtcatcaatcatcgggactggcggcggcgcgtacctgcatatgacggccggccgtgggatgaatgggtgatccgcgaacacttgtcccgcatagactggtattcgaataacaccattcagaggttatgtcagaggcacaatctgtcatgtgctgacctgcacaaatggggagaaaatgtggcgcgttgggaggatgttccggtgatggttgcgcgtgaagaagacgacgtgtccatcactcttctttcagggtttacagataactga

SEQ ID NO: 4218 - protein, 134 aa, Serratia marcescens
MAQPMVLLGAAHPVAGYLFLEVIPDSEVGYVDIYQLTDSLYVGDYLVINHRDWRRRVPAYDGRPWDEWVIREHLSRIDWYSNNTIQRLCQRHNLSCADLHKWGENVARWEDVPVMVAREEDDVSITLLSGFTDN

SEQ ID NO: 4219 - DNA, 720 bp, Serratia marcescens
atgaacatgcgaggcattctttttgtactgccactgtgcgccgggctcctggcgggctgtgataacaaacaggaagcgctgcagtttgaagccgcccgcacggcggcgctgaaggccgacgatccgtttctggcgctggactcgttcgaacagcagtccggcgactacggccgggactgcgactcgctgggggcatttctgtttggtaattttgctcccacggttaaggcctgtcaggcgcggtatgaggccacgcgggatatggtcctgaaagcagttgaaaagggttccgtgccggcactggtgtttctgtttgacccaagcagcaagacgccggatgtgtatccgcgcgatattgatccacagaaggccgggcaggcggctgagcggcttgttgcactggcagagtcggcgccggtggacagcaaaaatcaggcgttgctgatgcgtgccggcgaagtactgcaggcgggccagtacgttctgcaggattcccggagagcggcggccctgtacgtcaaagcctggcaggcaggcgatcagcgtgccgcgggcgagctggtcagggtctatcgctttctcaaggacagccggcgtacctatttctgggcggtccggagcaaagacgtgctgcagctggacagccgggaccagctgaccggagatgagatcagtgcaattcagaaacttgccgcggacagttcacgtaccgacatttga

SEQ ID NO: 4220 - protein, 239 aa, Serratia marcescens
MNMRGILFVLPLCAGLLAGCDNKQEALQFEAARTAALKADDPFLALDSFEQQSGDYGRDCDSLGAFLFGNFAPTVKACQARYEATRDMVLKAVEKGSVPALVFLFDPSSKTPDVYPRDIDPQKAGQAAERLVALAESAPVDSKNQALLMRAGEVLQAGQYVLQDSRRAAALYVKAWQAGDQRAAGELVRVYRFLKDSRRTYFWAVRSKDVLQLDSRDQLTGDEISAIQKLAADSSRTDI

SEQ ID NO: 4221 - DNA, 1149 bp, Citrobacter pasteurii
atggcgcaaaacatttcgtggtatggcatgatagcacccgaagagagtcaattcagggtggtaaatgtgaaaccagtaacgctatacgatgtcgcagagtatgccggtgtctcttatcagaccgtttcccgcgtggtgaaccaggccagccacgtctctgcgaaaacgcgggaaaaggtggaagcggcgatggcgcagctgaactacattcccaaccgcgtggcacaacaactggcggggaaacagtcgttgctgattggcgttgctacctccagtctggccctgcacgcgccgtcgcaaattgtcgcggcgattaaatctcgcgccgatcaactgggtgccagcgtggtggtgtcgatggtagaacgaagcggcgtcgaagcttgtaaagcggcggtgcacaatcttctcgcgcaacgcgtcagtgggctgatcattaactatccgctggatgaccaggatgccattgctgtggaagctgcctgcgctaatgttccggcgttatttcttgatgtctctgaccagactcccatcaacagtattattttctcccatgaagacggtacgcgactgggcgtggagcatctggtcgcattgggtcaccagcaaatcgcgctgttagcgggcccattaagttctgtctcggcgcgtctgcgtctggcgggctggcataaatatctcactcgcaatcaaattcatccgatagcggaacgggaaggcgactggagtgccatgtccggttttcaacaaaccatgcaaatgctaaatgagggcatcgttcccactgcgatgctggttgccaacgatcagatggcgctgggcgcaatgcgcgccattaccgagtccgggttgcgcgttggtgcggatatctcggtagtgggatacgacgataccgaagacagctcgtgttatatcccgccgttaaccaccatcaaacaggattttcgcctgctggggcaaaccagcgtggaccgcttgctgaaactctctcagggccaggcggtgaagagcaatcagctgttgcccgtctcactggtgaaaagaaaaaccaccctggcgcccaatacgcaaaccacctctccccgcacgttggcagattccttaatgcagctggcacgacaagtttcccgacttgaaagcgggcagtga

SEQ ID NO: 4222 - protein, 382 aa, Citrobacter pasteurii
MAQNISWYGMIAPEESQFRVVNVKPVTLYDVAEYAGVSYQTVSRVVNQASHVSAKTREKVEAAMAQLNYIPNRVAQQLAGKQSLLIGVATSSLALHAPSQIVAAIKSRADQLGASVVVSMVERSGVEACKAAVHNLLAQRVSGLIINYPLDDQDAIAVEAACANVPALFLDVSDQTPINSIIFSHEDGTRLGVEHLVALGHQQIALLAGPLSSVSARLRLAGWHKYLTRNQIHPIAEREGDWSAMSGFQQTMQMLNEGIVPTAMLVANDQMALGAMRAITESGLRVGADISVVGYDDTEDSSCYIPPLTTIKQDFRLLGQTSVDRLLKLSQGQAVKSNQLLPVSLVKRKTTLAPNTQTTSPRTLADSLMQLARQVSRLESGQ

SEQ ID NO: 4223 - DNA, 3075 bp, Citrobacter pasteurii
atgacaatgattacggattcactggccgtcgtattacaacgtcgtgactgggaaaaccctggcgttacccaacttaatcgccttgcggcacatccccctttcgccagctggcgtaatagcgaagaggctcgcaccgatcgcccttcccaagagtcgcgcagcctgaatggtgaatggcgctttgcctggtttccggcaccagaagcggtaccagaaagctggctggagcgcgatcttcctgacgccgatactgtcatcgtcccctcaaactggcagatgcacggttacgatgcgcctatctacaccaacgtgacctatcccattgcggtcaatccgccgtatgttcccacggagaatccgacgggttgttactcgctcacatttaatgttgatgaaagctggctacaggaaggccagacgcgaattatttttgatggtgttaactcggcgtttcatttgtggtgcaacgggcgctgggtcggttacggacaggacagtcgtttgccgtctgaatttgacctgagcgcatttttacacgccggagaaaaccgcctcgcggtgatggtgctgcgctggagtgacggcagttatctggaagatcaggatatgtggcggatgagcggcattttccgtgacgtctcgttgctgcataaaccgagcacgcaaatcagcgatttccatgtagccactcactttaatgatgatttcagccgcgctgtactggaggcagacgttcagatgtacggcgagctgcgcgatgagctgcgggtgacggtttctttgtggcagggtgaaacgcaggtcgccagcggcaccgcgcctttcggcggtgaaattatcgatgagcgtggtggttatgccgatcacgtcaccctacgtctgaacgtcgaaaacccgaaactgtggagcgccgaaatcccgaatctctatcgtgcggtggttgaactgcacaccgccgacggcacgctgattgaagcagaagcctgcgatgtcggtttccgcgaggtgcggattgaaaatggtctgctgctgctgaacggcaagccgttgctgattcgcggcgttaaccgtcacgagcatcatcctctgcatggtcaggtcatggatgagcagacgatggtgcaggatatcctgctgatgaagcagaacaactttaacgccgtgcgctgttcgcattatccgaaccatccgctgtggtacacgctgtgcgaccactacggcctgtatgtggtggatgaagccaacattgaaacccacggcatggtgccaatgaatcgtctgaccgatgatccgcgctggctacccgcgatgagcgaacgcgtaacgcgaatggtgcagcgcgatcgtaatcacccgagtgtgatcatctggtcgctggggaatgaatcaggccacggcgctaatcacgacgcactctatcgctggatcaaatctgtcgatccttcccgcccggtacagtatgaaggcggcggagccgacaccttcgcaaccgatattatttgcccgatgtacgcgcgcgtggatgaagaccagcccttcccggctgtgccgaaatggtccatcaaaaaatggctttcgttgcctggagagacgcgcccgctgatcctttgcgaatacgcccacgcgatgggtaacagtcttggcggcttcgctaaatactggcaggcgtttcgtcagtacccccgtttacagggcggcttcgtctgggactgggtggatcagtcgctgattaaatatgatgaaaatggcaatccgtggtcggcttacggcggtgattttggcgatacgccgaatgatcgccagttctgcatgaacggtctggtctttgcagaccgcacgccgcatccggcgctgacggaagcaaaacaccagcagcagtttttccagttcagtttatccgggcgaaccatcgaagtgaccagcgaatacctgttccgtcatagcgataacgagctcctgcactggatggtggcgctggatggcaagccgctggcaagcggtgaagtgcctctggatgtcgctccacaaggtaaacagttgattgaactgcctgaactaccgcagccggagagcgccggacaactctggctaacggttcacgtagtgcaaccgaacgcgaccacatggtcagcagccggacacatcagcgcctggcagcagtggcgtctggcggaaaacctcagcgtgacactcccctccgcgccccacgccatcccgcaactgaccaccagcgaaacggatttttgcatcgagctggataataagcgttggcaatttaaccgccagtcaggctttctttcacagatgtggattggcgataaaaaacaactgctgacgccgctgcgcgatcagttcacccgcgcaccgctggataacgacattggcgtaagtgaagcgacccgcattgaccctaacgcctgggtcgaacgctggaaggcggcgggccattaccaggccgaagcagcgttgttgcagtgcacggcagatacgcttgccgacgcggtgctgattaccacggtccacgcgtggcagcatcaggggaaaaccttatttatcagccggaaaacctaccggattgatggaagtggtcaaatggcgattaccgttgatgttgaagtggcgagcaatacgccacatccggcgcggattggcctgacctgccagctggcgcaggtagcagagcgggtaaactggctcggattagggccgcaagaaaactatcccgaccgccttactgcggcctgttttgaccgctgggatctgccattgtcagacatgtataccccgtacgtcttcccgagcgaaaacggtctgcgctgcgggacgcgcgaattgaattatggcccacaccagtggcgcggcgacttccagttcaacatcagccgctacagtcaacagcaactgatggaaaccagccatcgccatctgctgcacgcggaagaaggcacatggctgaatatcgacggtttccatatggggattggtggcgacgactcctggagcccgtcagtgtcggcggaattccaccttagcgccggtagctaccattaccagttgctctggtgtcaaaaataa

SEQ ID NO: 4224 - protein, 1024 aa, Citrobacter pasteurii
MTMITDSLAVVLQRRDWENPGVTQLNRLAAHPPFASWRNSEEARTDRPSQESRSLNGEWRFAWFPAPEAVPESWLERDLPDADTVIVPSNWQMHGYDAPIYTNVTYPIAVNPPYVPTENPTGCYSLTFNVDESWLQEGQTRIIFDGVNSAFHLWCNGRWVGYGQDSRLPSEFDLSAFLHAGENRLAVMVLRWSDGSYLEDQDMWRMSGIFRDVSLLHKPSTQISDFHVATHFNDDFSRAVLEADVQMYGELRDELRVTVSLWQGETQVASGTAPFGGEIIDERGGYADHVTLRLNVENPKLWSAEIPNLYRAVVELHTADGTLIEAEACDVGFREVRIENGLLLLNGKPLLIRGVNRHEHHPLHGQVMDEQTMVQDILLMKQNNFNAVRCSHYPNHPLWYTLCDHYGLYVVDEANIETHGMVPMNRLTDDPRWLPAMSERVTRMVQRDRNHPSVIIWSLGNESGHGANHDALYRWIKSVDPSRPVQYEGGGADTFATDIICPMYARVDEDQPFPAVPKWSIKKWLSLPGETRPLILCEYAHAMGNSLGGFAKYWQAFRQYPRLQGGFVWDWVDQSLIKYDENGNPWSAYGGDFGDTPNDRQFCMNGLVFADRTPHPALTEAKHQQQFFQFSLSGRTIEVTSEYLFRHSDNELLHWMVALDGKPLASGEVPLDVAPQGKQLIELPELPQPESAGQLWLTVHVVQPNATTWSAAGHISAWQQWRLAENLSVTLPSAPHAIPQLTTSETDFCIELDNKRWQFNRQSGFLSQMWIGDKKQLLTPLRDQFTRAPLDNDIGVSEATRIDPNAWVERWKAAGHYQAEAALLQCTADTLADAVLITTVHAWQHQGKTLFISRKTYRIDGSGQMAITVDVEVASNTPHPARIGLTCQLAQVAERVNWLGLGPQENYPDRLTAACFDRWDLPLSDMYTPYVFPSENGLRCGTRELNYGPHQWRGDFQFNISRYSQQQLMETSHRHLLHAEEGTWLNIDGFHMGIGGDDSWSPSVSAEFHLSAGSYHYQLLWCQK

SEQ ID NO: 4225 - DNA, 1254 bp, Citrobacter pasteurii
atgtactatttaaaaaacacaaacttttggatgttcggtttattctttttcttttacttttttatcatgggagcctacttcccgtttttcccgatttggctacatgacatcaaccatatcagcaaaagtgatacgggtattatttttgccgctatttctctgttctcgctattattccaaccgctgtttggtctgctttctgacaaactcgggctgcgcaaatacctgctgtggattattaccggcatgttagtgatgtttgcgccgttctttatttttatcttcgggccactgttacaatacaacattttagtaggatcgattgttggtggtatttatctaggcttttgttttaacgccggtgcgccagcagtagaggcatttatcgagaaagtcagccgtcgcagtaatttcgaatatggtcgcgcgcggatgtttggctgtgttggctgggcgctgtgtgcctcgattgtcggcatcatgttcaccatcaataatcagtttgttttctggctgggttctggctgtgcattcatcctcgccgttttactctttttcgccaaaacggatgcgccctcttctgccacggttgccaatgcggtaggtgccaaccattcggcatttagccttaagctggcgctggaactgttcagacagccaaaactgtggtttttgtcactgtatgttattggcgtttcctgcacctacgatgtttttgaccaacagtttgctaatttctttacttcgttctttgctaccggtgaacagggtacgcgggtatttggctacgtaacgacaatgggcgaattacttaacgcctcgattatgttttttgcgccactgatcattaatcgcatcggtgggaaaaacgccctgctgctggctggcactattatgtcagtacgtattattggctcatcgttcgctacctcagcactggaagtggttattctgaaaacgctgcatatgtttgaagtaccgttcctgctggtgggctgctttaaatatattaccagccagtttgaagtgcgtttttcagcgacgatttatctggtctgtttctgcttctttaagcaactggcgatgatttttatgtctattctggcgggcaatatgtatgaaagcatcggtttccagggcgcttacctggtgctgggtctggtggcgctgggcttcaccttaatttccgtgttcacgcttagcggccccggcccactttctctgctgcgtcgccaggtgaatgaagtcgcttaa

SEQ ID NO: 4226 - protein, 417 aa, Citrobacter pasteurii
MYYLKNTNFWMFGLFFFFYFFIMGAYFPFFPIWLHDINHISKSDTGIIFAAISLFSLLFQPLFGLLSDKLGLRKYLLWIITGMLVMFAPFFIFIFGPLLQYNILVGSIVGGIYLGFCFNAGAPAVEAFIEKVSRRSNFEYGRARMFGCVGWALCASIVGIMFTINNQFVFWLGSGCAFILAVLLFFAKTDAPSSATVANAVGANHSAFSLKLALELFRQPKLWFLSLYVIGVSCTYDVFDQQFANFFTSFFATGEQGTRVFGYVTTMGELLNASIMFFAPLIINRIGGKNALLLAGTIMSVRIIGSSFATSALEVVILKTLHMFEVPFLLVGCFKYITSQFEVRFSATIYLVCFCFFKQLAMIFMSILAGNMYESIGFQGAYLVLGLVALGFTLISVFTLSGPGPLSLLRRQVNEVA

SEQ ID NO: 4227 - DNA, 618 bp, Serratia marcescens
atggcccagcctagcgtttggaagttggtcagcggcggcgccaagggatcaaagaaaaccgctcagatcgctaatgtactgggagtgcgtgcggaatggctcgctgaaggaacggagcccatgcgcgatatcacaacagagtcaaaacgtatcgatttaacagatagcatccgggatgactccgacatctatcgagttgaggttcttgatttggtagttagcgcaggtccagggagttacatgctttccgaggttgttgaagtattgaatgcgattgagtttacttcagaccgcgccaaagcattgtttggtcacagggcggcccaggacgtgaaagttatgacggtagacggagatagcatgtcccctacgataaaatcaggggatcggctgtttttcgatgttgctgttcgtgagtttactacggatggtgtttatgcatttgtttatggtaaaacttttcatgtaaagcgcttgcaaatgcaaggtacaaagctcgccgttctttctgataaccctcaccttgaaaaatggtatatcgacgaaaacactgaagatcagttctttgttatgggaaaagctctactgcacgagtccatcatgtacggaaagctttaa

SEQ ID NO: 4228 - protein, 205 aa, Serratia marcescens
MAQPSVWKLVSGGAKGSKKTAQIANVLGVRAEWLAEGTEPMRDITTESKRIDLTDSIRDDSDIYRVEVLDLVVSAGPGSYMLSEVVEVLNAIEFTSDRAKALFGHRAAQDVKVMTVDGDSMSPTIKSGDRLFFDVAVREFTTDGVYAFVYGKTFHVKRLQMQGTKLAVLSDNPHLEKWYIDENTEDQFFVMGKALLHESIMYGKL

SEQ ID NO: 4229 - DNA, 1491 bp, Serratia marcescens
atgtatgagaaacgtggttcaacctatatccatttagatttggccaattctgacgccccaacgctgtatgtgtctgacgcgcacaataacagtctggccgtcacgtcagagattgccggcgcgtataagaaataccccagactgcaggttaagcgggttcagctcgacaagctgaaagagttgcagcaaagccaggtaaccgacaatcccgcggctaacgattattccgctcaacaggcgaaaatcatcgggttttttcgggaagccaagaagaaaggcgccagtgatattcatctgctgatcgggatgaataatgtgactgtggtgcaatttcgtgtgcacggcgaccttgaaacgttgacgcagctggatcgcgccgaaggaatgacgctggcgtcgacgattgtgatgtccatgtgcgatgtggccgagaaaagctttaatcccaatcgcgctcaagatgggcgggtgcgcaaagagtttctgcaggggcttaagttattcggcgcacgttatgcgcacacgccggcagaatttgggttgtatgtggtgatgcgcattttgcctgatgaaggaaaggccccccccacgctggacgaactgggttttttaccggaacagcaaacgctcattcgtcgcatgctggcgcggcctgaaggcgtcattatcctctccgggccgaccggctccgggaaaagtacctccctgcgtacattcagcgagatgtacctgtcttttaccggtcaccgcaaacgcttgatgacgctggaagatccgccagaggggttgattctaggggcagttcagacccccatcattgccgataaaaacgatccggatgccgttagtcgtgcctgggttaggtctatttctgccgcgttgcgcttggatcctgatgccatggtcgtcggcgaaattcgtgatgccaactcggttaaatctgcactgacggcggccaagtccggccacctggtggaaaccacgctgcatgcgaatgacgctgtcggcattcttgaccgtctgacagacacgttgggcatccctatgggacaggtggccgatcctcaagtcatgatcggtttaatcgctcaacgactggtacagctgctgtgtccgcactgcaagaaaagctggagtgacgtcagtgacggcctggaagacgagaaaaaagcgttacttgagcgcttttgccgcgtggagacgttggcctttcgccatcctgagggatgtgagcactgttataagggtgtgacgggccggcgtgtcattgctgaagttattcgtcccgacgccaaattcatggagctgtttcgtcatgagggcaagctggccgcgcgcagttattgggtgaatgtgctgtgcggcattacccgcggtcagcacctattgcgttatctcgatgccgggctggtcgacccgattgatgcggattacatcagtccgcttgacgaggacagtctgaccttgctacccccggaggtcatatcatga

SEQ ID NO: 4230 - protein, 496 aa, Serratia marcescens
MYEKRGSTYIHLDLANSDAPTLYVSDAHNNSLAVTSEIAGAYKKYPRLQVKRVQLDKLKELQQSQVTDNPAANDYSAQQAKIIGFFREAKKKGASDIHLLIGMNNVTVVQFRVHGDLETLTQLDRAEGMTLASTIVMSMCDVAEKSFNPNRAQDGRVRKEFLQGLKLFGARYAHTPAEFGLYVVMRILPDEGKAPPTLDELGFLPEQQTLIRRMLARPEGVIILSGPTGSGKSTSLRTFSEMYLSFTGHRKRLMTLEDPPEGLILGAVQTPIIADKNDPDAVSRAWVRSISAALRLDPDAMVVGEIRDANSVKSALTAAKSGHLVETTLHANDAVGILDRLTDTLGIPMGQVADPQVMIGLIAQRLVQLLCPHCKKSWSDVSDGLEDEKKALLERFCRVETLAFRHPEGCEHCYKGVTGRRVIAEVIRPDAKFMELFRHEGKLAARSYWVNVLCGITRGQHLLRYLDAGLVDPIDADYISPLDEDSLTLLPPEVIS

SEQ ID NO: 4231 - DNA, 861 bp, Serratia marcescens
atgcgttattttcgcctgtgtattatctccctgttagccaccctgccgctggcggtacacgccagcccgcagccgcttgagcaaattaaactaagcgaaagccagctgtcgggcagcgtaggcatgatagaaatggatctggccagcggccgcacgctgaccgcctggcgcgccgatgaacgctttcccatgatgagcacctttaaagtagtgctctgcggcgcagtgctggcgcgggtggatgccggtgacgaacagctggagcgaaagatccactatcgccagcaggatctggtggactactcgccggtcagcgaaaaacaccttgccgacggcatgacggtcggcgaactctgtgccgccgccattaccatgagcgataacagcgccgccaatctgctgctggccaccgtcggcggccccgcaggattgactgcctttttgcgccagatcggcgacaacgtcacccgccttgaccgctgggaaacggaactgaatgaggcgcttcccggcgacgcccgcgacaccactaccccggccagcatggccgcgaccctgcgcaagctgctgaccagccagcgtctgagcgcccgttcgcaacggcagctgctgcagtggatggtggacgatcgggtcgccggaccgttgatccgctccgtgctgccggcgggctggtttatcgccgataagaccggagctagcaaacggggtgcgcgcgggattgtcgccctgcttggcccgaataacaaagcagagcggattgtggtgatttatctgcgggatacgccggcgagcatggccgagcgaaatcagcaaatcgccgggatcggcgcggcgctgatcgagcactggcaacgctaa

SEQ ID NO: 4232 - protein, 286 aa, Serratia marcescens
MRYFRLCIISLLATLPLAVHASPQPLEQIKLSESQLSGSVGMIEMDLASGRTLTAWRADERFPMMSTFKVVLCGAVLARVDAGDEQLERKIHYRQQDLVDYSPVSEKHLADGMTVGELCAAAITMSDNSAANLLLATVGGPAGLTAFLRQIGDNVTRLDRWETELNEALPGDARDTTTPASMAATLRKLLTSQRLSARSQRQLLQWMVDDRVAGPLIRSVLPAGWFIADKTGASKRGARGIVALLGPNNKAERIVVIYLRDTPASMAERNQQIAGIGAALIEHWQR

SEQ ID NO: 4233 - DNA, 1878 bp, Serratia marcescens
atggccaagtcatttgactttgagctgacggctaatgatgaggcgtcagccgcaattctgcggattgaggaaattgtaaagcacctcaatccgctgttggacagaacgcgcgatgcgttggcgttgggcggtcaggaatccagagataaccttgacgatttgggcagccgttttgatgtgttggctaaaaatgccagaagcggcgtccagttcatcggcgatttggtcccgccgcttaaaatggtcggtggattaaccctcggactgggtggcgctgcagcggtcgtcaatgttgttaaaaacaacctgaccaattttgccaacgccggctaccggatcgataccgttgcaaaaaacgtcagcatgacggcggacgcgtttcaggaactgactggcgccatgattgaaaacggcagcgcgcgtgaggctgcggaaggttcggtcagtgagttgtttgaaaaggcgaatgatgctgtacacggccgtaatgagggctttctcgccttgctgaaacagcgagggatagggatcagcgaaaccaaggatggcctggccgatgtaggcaagctgattaacgacctcaaccgcgccatgcaatcactccctgctgggcagcaggcgctgtttgccaacaaattgggcatttcgcccgatcttctcagctatctgcgcaacacgaccagtgaagttcaacggctcaaggatcaggcccgccgggatggcctgatatttaccgagaaggatctgcagaatgccctggcgttcaagcagcagctgaaccagataggtgctgcctatgacggcatgctgatgaaagggcaggcctggctgggccagtcggaaaccttggcggcttcggtagaccagatcaagcaggtcgtcaccaatggtctggacagtacggctatcggttcgatcctgacgtttaacagcggcgggaaacaggccgatattttgcggcaggctcaaggcgacgagaaatttaaagacacgctttcatggaaagagaagctggatttaaaactgggctatgcgtcggaagatctgatcaagaaactgaacggttattataagcccgtatggcgcgccgaccagctgagagccgataccgagaaaatttcaggttacccggcgctggctgaaaatggggcgatgttgccgtatggccagccggggaataatgcactcgggctgcgtaacaataatcctggcaatctgcgttcagcaccgaatacgactggccgaaacggcggctttgtcacgttcgaaaatcccaatgatgggctggcggcgctttctcgacagctgatgctgttcggcgatcgggggaataatacgttaaaccgaatgattaggacttatgcgccacctaatgaaaatatcacccaggcctatattgatggtgtggcaaaacaaacaggctttaaccccgcggaaccgctggacctgcattcaccggcggtgcttgaaaagcttatcccggccatcatcaagcatgaaaacggcgcccagccatacagccgcgatcaaattttcagagggatcagcgattcggtctttgatcctcgctggtctggcttgcgtgaccagaataatctttacgggcagcgagcatctggtttgttcgaactctctgatcaggggcagtcattacagccgccaacgccaaaggattcgccaactcaagcctcgctgtttgcaccgaatgatcagcgagaggaaaccatcggccagatctctgatgccatgtctaaggcgatcgacgagaacaaattccaactggaaattacactggtcaatccccagaccggcgagcgccgcaaggttcaaactgaaggcggtggccgcgtggccttgtcaatgcaatcaatatcataa

SEQ ID NO: 4234 - protein, 625 aa, Serratia marcescens
MAKSFDFELTANDEASAAILRIEEIVKHLNPLLDRTRDALALGGQESRDNLDDLGSRFDVLAKNARSGVQFIGDLVPPLKMVGGLTLGLGGAAAVVNVVKNNLTNFANAGYRIDTVAKNVSMTADAFQELTGAMIENGSAREAAEGSVSELFEKANDAVHGRNEGFLALLKQRGIGISETKDGLADVGKLINDLNRAMQSLPAGQQALFANKLGISPDLLSYLRNTTSEVQRLKDQARRDGLIFTEKDLQNALAFKQQLNQIGAAYDGMLMKGQAWLGQSETLAASVDQIKQVVTNGLDSTAIGSILTFNSGGKQADILRQAQGDEKFKDTLSWKEKLDLKLGYASEDLIKKLNGYYKPVWRADQLRADTEKISGYPALAENGAMLPYGQPGNNALGLRNNNPGNLRSAPNTTGRNGGFVTFENPNDGLAALSRQLMLFGDRGNNTLNRMIRTYAPPNENITQAYIDGVAKQTGFNPAEPLDLHSPAVLEKLIPAIIKHENGAQPYSRDQIFRGISDSVFDPRWSGLRDQNNLYGQRASGLFELSDQGQSLQPPTPKDSPTQASLFAPNDQREETIGQISDAMSKAIDENKFQLEITLVNPQTGERRKVQTEGGGRVALSMQSIS

SEQ ID NO: 4235 - DNA, 735 bp, Serratia marcescens
atgaatacgatatgtaaaatgattttttctctatcattaataccgttatatgcgcactcaagtacttgtgaaaacagttacaatatgggatataaaggctttaccttcccaattataaccaactcgagaaacacaccagaaaaagcctgtttcagtggtagaaacgttacaagctggattacagaatctgatggcgccaaacttacctcagttataaagctagatgatgaagaattcttctacgtgaccacatacaatgaacaaaacggaaatagcgtattgtatggggtttatgaaaattcaaaaggcgaaccgaataaggttaggctgctttttaacgaccccaaaaaattcgaaccaaaacaaacattagaaaacatgagattaaactcatacgacaaagagaatggagttgtctatttttcaacaatggcatggaccactagtgacgccatacacgcatttagcgtgccaatgcaaaaattaaaaatagcctctcaccaattaaaagagagatttataacagacgggaatttcattgcagtagcaaattccgaaagatgccaatcatgtattgtcgtagaaaaaataagtcatgatgaaaaaggggcttatttccctaaattcctcgttaataataacggtgaaaacttctgccaaatcagcacaaaagatgcagcttgggagttagcaccagaatgcctatcaaaaggagatgaagaacgcccacgatag

SEQ ID NO: 4236 - protein, 244 aa, Serratia marcescens
MNTICKMIFSLSLIPLYAHSSTCENSYNMGYKGFTFPIITNSRNTPEKACFSGRNVTSWITESDGAKLTSVIKLDDEEFFYVTTYNEQNGNSVLYGVYENSKGEPNKVRLLFNDPKKFEPKQTLENMRLNSYDKENGVVYFSTMAWTTSDAIHAFSVPMQKLKIASHQLKERFITDGNFIAVANSERCQSCIVVEKISHDEKGAYFPKFLVNNNGENFCQISTKDAAWELAPECLSKGDEERPR

SEQ ID NO: 4237 - DNA, 693 bp, Serratia marcescens
atgccagtcattgtgttcgtatccccaaaaggaggggcaggaaaaaccacgtccgccctggcgttagctctacaaatagcaaaaagagttccggtaacggtcatcgatgcagacccgaaccaccctattaaatcttggtctgaagggggggctacacctgagagcatgaccgtcatttcagatgtaagcgacaagacgataggggaaacaatcgcagatgctgcgaccaagaccccctttgtgatagttgatttagaaggcacagctgcaaccattgttgcctatgcaattgccgagtcagactttgtcgtcgtcccaacccaaggctcccagcttgatgcagaacaagccagcagagcttttggtttaatccgcgcccatgaacgaggcattcagaagcataagcctgattacaagctaccttatgctgttttgttcactcgcacctcagcagcgatacagagtcgtgataccaggcatattaggaagagcttcgaagcaggtggcattcctttttttgaaaccgaattaaacgaacgcgctgcattcaaagcaatgttctcgtaccggcaacctcttgaaatgctcccaacaaacgaggtttcaaatgttgaaaaagccatcgagaacgcagaagcctttacgcgcgaagttattggcagaataaccaccggcactccggttacaccatga

SEQ ID NO: 4238 - protein, 230 aa, Serratia marcescens
MPVIVFVSPKGGAGKTTSALALALQIAKRVPVTVIDADPNHPIKSWSEGGATPESMTVISDVSDKTIGETIADAATKTPFVIVDLEGTAATIVAYAIAESDFVVVPTQGSQLDAEQASRAFGLIRAHERGIQKHKPDYKLPYAVLFTRTSAAIQSRDTRHIRKSFEAGGIPFFETELNERAAFKAMFSYRQPLEMLPTNEVSNVEKAIENAEAFTREVIGRITTGTPVTP

SEQ ID NO: 4239 - DNA, 513 bp, Serratia marcescens
atgtttttcaaaaagaaattaacagataaatcagcaaccaagatcataaaagagttaattgtttataacccgagaatagaagaaatggcaaacctattttggttttccgaacatgtaaatttaaacggatttattgcattaaacatttctctaatgagaatgatttctggaattattcatggtgtagcgggtaatgacataatcacctcaggaataaaggaaaatttactaaaaggttcattttcagaagagcaaaaacgagagttagataagctactgggaaacatagataaaaacataaaagcattcgccccggtgagcatacttaacttgagcgaggtagattttgacactttaatccgtccaatggtatctggtttctatataagaacaacaccactcccctctcaagttccaataagtgacattaaattaactcaaatattatttgctgaaagagtaaatgatgccattgaatattatataaaaagactagccaaatacaaagtttag

SEQ ID NO: 4240 - protein, 170 aa, Serratia marcescens
MFFKKKLTDKSATKIIKELIVYNPRIEEMANLFWFSEHVNLNGFIALNISLMRMISGIIHGVAGNDIITSGIKENLLKGSFSEEQKRELDKLLGNIDKNIKAFAPVSILNLSEVDFDTLIRPMVSGFYIRTTPLPSQVPISDIKLTQILFAERVNDAIEYYIKRLAKYKV

SEQ ID NO: 4241 - DNA, 822 bp, Serratia marcescens
atgtttgatattatttgtacgtttggtggcagtgacaaaccttattctattctagattttcaaaaattacccgacaacacgatagaactgttacgttattcactggtgtgccctgattgccgtaagcaggcgtactacagaaagaaaagtgttgacggaaaaaaggcctgttttggttccagatactgtacttgccgggaaactacagcttcatctcaacgacaaagggaggccaggaatgcgactgaggtggagcagattttgaccgagacagacaagattgaaatcagcttcgttactgcctccccttcttccgtaagcagtgaaccgactggtatccgagtggcgtcggatataacaaggacgggtaataataaagtatacgccataaaatctgagcaaacacgagtacccaaagtcacacttgaaaaaatactgcacagtttaatcagagggacggggttagcgacgtcggatacaattatccccatcgatggctttaattataaagccaagaacttatttgttaaatttccagatgctgagccactgaccaaaaaggctcatagattttattggggaacgctctataactctaatagtgatattgaatggcttaatcccgctgaatgcaaggatgtaggcattccgctaggtaatctgcggaaaagcattattgacaagttcaatatctctgatgctgaatctctcgagggagctgcaattatattttctggacggtgtagatggaataaagataagaccaaaaagataataagcatatgtgacagtgagcgtatatttatttcgttggttgattaa

SEQ ID NO: 4242 - protein, 273 aa, Serratia marcescens
MFDIICTFGGSDKPYSILDFQKLPDNTIELLRYSLVCPDCRKQAYYRKKSVDGKKACFGSRYCTCRETTASSQRQREARNATEVEQILTETDKIEISFVTASPSSVSSEPTGIRVASDITRTGNNKVYAIKSEQTRVPKVTLEKILHSLIRGTGLATSDTIIPIDGFNYKAKNLFVKFPDAEPLTKKAHRFYWGTLYNSNSDIEWLNPAECKDVGIPLGNLRKSIIDKFNISDAESLEGAAIIFSGRCRWNKDKTKKIISICDSERIFISLVD

SEQ ID NO: 4243 - DNA, 906 bp, Serratia marcescens
atgctattgagcgactatattgatgtggtgtacggaacagcacgggggaaccgggcacgtttcctgaaggagaacccggatattttgccccaggagctgagccgctggctgaaagccggtctgaaaatcagaccggagacaggagaaatctacaagcctgtatcacgccgcgtcagagtgccgtcggccatcgctgccggtgctggcgtgtttctctctgacgatctgcgtgagcgcgtgacgttgttggccactacacaaaacgtgacgacagatgccatgcttaatgccctggtcgagcgcgaagagctgtgccataagttgtctcctgccgtggccattggtattgctgttccggaacagcagatcgccggcatcgtcaaccgccattttgcagcgctgtcggaacacagtgaaacgtttgcctggcacagggtgctggagggactggtccatgaacttacggagtctgacctgctgtcatttcatacaggcaacattgccgagagccgacggctgaatataccccgtaccgcgtattactggtacggtggtttcgtggcaaaacgagtggccatgatgctgggctgcttcgatgtctatctgtggaatgaaatgatgcggcccgacagcgacgtggtcttcgtcggcgatgcacgcaatgcggtggcctgttactttatttgccagcagatgtgccgtcagctaaaagctgtgcggttgaactggcgtaaacagcagggagcatggggaagccgggcggagattgatgaagcggcacatcagtacactcagcgggtagcggaggggatcatggaaaacggtatttttatcggcggtgacgagcaaaatttttaccggttgcatcgctatgcggaaacacattatgcctgggccatgcgctga

SEQ ID NO: 4244 - protein, 301 aa, Serratia marcescens
MLLSDYIDVVYGTARGNRARFLKENPDILPQELSRWLKAGLKIRPETGEIYKPVSRRVRVPSAIAAGAGVFLSDDLRERVTLLATTQNVTTDAMLNALVEREELCHKLSPAVAIGIAVPEQQIAGIVNRHFAALSEHSETFAWHRVLEGLVHELTESDLLSFHTGNIAESRRLNIPRTAYYWYGGFVAKRVAMMLGCFDVYLWNEMMRPDSDVVFVGDARNAVACYFICQQMCRQLKAVRLNWRKQQGAWGSRAEIDEAAHQYTQRVAEGIMENGIFIGGDEQNFYRLHRYAETHYAWAMR

SEQ ID NO: 4245 - DNA, 528 bp, Serratia marcescens
atggatcataatacgtttaagaatgaagcagagaaattgaaagatattatctcaagcggtaatttacatatcccttccttttgggaatgtatatggcctggggtgttgatgatttcttggatcgtcatatgtcctgttattgcgtttcaaatgtatattgaaatgtatagcggagatccaatgataattgctagcggagtatttgttggcatactctttactgttgccatcttcaatattcgttcgtggtatcttgcaattccttatgagtttagagctaactccttattttttaaaaaactaaaatctaaactggtggcctattatttggtatacatgttagttgtacccatcgcctcttatttttctacttacacgacggtagaagcagctttttacgctggtcctctcttgatatcgctgctgttgataatgtttataggtttaatggatatcagtcgttaccgtgtgtcagctttttcttcggtgctggagcttatcaaatcccgcaaacagggaggtgagtaa

SEQ ID NO: 4246 - protein, 175 aa, Serratia marcescens
MDHNTFKNEAEKLKDIISSGNLHIPSFWECIWPGVLMISWIVICPVIAFQMYIEMYSGDPMIIASGVFVGILFTVAIFNIRSWYLAIPYEFRANSLFFKKLKSKLVAYYLVYMLVVPIASYFSTYTTVEAAFYAGPLLISLLLIMFIGLMDISRYRVSAFSSVLELIKSRKQGGE

SEQ ID NO: 4247 - DNA, 804 bp, Serratia marcescens
atgaatgaaacgtactattatggccagggtaaggtttatttggcacgtcgtgatggaaatggtcgtcccggtgcattccgctggataggtgatgtatcagcattatcggtaacgctggcatttgaacaaaagacgtctaagtcatcgcgaggcggaaaactggttaatacacgacgttacatgacgtctcaatcaggtgttgtgacatcaacatggcataatttttcggctgaaaatttgtcactgctgttgaattcaaatgtaatccgtaattacccggaaattatagaaaaagaagtgctgccgcaaaatatatcggctggcgaccgtattgcattgtcccaccaaaatgtttggggagtagaaattaatggcatgattgaggggcgtgattacagtgttgatgcctcctggggaatgattgattttatatcaactcccgttcatcagcctgttagcgttgactatgcgcatgccaatagctcaagcatttcgatcttttcggataaccgggatgagtttgtgtttcgttatgaaagcatcaatctggcagagtcaaatcagcacatgcttgttgagctttttcggctttcatttgaaccactgacgaccctgcaacttattaacaatgactcatcgataggaggcgtcgatacggcggctgaaataatgtatgacatgtctcgtcatgacgacccgattttaggtcgatttgggcgagtaacaataatcgagacgttaagtggtattacgcataacggcgctattaatcataacggtgtttatacccacggggggcaataa

SEQ ID NO: 4248 - protein, 267 aa, Serratia marcescens
MNETYYYGQGKVYLARRDGNGRPGAFRWIGDVSALSVTLAFEQKTSKSSRGGKLVNTRRYMTSQSGVVTSTWHNFSAENLSLLLNSNVIRNYPEIIEKEVLPQNISAGDRIALSHQNVWGVEINGMIEGRDYSVDASWGMIDFISTPVHQPVSVDYAHANSSSISIFSDNRDEFVFRYESINLAESNQHMLVELFRLSFEPLTTLQLINNDSSIGGVDTAAEIMYDMSRHDDPILGRFGRVTIIETLSGITHNGAINHNGVYTHGGQ

SEQ ID NO: 4249 - DNA, 3153 bp, Serratia marcescens
atggcagaacaagacggcggcagcctcgtttatcaggtcgatatcgacactgcaaaaatgatcactggtagccgtaaggcatctaccgtactcggggaaatggagaagcagtcaggaaaagccgatgctagtttgtcaaaattggaacgccaggcagcttctacaggttctacttttggaactctttcgcgtgtggctgcggctgttacagctgctctatcatttcgtgaggtaatgtcatacgccgacgcatggacaacgctaaacaacaaactggctaacgcagtaaggactaatgaaactctggctgatgtgactgagcgagtctttcagataactcaggatacgcgctccagcctgaacggcactgcgacgctttatgctcggcttgaacgcgctactcgaagctataacacctctgctggagatctggcaaaactaacaacaatcattaaccaaggttttgtcgtatccggcgccacagctcaagaagcagagaatgctattatccagttatcacaaggccttgcgtcaggcgttcttcgtggtgaggagttcaactcagtaaatgaacaaggtaataggctaatcgtagcccttgctgactcgatgaaggtatcagttgggcaaatgagagcgatggcagcacaaggaaaattaactactgatgtagtggttaatggattgctttctcagggcgatgcgataggtaaggagtttgctaaaaccacgatgactattggtcaggcaagccaaattgccggcaacaacatcaccaaatttatcggtagttcaacaacggtaaaaactggtgtgatggtcttcaatgatgccattattaccctgagtgaaaacctcaccgccgtctcaaacgttattttggctatctctgcggtaattggttcgcggtatgtttctgcattaacggctgcaacagcagcaacgatagcgaatacagcagcagcggtaagggcagcgattgcgcagggctctctccgttcagcacttcttgccgctttaaccccgcttggcggcttggttggtgcggcaacgctcgcatctgcagcaatattctatttctatcaacgtgctcaacaggccaagcaagaagcgatagatttcgcagataaactcgatggcgtgatagcaaaaatgcgccaaatgaatgatgtacagctgaccggaactattgccgatctgaacacgtcactgagggctcaggttgagaaattaggcgaattacaaactgctcaccaagaaaatattaaccgtttatataatgctcaacaggcgctaaataatgctgcagagggctcttgggcatataactcagcgtcagcggcagtagctgaggctcaagatcaggttgctcagtcggctcgtgatgtagatacagcagaaacaaagcttagccgaactaaaagcacattaggcttagtccaggcgcagttaagcggaaagcttgaacagggcgttgatcttctgcgccgagatggcgaagaggctagcgtgactgctggcatgatgaaccacctgggcaacgctataaatttcgccagcagggccaaggacaaattcaactcgcaaagcctcatcgttgaacggcctaaaaacgttcaggactatctggataagctgaatgatcaggttgagattcagggcgagctaaacgataggaagcgtgcccagctcaaggctgagaaggatatcaggtctctcggcggtagtgagcaagatgtactgctggcacgcgagagggcaggcgctgagttcgatgcaacgaaggcaattcaggagcagaagaaggcaaccaaggaagggatagcggagggcacgaagtcagcgagccaggcggaaagcgttgcccagaagctggctaacctgaagcagcagtctgagcttgcggcggactcaacaagtgagcttagccgagagcaggcgatcctgactgcacaacaatcgctgggtaaaggagctacacaggcccagatcgctgaggctggtgcttacgccgctaagaagtgggacactgccaacgctatcaaggcgcaggctgcagcagagaagctcctgccagaagccaaagagaatgccagctacgctcaggacgtgaaggacttaaacacggcgttagcggccaagaaaatcagccaggagcagtacaacaccacggctgagcagctggagcaacagcatcaggttaacttggcaaaaatccgggctgaagccgtggtaagtcctcaacagcaagccgccggcatggttgacccagtgcagcagcttgccaatgagaatgcgcagaagctggcgttgattcagcagtttgaaacggataaagggaagattactcagcgcggaattgagctgatgaatgctgctaacaagcagtacgaacaacagcgaactgccgcgcagtgggaaatccttagccagcagagccttggttacgacatgctgactagcgctgttgatgccttctctggtaatgcctccaacgctattacagggctgctcaccggcaccatgtcggcacaagaggcgatgcgttcgcttggcaacaccattctgaacagtgtgataaacagcatcgttcaggtcggcgtggaggcgttgaaaaactacatcctcggccagacgcttggcgccgcctccgtggcgtcatctgtgggtatggctgcaacaacggcttcagcctgggcgccggcggccgcaatggcatcactggcaactcttggcgctaacgcagctccagcggctgcagggataacctcaaccgtgggattggctggtgggctggctttggctggagcgcgaaaaaatggcggaccagtgtcccctgggaaaatgtaccgagttggtgagggaggggtgccggaggtgcttcagtcgagcaatgggcgaaactacctcttgaacggtgacaacggcggaaaggttatcagtaacaaggaactcaccgccggtggcagtgctgcaccaaccatcatcatcgaaaactactcatctggtgctggggtaatggatacccatgccagcaaaggggctgatggtggcgatgtagtgcgcatcgtgctggcggatctgcagcagggcggccaaatcagtcagggcatctcccagtatcaccaggcgcctcgcaaagccactgaatag

SEQ ID NO: 4250 - protein, 1050 aa, Serratia marcescens
MAEQDGGSLVYQVDIDTAKMITGSRKASTVLGEMEKQSGKADASLSKLERQAASTGSTFGTLSRVAAAVTAALSFREVMSYADAWTTLNNKLANAVRTNETLADVTERVFQITQDTRSSLNGTATLYARLERATRSYNTSAGDLAKLTTIINQGFVVSGATAQEAENAIIQLSQGLASGVLRGEEFNSVNEQGNRLIVALADSMKVSVGQMRAMAAQGKLTTDVVVNGLLSQGDAIGKEFAKTTMTIGQASQIAGNNITKFIGSSTTVKTGVMVFNDAIITLSENLTAVSNVILAISAVIGSRYVSALTAATAATIANTAAAVRAAIAQGSLRSALLAALTPLGGLVGAATLASAAIFYFYQRAQQAKQEAIDFADKLDGVIAKMRQMNDVQLTGTIADLNTSLRAQVEKLGELQTAHQENINRLYNAQQALNNAAEGSWAYNSASAAVAEAQDQVAQSARDVDTAETKLSRTKSTLGLVQAQLSGKLEQGVDLLRRDGEEASVTAGMMNHLGNAINFASRAKDKFNSQSLIVERPKNVQDYLDKLNDQVEIQGELNDRKRAQLKAEKDIRSLGGSEQDVLLARERAGAEFDATKAIQEQKKATKEGIAEGTKSASQAESVAQKLANLKQQSELAADSTSELSREQAILTAQQSLGKGATQAQIAEAGAYAAKKWDTANAIKAQAAAEKLLPEAKENASYAQDVKDLNTALAAKKISQEQYNTTAEQLEQQHQVNLAKIRAEAVVSPQQQAAGMVDPVQQLANENAQKLALIQQFETDKGKITQRGIELMNAANKQYEQQRTAAQWEILSQQSLGYDMLTSAVDAFSGNASNAITGLLTGTMSAQEAMRSLGNTILNSVINSIVQVGVEALKNYILGQTLGAASVASSVGMAATTASAWAPAAAMASLATLGANAAPAAAGITSTVGLAGGLALAGARKNGGPVSPGKMYRVGEGGVPEVLQSSNGRNYLLNGDNGGKVISNKELTAGGSAAPTIIIENYSSGAGVMDTHASKGADGGDVVRIVLADLQQGGQISQGISQYHQAPRKATE

SEQ ID NO: 4251 - DNA, 333 bp, Serratia marcescens
gtgcgcccgcaccgacaccctcacaccttcgagctactgttgccattaaggggtcgtttcgtggtgctgaattttgacgatcggggtaccgtcacccatcgggcgatattgggggaaacctgtacggtgctggagatggccgcaggaacctggcatgccgtgctgtcgctggataccggtggcataatttttgaagtaaaacacggtggctatcaacccgtggctgccgatgactatgcgcactgggctccagcggaaggagaaccaggaaccacggagcttatggcctggtatgcgcaagcgcaggtgggcgacagcgcttttgccgtctga

SEQ ID NO: 4252 - protein, 110 aa, Serratia marcescens
MRPHRHPHTFELLLPLRGRFVVLNFDDRGTVTHRAILGETCTVLEMAAGTWHAVLSLDTGGIIFEVKHGGYQPVAADDYAHWAPAEGEPGTTELMAWYAQAQVGDSAFAV

SEQ ID NO: 4253 - DNA, 465 bp, Serratia marcescens
atgaataagctgattgctcacgttggcggcccggctagcgtcaccgcgttcgcccgacagctgggagacgaaacgttccgtctcgaccgtaccgagccgacgttaaacaccgccattccgggcgatccgcgtgataccacttcacctcgggcaatggcgcaaactctgcggaatctgacgctgggtaaagcattgggcgacagccaacgggcgcagctggtgacatggatgaaaggcaataccaccggtgcagcgagcattcaggcaggactgcctgcttcctgggttgtgggggataaaaccggcagcggtgactatggcaccaccaacgatatcgcggtgatttggccaaaagatcgtgcgccgctgattctggtcacttacttcacccagcctcaacctaaggcagaaagccgtcgcgatgtattagcgtcggcggctaaaatcgtcaccgacggtttgtaa

SEQ ID NO: 4254 - protein, 154 aa, Serratia marcescens
MNKLIAHVGGPASVTAFARQLGDETFRLDRTEPTLNTAIPGDPRDTTSPRAMAQTLRNLTLGKALGDSQRAQLVTWMKGNTTGAASIQAGLPASWVVGDKTGSGDYGTTNDIAVIWPKDRAPLILVTYFTQPQPKAESRRDVLASAAKIVTDGL

SEQ ID NO: 4255 - DNA, 339 bp, Serratia marcescens
atggcacacgtagatatggcactgcagatcgaacgattccaaaaaatcgcacatgtcatcgtcgaaaacgtaaaaacgcgcgttaccagcggattagcggacgacgaaatcatgcatatcatctacgaagaaatcctgagttttttcgtgatgcaacaaagaattactgttgaatacatgaattttaacgaagaacagcgcgccaattttgccgcgcaaatgtattccctgcttgagccattagcttgtgaatttaaagggatagcaaaccccaaatatgcggactatgtggccgccacgggaaagactggagcacttaatttcatggtaaacgcataa

SEQ ID NO: 4256 - protein, 112 aa, Serratia marcescens
MAHVDMALQIERFQKIAHVIVENVKTRVTSGLADDEIMHIIYEEILSFFVMQQRITVEYMNFNEEQRANFAAQMYSLLEPLACEFKGIANPKYADYVAATGKTGALNFMVNA

SEQ ID NO: 4257 - DNA, 585 bp, Serratia marcescens
gtgaaggcagaaaggggggctgacttatcggatggtaagacgctattttggctagataacctgtgcttaacttgcgtgcctagccaaagagggaactggcatgtgtgcagttttaagcgagaagaatcccggtgggacgatacaatcgccttgcttaaaggggatgaagttcaattctctgtaaagctaggaaatggcagttatggtaaggcgcactgcgtttctctaaatggcgccttcatcttcagtattcatggcgatccagacaatcgcatgaaaggacttatcgtcatgaatagttcacatcaagaactatttagggtcgagacatcttgtcacctgataagtgctgccatatctgagttcggacaatacatcgcgctttcgtttgccataggaaaagatacgactgacccgtactcgggacggttagaggtcattgatctaagtactggtgaggtaaaaatgtcgttggtgaaaagcgacaagatctaccatgccagtcttgacgttctcgagcctgatggggaggtttttgcgacatctaatggtaaatctgtgctggtatattctaataggatatga

SEQ ID NO: 4258 - protein, 194 aa, Serratia marcescens
MKAERGADLSDGKTLFWLDNLCLTCVPSQRGNWHVCSFKREESRWDDTIALLKGDEVQFSVKLGNGSYGKAHCVSLNGAFIFSIHGDPDNRMKGLIVMNSSHQELFRVETSCHLISAAISEFGQYIALSFAIGKDTTDPYSGRLEVIDLSTGEVKMSLVKSDKIYHASLDVLEPDGEVFATSNGKSVLVYSNRI

SEQ ID NO: 4259 - DNA, 417 bp, Serratia marcescens
atgagtaaagatctttctctggcggcggagaacggggcagaagtgagcgaactccctaatggactatcctttaatgcctcaacaggccagtggcgggcgcagtacaagggtcagaggatcacttacagcactgcccgctatggggacatggctaaggatttggcgcatagtgcgctgaaacggatgctggccgggaattttgacccagtagctgatgatctacttctcaagtattcatggcgcatggacgatgcggctacgcagttgggcctatcgcttggtcagcttagacagtggatgctgacggggatagtcaacggtaaggagattcgctcccccaaacgtgatgttcagggggtagaccggatcagcgggcatgagctaatgatggcacaagagcgtttgcggcttgagtaa

SEQ ID NO: 4260 - protein, 138 aa, Serratia marcescens
MSKDLSLAAENGAEVSELPNGLSFNASTGQWRAQYKGQRITYSTARYGDMAKDLAHSALKRMLAGNFDPVADDLLLKYSWRMDDAATQLGLSLGQLRQWMLTGIVNGKEIRSPKRDVQGVDRISGHELMMAQERLRLE

SEQ ID NO: 4261 - DNA, 156 bp, Serratia marcescens
atggatccgcttaaaccaaaacaatctgaacctgagtgggcggaaatgttaaataaaaatatgggagataaacagcaacgcaaagaaactttctggcgcaatgctgttatcttttttgtgttgctggggattgttctgcatttttttgggaaatga

SEQ ID NO: 4262 - protein, 51 aa, Serratia marcescens
MDPLKPKQSEPEWAEMLNKNMGDKQQRKETFWRNAVIFFVLLGIVLHFFGK

SEQ ID NO: 4263 - DNA, 162 bp, Serratia marcescens
atgagcatggttgaatttagcgcggtcgctaaacatttcggcaccacccaggtgctgcacgatatcaatctgaaaattgatgccggtgaataccggctggctgccgacgatccggatgaggagaacaccctcgccacggcagtttcatttgatgctcgatga

SEQ ID NO: 4264 - protein, 53 aa, Serratia marcescens
MSMVEFSAVAKHFGTTQVLHDINLKIDAGEYRLAADDPDEENTLATAVSFDAR

SEQ ID NO: 4265 - DNA, 273 bp, Serratia marcescens
atgaaagataaatatattgacggcattaccatttcgaaaattgacgacaaaataaccaagttagtatccaaagttgcaaaaaaagaattaggtgggggcccgatgctcgttgccattcaaaatgaagccggtgaggtttaccggctcatcacttctgaaggtatgtcggcataccttgatatcgttcaggggcttgccaacatggggcttaatgaccttctcgccacgaatttcaaaccgcataaatacgacagtcttttcaccttcaaataa

SEQ ID NO: 4266 - protein, 90 aa, Serratia marcescens
MKDKYIDGITISKIDDKITKLVSKVAKKELGGGPMLVAIQNEAGEVYRLITSEGMSAYLDIVQGLANMGLNDLLATNFKPHKYDSLFTFK

SEQ ID NO: 4267 - DNA, 276 bp, Serratia marcescens
atgtcattcagcattaccagagaacttaccgttgccaagtcataccctgagcttgtgatgcaggttgataatgggacggaggacgttgaggtgacttacgatgttacttcactggagagcctgcttggaagcgacggtgtcattaactataccgtgtccattgccggtgttgcctctccctgggttcgccagttcgacttcaagtattcaggtgctggaaatccgctcactgagggtgaggtggcgctcaaagcagctcttggatataaagcctga

SEQ ID NO: 4268 - protein, 91 aa, Serratia marcescens
MSFSITRELTVAKSYPELVMQVDNGTEDVEVTYDVTSLESLLGSDGVINYTVSIAGVASPWVRQFDFKYSGAGNPLTEGEVALKAALGYKA

SEQ ID NO: 4269 - DNA, 381 bp, Serratia marcescens
atggccaagatgacagtgacattgattcacggcctggtcaccggcaaaggctcaccggatgaaaccacccatatggacgtggaactgcgcgagttgaccacccaggatgtggtggagtctcagttggcctctgagcggatagttctggcggatggtaaggctgtggcctattgctccgaagtcatgatggggctggagatgttgcgtcgccagattgcctccatcggtagcatccccggcccgttaagcctgaagcagatttaccaacttcacccggctgatctgaagcatttgacggaaaaaacagaagctatggacgggttgttgacggaggtggcagaacgggggcgaactgatgccgctggcgacggcgctcaataa

SEQ ID NO: 4270 - protein, 126 aa, Serratia marcescens
MAKMTVTLIHGLVTGKGSPDETTHMDVELRELTTQDVVESQLASERIVLADGKAVAYCSEVMMGLEMLRRQIASIGSIPGPLSLKQIYQLHPADLKHLTEKTEAMDGLLTEVAERGRTDAAGDGAQ

SEQ ID NO: 4271 - DNA, 258 bp, Serratia marcescens
atgaagaccaagaatcttaagcccaaaggtgacgtgcacgtgcgcaagccagacggcacttacctggccgccgagggggaaagcctgttgctgtccgcctactggttgcgccgcattgccgaaggtgacgtggtggttagtgacatcaccatcccacaagctgaggccgatgttgccttgagcaacgtcgcttcccagaagaccgaggcggcacctgtagaaccagccgcgccaaaatccaccaagacggagaagtaa

SEQ ID NO: 4272 - protein, 85 aa, Serratia marcescens
MKTKNLKPKGDVHVRKPDGTYLAAEGESLLLSAYWLRRIAEGDVVVSDITIPQAEADVALSNVASQKTEAAPVEPAAPKSTKTEK

SEQ ID NO: 4273 - DNA, 534 bp, Serratia marcescens
gtgagtgggaagccaatcaagaaaaagtcggagcaagtcggtcaggcagctccagcagaagttaacgcgcctgaagcgccggttattactccgactgttacaggacactatcagcccgttacccagtccagtgcgccaccgcaaccggattcggcagcacctgagctaaccggcagcgataccatcgtgaccctgagcgtttccgggtcgcaaatggataccgagcaggtcaatcaagaccaggtcacgctgactgccgttctggcacaggaatatgcggacaaacctgctggcgttgaagtgttgttggttcaggcaatatcactcaacggtttttaccgtgccgggcagttctggccacacgaaggcgttcatgcattcgtcagttatgacgcggacagtgataccgccgagaacgaggccaacatggttgcgccattcatcagcatagcgacagccgagcgactgaaagctgagcctaacctccgggtcacggtcgtagaaaccgtcgtcactgacgccgagggggaataa

SEQ ID NO: 4274 - protein, 177 aa, Serratia marcescens
MSGKPIKKKSEQVGQAAPAEVNAPEAPVITPTVTGHYQPVTQSSAPPQPDSAAPELTGSDTIVTLSVSGSQMDTEQVNQDQVTLTAVLAQEYADKPAGVEVLLVQAISLNGFYRAGQFWPHEGVHAFVSYDADSDTAENEANMVAPFISIATAERLKAEPNLRVTVVETVVTDAEGE

SEQ ID NO: 4275 - DNA, 303 bp, Serratia marcescens
gtgggttgggaagtcatcaaaggtaactggactattatctgggcgctactgatgttggccatccaaatggtgcaattgttgttgtccaaaacctacgtcaagcgtgaggagttggagtcactgcgcatccgtatccaggcgatggaaagcaccattgccggattacctagccagaaagacctgcatatgttgcagcttgaaatgagtaacttgcgcggtgatctgcgcgaactcggcccggccattcgccaggtgaaacacgtcagcgatctcctgctggaaaatgaattgaaggataagtga

SEQ ID NO: 4276 - protein, 100 aa, Serratia marcescens
MGWEVIKGNWTIIWALLMLAIQMVQLLLSKTYVKREELESLRIRIQAMESTIAGLPSQKDLHMLQLEMSNLRGDLRELGPAIRQVKHVSDLLLENELKDK

SEQ ID NO: 4277 - DNA, 528 bp, Serratia marcescens
atggtcagcgtgatcgccttaaaaaagaggtgcttcaccggatggccaatggccccaaacctaccccggtggattaccggggctgtgacgggactcatgccagcttttacaaaagaggttgggaatcagttggccccagggatatcgcctgggaatgccagcgttataaggaaaaacatcatgttaaaactcattaattcaccctggtcagtgttgacattgctggccctatcaatggggctgtgcgcctccctggataaactcgcttttggtctgtggtggtgggtattcgccggtgtcgtcatttgggttttggcgaccatgcaaaatctgggtcactacttcttttctctctttttggcgtgtctctttagcggcgtcggtgggttgttgactggtcgggcggtggcttcaggctatgcctatctcggctgggtcagtatccctttgtcgctattgtctgcggttacggcatttctggtgcttcatcagcttaaacagcggggagcgctcatttggatccgataa

SEQ ID NO: 4278 - protein, 175 aa, Serratia marcescens
MVSVIALKKRCFTGWPMAPNLPRWITGAVTGLMPAFTKEVGNQLAPGISPGNASVIRKNIMLKLINSPWSVLTLLALSMGLCASLDKLAFGLWWWVFAGVVIWVLATMQNLGHYFFSLFLACLFSGVGGLLTGRAVASGYAYLGWVSIPLSLLSAVTAFLVLHQLKQRGALIWIR

SEQ ID NO: 4279 - DNA, 540 bp, Serratia marcescens
atgcggaaaatactacttggggcactcttccttgtgtctatttccacttcagcagccaacacatcgattaaagataatgcgaaagtactattggaagaatatgcgggggtagattctgttgattggtataacaaaggtgacaccgcttttgctgagaatgacggttttattggcgtttatagacaattaaaagcatctgtagacgatagcggagttaacattaaaatgcagttcgtgtctggttctaagcgaccagatagtgatgactttagccgagtaactacggatgtatgtttgttggtcgtgtcggagttaatccacccaacccctaaagcgaaagaaccagtgaaatgggatgatgatattgagtctgctgatgacaagaataatccatttgattttatgcaagaaagtagccttgataaagttcacggggagcagaaagtaaaaatcatagatgggtggaaagttagcattaagcgaacaaccatgttaacaacatgctccgcaaaaaaaaatataatccaccaatcacaatga

SEQ ID NO: 4280 - protein, 179 aa, Serratia marcescens
MRKILLGALFLVSISTSAANTSIKDNAKVLLEEYAGVDSVDWYNKGDTAFAENDGFIGVYRQLKASVDDSGVNIKMQFVSGSKRPDSDDFSRVTTDVCLLVVSELIHPTPKAKEPVKWDDDIESADDKNNPFDFMQESSLDKVHGEQKVKIIDGWKVSIKRTTMLTTCSAKKNIIHQSQ

SEQ ID NO: 4281 - DNA, 213 bp, Serratia marcescens
ttggacaaagtaaagtttatggaaatgaaaattcgtttctatgtaaccaaagatggaagtatcaaacaagatattgactctaaattcatgaaaaatgaaacatctaaggcttttagcgaaaaatatataaaggcgtttgtggctttgcagggtgatttggtgacggatatttccaaaactgtaatcagcgatgacattaataaattccactga

SEQ ID NO: 4282 - protein, 70 aa, Serratia marcescens
MDKVKFMEMKIRFYVTKDGSIKQDIDSKFMKNETSKAFSEKYIKAFVALQGDLVTDISKTVISDDINKFH

SEQ ID NO: 4283 - DNA, 900 bp, Serratia marcescens
ttgaaaaataaaaatatggatatcatactgcgcttcttaataaggaattatgccataaatggaagttcatcctttgactctttgttttctgatggtatagaaaaaaccaagttatacactcaggcttacaatgaattcaaaataaactttcagttttatgtcaatagatacttagcgttaagttatatttatcattctatgattaatgctgggtcaacatttagttcaatggtgttattagaggaggtgaagattatcaatttagatagagggccaaaagataccaacttctactacgctagaaatgagtcattcggacatcagattatcatgcagtatgccaagttatatgaagccttggttaatatagatgcattggaaggtgatagtaataaatttaatgaaaatgaaaagaggcacgctttaaaaatattggattcagataaattaaaagatgcctacgtttatctgaatgatctgcgaaacagaatagagtcatcaggtgctctaaagctcagaaataatattttcgctcatccatttaaagatggtggtgctggaagtgttgtttttttggaacaagtgacgagtaaagtttattcaatacttagagatctttgcgatgaaacagatagagagaaatatgaaggatcagataatagaataagatttttttgtagtaattacatcatgagggctgtatatggaggtagtgacggttgtaatgcgctttcgtctattgaaaaacagtttgcaataaaaacaaaggcacaaaaacatataatagcactctatgagttcatgtctattcttcgtggtgagaaacttttaggtgtagaaccatttctgatagttgacattaatactgtcaaagctgagttgaaagatattctttattaa

SEQ ID NO: 4284 - protein, 299 aa, Serratia marcescens
MKNKNMDIILRFLIRNYAINGSSSFDSLFSDGIEKTKLYTQAYNEFKINFQFYVNRYLALSYIYHSMINAGSTFSSMVLLEEVKIINLDRGPKDTNFYYARNESFGHQIIMQYAKLYEALVNIDALEGDSNKFNENEKRHALKILDSDKLKDAYVYLNDLRNRIESSGALKLRNNIFAHPFKDGGAGSVVFLEQVTSKVYSILRDLCDETDREKYEGSDNRIRFFCSNYIMRAVYGGSDGCNALSSIEKQFAIKTKAQKHIIALYEFMSILRGEKLLGVEPFLIVDINTVKAELKDILY

SEQ ID NO: 4285 - DNA, 651 bp, Citrobacter braakii
atgaaatcacgagagctaaagactattcatgatctgataattacaaattatcaaaaacatgacttaggaaatggccgttatctacatactttccagccagcaacaactgacactacctatcagtttgaagccaacattgaggatgtagtcatcgaaggagaaagatataatattggattcactgagcataatggtataaagactattgagacatcatgtttatcaaagtcatctgttctagacaaagactttagctatcaatatgctcgtaatatgtctaaacagaaacatgatgaaaataaagggaaaaatgattcaagggtaaagcattctgagtccgatggctactattgggggcggaaatatgcttggcgtgaatttggactagctcttcctcgagaggtctttgagcgctacttaatagagtgtattgatcatccttatatcgaatgtcaggtcataacagaaggatatccacaaggtgatgattctatcgcttttttagatgatggcctagctgatgccattgatgatttaatccaaactgctgtgattgttaataaagggccttattttaaatcaccattatattatggtggtgatagaaaatttacgattaaaggtgtccctgctataaccgacaaaaaatga

SEQ ID NO: 4286 - protein, 216 aa, Citrobacter braakii
MKSRELKTIHDLIITNYQKHDLGNGRYLHTFQPATTDTTYQFEANIEDVVIEGERYNIGFTEHNGIKTIETSCLSKSSVLDKDFSYQYARNMSKQKHDENKGKNDSRVKHSESDGYYWGRKYAWREFGLALPREVFERYLIECIDHPYIECQVITEGYPQGDDSIAFLDDGLADAIDDLIQTAVIVNKGPYFKSPLYYGGDRKFTIKGVPAITDKK

SEQ ID NO: 4287 - DNA, 387 bp, Serratia marcescens
atgagtggttggctgcaaaaactgacgcatggcagtttagtgctcttgctgctggtggctattagcctaggtggctacagctcattgctatcacatcgattggatctggcacggaggcagtctgcggagcagcagaagacgctggcgcagcaggcaaagttgatcacctcattgcgcacggatgacgcccgcaatcgcgcattgatggcagaacaacaacggagagagcagcagctgcgccagcagggcgaaaactaccagaggaaatatcgtgaagcaatacagaatgatgagtgtagtcggcgtgctgctcctgtcactgttcttgacctcttgcgcggaaaggataccgccaccactggatcctatcgttctgttgccccctga

SEQ ID NO: 4288 - protein, 128 aa, Serratia marcescens
MSGWLQKLTHGSLVLLLLVAISLGGYSSLLSHRLDLARRQSAEQQKTLAQQAKLITSLRTDDARNRALMAEQQRREQQLRQQGENYQRKYREAIQNDECSRRAAPVTVLDLLRGKDTATTGSYRSVAP

SEQ ID NO: 4289 - DNA, 717 bp, Serratia marcescens
atgtggagttatcccggatgctgcaaagacctcaaaaacacgcccatgagggatgacgcccttgcgcttatttttccatttgccgatagattgctgagaaatccccagccgtttggcaagcaatttcgtcgatcccacggcatctatcgcacgaaggagagcttctcttgtcatttcgatttcaacctttgttgttatgaacaagccagattaaaccacagggttacacaacaatgcaaccatgaggttattcatagtattaaacctttgggttataattttgatatgaatgaaaaaaatgcttcaaaagagccagccattgcggctcgcctataccagttgatgaatcaaaccggagtcaacaaatccggtttggcgcggatatgtggaatcagcccacaggctgttggccgctggttcaccaaaggaacaatgagtaaagactcagcattcaagttatctgaggcatttggagtatctgtagcctggctactcaatgatgatggtgctgttgaaagccctgccataccatatccagaggtgttaagtgatcggcatcgagaacttctcaacctgtttgaccgccttccagaaagtgagcaacagaatcacatagaggctctcagaggaatggtagaaaattacgacaggctcttcggtgaacttctaaagtcgagaaatatcaaagatataattgaggccaagaaagaaaaataa

SEQ ID NO: 4290 - protein, 238 aa, Serratia marcescens
MWSYPGCCKDLKNTPMRDDALALIFPFADRLLRNPQPFGKQFRRSHGIYRTKESFSCHFDFNLCCYEQARLNHRVTQQCNHEVIHSIKPLGYNFDMNEKNASKEPAIAARLYQLMNQTGVNKSGLARICGISPQAVGRWFTKGTMSKDSAFKLSEAFGVSVAWLLNDDGAVESPAIPYPEVLSDRHRELLNLFDRLPESEQQNHIEALRGMVENYDRLFGELLKSRNIKDIIEAKKEK

SEQ ID NO: 4291 - DNA, 987 bp, Serratia marcescens
ttgaaaaatcaaacactcctctatccttctggaagttctggcggtggtaatcacacaaaactggaccgaatacccttaacgtccagtgacgacaaaagcggcgctttaatacttaaagatcccttggccggatttgtttatactggtttcctctccacaaaccggctgatacggatgaacaagatctaccactacaccgacctaaacggactccaaggcattgttgaaaatcattgcctgcgggcgaccaacctgtattttctcaacgacgaagaggaaatgcatcatggcatcgcagctttcgaaaatgcactcaaccatctaaatgaagaactgagccaggaaagcattaaaatccttcgtcatacacttgccattcaccgattaaatcaggcgaggcataattataatatttcattctgccaaaagtctgatctgcttagccagtggcgcggctatgccgctactcaaggggtatgtctggagttcgacagtgataaattagaaaacgccctcgactaccaagattatcaggtattatcacgtggggtgttttatactagtagaaattccacgctggaagcgaaagcagaaatactcacctttctaaaggaagaaaatattattgagataagtaaagagaataagttatttgaatatacaagtgcatctcaactagtaaacaggttgacgccgtttttcaagcacgatagttttaaggaagaaagcgaataccggatcgtaatacagcctaatataaagtctgctccagttaaattccgggtaaaccagcacggtctgattccctatcttgaagtaaaagccagacaagacaatgcttttgacggacgactgccgctagaaagtgtaaagatcggcccctgcaaaaaccgggaatttatgaagcagggtatcgagttcctgctcaactacaacggctataagaaaactgagctttcctttactgatgtaccttttcgggtttag

SEQ ID NO: 4292 - protein, 328 aa, Serratia marcescens
MKNQTLLYPSGSSGGGNHTKLDRIPLTSSDDKSGALILKDPLAGFVYTGFLSTNRLIRMNKIYHYTDLNGLQGIVENHCLRATNLYFLNDEEEMHHGIAAFENALNHLNEELSQESIKILRHTLAIHRLNQARHNYNISFCQKSDLLSQWRGYAATQGVCLEFDSDKLENALDYQDYQVLSRGVFYTSRNSTLEAKAEILTFLKEENIIEISKENKLFEYTSASQLVNRLTPFFKHDSFKEESEYRIVIQPNIKSAPVKFRVNQHGLIPYLEVKARQDNAFDGRLPLESVKIGPCKNREFMKQGIEFLLNYNGYKKTELSFTDVPFRV

SEQ ID NO: 4293 - DNA, 201 bp, Serratia marcescens
atgaaaccatttaaagctcgtgagtttaatgaaaagtacaaagtcggcagcatgtttatttaccagtcctgcccgattttacgcggtggtccgattgtaaaaacggtagggccagccagggatttcaaagtttcaggcacggtggttgagataaatcaggaaccttatttcgttaaagttaccgcgctgaccgcagcttaa

SEQ ID NO: 4294 - protein, 66 aa, Serratia marcescens
MKPFKAREFNEKYKVGSMFIYQSCPILRGGPIVKTVGPARDFKVSGTVVEINQEPYFVKVTALTAA

SEQ ID NO: 4295 - DNA, 3840 bp, Serratia marcescens
gtggcgatcttcgatatcaataaagatgaattactcggactctcagatactcttttggaagagttaattgctcgccttgctgaagccgaagtggcggtctgcggtcatagcccggcgcgggtgcgctggtcgggatcgatcaacgcacctgatggtggaattgatgtccacgtgcaggtgccggtcgaacagctcaactccgggtatattgagcgaccggataccgtcttccaggccaaaaaacataggatgcgcagggcagatattctgcgagagatggctccttctggcgtcctttctcccatgatatccggccaggccacaaaggggggaagctatatcattgtcagtctagatgaggactgttcccccactatgcttgccgaacgcgtcaaggcgatgtatgaggccgtcaggcatactccctctcacccaactcttcatctggctttctatgatcgcgcaaagttggctcagtggatacgacagcatccgtcagtaatgctgtgggtaaacagaatactggggcggggttattccggctggcaaccatatggagcatggagttgccctccagagggggcggaagataccctgataaccgcgtccggtatcacgatctcacctccgtcagaaaaaggtcatcccctgagtattaaggatgccatcgggccgatacgccagcttatccggaccactcgtaaagccgtacgtattactggtttatcgggcgtcggtaaaacgaggattgttcaggccttgtttgatgaatccgtaggagccgatgccctggaccacaccctggcggtttatgccgataccggtgacgatccgatcccttctgctgcagccatgctggaacgcctcatcgctgaccagcgcagcgcaattatggttcttgataactgcccgtctgaactgcatgctgccctcgcggcgagagttacctcggtggggagcaggatcaagctaattaccgttgagtatgatattcgggaggacaaacctcagaccacggaggtgatccacatcgaggcggttggaccggaagtggcggaaaaacttctgctgcggcgcttccccggtatcggacagttgaacgcccgtcgaatcgcccagttcgctgacggaaatgccagagtctcgctggccatcgctgagagagtggatgagggggagtcgttggccgttctgtccgatgcacaactcttcgacagactttttgaacaacgtcatgagcgagacgagggattacgggagcaggccgagatactttcgctggtatactcgttttcgagtgacttttctgaaacaggcgacagtgaactggagatccttggcacgctcgcgggctattcacataaccagctgtaccgtacgctcaagaagctgaccgatcgccacattcttcaggccaggtcgcactggcgagccatcttaccccatgctatagcgaacaaactggcagcctccgcgctggatagctttccggttgcgtttctcaggtctacctttgaagtgccgggacgggatcgcctccttatgtcatttgctcaccggctgggccttttacacgatcatccggtggcaaaggagattgcggctgcatggctccagccggaagctatgctgggtaacctgctggcattagaggacttgccggctcgtatgttggagtacattgcaccggtggtgcctgacgttctgcttaaccggattgacgaggtcctcagggccgcagactttaaaggccgggaaagacattacgatccccgctggagtaccatcctcaaccttttgcaggcactggcctgggaaccttcatacttcaaccgttgcgccagccttttactgcaaatagcggatcatgaaatagataagactcgtcaggagaatgcgcgggacagactcacattgttctgtcaaccctatctgtcaggtacacatgcctctctggagcagcgaattgcgcttctggaggagtgtcttacttcaggtttatcacagcgtcgcactctggggctgaaaatgctttctgccggacttagcggttcgacgtggacaagttcgggtatatatgagtttggtgcccgcccgagggattacggggcagaaccagactatgacgcgttgatggcgtggagatgctcgttcatcgagattgccgttcgtgtcgggaacgccgatgatatgcatcttgccaacggtgcgcggacatttctggcaaatgcactcagtggcctgtggcgtgataagaggatgggctccgtcctcgttgatgccgcacgtacattgcatgtccgtcttccctggggggagggctggaaggcgattcggacaaaactgtactttatgcggaaggagcctcaggtatcgtccgtgctgcttgaaactcttgatgctctggaaagggagctcagaccgaatgatttgctttccgctatccggctttatgtcctgagtaaaggccactataactggatgcttgatgacgaatttaaccgaagtgaccagaaacgatacactgaagcagaagagcgactgatggccagagcagagcaactggggcgtgagtttgccacttcaatactttgtctttctgacctgagacccaatctgttctcttctgaatggatgccttaccggagcgcattcgggaaggggctcgctgagggaaccgcgaatccccatgaagtctggcaattacttataaaagaactggaacagaactctactgaaaataaagatttttctgtgtttcaaggctttatcgaaggcgtggatcgtactaatgaagtgctagcccatgaatttctggatcactgcgctgtgcatccttcactctgtcgagttctggttaatttgcatccccagcgagattttacagaaaccgacctctatcgatgtatgtcggttctgaataaacctgatactcgtatagttatgtttgacgccattctttggcaaaaaaaatgcctgcatttgccactaacccgagtgctcgaactggcagaacgattgttagccatagaaaacggcgctgaggttattttgaatgggctagggatgaggttacatgacaacaaagcgacagaggacatgcctggcccggaactccgtcaaatcggtctcagggcagccattcaggttttacagaaagagactgatcggggcggtttcgttgatggctttatggcatctgtcgtagcggcggcattgcagtttgacagtcatgatgggctgacagaaaactggctggacgcagtcttctcagcgatcgataaacattatggttacatgaatgattaccttaaaaccattcagacaacggtgacactcataccagtaccgtttctctctcgtctctttgctgattctgaagctcaaatatgtatgcggttgttcttcatgcgtggcggcatttcggatactccgctgctttctggtgttggcatagaaatcgtgattgactggtgctacaggaatgagaatcccaaggtatgggcatatgtgccgcaggggttagaactctggtcaagtagtactgacacaagcaggactgctttgcgcgagaacgccatcaaattcctggaggctgcacctgaaccttcagtggttcttgagtcttttgctgaattaactagtccgtcaagttggagtggcagtcttgcaaacatattacagtcccggactgacgctttcggtgaactcattgcacacgagcgggatgacatttcaaaggctgcaaaaaagatacatgagagattgatacttatgattgagcgtcaaagaattcgagaacagcagaaagatcgtgaaagtgggcagcggtttgagtga

SEQ ID NO: 4296 - protein, 1279 aa, Serratia marcescens
MAIFDINKDELLGLSDTLLEELIARLAEAEVAVCGHSPARVRWSGSINAPDGGIDVHVQVPVEQLNSGYIERPDTVFQAKKHRMRRADILREMAPSGVLSPMISGQATKGGSYIIVSLDEDCSPTMLAERVKAMYEAVRHTPSHPTLHLAFYDRAKLAQWIRQHPSVMLWVNRILGRGYSGWQPYGAWSCPPEGAEDTLITASGITISPPSEKGHPLSIKDAIGPIRQLIRTTRKAVRITGLSGVGKTRIVQALFDESVGADALDHTLAVYADTGDDPIPSAAAMLERLIADQRSAIMVLDNCPSELHAALAARVTSVGSRIKLITVEYDIREDKPQTTEVIHIEAVGPEVAEKLLLRRFPGIGQLNARRIAQFADGNARVSLAIAERVDEGESLAVLSDAQLFDRLFEQRHERDEGLREQAEILSLVYSFSSDFSETGDSELEILGTLAGYSHNQLYRTLKKLTDRHILQARSHWRAILPHAIANKLAASALDSFPVAFLRSTFEVPGRDRLLMSFAHRLGLLHDHPVAKEIAAAWLQPEAMLGNLLALEDLPARMLEYIAPVVPDVLLNRIDEVLRAADFKGRERHYDPRWSTILNLLQALAWEPSYFNRCASLLLQIADHEIDKTRQENARDRLTLFCQPYLSGTHASLEQRIALLEECLTSGLSQRRTLGLKMLSAGLSGSTWTSSGIYEFGARPRDYGAEPDYDALMAWRCSFIEIAVRVGNADDMHLANGARTFLANALSGLWRDKRMGSVLVDAARTLHVRLPWGEGWKAIRTKLYFMRKEPQVSSVLLETLDALERELRPNDLLSAIRLYVLSKGHYNWMLDDEFNRSDQKRYTEAEERLMARAEQLGREFATSILCLSDLRPNLFSSEWMPYRSAFGKGLAEGTANPHEVWQLLIKELEQNSTENKDFSVFQGFIEGVDRTNEVLAHEFLDHCAVHPSLCRVLVNLHPQRDFTETDLYRCMSVLNKPDTRIVMFDAILWQKKCLHLPLTRVLELAERLLAIENGAEVILNGLGMRLHDNKATEDMPGPELRQIGLRAAIQVLQKETDRGGFVDGFMASVVAAALQFDSHDGLTENWLDAVFSAIDKHYGYMNDYLKTIQTTVTLIPVPFLSRLFADSEAQICMRLFFMRGGISDTPLLSGVGIEIVIDWCYRNENPKVWAYVPQGLELWSSSTDTSRTALRENAIKFLEAAPEPSVVLESFAELTSPSSWSGSLANILQSRTDAFGELIAHERDDISKAAKKIHERLILMIERQRIREQQKDRESGQRFE

SEQ ID NO: 4297 - DNA, 1506 bp, Serratia marcescens
atgacccagaaatggctaatactttacgtcatcatcttaatgtacctccctgtttctatcgatgcgacggtccttcatgtagcagcaccacgcctaggggttactctatcggcgactggagaacaattattgtggatcatcgatatctattctttagttatggctggcttattacttcctatgggcgcacttggtgatcgcattggttttaaaaggttagctattcttggttccagtgtcttcggcttggcctctcttcttgctgctttagcgttctcagttacaagtttggttgccgctcgagccttcctcgctgtaggggcggcgatgattcttcctgcaacactttcggcactacgacatacctttaccgaagaaaaagagaggaactttgcactaggtatttggagtgcagtcggcacagtaggtgcagcaatgggcccactcgtcggcgggtttttgatggaatatttctattggggttcggtttttttgattaatctaccaatagtattattagtattgattgtcacagtatttttaatgccaaatcaacctaaaaaaccagagaagacatggaaaatcagacaggcattggtgttaatttcagcaattttgttgctcgtttatgctgctaaaaatggaattcgtagcaattctataccttatgtaacattagtgattgcgtttattggagcaagtctactgtttctatttgtgcgatatcaactcatagttacgacacctatgattgattttagaattctaaatcaaagagaaatcgctgttgggattgtaatggcattggttgctatgattaccctagtaggttttgagctattgttaactcaagagttacaattagttcttggaaaaacaccgcttgaggctggattatttcttttgccgttgatgatcgctagtggtgtttctgggccaatagcaggcagattggtgacgatatttggtttacgcttagttgctagtcttgggatcttcctgagcgctattagtttcatgattttagcttacactgacttttcccaccagaccatattggcctggaccggtatggctctgctgggatttagtgtagaggcttccatgttagcttctactgcagccataatgacttctgtaccgaaggaaaaatctggagcggctggtgcactcgaaggtatggcctatgaattaggggctgggataggagttgcaatatttgggttgctactttcaggaacatatgtagctactatcgttttgcctgccgagttgcctatagatatgatcgttcaagcacgcgcgtcgattagtgagacagtccaggttgtacaaaaacttgataatgatgttggggtgcaacttttacatgcttcgagagttgctttctctagctcacacaacttagtactaggaatagctagtagtatattgctcgcattggcagtaattatttggttcattctgcctaagcgcctcagaagccaaataccccatgcatcttaa

SEQ ID NO: 4298 - protein, 501 aa, Serratia marcescens
MTQKWLILYVIILMYLPVSIDATVLHVAAPRLGVTLSATGEQLLWIIDIYSLVMAGLLLPMGALGDRIGFKRLAILGSSVFGLASLLAALAFSVTSLVAARAFLAVGAAMILPATLSALRHTFTEEKERNFALGIWSAVGTVGAAMGPLVGGFLMEYFYWGSVFLINLPIVLLVLIVTVFLMPNQPKKPEKTWKIRQALVLISAILLLVYAAKNGIRSNSIPYVTLVIAFIGASLLFLFVRYQLIVTTPMIDFRILNQREIAVGIVMALVAMITLVGFELLLTQELQLVLGKTPLEAGLFLLPLMIASGVSGPIAGRLVTIFGLRLVASLGIFLSAISFMILAYTDFSHQTILAWTGMALLGFSVEASMLASTAAIMTSVPKEKSGAAGALEGMAYELGAGIGVAIFGLLLSGTYVATIVLPAELPIDMIVQARASISETVQVVQKLDNDVGVQLLHASRVAFSSSHNLVLGIASSILLALAVIIWFILPKRLRSQIPHAS

SEQ ID NO: 4299 - DNA, 582 bp, Serratia marcescens
atgagttatctcaaacgtgaagagcgccatgctgccattctggaggctgccgtacgtgttacactagctgaaggtatcatggcttctacggtgagacgcatagctgctgaggccggaatggcaattggacaagtgcaccatcacttttcatctgtgaagcagttgcgtgctgaggccttcttgctattgactcgcaagtccttgtatgatttttatctaaaatgcaaagacttacctgccactgaacgtcttaaactggcgttgggttatccaatggatgaggatagtgtacgggaaacgcatttgtggaatgaaatgatgctgttggccgagcgagatacaattatgcatgaggcgtatgcaactgcgatttccgattggcatcacgctgtgacaaaagtaatagccgaaggtaaaactgcggggtcttttcgcgctggagcaaatgtagatgatatcgcctggcgcttgatagggttagtatgcggtttggacggtttgttatcatttaatcgaactagtatttctgaagcagagattatgcgtcatttgtcttctgctatagaactagagttgctctaa

SEQ ID NO: 4300 - protein, 193 aa, Serratia marcescens
MSYLKREERHAAILEAAVRVTLAEGIMASTVRRIAAEAGMAIGQVHHHFSSVKQLRAEAFLLLTRKSLYDFYLKCKDLPATERLKLALGYPMDEDSVRETHLWNEMMLLAERDTIMHEAYATAISDWHHAVTKVIAEGKTAGSFRAGANVDDIAWRLIGLVCGLDGLLSFNRTSISEAEIMRHLSSAIELELL

SEQ ID NO: 4301 - DNA, 486 bp, Serratia marcescens
atgcaaagacacgcgattgattcaggactaccgatacatcttacattcgtgctgaaaatcgggctgataatctcggccgtttactatacggccaaggcggcgtatttggtatggggcctgggcgatataggtgtggggttgatggcgtggctgacaataatcgccattttgctactgcgcgaaacggcgtttacttgcctgaagaattacgaagcgcaactggtgaagggagaagatccagtgtttcatccggagacgctggggattaagcgggcggactactgggtgggtaaccgtactgaggtgaaccgaatacgtgaagctacgggaagcattgatgagaaagtgggactatccggcaaacagcgcctgcaagatgcagccaaatttcaaaatttgactgcgtatacaaactggctacggccgttttttacgtctatggttctgactcagcaccaaaaggtaaagggaagtgtagagcgttag

SEQ ID NO: 4302 - protein, 161 aa, Serratia marcescens
MQRHAIDSGLPIHLTFVLKIGLIISAVYYTAKAAYLVWGLGDIGVGLMAWLTIIAILLLRETAFTCLKNYEAQLVKGEDPVFHPETLGIKRADYWVGNRTEVNRIREATGSIDEKVGLSGKQRLQDAAKFQNLTAYTNWLRPFFTSMVLTQHQKVKGSVER

SEQ ID NO: 4303 - DNA, 1035 bp, Serratia marcescens
atgttaaaaaaaatcatttttgagagtaagtgtgtctatttaaaaacatcattgttttttcttcttactatgtgggtccagttagttaatagtgcttcatctgactatgtctcagaatacaatggtacttacttaaagtttcttgcatcagagggagataatgatctgccccgattgaagatgacaattttcaataaacagttaccctctatagttgttgatacaggctccactggtattgttatatccgccaatgcaataccgtcattgaatgacttaccttcaaagcctggtaaaatcatatataatagctctggccgtatcatgctgggagtatgggttgaaactcctgttattattagcggagataatggagtgagcatatccacaaaatcgcttcccatacttgctgttagtgaaatagcatgtcttgaaaatgcaagggattgcactcctcaaaaaaaaccaagagatgtatatatgatgggagtaggatttgcacgggaaaacagcatgcaaaaacaaagtacgcctgatacaaatccatttcttaatacaagagaaaataattatcataaaggatatattatgacccgtcatggggtataccttggcattacagataaggatgtaagtagaaatttctcaatagttaacctaattccatcgaaagatatagttggtgaatggaaagccccatctgcttgtataaaagtttcaacgaatatatcagagttttgtggtagtgcgcttgttgataccggtgttaaagacatgtttctaactcttccaggatattttagtgacagcggggagcaactttccccaggagatgaaataacaattaaattaagctcggaaatacaatacactgttgtttatgatggtgaaaaaaatgctacatctccggcgaggatatttcttaatacaaagcgagctactccatttgtaaatactggtgtgaactttttaaatgactttgacatactttatgatgcggacgctggactatttgggtatcgttatatcaaatag

SEQ ID NO: 4304 - protein, 344 aa, Serratia marcescens
MLKKIIFESKCVYLKTSLFFLLTMWVQLVNSASSDYVSEYNGTYLKFLASEGDNDLPRLKMTIFNKQLPSIVVDTGSTGIVISANAIPSLNDLPSKPGKIIYNSSGRIMLGVWVETPVIISGDNGVSISTKSLPILAVSEIACLENARDCTPQKKPRDVYMMGVGFARENSMQKQSTPDTNPFLNTRENNYHKGYIMTRHGVYLGITDKDVSRNFSIVNLIPSKDIVGEWKAPSACIKVSTNISEFCGSALVDTGVKDMFLTLPGYFSDSGEQLSPGDEITIKLSSEIQYTVVYDGEKNATSPARIFLNTKRATPFVNTGVNFLNDFDILYDADAGLFGYRYIK

SEQ ID NO: 4305 - DNA, 885 bp, Serratia marcescens
atgtcaaacaaagtaaattttaaaacggcttcatttttgtttagtgtttgtttagctttgtcggcatttaatgctcatgctaacaaaagtgatgctgcggcaaaacaaataaaaaaattagaggaagactttgatgggaggattggcgtctttgcaatagatacaggatcgggtaatacatttgggtatagatcagatgagcggttccctttatgcagttcatttaaaggttttttggcggctgctgttttagagagagtgcaacaaaaaaaactagatatcaaccaaaaggttaaatatgagagtagggatctagaatatcattcacctattacaacaaaatataaaggctcaggtatgacattaggtgatatggcttctgctgcattgcaatatagcgacaatggggcaacaaatataattatggaacgatttcttggcggtcctgaggggatgactaaatttatgcgttctattggagataatgagtttaggttagatcgctgggaactggaacttaacactgcaatcccaggagataaacgtgacacttcaacgccaaaagctgttgcaaatagtttgaataaactagctttggggaatgttctcaatgctaaagagaaagcgatttatcaaaattggttaaaaggtaatacaactggtgatgctcgaattcgtgctagtgttcctgctgattgggttgtaggtgacaaaactgggagctgtggggcatatggtactgcgaatgattatgccgtcatttggcctaaaaatagagcaccattaattgtctctatatatacaacacgaaaatcgaaagatgataagcacagtgataaaactattgcggaagcatcacgtattgcaattcaggcaattgattaa

SEQ ID NO: 4306 - protein, 294 aa, Serratia marcescens
MSNKVNFKTASFLFSVCLALSAFNAHANKSDAAAKQIKKLEEDFDGRIGVFAIDTGSGNTFGYRSDERFPLCSSFKGFLAAAVLERVQQKKLDINQKVKYESRDLEYHSPITTKYKGSGMTLGDMASAALQYSDNGATNIIMERFLGGPEGMTKFMRSIGDNEFRLDRWELELNTAIPGDKRDTSTPKAVANSLNKLALGNVLNAKEKAIYQNWLKGNTTGDARIRASVPADWVVGDKTGSCGAYGTANDYAVIWPKNRAPLIVSIYTTRKSKDDKHSDKTIAEASRIAIQAID

SEQ ID NO: 4307 - DNA, 570 bp, Serratia marcescens
atgagaaaagaacacgaacgttctttacctgatgatagaaaagaaccgattatcgagcggatctttgctctggtagagcgctacccttcacggaatgaagccgcaaaagcttggggtattaatatcaatacgttacagaactactataagagacgggaattagcacctacacctaggcatcaactacttgaagtgattgccaatcatgagggtgtatcactcgaatggcttactgatggtattggtgaggctccggtgaacacaaagaatgaacacaaaaaagaacacacctcaaccgaggtcgttgatcctgatgcaagacttgccactttgttttcgattctgtcagatcgcgaaaagcaatccctgtttgaaatcattgttcgcaaaggggttgatacagtgttacgtcttagtgatgaacggaacatcaagttgcttcaatgcaatgatatggaaaaggaaaaattcttggctggacttgaagggaatatcaaaaaagaggcacttacacatagtcaggacgtagtagcatcgagcctttcaaacactggtaagaaggccggttaa

SEQ ID NO: 4308 - protein, 189 aa, Serratia marcescens
MRKEHERSLPDDRKEPIIERIFALVERYPSRNEAAKAWGININTLQNYYKRRELAPTPRHQLLEVIANHEGVSLEWLTDGIGEAPVNTKNEHKKEHTSTEVVDPDARLATLFSILSDREKQSLFEIIVRKGVDTVLRLSDERNIKLLQCNDMEKEKFLAGLEGNIKKEALTHSQDVVASSLSNTGKKAG

SEQ ID NO: 4309 - DNA, 855 bp, Serratia plymuthica
atgaaagagctaataacgatatatgaggcggcagaaagcagcggcctgtcaattaatgatatatttaatagtgctattactggtgaagtaaatatacttactagattagaatctaaccaatattcaatttttgatgtggagttttctggaaatatagaagaattagatgcatggttagacagttcatacattgacaatgttcattgtttaactaaatcatcggggttcactgaattaaaaaaaagcccaagtgattggtgggatgatgggccaataataacttctgaaaattgtgataagcgttctttgaaagaacgagtaaaaccaaatggacagaatgttatctatgttaatgctagtatttctggagtgtggagactgacggaatcatatattaaaaaatgtggtactctgggatacaaccctcgagcgaacttcactcaccttcaaccatatggtgaacttaataatttaaattttttgcgtttatattctaacgattttgaaggttgttgcaaaattgatgaactatatcttactgaaagtgatttcaatatcattattgaaggcgcgttagatgggaaaagattaataaataaaaagaaatacagttacagatctcaaaaatcagctcaaattgagcgacatgcggctaacagagagcgcgtgttgttggcagctatttcattatataagcgcttcccggatgaatgcagtaaaaatccctctcgctggggatcgctgctatgggataagcggtttgagtactggagtgaagtaggtggggcaccactgtcaaaagatgaaattatcaggttacttagaaaagcagtgaagcctcctcttataaaataa

SEQ ID NO: 4310 - protein, 284 aa, Serratia plymuthica
MKELITIYEAAESSGLSINDIFNSAITGEVNILTRLESNQYSIFDVEFSGNIEELDAWLDSSYIDNVHCLTKSSGFTELKKSPSDWWDDGPIITSENCDKRSLKERVKPNGQNVIYVNASISGVWRLTESYIKKCGTLGYNPRANFTHLQPYGELNNLNFLRLYSNDFEGCCKIDELYLTESDFNIIIEGALDGKRLINKKKYSYRSQKSAQIERHAANRERVLLAAISLYKRFPDECSKNPSRWGSLLWDKRFEYWSEVGGAPLSKDEIIRLLRKAVKPPLIK

SEQ ID NO: 4311 - DNA, 255 bp, Serratia marcescens
atggccgacatttcgctcgttaagataattgaggacttgaacgaaagggtttccaaactcagctcggaaaacctggcattccagcaggcgcttacagccattgttgctgctatgcctgtagagcaagcctctttagcgaaaagacatcttgaagaggttattgagtatgttgagaagggcggttcagctggcgctcttgaagcgctagaagctcagaaaccgatctatcaaatgattttccttcacgcgaaatag

SEQ ID NO: 4312 - protein, 84 aa, Serratia marcescens
MADISLVKIIEDLNERVSKLSSENLAFQQALTAIVAAMPVEQASLAKRHLEEVIEYVEKGGSAGALEALEAQKPIYQMIFLHAK

SEQ ID NO: 4313 - DNA, 189 bp, Serratia marcescens
atgacattcaaatacaaaaacttggcccaccaggcggccgaggcggaacgtcacgcccatttttcagatgcggctgaactgtggcgccaagcgcttgatacggcgcgggcggtagatattgtgtggattaaaatccgcatagagttttgcgtcaacgcggccgcgcgctgctggggtaacgctcaatga

SEQ ID NO: 4314 - protein, 62 aa, Serratia marcescens
MTFKYKNLAHQAAEAERHAHFSDAAELWRQALDTARAVDIVWIKIRIEFCVNAAARCWGNAQ

SEQ ID NO: 4315 - DNA, 1266 bp, Serratia marcescens
atgcagcttggtgtcattgccgatgacttcaccggcgccacggatattgccagcttcctcgtgcgcaacggcatgccgacggtgcaactgaatggcgtgccgacccgcgatcttccgctgaccagcgaggcggtggtcatcagcctgaaaactcgctcctgcccggcggaaatggccgtcagccagtcgctggcggccctgcgctggctgcaggcccagggctgtcagcagttttatttcaagtactgttccactttcgacagcaccgcgcagggcaacattggcccggtgctggatgccctgctggccgagctgggtgagacgcggacggtgatttccccggcgctgccggttaacggccgcacggtctatcagggatatctgttcgtcggcgagcaactgctgaatgagtccgggatgcgccaccatccggtgacgccgatggaggatgcgcacctgggccgcttaattgagcgccaggggcgcggaaaagccgcgctgattgcctggccgattgtcgcccgggggccggaggcggtcgccgccgcgctggcggcagtcaacgatccggcggtgcgctatgtggtgctcgacgccctcagcgaacaggatctgctcacccagggcgtggcgctgcgggagatgaagctggtctccggcggttccggcctcgccatcggcctcgcccgcgacttggcgcagcgccatggcgcccggggtgaaagcgctcaggccggcatgccgctggtcggcccggcggtggtgctctcgggctcctgctcggtgatgaccaacagccaggtggcggcctatcgtcaacaggcccccgcccgcgccgtcgacttaagcgcctgctttaccgatctggagagctacgtcaggacgctgactgactgggtggacgcgcagcgcgatgcgccgctggcgccgatgatctatgccaccaccgagccgcaaacgctgcagcggatccaggcgcagtatggcgacaaggccagcagcgaacgggtggaacagctgtttgccgctcttgccgccgccctgaaggcgaaaggatttacccgctttattgtggccggaggggaaacgtcgagcattgtggcgcagaccctgggggttgaggcgttccatattgggccgaccatctcccctggcgtgccctgggtgcgtgacacccgccagccgctctccctggcgctgaagtcaggtaacttcggcgatatccagttctttgcccgtgcccagcaggagtttcgtcatgactga

SEQ ID NO: 4316 - protein, 421 aa, Serratia marcescens
MQLGVIADDFTGATDIASFLVRNGMPTVQLNGVPTRDLPLTSEAVVISLKTRSCPAEMAVSQSLAALRWLQAQGCQQFYFKYCSTFDSTAQGNIGPVLDALLAELGETRTVISPALPVNGRTVYQGYLFVGEQLLNESGMRHHPVTPMEDAHLGRLIERQGRGKAALIAWPIVARGPEAVAAALAAVNDPAVRYVVLDALSEQDLLTQGVALREMKLVSGGSGLAIGLARDLAQRHGARGESAQAGMPLVGPAVVLSGSCSVMTNSQVAAYRQQAPARAVDLSACFTDLESYVRTLTDWVDAQRDAPLAPMIYATTEPQTLQRIQAQYGDKASSERVEQLFAALAAALKAKGFTRFIVAGGETSSIVAQTLGVEAFHIGPTISPGVPWVRDTRQPLSLALKSGNFGDIQFFARAQQEFRHD

SEQ ID NO: 4317 - DNA, 729 bp, Serratia marcescens
atgaaagagcgtccagtgattttcaacggcgagatggttcgcgccattctcgacggccgcaagacacagacgcggcgtgttatgaaagataagccagagccatcaaaaacacgggcaggagacttttggtttccgtctaaaaaattagaaagcatggttcatgtttcggacttcacgcctggcaattcacctattgccgattgccaccttttctttcaagagcattgttgcccattcggccaggtaggcgatcggctgtgggtgcgcgagacgtttcaaggcccactaattcccgaggatgagttgagtgagtatctcggtgctaatccagataagttccaatctcctgcgtactgtgaatatgcggctgatggcggcgcgaagcctgagtatgtcgattctgatgagaatactcgttatggctggcgcccatcaatccacatgccgcgctgggccagcagaatcacgctggaaatcaccgccgtgcgtgttgagcgcctgaacgatatcagcgaagaggacgccaaggctgaaggcgtaaagccagctggcgacatactgccggattacccagacacattcctgacgccaaagggcgactttgctacagctaaagttgcattccagcgcctctggcaatccatctacggcgaagaaagctggagcgccaatccctgggtgtgggttatcgagttcaagcaggtcagcgaggagtcccagcatggctaa

SEQ ID NO: 4318 - protein, 242 aa, Serratia marcescens
MKERPVIFNGEMVRAILDGRKTQTRRVMKDKPEPSKTRAGDFWFPSKKLESMVHVSDFTPGNSPIADCHLFFQEHCCPFGQVGDRLWVRETFQGPLIPEDELSEYLGANPDKFQSPAYCEYAADGGAKPEYVDSDENTRYGWRPSIHMPRWASRITLEITAVRVERLNDISEEDAKAEGVKPAGDILPDYPDTFLTPKGDFATAKVAFQRLWQSIYGEESWSANPWVWVIEFKQVSEESQHG

SEQ ID NO: 4319 - DNA, 621 bp, Serratia marcescens
atgacaaaaaaaaacaatcaagagtttacccatctagatttcgaaaatcacatccatctgcctcatggctacttaaggatacctatacctgatgaaaagtataagtgcttacccggtgtttatgaccgtgtatgtagcgtaatttatttcgcatcaagaatcggaggtaaatctgatagatttggcatttccaacaatgccttcagcacagcaatgtttcgggcgtcacttagcgaattcatcgctcttgacgattatataatacaaaaccatagtaaaagactgtggcttaatgagcataagaatactgacccagtctttcatatgcttaaattgctcaggaattataatgttcatattaacaataacaaaattgactcatgccaatttcaagttacaactcttattgaaccagacaaaacacatacaatcagtaaatattacatatctaacttaagcatcgtcgaactaaaaaaactaaatggcgcatcacgttaccattcctctttaagtaaaatgatagatatatttgaaactgagcaacacgaatatggaattggtcaactaataatgcactgcactcttattaatatgaaaaacctcgataccctactaacttaa

SEQ ID NO: 4320 - protein, 206 aa, Serratia marcescens
MTKKNNQEFTHLDFENHIHLPHGYLRIPIPDEKYKCLPGVYDRVCSVIYFASRIGGKSDRFGISNNAFSTAMFRASLSEFIALDDYIIQNHSKRLWLNEHKNTDPVFHMLKLLRNYNVHINNNKIDSCQFQVTTLIEPDKTHTISKYYISNLSIVELKKLNGASRYHSSLSKMIDIFETEQHEYGIGQLIMHCTLINMKNLDTLLT

SEQ ID NO: 4321 - DNA, 903 bp, Serratia marcescens
atgcgcgaaatgcctgaaaaggcattccatacctgcgtaacaagcccgccatattacgcgctgagagactacggcgttgaaggccagatcggcctggagccgacgccggcggagtttatccaacgattggttgaagtcttccgtgcagtgcgtcgcgtactccgtgatgacggaacgatctgggtaaatatcggcgacagttacgcggcgagatttagtggcaataacggatattcagacggaagaaccaatcggcaagagcggcgcgcggcaggagtgccagcaggggttaagccgaaagatatgctcggcatgccgtggcgtctcgccttcgccctacaggacgatggttggtatctgcgccaagacatcgtttggcacaagactaacccgatgccggagagcgtacgtgatcgctgcacaaaggctcacgagtacgttttcttgctgagtaagaggccaaagtattacttcgaccatgaagccatcaaggagccggtaacggggaactcgcatccgcgcgggaaaggtgtcacgcctaaaagccaagccaacgcattcggaaatcgcaacaacgcatcgttctcggcggccgtctctggattggtagagctccgtaatcgtcggacggtgtggtcagtgccaacgcgaccattcaaaggcgcccattttgcaacattcccgccgtcgctgattgagccgtgcattttggcaggatgcccggccggtggcgctgttatagacccgttcggcggtagtggcactactgcgggcgttgctgcggcatacgggcgtaaggcggtgctgtgcgagctgaatcctgaatatgcggctttggtgccgggcagggttagcgacatagcgaattcaatcaccgaaaaacgaaataccaggaacagctaa

SEQ ID NO: 4322 - protein, 300 aa, Serratia marcescens
MREMPEKAFHTCVTSPPYYALRDYGVEGQIGLEPTPAEFIQRLVEVFRAVRRVLRDDGTIWVNIGDSYAARFSGNNGYSDGRTNRQERRAAGVPAGVKPKDMLGMPWRLAFALQDDGWYLRQDIVWHKTNPMPESVRDRCTKAHEYVFLLSKRPKYYFDHEAIKEPVTGNSHPRGKGVTPKSQANAFGNRNNASFSAAVSGLVELRNRRTVWSVPTRPFKGAHFATFPPSLIEPCILAGCPAGGAVIDPFGGSGTTAGVAAAYGRKAVLCELNPEYAALVPGRVSDIANSITEKRNTRNS

SEQ ID NO: 4323 - DNA, 384 bp, Serratia marcescens
atgctggcgcttcgcttcccgccaggtttttcctacgatcctgtcatgggtttcgactatggcatcagcaatcgccgcttcccactccacaacacagacggcaaggatcgcccagcggcggtccgaagtgatgtcacgcaaaccgtcggtgaagtagcgttcaccctgccgacgcagccgggcaatgcgatgggcaggtatgctggccaaagcactatgattgatattcagggtacgcagaaattcgagcctgtcgagcaaacggttagcagcagccgagttgttaccaacctcgaagttgcgaagccagatgaaacgactgatattgccggcgagcatttcactcagaagtttgtccaggtgatcgcgaacatccgctgttaa

SEQ ID NO: 4324 - protein, 127 aa, Serratia marcescens
MLALRFPPGFSYDPVMGFDYGISNRRFPLHNTDGKDRPAAVRSDVTQTVGEVAFTLPTQPGNAMGRYAGQSTMIDIQGTQKFEPVEQTVSSSRVVTNLEVAKPDETTDIAGEHFTQKFVQVIANIRC

SEQ ID NO: 4325 - DNA, 330 bp, Klebsiella pneumoniae
atgtacaaacaagacattgagaaggggattgagctgctcaagctgtgcagcaaactccagtcagaaaaagatggagtggatagaccagagcctctggttatcgacaagagtaaggtgctggaccagttcgcccgagacgtttccacatcgatcacctacatgagttcgttgttcaagctcatccccatgatggaaaaccttaccgagcttggccgaaagctggagaaagaaggaaagatcgaagtttctctcgggcaagactattccattgccgcgcttaactttgttatgtcggaacacggcatgacacccgaaacaactcaggagtga

SEQ ID NO: 4326 - protein, 109 aa, Klebsiella pneumoniae
MYKQDIEKGIELLKLCSKLQSEKDGVDRPEPLVIDKSKVLDQFARDVSTSITYMSSLFKLIPMMENLTELGRKLEKEGKIEVSLGQDYSIAALNFVMSEHGMTPETTQE

SEQ ID NO: 4327 - DNA, 288 bp, Serratia marcescens
atgacagcatctgtagcggccactgaattggcgaaactggggaaatgtgaagcgatgatcaagaaagtcgccagccatcctcgccctgccctgtcaaagcgcccacaatcgccacaggggacagatagcacccttcggggtgagttcgctcatttccgatatgaagcggcagccctgcgttttatgagcggcactgcgggggctaagcgtcgcatctaccagctagtgttttcagcgacggtagcagcgggagcattgacaatgctggcggcatggaccaccagctag

SEQ ID NO: 4328 - protein, 95 aa, Serratia marcescens
MTASVAATELAKLGKCEAMIKKVASHPRPALSKRPQSPQGTDSTLRGEFAHFRYEAAALRFMSGTAGAKRRIYQLVFSATVAAGALTMLAAWTTS

SEQ ID NO: 4329 - DNA, 789 bp, Serratia marcescens
atgggaatgccattgcgtgaatattaccctgtggctcgcgcagctgagttacttggttgtaaaatagaagatttattccattgggcttctgttgggggtattaatatatacctgtcgattgagttaggcatgggatacatgcacttctgtaatgaaaatgatgagttagaagaacaatttgaagaaaaagcattagctcgtgatggattttcaactgtaagtgctatttatattttggaggacgatgctgctaaagctttcttccagaaagagccacctttcgaagggttcaagccatgcacatttaatgggttgtgggctttgcctcgttcagcgtattgttatgatgatttaatggaatttaaacccagtttttttgatttatggctgtcgtcaaatagtttgatgtttatagcttttgaagatgatagctacttaaatcctcttgaaagtgatctttatttaatgaagtctgattttttattaatttcaaaaataataaatggtgttgaaattacaaattcttttaaggaaatcccaaactactttaatgaaggtagggaacgtctaaatttagattctaacaaaagcgataattcaatttctcaagttagaaactcaagaaccgctagggacgcaataaaaataatggcaaaaaaacattatccggaaattgctgggaattataaaaagcttgcagaggtgttgagtgcggaggctaacgagattgaagggatggcggggattaggtttgatgattctacagtaggccgctggatgaaagactag

SEQ ID NO: 4330 - protein, 262 aa, Serratia marcescens
MGMPLREYYPVARAAELLGCKIEDLFHWASVGGINIYLSIELGMGYMHFCNENDELEEQFEEKALARDGFSTVSAIYILEDDAAKAFFQKEPPFEGFKPCTFNGLWALPRSAYCYDDLMEFKPSFFDLWLSSNSLMFIAFEDDSYLNPLESDLYLMKSDFLLISKIINGVEITNSFKEIPNYFNEGRERLNLDSNKSDNSISQVRNSRTARDAIKIMAKKHYPEIAGNYKKLAEVLSAEANEIEGMAGIRFDDSTVGRWMKD

SEQ ID NO: 4331 - DNA, 201 bp, Serratia marcescens
atggcgcatgaaatcacgttatccaaagcaagtcgccaggcggaccagctcagtgccttgctgacagcaatgagcaccgcggtcagtgagctcgaagtaactgacatgagcactttaatcacattggcgctggatttagccggcggaccagcgtgttggttattggaagaacaataccaacgggaggctaatcatgcgtaa

SEQ ID NO: 4332 - protein, 66 aa, Serratia marcescens
MAHEITLSKASRQADQLSALLTAMSTAVSELEVTDMSTLITLALDLAGGPACWLLEEQYQREANHA

SEQ ID NO: 4333 - DNA, 1023 bp, Serratia marcescens
atgggaagagatataactttatatcctaagaaggcaaccagagatgagcttaaaaattatcttgaaaacttgggatttaagaagtgtaaacatctttgggaatggccaaaaggaactttgaattactattggtttgaccatacagacttcaaatcaattgatggagtttcagctgatatatatcctgtttcagatgaaaaatcacacacatatagtaataaatgggcattacatgtgcgtaatttatatagcgccagctggtatgatgtaaaaatgcttaacgatgttctaaaaggcgcaagaagtctttttggcggaactattgaaggtgattacgggaaaaatagatacgctactctatgggaggattctagcacgccgatcagtagggggatatcttcaatatacaatcatgttcgccaagaaattttttgcgttaaacatgccttaccagaacctacaattaaattaaccccaccggaagatggcgaatcatcagaattttttgaactcatgcaaagcatggatccgagtagagtcatatataatggattagtgccttttgcggttgcaatgtttgaatacttcttctcccaagcttttcaggtgctaataaaatatgacccttttgcaataaaaaagagagtatcgcataggcaaaaaattgatttcgacgttttacttgaaatagaaaaaggaagcatatcaatagaaaatgtcattgctagaaatttcactttccaaaacttagaccaacttaacaaagcttataaagaatggctagatatagatgtgagagcaattcttttcaagaaaaaacgaatcggaaagtcaattagtttccttgagaatcgaatctctgaaatcatacaatacaggcatgggatagttcatcactttgaattagacagaactttgaacagggatggatatattcatatattagaagcaattgaaaaaagtataattgaatttattcatttcatggaaggtaaatacaaatttaaattagatgattattaa

SEQ ID NO: 4334 - protein, 340 aa, Serratia marcescens
MGRDITLYPKKATRDELKNYLENLGFKKCKHLWEWPKGTLNYYWFDHTDFKSIDGVSADIYPVSDEKSHTYSNKWALHVRNLYSASWYDVKMLNDVLKGARSLFGGTIEGDYGKNRYATLWEDSSTPISRGISSIYNHVRQEIFCVKHALPEPTIKLTPPEDGESSEFFELMQSMDPSRVIYNGLVPFAVAMFEYFFSQAFQVLIKYDPFAIKKRVSHRQKIDFDVLLEIEKGSISIENVIARNFTFQNLDQLNKAYKEWLDIDVRAILFKKKRIGKSISFLENRISEIIQYRHGIVHHFELDRTLNRDGYIHILEAIEKSIIEFIHFMEGKYKFKLDDY

SEQ ID NO: 4335 - DNA, 258 bp, Serratia marcescens
atgaaaaaagtaatagtcatcaccgataaaaaacagattgaggaatggactgtagaggaatggctcacagacttgtccatgccgaaatcagttaattcatgggagtggaaaccggattcagaaccaaaacttgagacaatctatcacgcccctattgaaacgatctccatcgacggcaaaagctacctaatcgcagttttccccggcgcagctgatgagcatgaaacaatcaatatcattcgcagtcattattactaa

SEQ ID NO: 4336 - protein, 85 aa, Serratia marcescens
MKKVIVITDKKQIEEWTVEEWLTDLSMPKSVNSWEWKPDSEPKLETIYHAPIETISIDGKSYLIAVFPGAADEHETINIIRSHYY

SEQ ID NO: 4337 - DNA, 405 bp, Serratia rubidaea
atgaaaagaaccatcgcagtagtaacgttttgcgcgttactggcgggttgtcagcaggctggcaaccgttccgtcgccaaggcggagcaggcgcaagccacggaaacatcctccatgttatcaacccggccggcagtgaatgtgggcaacgacgccgccctgtatacctgcatgaaagaactgaatgcgttgcagcaggtttcgccggcggcctatcagagcaaaaacgccgaattaaatcagattctgacgcaggccaaactctatacgcaggtgcgcgccaatctgagccgtgagatcaacggcattctggactccggctatcaataccgcatcggcaaagcctgcaatgacattcgtacggcgttaactcaggcgctagttgagcgggtggaaaacatctga

SEQ ID NO: 4338 - protein, 134 aa, Serratia rubidaea
MKRTIAVVTFCALLAGCQQAGNRSVAKAEQAQATETSSMLSTRPAVNVGNDAALYTCMKELNALQQVSPAAYQSKNAELNQILTQAKLYTQVRANLSREINGILDSGYQYRIGKACNDIRTALTQALVERVENI

SEQ ID NO: 4339 - DNA, 1188 bp, Serratia fonticola
atgaacgaagtcgccgcttcccgccgcacagcctggctgcgcgttgtcgtgcttgccgtttccgcctttatctttaataccaccgagtttattccggttggtttactgagcgatatagcacaaagttttgccatgcagaccgagcaggtggggctgatcattacgatttacgcctggattgtcgccgccgcctcgctggtgtgcatgctgctgaccagcaaaatcgaacggcgtaaattgctgattggcgtatttatcctgtttatcgccagccatgtgctgacggcggttgcctggaacttcaccacgctggtgatttcccgcgccggcgtggcgctggcgcactcggtgttctggtcgattaccgcttcgctggcgatccgcgtggcgccggcgggcaaaaaagcgcaggcgctgagcatgctggcgggcggcaccgcgctggcgatggtgctcggcctgccgctggggcgcgtcgtcgggcagctgctgggctggcggatgacctttatcggcatcgcggtggcggcgacgctggcgctgctgatgctgtggcggctgctgccggtgctgaagagcgagcactccggctcgctggccagcgtaccggtactgttcaagcgcccggcgctggtcagcctgtatatgctgaccatcattgtggtgacggcgcactttaccgcttacagctatatcgagccgtttatccagcgggtggccggcctgagcgataacttcaccacgctgatgctgctgctgttcggcgcgaccggcattatcggcagcctgctgttcagccgctacagcgaacgcttcccgtccgggctgtttatcagcgcgatcggtctgctggccgtctgcctgctgctgctgctgccggccgccgacagtgagctgcacctgacgctgctgtgcgcgttctgggggatggcgattatggctatcggcctgtcgatgcaggcgaaggtgctgagcctggcgccggacgccaccgacgttgcgatgtcgatttactccggtttgtataacctgggcatcggcggcggggcgctgctgggcaaccaggtcagcctgcaccttggcatgccgagcatcggcctggtgggcgcgccgctggcgctgattgcgctggggtggtgcgtactgaacttctaccgcagcgagcgcctgcagcatcatcgcgcctga

SEQ ID NO: 4340 - protein, 395 aa, Serratia fonticola
MNEVAASRRTAWLRVVVLAVSAFIFNTTEFIPVGLLSDIAQSFAMQTEQVGLIITIYAWIVAAASLVCMLLTSKIERRKLLIGVFILFIASHVLTAVAWNFTTLVISRAGVALAHSVFWSITASLAIRVAPAGKKAQALSMLAGGTALAMVLGLPLGRVVGQLLGWRMTFIGIAVAATLALLMLWRLLPVLKSEHSGSLASVPVLFKRPALVSLYMLTIIVVTAHFTAYSYIEPFIQRVAGLSDNFTTLMLLLFGATGIIGSLLFSRYSERFPSGLFISAIGLLAVCLLLLLPAADSELHLTLLCAFWGMAIMAIGLSMQAKVLSLAPDATDVAMSIYSGLYNLGIGGGALLGNQVSLHLGMPSIGLVGAPLALIALGWCVLNFYRSERLQHHRA

SEQ ID NO: 4341 - DNA, 1050 bp, Serratia marcescens
atgaaacaccttgcccagtattcacgccgcagatttctcagtttgggaggcagcctgctggcagcccccgcgttggccgccctatcgccgacgctgttcgcccatgatatgaccgccatgcatcaggagggcggcaacgcactgcgcctgcccgcgccttataagttgaaactcgccatcaaccagagcgcggtatgtattgctcccgtcaccgtggcggagcagcagcacttcttcagcaagtacaatttggacgttgaatttgtcaacttcggcaactcgaccgatctgctgttggaagcgatcgccaccggcaaagccgacgccggcatcggcatggcgctgcgctggctgaaggcgctggagcaaggttttgacgtcaagctcaccgccggcacccacggcggctgcctgaatctgctgaccgccaaaaatgcgccctttaccagcctggacaagctgaaaggacaaaccatcggcgtgaccgatatggccggcccggacaaaaacttttttgccatcctgctcaaacgccacggcgtagacccgatcgccgacgtgcagtggaaggtttatcccgccgatttattgagcgtcgcgttggataagcaggaaattgccgccatcagcggcagcgaaccctttagctaccgcttattggcgagcggcaaataccaactgctggcaagcaatatgaccggggaatatgccaatctcagctgctgcgtggttggcgtcagcggatcgctggcgcgtaaacacaaggccgcagcggcggcgttaacccaggcgctgctggatgcccacagctacgcggcagagcacccggaaagcgttgccgacgcctttatggcccacgcgttaaacaccaatgtcaaagaagtggccggcattatccatggccaggcccacgggcatcacgccgtgggggaagccttcgtcaaagagctgacccaatacgtcagcgatttacagcgggtacaggtgattaaacccggtaccgatgcccaccaatttgcggagagcatctatgccaacgtatttgcttga

SEQ ID NO: 4342 - protein, 349 aa, Serratia marcescens
MKHLAQYSRRRFLSLGGSLLAAPALAALSPTLFAHDMTAMHQEGGNALRLPAPYKLKLAINQSAVCIAPVTVAEQQHFFSKYNLDVEFVNFGNSTDLLLEAIATGKADAGIGMALRWLKALEQGFDVKLTAGTHGGCLNLLTAKNAPFTSLDKLKGQTIGVTDMAGPDKNFFAILLKRHGVDPIADVQWKVYPADLLSVALDKQEIAAISGSEPFSYRLLASGKYQLLASNMTGEYANLSCCVVGVSGSLARKHKAAAAALTQALLDAHSYAAEHPESVADAFMAHALNTNVKEVAGIIHGQAHGHHAVGEAFVKELTQYVSDLQRVQVIKPGTDAHQFAESIYANVFA

SEQ ID NO: 4343 - DNA, 435 bp, Serratia rubidaea
atgaaaaaactttcttccttgttattagtttgtgttgcgatggttttttcctccaatgcaacggcgggacgtcagggatgtgaaatcaagaaaagtaaaatcaaaacgcagatggaatatgccaaacgctacggcaaccataaccgtctggcggggctggagcgggcgctggcccgggttgaggcggcgtgttctgatggttacagcggcgccagctatcgccttgacggctatagcggggcgagtcatcgtcttgatggctacagcggtgccagtcatcgtctggataaaattcagggtaaggaagataaagtcagacggcgcgaaatcgagcttgatcgggcgattgccagcggcgatatggaaaaggtccgtaacaaggcccataagctgaatgaagccaagcaggaactggcggaagcgcggcgctggtaa

SEQ ID NO: 4344 - protein, 144 aa, Serratia rubidaea
MKKLSSLLLVCVAMVFSSNATAGRQGCEIKKSKIKTQMEYAKRYGNHNRLAGLERALARVEAACSDGYSGASYRLDGYSGASHRLDGYSGASHRLDKIQGKEDKVRRREIELDRAIASGDMEKVRNKAHKLNEAKQELAEARRW

SEQ ID NO: 4345 - DNA, 1617 bp, Serratia fonticola
atgcctgattcattaagtgccgacgtggtggtcatcggcgccggtattgccggctcgctggcggcattaaagatggcgcaggccggcgcctcggtgctgatgctggagtccggcccggagattaaacgtgacaacgcggtggagctgttccgcaactcgccgttcaagggcgactttaccgagccgtttccgccgcagccctgggcgccgcagcccaaattcgtgccgagcgataacaactacctgatccaaaaagggccggacccctaccgcgcccagtatctgcgcggtatcggcggcactacctggcactgggccgggcaggcgttccgcctgctgccgaacgatatgcgcctgcagagcctgtacggcgtaggccgcgactggccgatcggttacgccgatctggaaccttactattgcgaggccgaataccagatgggggtttccggcgacagcgatctggactcgccgcgctcgcgcccttacccgctgccggggatcccgctgccttacggttttgaacggattaaacagcgcgtcgccgggctgggttatgaggtcggcatcggcccgcaggcgcgcaacagcgttccctacgacggtcgcccggcctgctgcggtaataacaactgtatgccggtctgcccgatcgacgcccagtatcacggcggcatctccgcccgcaaagcgctggaggccggcgtgcgcatcgtcgccaatgcggtggtgtaccgtattgaggccgacgacaagggtaatatcgtggcggtgcactatctggatcgcaataaacacagccaccgggtcagcggcaaacgcttcgtactgaccgccaacggtattgaaagcccgaaaatcctgctgctgtccagcagcgagcgttatcgccacggcatcgccaacagttccggcatggtcggccgtaatctgatggatcatccgggcagttcagtagaattttacgccgacgaaccggtatggttcggccgcgggccgatgcggcccggcagcatcaacaacctgcgcgacggcgcgttccgggcgcagcgttcagccctgcgggtcgatctggccaacacctcgccggtgcgctacctcaccgagcgcctgatccgtcagggctattacggcaaggcgctgaatgaaaagctggcgttccagtccgaacgctacgtacagctgaaatgcctgctggagatgctgcccgagccggaaaaccgcgtgcagctgagcaaaaccgagaaagacgcctggggcatccccaaactggaagtctactaccgctttccggagtatgtgcaccgcggctacgaccagtcgatggtcgacttccggcgtatcgtcaaacagatgggcggcagcgaggcgctgtacagccggcgcggcgtttatgacaacaaccagcacatcaccggcaccatgatgatggggcgcgatccgcgcgattcggtggttgacggcgactgccgcagccacgaccaccccaacctgtttatcgccggcaccggcatcatgccttccgcctccacggtcaactcgacgctgaccggcgtggcactggcgctgcgcatggcggacagcgtgctgagcagtctgcagggaggcatggcatga

SEQ ID NO: 4346 - protein, 538 aa, Serratia fonticola
MPDSLSADVVVIGAGIAGSLAALKMAQAGASVLMLESGPEIKRDNAVELFRNSPFKGDFTEPFPPQPWAPQPKFVPSDNNYLIQKGPDPYRAQYLRGIGGTTWHWAGQAFRLLPNDMRLQSLYGVGRDWPIGYADLEPYYCEAEYQMGVSGDSDLDSPRSRPYPLPGIPLPYGFERIKQRVAGLGYEVGIGPQARNSVPYDGRPACCGNNNCMPVCPIDAQYHGGISARKALEAGVRIVANAVVYRIEADDKGNIVAVHYLDRNKHSHRVSGKRFVLTANGIESPKILLLSSSERYRHGIANSSGMVGRNLMDHPGSSVEFYADEPVWFGRGPMRPGSINNLRDGAFRAQRSALRVDLANTSPVRYLTERLIRQGYYGKALNEKLAFQSERYVQLKCLLEMLPEPENRVQLSKTEKDAWGIPKLEVYYRFPEYVHRGYDQSMVDFRRIVKQMGGSEALYSRRGVYDNNQHITGTMMMGRDPRDSVVDGDCRSHDHPNLFIAGTGIMPSASTVNSTLTGVALALRMADSVLSSLQGGMA

SEQ ID NO: 4347 - DNA, 888 bp, Serratia rubidaea
atgaccacctttaccccacgggtcacgctgatcggcttcggtgaagtcggcagcattctggctcaggcactgagcgctcagggcgcatgcgttaccgcctatgaccagcacattacgccggcgatgctcgccaccgccgagcgctgcggctgcacgctgaccgaacaactgccggcggcgctggccgacgccgagctgattttttccgtcgtcaccgccgccaatacgctggcggtcgccacgcagtgtgctccgctgctgcgcgccggccagtactttttcgacctgaactccgccgccccccataccaaacgcgccgccgctgcggcgattgagcaagccagcgacgcgcgctatgtcgaggttgcggtaatggcgccggtgccacccaagcggctgcaaacgccgctgctgctgggcggcccggcggcggccgagggcggcgcacggctgcagccgttaggatttaacgccaggattcacagcgatcgcatcggcgaggcttcggcgatcaaaatgtgccgcagcgtgatgatcaaggggctggaggcgctgaccgtcgaatgcctgcacgccgcccgccgctacggcgtcgaacggccggtgctcgattcgctgcacgccagtttcccgtcgctgggctgggacgagcggctgccccactacctgattagccgggtagcggagcacgggcaacgccgcgccgaggagatgggggaagtggtgaaaacgctgcaggacgttggcgtggaaccgcaccaaagccgcgcgacggtgttatcgcagcaggggctggtcgacgcgatgaaagcgcaaaatatccgctattcgcaactggaacctttcgtttggcaacaagcacttgaggcgatctacggcaaattgtga

SEQ ID NO: 4348 - protein, 295 aa, Serratia rubidaea
MTTFTPRVTLIGFGEVGSILAQALSAQGACVTAYDQHITPAMLATAERCGCTLTEQLPAALADAELIFSVVTAANTLAVATQCAPLLRAGQYFFDLNSAAPHTKRAAAAAIEQASDARYVEVAVMAPVPPKRLQTPLLLGGPAAAEGGARLQPLGFNARIHSDRIGEASAIKMCRSVMIKGLEALTVECLHAARRYGVERPVLDSLHASFPSLGWDERLPHYLISRVAEHGQRRAEEMGEVVKTLQDVGVEPHQSRATVLSQQGLVDAMKAQNIRYSQLEPFVWQQALEAIYGKL

SEQ ID NO: 4349 - DNA, 330 bp, Serratia rubidaea
atggtagatgaaatcgaagaacagatttatgcgttggtccgcaaacatgatggtgtctatctgtttaaggaaaaaacgctcaccccagacactgacctggacacggatctacaactggaagacgatgaagcggaagcattgatgaacgagttttttgaacaatttggcgttgagagggggagttttgccctagaaacctactacccagcggatccgccgctgcgcgaactgttaaatccgttcaagaagagggatatccctatagtccctgattttaccattaatatgctcatcgaatccgccaaggctggccgctggctgtataaatga

SEQ ID NO: 4350 - protein, 109 aa, Serratia rubidaea
MVDEIEEQIYALVRKHDGVYLFKEKTLTPDTDLDTDLQLEDDEAEALMNEFFEQFGVERGSFALETYYPADPPLRELLNPFKKRDIPIVPDFTINMLIESAKAGRWLYK

SEQ ID NO: 4351 - DNA, 1059 bp, Serratia marcescens
atgagggttatagactttttctgcgggtgcggtggagccagtaagggttttgagctggccgggtttgatatcgccttaggtatcgacttcgatgaaagcgctgaagccagctataaagctaactttcctcatacaaaatttattcgtgatgatataaggaatatcaaggtacgagatgttgctaagttagtaccagacagagatagcacagaactagtgttctgcgcatgtgcaccttgccaaccattctcttcacagaacaaaactcgaaatgcagatgatatacgccggactcttctaggagaaacgaagcgcttcataagagcatttcgccccgctttcatttttattgaaaatgttccaggtattcagagtatcaaaattgaagaaaatggcccctttgcagatttccttcattttattggacgatttggttatcagtatgattttaaagttgtttcaagtgaattttatggtgttcctcaacaaaggaaacgcttggtaattcttgcaagattggggggggctccctacttcccggcaccatcacatggcaacgaagaacatccgtttgcaacagtcagagactatattggcgatctaccccgtttacaggcgggcgaatgcagtcctaatgatcccctgcataccgcagctgttattagccccatcaatatagaacgccttcaacacactcccgaaggtggggatagaagagactggccagatcacttgtggttaaattgccatcgagaatataatggtcatactgatgtttatggcagaatgaagtgggatacaccatgtaaaacactaactactaaatgtacaagcatttctaatgggcgttttggacatcctgatatcactcaaaatcgagctattacgtttagagaagcggcctgtcttcagactttcccaaaaagttttatttttgaggggagtaatatttcgaagtctaagcaaattggtaatgccgtaccagtgcttttggcacagtgttttgcagaagcaattctcaagcaggctaaaattaacaaggagaccggggataattga

SEQ ID NO: 4352 - protein, 352 aa, Serratia marcescens
MRVIDFFCGCGGASKGFELAGFDIALGIDFDESAEASYKANFPHTKFIRDDIRNIKVRDVAKLVPDRDSTELVFCACAPCQPFSSQNKTRNADDIRRTLLGETKRFIRAFRPAFIFIENVPGIQSIKIEENGPFADFLHFIGRFGYQYDFKVVSSEFYGVPQQRKRLVILARLGGAPYFPAPSHGNEEHPFATVRDYIGDLPRLQAGECSPNDPLHTAAVISPINIERLQHTPEGGDRRDWPDHLWLNCHREYNGHTDVYGRMKWDTPCKTLTTKCTSISNGRFGHPDITQNRAITFREAACLQTFPKSFIFEGSNISKSKQIGNAVPVLLAQCFAEAILKQAKINKETGDN

SEQ ID NO: 4353 - DNA, 534 bp, Serratia marcescens
atgaacacctcattcagcttccgcacgatggcgatcgtcctgctgctgctggcgctgattgtttccggcaggctggcgttttacttccacagcaacgcagtaaaggccggtgagcaggttaagcagctgcagagcgataacagcctgcaggcgaatacaatcgccacacaggcgtttcagttccagcgcgccaacgaaatcagcaacgcggtgactcagtacggcatcaataccgacgcagccacccaagggaaagaaattgaataccggacgatcctcaagaaacagccgacgtgcgatctggctgtgcctgccgctattgctggtgggctgctcgactacacgtaccgtctacgttcccgcgcaatgtcagccaataccggcgacgctgacgcaaccggtactggcgccactgcctccagcaccctgacttactgccaagcagttctatggattgcaccattgctcgcagcacatgataaggcgaacaaccaaatgttggaaattcgcaaacttgatatgatgctgcggtag

SEQ ID NO: 4354 - protein, 177 aa, Serratia marcescens
MNTSFSFRTMAIVLLLLALIVSGRLAFYFHSNAVKAGEQVKQLQSDNSLQANTIATQAFQFQRANEISNAVTQYGINTDAATQGKEIEYRTILKKQPTCDLAVPAAIAGGLLDYTYRLRSRAMSANTGDADATGTGATASSTLTYCQAVLWIAPLLAAHDKANNQMLEIRKLDMMLR

SEQ ID NO: 4355 - DNA, 207 bp, Serratia marcescens
atggaacagagagagatcaaaattgttgctgaaggggtttctaacgaggatgtgctcaaatggatgcaaaagaaagtgagtgcgtcaagaaatctgcaagtagcgcttgcagagcgtaagaacttggagcaagcgcttgttgaggtggaaaagcaaataacgctacttaccaacgaggcgtctgtggaagtttgtcaatcaagttag

SEQ ID NO: 4356 - protein, 68 aa, Serratia marcescens
MEQREIKIVAEGVSNEDVLKWMQKKVSASRNLQVALAERKNLEQALVEVEKQITLLTNEASVEVCQSS

SEQ ID NO: 4357 - DNA, 522 bp, Serratia marcescens
atgacactaacgattgaagagttgaagtacggcgcggctatcggcgatctgggtatcgatgccgtgcgcgcggtgtgtgccgaagcgctggctaaccgggaggcgcagccggtgggatacatcgcagaagtcagcggcaatagagttggcgtgctcaggggtctaccaatgccggatgttggctcattgatctacaccgccccgccagcgccagcagtgccggacgaaatcagttctgcaatccgccatctcaaggacacgttggtagcctgcaatcgttttaactactgcgctgatgctgtgaatcgagtagaaaacgcctgccgcgccgcaatgctggctcaacctgtaagtagcggttacacgttgaactctccggaaattccggatggttggaagctggttcctatagatgcgacacgggctatgattgacgcggctcaaatggtggaagaagacggttacgacgccatgtacaaagcaatgctggcagcagcgctggagagtgggaatggtgcataa

SEQ ID NO: 4358 - protein, 173 aa, Serratia marcescens
MTLTIEELKYGAAIGDLGIDAVRAVCAEALANREAQPVGYIAEVSGNRVGVLRGLPMPDVGSLIYTAPPAPAVPDEISSAIRHLKDTLVACNRFNYCADAVNRVENACRAAMLAQPVSSGYTLNSPEIPDGWKLVPIDATRAMIDAAQMVEEDGYDAMYKAMLAAALESGNGA

SEQ ID NO: 4359 - DNA, 225 bp, Klebsiella oxytoca
atgaccatccatataaattcgttgtcgatgatctcccagcagaccaagagtcaaatctctctcccgttttttggcaagcaccatcaaggagtccagtacacctttcatcgtgtcctgcgactcatcaatcagtatgattggatgtcgatctttgagaatggattggagtgttggcttattttgaagcaaccaagctgtcgcatcgagtacgtaattgtgcggtag

SEQ ID NO: 4360 - protein, 74 aa, Klebsiella oxytoca
MTIHINSLSMISQQTKSQISLPFFGKHHQGVQYTFHRVLRLINQYDWMSIFENGLECWLILKQPSCRIEYVIVR

SEQ ID NO: 4361 - DNA, 282 bp, Serratia marcescens
atgttcgacattgcaaaaaccactttcaacatggcgcagaaacgcgggctgacacttaccgtggaaaagttggatggcgaccaatgcctctgtgtttgggagtccaaaaacgacatggaatggttgttcagctacacgctgacaggtgcaggcctgcaatggaggggcaacgtttatctgccgaatgatcttaaggaagaacttccagcgctgatcacctctgagaagaagctccgcgaaatggtcgatttcatcggaataaaccgccacctactcaactaa

SEQ ID NO: 4362 - protein, 93 aa, Serratia marcescens
MFDIAKTTFNMAQKRGLTLTVEKLDGDQCLCVWESKNDMEWLFSYTLTGAGLQWRGNVYLPNDLKEELPALITSEKKLREMVDFIGINRHLLN

SEQ ID NO: 4363 - DNA, 741 bp, Pseudomonas aeruginosa
atgagcaagttatctgtattctttatatttttgttttgcagcattgctaccgcagcagagtctttgccagatttaaaaattgaaaagcttgatgaaggcgtttatgttcatacttcgtttgaagaagttaacgggtggggcgttgttcctaaacatggtttggtggttcttgtaaatgctgaggcttacctaattgacactccatttacggctaaagatactgaaaagttagtcacttggtttgtggagcgtggctataaaataaaaggcagcatttcctctcattttcatagcgacagcacgggcggaatagagtggcttaattctcgatctatccccacgtatgcatctgaattaacaaatgaactgcttaaaaaagacggtaaggttcaagccacaaattcatttagcggagttaactattggctagttaaaaataaaattgaagttttttatccaggcccgggacacactccagataacgtagtggtttggttgcctgaaaggaaaatattattcggtggttgttttattaaaccgtacggtttaggcaatttgggtgacgcaaatatagaagcttggccaaagtccgccaaattattaaagtccaaatatggtaaggcaaaactggttgttccaagtcacagtgaagttggagacgcatcactcttgaaacttacattagagcaggcggttaaagggttaaacgaaagtaaaaaaccatcaaaaccaagcaactaa

SEQ ID NO: 4364 - protein, 246 aa, Pseudomonas aeruginosa
MSKLSVFFIFLFCSIATAAESLPDLKIEKLDEGVYVHTSFEEVNGWGVVPKHGLVVLVNAEAYLIDTPFTAKDTEKLVTWFVERGYKIKGSISSHFHSDSTGGIEWLNSRSIPTYASELTNELLKKDGKVQATNSFSGVNYWLVKNKIEVFYPGPGHTPDNVVVWLPERKILFGGCFIKPYGLGNLGDANIEAWPKSAKLLKSKYGKAKLVVPSHSEVGDASLLKLTLEQAVKGLNESKKPSKPSN

SEQ ID NO: 4365 - DNA, 174 bp, Serratia marcescens
ttgttcgaggagaaaaccggcaagccctataagtacgacgctcccaacagttacctcaatgttttcctgggttctgatccggaaattcgtcgtgcctggaaactgatgcagaaagatattgtgtcaacccgccaaggcttcgccgacagggtaaggagagaacgtgacaactga

SEQ ID NO: 4366 - protein, 57 aa, Serratia marcescens
MFEEKTGKPYKYDAPNSYLNVFLGSDPEIRRAWKLMQKDIVSTRQGFADRVRRERDN

SEQ ID NO: 4367 - DNA, 648 bp, Serratia marcescens
gtgagcgggtttcaatactggaattccaatggtgctcttatgattgattcgaactacaaaggcacatattatcaggatagtatggagtatcagaatattactgatattggtttttaccaaattgaaacaaccattgggaatagtctcgatatgggatatgttttcaataaatttcctgaaagtgatagcctcatgtggtttaaacctaacaacggttcaaaaatggttttcggcggtactgacttgatgacagccagcgcaggaagaatggcaaggtcacgtagtgatttacctgttgaaagtggttatcgtgacgtgtttaactccgctggtgaattagtttggtctgttgtgcacgcagctaaaatccctcgagtcattgggttctatgatattcctgtgaattttgatttggataatacagcatattcgcagtatattggggcggatacttggattttatcaagcaatgcacctggagccataacctttgacggtggagaagcggggtatagcgggctattttttcgattcattaatggaacattgtcttgccaatggataagtaagaatcagagttcttggctgtccacaatgaaaccttatgggctaagaataccgattgcaaaactgtcgaatcttgtgtga

SEQ ID NO: 4368 - protein, 215 aa, Serratia marcescens
MSGFQYWNSNGALMIDSNYKGTYYQDSMEYQNITDIGFYQIETTIGNSLDMGYVFNKFPESDSLMWFKPNNGSKMVFGGTDLMTASAGRMARSRSDLPVESGYRDVFNSAGELVWSVVHAAKIPRVIGFYDIPVNFDLDNTAYSQYIGADTWILSSNAPGAITFDGGEAGYSGLFFRFINGTLSCQWISKNQSSWLSTMKPYGLRIPIAKLSNLV

SEQ ID NO: 4369 - DNA, 1179 bp, Serratia marcescens
atggccgcccgtccgcgccggcgggaaaaccggcatttaccagatcaactttatttcgataaagccactggtgtttaccgcttcactctggtcacggggaaacgcaagtctctgggtaaagaccgggcactggcaatcgatattgcacgcgaatacaacaacagaatgcgtccagaaaatgcagtatcaatagactcacttatcagggaatctggaggtatacagggagaagctctccccttcgctgagcatgtagatagaataatggcgagagctattgaagatgaacgtccatccgacaatacgaaagatgattggaataatgatgccaagcgggtgaaagaattttttgtaaatataccggcatgtgatatcgaactagagcatgtcaactcttatataaaagaataccatgcagaagcatcagccaacgttcaaaacagaaaggtcagtttcttaaagaaactattcagttacgctgtagatgaatcgttaatgcttgataacccggccacgcgtaagaaaatgcgaagaacagatgagaaaaagagacagcgcttatcccttgagcatttcttggctattcgtaacgcagccttaccatggttacgaacagccatggatctggcattacagacaacgcatgctcgccttgaggtatcccggatccgctattctatccgtgaaccaaagaatgggatctgtgggtgcgtttggttggaacagcccgtgaatggtatttacggaacactatatattcaccggcaaaaagtacaaaagaaagaggcttcacacgttgccattccgatcggggaggttttgaagaagatcatcgaggaaagtagagacaatgtagctagcccatatgttgtgcaccgcatacctgaccggaacgtgaaacgcagcaaagaagttgctcacccgactcaggtggcgcctgattacctcagtcgttctttttccaaattacgcgatcaactcgggttatccgatcacctgaaaatggaagagcgaccgacattccatgagatacgtgctttagcggctcacctttttgacaaccaggggatagatccacaagggcgaatggcacatagcgacgcaaaatcgaccaaaatatacacccaaaatcacatcgattgggtggtcgtcccacatggggagatctctgtagggtag

SEQ ID NO: 4370 - protein, 392 aa, Serratia marcescens
MAARPRRRENRHLPDQLYFDKATGVYRFTLVTGKRKSLGKDRALAIDIAREYNNRMRPENAVSIDSLIRESGGIQGEALPFAEHVDRIMARAIEDERPSDNTKDDWNNDAKRVKEFFVNIPACDIELEHVNSYIKEYHAEASANVQNRKVSFLKKLFSYAVDESLMLDNPATRKKMRRTDEKKRQRLSLEHFLAIRNAALPWLRTAMDLALQTTHARLEVSRIRYSIREPKNGICGCVWLEQPVNGIYGTLYIHRQKVQKKEASHVAIPIGEVLKKIIEESRDNVASPYVVHRIPDRNVKRSKEVAHPTQVAPDYLSRSFSKLRDQLGLSDHLKMEERPTFHEIRALAAHLFDNQGIDPQGRMAHSDAKSTKIYTQNHIDWVVVPHGEISVG

SEQ ID NO: 4371 - DNA, 3531 bp, Serratia marcescens
atggctgttttaatcagcggtaaactcattggccctaatggcgacccgcgcccgagtgtaacgattatgctggtggcagtaaaaacctcatcggcagttgttaaacaggcgccttccatttcgacaactggcgcagatggtagttactcgttatccgtcgaggttggcacacacaacgtaatgatcgaggcacatggacgtccttttgagaaagctggtcaaattacggtttacagcgactcaaaaccgggaacacttaacgattttctgaccagtccagggcaggatgaattaacgcccgcgattgtggcaatggtagacgatatgcgtgcagccactgctttatatgctgagcaggctggtattgctcgtgatgaggcaaagtctgcttccgaaaacgcacagaacatcgcagacgccaatacctactacaccacgccagaagaccctgacgggacgattgcgggtattgctggtactccgattgggaaaagtttccgtgttggtcttggtgtcggaaaagggtttaaatactatataaacaataatgattccgctattgaaattagtgagattgcaggtgctaacgttgtaaacagattgcagacggatttttatgcttatgaaaaaaagaatagccatctaaatagtgagctattctctatgcaggtatcatctattgattttaatgagatgggtaatatcagtcttggtgatacatcactaatcagaatcactgacattaacacgcatgatgcattcttaagcacaattcagttctcacaggtttcatccccatccctgatgaaacgctggtatattccaaatcatacacaatattctaatggcgtaatttcatcgaattatcagcctttctattatcagagtttgtcattcaatgagttttctgagctgacagaacgctatgctcgagttagatatacgctccctgataattacaatttggtagatgaaaataatcgctatcgtgttgtagatacatccggaacatttaagccatcattcgcaggaacattgacatcagagacagtgtcatgcatatcagcgcatgcgactaaaaatattgttcaattctttgtggtgctgtcagaaattgttagtgaaggctatgagccaaatcaggctggcgttctttcattcattgcagacaaaattgacggcgccttgatgatggcgtactcgggtgtgtatgggtcatatacactgcgcgaagaccaattcgacatcatcattcctgccggggaatataccatcgacgttgtaggtgacgtcggggttgctgcgaccattcgtcagcgtaaaaaactgacgtttgagcccgaagataaatatatccgtaaggttgccgatgtcacaaataacacagaccttaacttcactaagtacccgattgagttgaagtgtacctttgaagaaggtgaagcgccatcgtctgactgcctggtattgctcgatgagaaaggaaacaacatcgattgccagtttgctggcgaataccatacaaatctgcgcaagcagttggatattggtaaacatgctgatggttcgttgaagtctggttcggtgttcttcaatgctgatatcgctgccggtaagcagatttatgttcaattgaatgctcatacgacaccgcagacgcatggtattcacccaaaactgattgcggtaaacgacggctatgatattaacgtcggtggtaacacgttccagttccgtgataatagcaattttctgctgggggccatcgttgataaaaatggcgtggtacatggcatgagccattttgctacttttgccgggttggttggtggtaacgcagatctgacacgcttctcctataagccaattatgcgccttatcagcacagggccggtgttctctgaggtggagtctgtcgtttacaactcggaaaaatacggtcttgatgctggcgtgctaaagctgcgtgtacggtatcggatatttaaaagcggacaggttcaggtctacggtatgtgcaacgtgatgaagcctatccccgttggcaaactgtatgggttcgatattcgattccagaccggtgacaaaacatttgttgcggatgataaatataaaacagcgctgacacctgcggccggcacatttaccgcgccaatgtctctggctgtcgttcgggcttgtggtgatacgcaccgcagcggaactcaatacgggccaacgcggccaatcacggcatcagctggcggtatcggtacgggtggggtgcaggtttatgctggttggcgctatacctcaccaacagattacagcttcctgaattggccggttgagaaagattgggcgtggccgtttgagttttggatggactgcaacgaaagccaggacagcccgcgaaatgtggctattgaggtgttcaatcgtccagttggtttcctcggtgacggcgcgtatccgatccataaacgcaagcttattttgcctgaactggcagaactgtcagagtctatcctggagttttgggacgatgcggcaaaaatgccggactactatgattactatgttgcaaagggcggaaccaaaacatcgtatcaccgcccgtacacgacagagatcattaaattccttcgctaccgaaatagcacgttccagaaactattcagtgattttaaaaattacctgaatgccaactttgggccgttggcaaatctgggtgataactacctgtctgaacgctatggtcttgagtttgcagcaacgtgtgtcatcccacctctgcaatggatgtatttcacagcagtaaaagaaaatgacacaacggcaacttcagaactgaaagcaggcatcaaaaactttgctgatgccttggttgaccgatacaacgcaattggcggtattccgttgcgtggtaaagctcaaacagatatcggtaacgcaaacgctatgggtatgcgtgtgctgggcttagcgctttatgccgggttagatgctggagatgtttacaaaaacacattcactggcgtactgaatcgtttatcaacggtatatcaggtgatcccaggtattgttacagatagccagaatgcgtcaccggcatcagatttgtggctgccgtatcagtcatggatcggttatttcctggcattcgcttacaagctggttggccgtaacgatcacccgatagacaatatcaacctgttgttaagggcaacatctggcgctggggcgctgcgtgagtctgactattgctggtctgaatcccgacgcggacagccgccaactgtggcttgggtgatggcgattttgatgatggataaccgacaatcaacggttaatgctgcggcttctctggcagagacgttcacgtcggagtttgggccgcgtcctggctatccaggccggttctacggttacagcaataacacgtcggaagatccggaagggaaaggccgcccaggtactaacatcccatatttggccgctaaccttagtgatctgtggttgtactactatttctaccaaagcgggctgtaa

SEQ ID NO: 4372 - protein, 1176 aa, Serratia marcescens
MAVLISGKLIGPNGDPRPSVTIMLVAVKTSSAVVKQAPSISTTGADGSYSLSVEVGTHNVMIEAHGRPFEKAGQITVYSDSKPGTLNDFLTSPGQDELTPAIVAMVDDMRAATALYAEQAGIARDEAKSASENAQNIADANTYYTTPEDPDGTIAGIAGTPIGKSFRVGLGVGKGFKYYINNNDSAIEISEIAGANVVNRLQTDFYAYEKKNSHLNSELFSMQVSSIDFNEMGNISLGDTSLIRITDINTHDAFLSTIQFSQVSSPSLMKRWYIPNHTQYSNGVISSNYQPFYYQSLSFNEFSELTERYARVRYTLPDNYNLVDENNRYRVVDTSGTFKPSFAGTLTSETVSCISAHATKNIVQFFVVLSEIVSEGYEPNQAGVLSFIADKIDGALMMAYSGVYGSYTLREDQFDIIIPAGEYTIDVVGDVGVAATIRQRKKLTFEPEDKYIRKVADVTNNTDLNFTKYPIELKCTFEEGEAPSSDCLVLLDEKGNNIDCQFAGEYHTNLRKQLDIGKHADGSLKSGSVFFNADIAAGKQIYVQLNAHTTPQTHGIHPKLIAVNDGYDINVGGNTFQFRDNSNFLLGAIVDKNGVVHGMSHFATFAGLVGGNADLTRFSYKPIMRLISTGPVFSEVESVVYNSEKYGLDAGVLKLRVRYRIFKSGQVQVYGMCNVMKPIPVGKLYGFDIRFQTGDKTFVADDKYKTALTPAAGTFTAPMSLAVVRACGDTHRSGTQYGPTRPITASAGGIGTGGVQVYAGWRYTSPTDYSFLNWPVEKDWAWPFEFWMDCNESQDSPRNVAIEVFNRPVGFLGDGAYPIHKRKLILPELAELSESILEFWDDAAKMPDYYDYYVAKGGTKTSYHRPYTTEIIKFLRYRNSTFQKLFSDFKNYLNANFGPLANLGDNYLSERYGLEFAATCVIPPLQWMYFTAVKENDTTATSELKAGIKNFADALVDRYNAIGGIPLRGKAQTDIGNANAMGMRVLGLALYAGLDAGDVYKNTFTGVLNRLSTVYQVIPGIVTDSQNASPASDLWLPYQSWIGYFLAFAYKLVGRNDHPIDNINLLLRATSGAGALRESDYCWSESRRGQPPTVAWVMAILMMDNRQSTVNAAASLAETFTSEFGPRPGYPGRFYGYSNNTSEDPEGKGRPGTNIPYLAANLSDLWLYYYFYQSGL

SEQ ID NO: 4373 - DNA, 855 bp, Serratia marcescens
atgcagcgtgatttccatctccttgggaatgatgccgccggcatagcgtcccagctcggtgacggcgcgcatcagttcgtttttctctttcttgccgatgccttccgggtatttaccgatgcgcagcggaataccgtagatctccaacagctccgccaggctctgagtgccgaagttacggcacacatatggccaggacagagtacgcagcagcccagcacgcgcaacatagccgctgcgcgacttatggcggtgctgtatccagccgaacggttgcagcggtgcgcccatgccgtcatcggttcgcagcagcagctgatcctgattgtcccgcgccagttcgaaccaggacgccggccggtggttaaacgccttcgggaaccactcgcggccgagctgttgccattcaatctcgatgttgctgaacccctggccgatggcgtcgagcatatcgatgatcaaatcctcccagccgtcttgctcggtgatgtactccgccagccaggccgcatccgcttgctctgccggtgtggcattgggcggtggcgtgatttcgtgcggaatggtcagcagcgcacgcttgcgcttttgcatctcggcaaacaaatgggcgtcccgttcttccatatcggtgaacaggtcggcctgggcctgcaggttgcccagctcggcctcgttgagaatttgctccaggcgctggggcgtcaaccgctggctggggtgctcggcatacaggccggccagtgcggccacatgcgaggattgcggctcgcgcagcacatcgcggcggatcggtttcccgttgatatcgacaatttgaaccatttttttcaccataaaccgcgaccgccgtaa

SEQ ID NO: 4374 - protein, 284 aa, Serratia marcescens
MQRDFHLLGNDAAGIASQLGDGAHQFVFLFLADAFRVFTDAQRNTVDLQQLRQALSAEVTAHIWPGQSTQQPSTRNIAAARLMAVLYPAERLQRCAHAVIGSQQQLILIVPRQFEPGRRPVVKRLREPLAAELLPFNLDVAEPLADGVEHIDDQILPAVLLGDVLRQPGRIRLLCRCGIGRWRDFVRNGQQRTLALLHLGKQMGVPFFHIGEQVGLGLQVAQLGLVENLLQALGRQPLAGVLGIQAGQCGHMRGLRLAQHIAADRFPVDIDNLNHFFHHKPRPP

SEQ ID NO: 4375 - DNA, 630 bp, Citrobacter koseri
atggcagttccgtatgaaccagcggagttcaagaaagaagcttttaactgcccgtactgtcaggcttacgctaaacaaaagtgggagcaattatatcctttctatgaacaagatgcctttcctatgcatgtgtcacaatgtgagcgctgtggggagtattcatattggtttaaaaaatcccttctgattcctgcttctgcgaatgttgaactgcctaacccagacatgccggaagactgtaagtccgactatatggaagccagaagcatcatcaatctgtcgcccaaaggagccgctgcgcttctccgtctgtgccttcagaagctcatggtccatttaggagagccggggaaaaacattaacgccgacattaagtctctagttgagaaagggctgcctcctcgcatccaacaagctgcggacatttgccgtatcgttggaaatcaggctgtccaccccggagagattagccttgatgatgacccacagttaacacatggcctctttaagctgttgaatatcattgtcgatgaccgaattacgagaccaaaagagatcgaggcgatgttccatagtatgccggaggggccacggcaggggatcgagaaaagggacggtaagactagttaa

SEQ ID NO: 4376 - protein, 209 aa, Citrobacter koseri
MAVPYEPAEFKKEAFNCPYCQAYAKQKWEQLYPFYEQDAFPMHVSQCERCGEYSYWFKKSLLIPASANVELPNPDMPEDCKSDYMEARSIINLSPKGAAALLRLCLQKLMVHLGEPGKNINADIKSLVEKGLPPRIQQAADICRIVGNQAVHPGEISLDDDPQLTHGLFKLLNIIVDDRITRPKEIEAMFHSMPEGPRQGIEKRDGKTS

SEQ ID NO: 4377 - DNA, 2598 bp, Klebsiella oxytoca
atgtctgaattagcacaagaatcaatcgcaaccaatgacttcgaaaaatggctgaatgagcgtaataactggcttcaaacggcagcaaaacagcttattgagaataaacggttacccaatgaggtcgaactcactgagctggttcgactctgcaaactggaggcggctaaacaagatgactctgggttcttgaaggttgaacctggctcattctcagcagggttactccaacgaaatgttcgtgttgaagaagtaagccaagtatttggtgtaaatgccatcaagcctggggcatccttaccattcggcgctggtagtctagctgttatttatgggcagaatggttcagggaaaagtagtttttctcgtctgctcaaacaactctgtggctcacgttcaagggacgaaatccgcccgaatgttttcagcaacgaagagcatacatgtagtgctcaatgtcgaattaccattgatggtaaacccgtagaaatcaattggcaggctggggttgccccacatccgatgctcaagtatgcccaagtatttgactcgaaaactgcgactcaatatatggggcgcactgaatcaagctacgaaccaagcagcatgcgttttatatctttgctcattcagatctcaggaatggtttctgaacaactaagtagagagaaggaaaaacttgtccgtgctcttccacttttcccaagtgaccttacagagaccgccgaaaatacttggttcaactctcttaaagcatcaacctccgctgagaaaattgagtcgttttgccaatatggtaatgatttggaagatgaacgtattaaaggtgaagctctgttagcagagaaagacatcaagggacgcctgattgcaataaataaggaagagattgccactgaaaacattaagcaggccatgaggttattgaaggaaggacttgcggatgggaaagccgaggaattgtttaaggcaaaagaattggctgttgcagcaagaaaggctgccaacatagttgcgcagcaggcattcacaacagcccctctacaaggcgttggtgaaacggcttggaagctaatgtgggagcaagccagaaactactccactgttcatgcttaccatagccgcgaatttcccgttactactgcagatgcatattgtgtgctctgccaacagaaacttactgaggaaggctcatctcgactcaaaagttttgaggctttcgttacggctggtttagaaaccacggcaaaaactgcggaagccactagcgctgaactcattacgaaggtcgttcaattaccttcgatagaggattggattgctcggctggctcaattgaaatttgatgagacctttgctcgtacctgttatgaaactttgaaagcaaggcgctcacagtttgaggcatgcaccgccgttggttctatcgtcgcattcgattgggcgcttattgatcaggtagttgaaaaacgtgctgtcgatttaattgctgagaagattagtttgatgcaattgcaacaagatgggcaacgccaacaacttgaaaaacgcattaagcaactcaaggcactgcaatggttatgtcaaaacaaattggcaattctcgccgagcgtgaacgcttggtggcagtggatttgctagataaagcagtgagactaacggccagcaattctttgacaactaagcgaaccgaactagggaaaactgagcttgatgctggatatcagagtcgttttgatgcggagttaaaggtacttggtggacggcgtttgccggtagtgccgcagagcaaagctcaaggcaaaggagtaataacttttgggctaacccttgtcggggcaagggctggcttcactcctgatgtaatactcagtgaaggagaagcccgcattgttgcattagcggcattcttggccgatacgactggttcgaatcagttagcccccttcatctttgatgaccctatttcgtcattagatcaggacttcgaagagcgggttgtagctaggcttgtcgagttagcgaagaccagacaggtcataatcttcacacaccgcctttcgcttgtttccatcattgatgctgtaattaaaaagcacagtgagaatccggctaatgaaaaaattaaccatacagtgcaatcgcttagacgtttagataaaatttcgggaatcttggcacaacacagcttgcgggatgccaagcccgaaaagtcgcttaatatgattagggatcatgtcatccctaagctcaaaaagcatcaagtagatgcagatgctgatgtttatgatcttacggcaaaaagtgcatgtagtgattttcggataatcttggaacgaatagtagaatttgtccttttgaatgatgtagttgtccggttcagacgtgatgtcaatactaaagggaagctgcggggtataaccaaggtaactgcagaagactgtgatcttattgatgcgctgatgaccaagtattcagtttacgagcactctcaatccgatgagctgcctctagttccggttgaacttgatgaattcgaaaaagatgtattggagctgattgcatggatcaatgagtttaaaactcgaatcggctga

SEQ ID NO: 4378 - protein, 865 aa, Klebsiella oxytoca
MSELAQESIATNDFEKWLNERNNWLQTAAKQLIENKRLPNEVELTELVRLCKLEAAKQDDSGFLKVEPGSFSAGLLQRNVRVEEVSQVFGVNAIKPGASLPFGAGSLAVIYGQNGSGKSSFSRLLKQLCGSRSRDEIRPNVFSNEEHTCSAQCRITIDGKPVEINWQAGVAPHPMLKYAQVFDSKTATQYMGRTESSYEPSSMRFISLLIQISGMVSEQLSREKEKLVRALPLFPSDLTETAENTWFNSLKASTSAEKIESFCQYGNDLEDERIKGEALLAEKDIKGRLIAINKEEIATENIKQAMRLLKEGLADGKAEELFKAKELAVAARKAANIVAQQAFTTAPLQGVGETAWKLMWEQARNYSTVHAYHSREFPVTTADAYCVLCQQKLTEEGSSRLKSFEAFVTAGLETTAKTAEATSAELITKVVQLPSIEDWIARLAQLKFDETFARTCYETLKARRSQFEACTAVGSIVAFDWALIDQVVEKRAVDLIAEKISLMQLQQDGQRQQLEKRIKQLKALQWLCQNKLAILAERERLVAVDLLDKAVRLTASNSLTTKRTELGKTELDAGYQSRFDAELKVLGGRRLPVVPQSKAQGKGVITFGLTLVGARAGFTPDVILSEGEARIVALAAFLADTTGSNQLAPFIFDDPISSLDQDFEERVVARLVELAKTRQVIIFTHRLSLVSIIDAVIKKHSENPANEKINHTVQSLRRLDKISGILAQHSLRDAKPEKSLNMIRDHVIPKLKKHQVDADADVYDLTAKSACSDFRIILERIVEFVLLNDVVVRFRRDVNTKGKLRGITKVTAEDCDLIDALMTKYSVYEHSQSDELPLVPVELDEFEKDVLELIAWINEFKTRIG

SEQ ID NO: 4379 - DNA, 912 bp, Serratia marcescens
atgactatcggatttaacagcggcattccatccgcaaacagcggttacgcattattaaaactgtcggattatgtgctggacgaaaacaccatttttgccgcccataaagcgcgcgtgttggctgatggcggcattatccctgatgaggtgggctgtctggagcgcattacgtggctgctggacaatggcttgtatcgcaagatggaaagcatgattaatcccgcctttggcgtgaagatgaacgaggaaagggaagtcagcaagctgtactcattcaaggcgggcgacgactatgtcagcctgatgcaaggcacgggcggggcagtcatgtatgaagacagcgaaggggggccgggcgttaccgtgaaaatcacatcaaacggtggtgcctacctgcgctcagagaaaaatcaccgtgtgcagcgtggccgccagtatgccatcggcggtcggctgtcggataaagacaaggcggatgtgctgggtatcagcgccggtgtcagtatcaacggtttgcaaatggcttacctgcgtacccaaatcaccaataaccaaaaagacatagaggcttggcgttatggtacgcgtgacggtgcctggactggttcggggccatcgggcgcggcaatcggtgcagtgcgccgcccctatgctgattttatcccgtcggcggcgttatttgacgttgacggcggcgaggtgcgggggtacgagtcgggcgctttgaaagcccgcgatgcggcagcaacagggacattggccgatttgaccgctttcgcggtaccgatttatgttggttcgacctttgccaatggcattgtccaaccctgctacggcacgttgcgtgatgtcatttttctgcataccgctgacgatgccgacgcggcattgttgtcgcgtctgggcatgtaa

SEQ ID NO: 4380 - protein, 303 aa, Serratia marcescens
MTIGFNSGIPSANSGYALLKLSDYVLDENTIFAAHKARVLADGGIIPDEVGCLERITWLLDNGLYRKMESMINPAFGVKMNEEREVSKLYSFKAGDDYVSLMQGTGGAVMYEDSEGGPGVTVKITSNGGAYLRSEKNHRVQRGRQYAIGGRLSDKDKADVLGISAGVSINGLQMAYLRTQITNNQKDIEAWRYGTRDGAWTGSGPSGAAIGAVRRPYADFIPSAALFDVDGGEVRGYESGALKARDAAATGTLADLTAFAVPIYVGSTFANGIVQPCYGTLRDVIFLHTADDADAALLSRLGM

SEQ ID NO: 4381 - DNA, 855 bp, Serratia marcescens
atgaaacattttcgtctttgccttatccccgtgcttgccgcattttcactgccggtttttgcccacccggcgacgctggataccattaaagatgctgaaagccggcttcacggccgagtcggctatgctgagctggatctcgccagcggaaacatgatggatagctatcgcgctgatgaacgcttccccatgatgagcacctttaaagttattctgtgcggcgcggtgttagcgcgggttgatgccgggcaggaacagcttgatcgccgtatccgctaccgtcagaacgacctggttgagtactcgccggtaacggagaaacatctcgcagaggggatgaacgtgggggaattatgccatgccgcgatcaccatgagcgataacacggcggcaaacctgttgctctctacgctcggcgggccgtcggggctgaccgcatttttgcggaaaacgggtgactcggtgagccgtcttgaccgttgggaaacggcgcttaatgaagcgttgccgggtgacgagcgtgataccaccacgcctgagtccatggcgcggacgctgcataatttgttaacgggtgatgccctgagcgctgagtcacgccggcaattaatgcgctggatggaaatggataacgtcgccggaccgcttttgcgttcggtgttgccggcagggtggtttattgctgacaaaaccggtgcgggtgagcgtggttcgcgtggcatcgtggcggcgctggggcctgatggtaaaccgtcgcgtatcgtcgtgatttacctgacgggaaccaaggcaacgatggacgagcgcaataagcagatcgccgatatcggcgctgcgctgataaatcactggtaa

SEQ ID NO: 4382 - protein, 284 aa, Serratia marcescens
MKHFRLCLIPVLAAFSLPVFAHPATLDTIKDAESRLHGRVGYAELDLASGNMMDSYRADERFPMMSTFKVILCGAVLARVDAGQEQLDRRIRYRQNDLVEYSPVTEKHLAEGMNVGELCHAAITMSDNTAANLLLSTLGGPSGLTAFLRKTGDSVSRLDRWETALNEALPGDERDTTTPESMARTLHNLLTGDALSAESRRQLMRWMEMDNVAGPLLRSVLPAGWFIADKTGAGERGSRGIVAALGPDGKPSRIVVIYLTGTKATMDERNKQIADIGAALINHW

SEQ ID NO: 4383 - DNA, 3711 bp, Serratia rubidaea
atggagcaaattattcatcaggaattggggccggactccctacaccagaatgaatatcggttgtatatattgagtgagcatgaggtgatatggttttcctgtattcaccatatcgccttcgatgcctatgtgtaccatttgctttatcagcgtgttgctgagcactacaacgtcctgttgcgtggtggggaagcgacatcttgccggtttgctgcactccgcactctgtatgtagaagaccaagcatataaaaatagtccgcaatatgcccgcgatcgggattattggcggtatcgctgtgcgcagatgccagcgccgacttttattggtgcatcggtgcaggaaacaacggtggatattattcaggccgacgcgcgtattgatgatgaaatctgtttggcgctggatgccttttatcaacaaagcaggatcgctttgtccgatctattgattggtgtattcgccagctatttttcatcctgtttggcgggggaacgccagttgttgttcggactcccttgcatggtcaggcaagactcccttggtgctcaggcggcggtgactcgcagtaatattttgcctttgctgctaacgttgccacaggatgccaattttcaggacgtttgcgccgttgtggcaaagaacagacgcgaattgcatcggcaccagcgctatcgcagcgaatggattagcagggacattggacgagtcggcaatgcgttaccgctttacggtattgaactgaatatattgccctgtttcccttccccagattttactgacttagatgcttcggttcgacatatcgccacggggcccgtgcgtgatattaacgtgcatctggagctcggggcggatctacgcccgcatacactcaggttacttgcccacgcgtcacgacacaatcagtccgaattacagctacacgtgcgtcgtttactacattggatgaaacagttgattgcgtcgccgtccgcgccattgaggatgttgccgttggctatgccgacggaattggcgcaaattactcgatggaatgacaccaaacatgagctgccgaagcacggcattcttgaactatttgaacagcaggtacggactgcgccgcagcagattgccgtaatggatgaaagcggcgtgttgacatacggcgaactggaactccgctcgcgcaggtttgcatgtgctctcgacgactatctgcaaggcgctggtggaaaggttatcggagtggcactggaacgcagtatagagttggaggtggtgttgctggcaatcctgcgtgccggcgccgttattttgccactgtcgttggatctgcccgaattacggttgcgaaagatgctcaaccaggcgggagcctgtctgacgatcacctcctctgtagggcaagaagggttgccaaccggacatccgagtttggatcttgtcacgttgacgcagatcgcagaacttttgaatgctgaaacgtcgccacctaagtcagcagggcaagacgcaggcgttcctgcctacattctgttcacgtcaggatccagcggcgagccgaaaggcgtgatggttgggcatctggctttagccaaccggttgcagtggatgcaggctgagtatggtttgcagccgacggaccgagtgttacagaaaacaccggcgacttttgacgtatcaatgtgggagtttttctggccgttgatcggtggcgctacattggtaatggcacgttcaggcgggcatgctgaaccagaatatattattgattgtataaggtattttgatgttaccaccgtgcattttgtaccgtctatgctggcgttgtttcttgatgaaattgagcgtcagcctgggccgctgaagttgcgcagggtttttgccagcggagaggcgttgtcctcggagctggcccagcgttatcgacggctgctggttgcgccattacataatctttacggtccgactgaagcggcgattgatgtcacttatcatgcggtcggtttgggagtagaagggcgaggcgtaccaattggtcggcccatttggaatacgcgaattcacattctcaatgccgaagggcgttgtacgccgatcggtatggcaggagaactacatattgagggaatttgtctggctgatggttatgtcggccagccgtccttgaccgcagaacgtttcgtgatgcgcgatgatggcgtgcgtctctaccgtaccggcgatctggctcgttggctcccgaatggtgagattgattaccttggtcgtatggatcagcaaataaaaattcatgggcaacggattgaattagcagagattgaaacggttattagtgggcattctcagatccatcgggcgtgcgtaactctgtttgaaggagagcttattgcttatgccgtagcgaatgatatcaggccgactgaggatatattggtcgcgcattgtcgtgagcatcttcctggctatatgttgccgcagcgctgggtatggctggcggaactgccgttaaatagcaatggcaaactggatcgtaaggcgctaccggagccggtaaaacggttacggaaagacgtcagcgcgccgtcgaacctgaccgaacaacgactatgcgagtattttgccgatgcattacagttgtccagtgtaacgcctgaagaaaatttctttgagctgggtggtaattccctgagtgccgttgatgctgccgccagaattaacactggtctgggttggcatattacgcttgccaacattttcgcccatccttctcccaaagcgctggccggatatggtcagcatgacgacgtggacatgctggataccatgttgcttttgcggcctgttcggcattctgtccgcggtcggttgccgacgctgttttgcattcatccggctggaggcatcgcctggtgttacagtggactggcccgctttctcaaagcgccgtgtgaaattgtcggcatacaggcgcggggactcacagcgggcagtcgcattacaccatcaatggatgagatggctgaagaatacgctaaacgcatacgcgctcatcaacctcaaggtccgtattggctgctcggctggtccgtgggaggcatgatcgcccatagcgttgccgtacatctggagcaacaggggcaaacggtggcgctgttggctatgatggattcctatcccagcgatctatggcgatgttttgctgctgaggtgttgaacgctagggaagaggagaccatggcgctggccgccttgctctttattgccggaatcgctttgccttttgaccaagggttgccatctttgctggtaccgaaaggtcaggtgcttgaacgttcgcagactatcggattattgagaaagcagggcaatgcgttagcctgcctcgacgacccgacgttggatcggctgatcgatgtggtaatcaacagtcgtcggctggtaggaagttcaaaccatgatgtttatcacggcgatatgctgttcttcacggcagcggcgccgagggttgaaacgtggctggatagggcggcgtggcgtccttatgtgagtgggcagatccataatattgatattgattgcgatcatcccgcgatggccagagcggagacgctacgtgaaattgccggacatctggactgtgcctttacagcactgactggatatttaccggctgttccgcagagcattgacagggaggatacagtacaggaggttgaaagatga

SEQ ID NO: 4384 - protein, 1236 aa, Serratia rubidaea
MEQIIHQELGPDSLHQNEYRLYILSEHEVIWFSCIHHIAFDAYVYHLLYQRVAEHYNVLLRGGEATSCRFAALRTLYVEDQAYKNSPQYARDRDYWRYRCAQMPAPTFIGASVQETTVDIIQADARIDDEICLALDAFYQQSRIALSDLLIGVFASYFSSCLAGERQLLFGLPCMVRQDSLGAQAAVTRSNILPLLLTLPQDANFQDVCAVVAKNRRELHRHQRYRSEWISRDIGRVGNALPLYGIELNILPCFPSPDFTDLDASVRHIATGPVRDINVHLELGADLRPHTLRLLAHASRHNQSELQLHVRRLLHWMKQLIASPSAPLRMLPLAMPTELAQITRWNDTKHELPKHGILELFEQQVRTAPQQIAVMDESGVLTYGELELRSRRFACALDDYLQGAGGKVIGVALERSIELEVVLLAILRAGAVILPLSLDLPELRLRKMLNQAGACLTITSSVGQEGLPTGHPSLDLVTLTQIAELLNAETSPPKSAGQDAGVPAYILFTSGSSGEPKGVMVGHLALANRLQWMQAEYGLQPTDRVLQKTPATFDVSMWEFFWPLIGGATLVMARSGGHAEPEYIIDCIRYFDVTTVHFVPSMLALFLDEIERQPGPLKLRRVFASGEALSSELAQRYRRLLVAPLHNLYGPTEAAIDVTYHAVGLGVEGRGVPIGRPIWNTRIHILNAEGRCTPIGMAGELHIEGICLADGYVGQPSLTAERFVMRDDGVRLYRTGDLARWLPNGEIDYLGRMDQQIKIHGQRIELAEIETVISGHSQIHRACVTLFEGELIAYAVANDIRPTEDILVAHCREHLPGYMLPQRWVWLAELPLNSNGKLDRKALPEPVKRLRKDVSAPSNLTEQRLCEYFADALQLSSVTPEENFFELGGNSLSAVDAAARINTGLGWHITLANIFAHPSPKALAGYGQHDDVDMLDTMLLLRPVRHSVRGRLPTLFCIHPAGGIAWCYSGLARFLKAPCEIVGIQARGLTAGSRITPSMDEMAEEYAKRIRAHQPQGPYWLLGWSVGGMIAHSVAVHLEQQGQTVALLAMMDSYPSDLWRCFAAEVLNAREEETMALAALLFIAGIALPFDQGLPSLLVPKGQVLERSQTIGLLRKQGNALACLDDPTLDRLIDVVINSRRLVGSSNHDVYHGDMLFFTAAAPRVETWLDRAAWRPYVSGQIHNIDIDCDHPAMARAETLREIAGHLDCAFTALTGYLPAVPQSIDREDTVQEVER

SEQ ID NO: 4385 - DNA, 1557 bp, Serratia rubidaea
atgagtgagcgcccaactttgacggatcttactgcaaacctggttccttttactgcccatcaggtaaaaacttcgctgatctggagtactgctgatgagggagatggggaagtattacgcgatgcttgcagttatttggtcgattctgatgacacctgtgcagctaaagtatttctggctgagcgctatggcggcagcggtattcagcgcaatggcggcggtgcccgctgtggttttgatggccgctatcaaattaaagggatcggtgctaatcctctggtggggcagggatcagactggcatcactctaacggtgcgctcggcgccggccaggcgatttatgaagccttatggggagatattctggcgcagatattgccctatggtgctgtagctacccgggccattttacttactgacaattatatcgatatcgagtttgaacgcagccgaggacgttcccgacgcgcgttgttgatccgtgagccagtgattcgcccggcccactttgagcgggcaccatattttcggcctcagtcggcatataccgggcaactgatgcacgatgctcaaagagtcagagcggtgattggtcatctaccggcttgtttgccgactccttcggacggtttcagcaccgaagcccgatgcgatccgcgcacttggtgtattgaaggattatgtgaattggcgcgccgtcaggctcagcagatggcctattgccagacccggttcctgatgttgaccacatccccctccaacattgcgatggacggcagggtgttggatttcaacgggcttaactgtctatttcccagcgatcatcgcgatgattttgaatatcgccttaaaaccgctcagttgataggtgaaccggcgatccttaaacaaggtttgtctgatttatgcctgtatctcggcaaatacatgttcgagccgactttcacgcagcttgctcgacagcaggtgacggcctgttttcagcgcgattttcaacaggcttgttatcacggctatgcgacgttgcttgggataccggtcgaacttttgcagcggggggggccggcgtcactggaaaggctggtggacagttttatgcgattgctcaacagccgcaggggcactttgtaccatgcagacaatggagaatctccgctggaacggctggttgttacactgattcatcgtagctgggggctgccggttcatgacgatgcctgtatggcaatggatgtccgttttgcgcacacgcaggaattgtttaatgaggtcatgcattgggctaatactacttgccgcgtcgaacaacgaaattcgttcgcgttcatgtcagaaatcgagacgcaggcgcgtgagaggctgaagcccagaaggtgtttaggcaaagtgcaaatgctgcgggagattgatgagttactggaaacttgtaaggacgatgagaggcaactgcggttagcactggcggaaatgaaaactagagtgctggcgtttgccacggttgcacttggttgccagcagactatcggccacggagctgaaaacaggggaaacgtatga

SEQ ID NO: 4386 - protein, 518 aa, Serratia rubidaea
MSERPTLTDLTANLVPFTAHQVKTSLIWSTADEGDGEVLRDACSYLVDSDDTCAAKVFLAERYGGSGIQRNGGGARCGFDGRYQIKGIGANPLVGQGSDWHHSNGALGAGQAIYEALWGDILAQILPYGAVATRAILLTDNYIDIEFERSRGRSRRALLIREPVIRPAHFERAPYFRPQSAYTGQLMHDAQRVRAVIGHLPACLPTPSDGFSTEARCDPRTWCIEGLCELARRQAQQMAYCQTRFLMLTTSPSNIAMDGRVLDFNGLNCLFPSDHRDDFEYRLKTAQLIGEPAILKQGLSDLCLYLGKYMFEPTFTQLARQQVTACFQRDFQQACYHGYATLLGIPVELLQRGGPASLERLVDSFMRLLNSRRGTLYHADNGESPLERLVVTLIHRSWGLPVHDDACMAMDVRFAHTQELFNEVMHWANTTCRVEQRNSFAFMSEIETQARERLKPRRCLGKVQMLREIDELLETCKDDERQLRLALAEMKTRVLAFATVALGCQQTIGHGAENRGNV

SEQ ID NO: 4387 - DNA, 324 bp, Serratia rubidaea
atggcgagtaacagcggggaaggcgtgtgtttccatgttccggacagcaaagattaccagccatccctgattgccatcaatccccgggatacaccgccgcagcggttatcggtggttgatgcccccgatttaacgataaacaacggtatgttgtgcattccccctggcttttactcttttccgtcagcaggacagtttatcgtgcgctatatactcacctcgccgacggatagcgaatcaccaagaagcgtggtggccggtattgagttatcggacgggcagattaaaaatataccgctctctgacgcagagataacgcgttga

SEQ ID NO: 4388 - protein, 107 aa, Serratia rubidaea
MASNSGEGVCFHVPDSKDYQPSLIAINPRDTPPQRLSVVDAPDLTINNGMLCIPPGFYSFPSAGQFIVRYILTSPTDSESPRSVVAGIELSDGQIKNIPLSDAEITR

SEQ ID NO: 4389 - DNA, 648 bp, Serratia rubidaea
atgaacataagcgcaaaagacctcgcgcaacgtatggccgacgcgttaaatgtggataatggcttcttaactggattcgcccaaggtgctatatcgcttcccatcgatcttggttatttggcatacgacttccttgatactgaaaatcggtcagccaatatggatgatactgaaaggatgatccgcctgattaagtctggtttagccaataaaaagagcttggccaaaattgcgagattggtcgctgatgacttccttgagaaaacagatagcgaacgagtaaagctaattattgaaaaaggttcgggtaagttcctgggtaggttcgtgaccaaccaattacttggtgtcaacctaggtgctttgattgccgaacggtttgttctgcagttcgcagcaagcctttcattggggtcggtgttatcccttggcgcgatgaaatcccgtgcgatttatacgtcacgcgagctgcgctcaagaaacccatggctatatgaccggcttaggagaatgggaaaccttgaccttctttattttttgatggagaagcgcaccaggccgtttgaagatgcgatcgcagtttggcatagcagtaggagtgactttaatcggattgttgaacttttcttccaaaaggtagctaagtga

SEQ ID NO: 4390 - protein, 215 aa, Serratia rubidaea
MNISAKDLAQRMADALNVDNGFLTGFAQGAISLPIDLGYLAYDFLDTENRSANMDDTERMIRLIKSGLANKKSLAKIARLVADDFLEKTDSERVKLIIEKGSGKFLGRFVTNQLLGVNLGALIAERFVLQFAASLSLGSVLSLGAMKSRAIYTSRELRSRNPWLYDRLRRMGNLDLLYFLMEKRTRPFEDAIAVWHSSRSDFNRIVELFFQKVAK

SEQ ID NO: 4391 - DNA, 411 bp, Serratia rubidaea
atgagtgatgcaattagaaacattggtacaataatcgccttcctggggatgctactatttatttttagcattatttattttgctgttataaaaaaaaactataaaaatacaatttcaaaatacatgtcacatggtttgtttatgcggcaattcgatattcttgctgtttccgcagggtattttggcagtatgatcgtcaccatatttttctggcagcttctgacccgtaaacgcatccgattgtctaaaactgagtaccttggagatgaatcttacgatttcatcaataccttacctaaaagtgaaacccgttggattaaacgctatttttacctctttctcatctggtcactttcaatactcttgggaggggcgatgatgtatctgcccgactggctacatatgtcataa

SEQ ID NO: 4392 - protein, 136 aa, Serratia rubidaea
MSDAIRNIGTIIAFLGMLLFIFSIIYFAVIKKNYKNTISKYMSHGLFMRQFDILAVSAGYFGSMIVTIFFWQLLTRKRIRLSKTEYLGDESYDFINTLPKSETRWIKRYFYLFLIWSLSILLGGAMMYLPDWLHMS

SEQ ID NO: 4393 - DNA, 840 bp, Stenotrophomonas maltophilia
atggtgacggtgttcggcattctgaatctcaccgaggactccttcttcgatgagagccggcggctagaccccgccggcgctgtcaccgcggcgatcgaaatgctgcgagtcggagcagacgtcgtggatgtcggaccggccgccagccatccggacgcgaggcctgtatcgccggccgatgagatcagacgtattgcgccgctcttagacgccctgtccgatcagatgcaccgtgtttcaatcgacagcttccaaccggaaacccagcgctatgcgctcaagcgcggcgtgggctacctgaacgatatccaaggatttcctgaccctgcgctctatcccgatattgctgaggcggactgcaggctggtggttatgcactcagcgcagcgggatggcatcgccacccgcaccggtcaccttcgacccgaagacgcgctcgacgagattgtgcggttcttcgaggcgcgggtttccgccttgcgacggagcggggtcgctgccgaccggctcatcctcgatccggggatgggatttttcttgagccccgcaccggaaacatcgctgcacgtgctgtcgaaccttcaaaagctgaagtcggcgttggggcttccgctattggtctcggtgtcgcggaaatccttcttgggcgccaccgttggccttcctgtaaaggatctgggtccagcgagccttgcggcggaacttcacgcgatcggcaatggcgctgactacgtccgcacccacgcgcctggagatctgcgaagcgcaatcaccatctcggaaaccctcgcgaaatttcgcagtcgcgacgccagagaccgagggttagatcatgcctag

SEQ ID NO: 4394 - protein, 279 aa, Stenotrophomonas maltophilia
MVTVFGILNLTEDSFFDESRRLDPAGAVTAAIEMLRVGADVVDVGPAASHPDARPVSPADEIRRIAPLLDALSDQMHRVSIDSFQPETQRYALKRGVGYLNDIQGFPDPALYPDIAEADCRLVVMHSAQRDGIATRTGHLRPEDALDEIVRFFEARVSALRRSGVAADRLILDPGMGFFLSPAPETSLHVLSNLQKLKSALGLPLLVSVSRKSFLGATVGLPVKDLGPASLAAELHAIGNGADYVRTHAPGDLRSAITISETLAKFRSRDARDRGLDHA

SEQ ID NO: 4395 - DNA, 276 bp, Stenotrophomonas maltophilia
gtggatctgtttacgaagaatggtaagcctctgcaggtgcgcggggagtttgtctacagccgctcgggcgcagtggtcggccgcatcaagggcgagcgtgtttttggcacggatgggaagtatgtgggctccattgttaaggatcgcctgatttaccggtctactcatagcgcagcaatcagctcgccgttctcccgggcaagccgtgccggcatcgctagggcgaaccgggcaggctcggcctcttggggcgatgagccgaccattcccgattag

SEQ ID NO: 4396 - protein, 91 aa, Stenotrophomonas maltophilia
MDLFTKNGKPLQVRGEFVYSRSGAVVGRIKGERVFGTDGKYVGSIVKDRLIYRSTHSAAISSPFSRASRAGIARANRAGSASWGDEPTIPD

SEQ ID NO: 4397 - DNA, 1041 bp, Stenotrophomonas maltophilia
atgattcacattggagactgcctggacgtgatgcgcggcatggccgccggctcggtgcagacctgtgtcaccagcccgccctactacgggctgcgcgactatggcgtggccgggcagatcggcctggaagacacaccagccgagtatgtcgcgcgcctggtcgctgtcttccgcgaggtccgccgcctgctgcgcgatgacggcacactgtggctcaacctgggcgacagctatgccaccgacagcaaatggggcggatcgactggcggcaaggctgcggccgccttgcatgggctcggcggcggcggccgcaacaagacggctacaggtctgcctgacaagaacctgatcggcatcccatggcgcgtggcatttgcgctgcaggaagacggctggttcctgcgccaagacattatctgggccaagcctaatccgatgccggagagcgtgaccgatcgctgcacgaaggcccacgaatacctgttcctgctgtccaagtcgccccggtactacttcgaccagcgcgcaattcgcgagcaagctacccaaagcagcatggcgcggtgggcacaggatatcgaaggccaagcgggtagtcggcgggtcccaggaaagaccaatggcgccatgaaggccgttggcgggaggtcaagacgcgattccttcgcgaggaatggcgccgtcagcaatcacatgttgcctgggcagagtgctgcccagcatcgcaggaaccggggagccgacactttcgacacagatggccgcaacaagcgcagcgtctggaatgtggccacccgtccattccgtgatgctcacttcgcgacgttcccagagcagctcatcgagccctgcatccttgccggcgcgcctgctggcggcctggtgctggacccctttatgggggccggcacaaccgcggtggtcgccgagcgcctgggccggcaatgggtggggtgcgaattaaaccctgattacgccgcgatcgccgaggcgcgcatccgggtcgcacagcctggcctttcatttggagacgtcgcatga

SEQ ID NO: 4398 - protein, 346 aa, Stenotrophomonas maltophilia
MIHIGDCLDVMRGMAAGSVQTCVTSPPYYGLRDYGVAGQIGLEDTPAEYVARLVAVFREVRRLLRDDGTLWLNLGDSYATDSKWGGSTGGKAAAALHGLGGGGRNKTATGLPDKNLIGIPWRVAFALQEDGWFLRQDIIWAKPNPMPESVTDRCTKAHEYLFLLSKSPRYYFDQRAIREQATQSSMARWAQDIEGQAGSRRVPGKTNGAMKAVGGRSRRDSFARNGAVSNHMLPGQSAAQHRRNRGADTFDTDGRNKRSVWNVATRPFRDAHFATFPEQLIEPCILAGAPAGGLVLDPFMGAGTTAVVAERLGRQWVGCELNPDYAAIAEARIRVAQPGLSFGDVA

SEQ ID NO: 4399 - DNA, 2058 bp, Stenotrophomonas maltophilia
atggctgacggctcccacgctttcaacttccccatgccgcagcgctcccggctgcgccccggcgagatcgttgtggatctcttcgccggcggtggcggggcatcggaagggctcaagcaggccctcggcatcgatcccgccctggcctacaaccacgacgagctggccatcggcatgcacgccgccaaccaccctctgacccagcaccaccgcgaggatatctggcacgcagacccgcgcgtggacgtggccggccgctccatcggctggttccatgcctcgccggactgcacgcacttcagccaggccaagggcggccagccgcgcagccgcaagacccgcgcattgtcgtgggtggtgctgaagtgggttggccagctgctgcgtgctgatcgcctccacggcaccaacaccgctccgcgcatcatctccatggagaacgtctggcagatcctgacctggggtccgctggtggcgaagcgctgcaagaccaccggccgtgtcatcaagatggacggcaccgttgcagggcgcggcgagcgcgttcccgtggagaaccagcagctggtgccggacaagcgccacagcggccgcacctggcggcagttcgtggctgccctgcggtcgctgggctacgcagtcgagtggcgcaagctggtggccagcgactacggcgccggcaccagccgcgaacgcctgttcctgctcggccgccgcgacggtcaggccatcgtgtggccagaaccgagccacggctctgctccgggccagaagccgcgcgtgaccgccgccgactgcttggacttctcgattccctgcccatccatcttcacccgcgcccggccactggccgatgccaccatgcgccgcatcgccaagggcgtcatgcgccacgtcatcgagtcggccgatcccttcatcgtgccagtgacgcaccaaggcggcgaccgcgtccacgacgtgcgcgcccccctgcgcaccatcaccgccgccaaccgcggcgagctgatgctggcagcgccggagctggcgcctttcctcactgagcacgccaatgccagccgccagcgaacgatggcggccgacgagccgctgcccacggtctgcgctggggtgaagggtggccacttctctgtggtgacaccgatcctggccggcgtcggcggtcgggccgcccagtccgagccgcgcaccggcggcgaaccgctctacaccatgaccacgaaggccgacaccgcgctggtcgctccgacgctggtgcagaccggctacggcgagcgtgagggccaggctccgcgcgcgctcgacctgcagcagccgctggggacggtggttgccggcggcgtgaagcatgcagttgccgccgcttcgctggtcacgctgcgcaacaacatggttggcgccgagcccaccgagccgctgaccaccatcgccgcacagggtgggcatcacgcattggccaccgccttcatcgagcaggcgaacggcgggttttaccagggcgcaggcaacgacgcacgcgatccggtcagcaccatcaccgccagcggcagccagcagcgcctggtcaccgctcacctgatgaccaataccagcgcgcattgcggtgcaggcggcgcagaccccgttcccaccataaccagcgcgggcaaccagaccctcgttgaatgcaccctcagccccgaacaggaggccggtgcactgcgcgtcgccgccttcctggtgaagtactacggcaccggcgccaacgtcccctccctgctcgatcccgtggataccgtcactacccgcgaccgtctggcgctcgtcaccgtccacctcaagggcgtgccgtacgtgatcgtggatattggcctgcgcatgctcaagccgcatgagctgtaccgcgctcaggggttcccggccaactacatcatcgatcgcaccgccagcggcgcgccgctcagcaccagcgccgccgtgcgcatggtcggcaacagcgtcagcccgccgccgctgcgcgccttggccgaggcgaaccttgaccgggtgccggccgacatggcggtggcggcgtga

SEQ ID NO: 4400 - protein, 685 aa, Stenotrophomonas maltophilia
MADGSHAFNFPMPQRSRLRPGEIVVDLFAGGGGASEGLKQALGIDPALAYNHDELAIGMHAANHPLTQHHREDIWHADPRVDVAGRSIGWFHASPDCTHFSQAKGGQPRSRKTRALSWVVLKWVGQLLRADRLHGTNTAPRIISMENVWQILTWGPLVAKRCKTTGRVIKMDGTVAGRGERVPVENQQLVPDKRHSGRTWRQFVAALRSLGYAVEWRKLVASDYGAGTSRERLFLLGRRDGQAIVWPEPSHGSAPGQKPRVTAADCLDFSIPCPSIFTRARPLADATMRRIAKGVMRHVIESADPFIVPVTHQGGDRVHDVRAPLRTITAANRGELMLAAPELAPFLTEHANASRQRTMAADEPLPTVCAGVKGGHFSVVTPILAGVGGRAAQSEPRTGGEPLYTMTTKADTALVAPTLVQTGYGEREGQAPRALDLQQPLGTVVAGGVKHAVAAASLVTLRNNMVGAEPTEPLTTIAAQGGHHALATAFIEQANGGFYQGAGNDARDPVSTITASGSQQRLVTAHLMTNTSAHCGAGGADPVPTITSAGNQTLVECTLSPEQEAGALRVAAFLVKYYGTGANVPSLLDPVDTVTTRDRLALVTVHLKGVPYVIVDIGLRMLKPHELYRAQGFPANYIIDRTASGAPLSTSAAVRMVGNSVSPPPLRALAEANLDRVPADMAVAA

SEQ ID NO: 4401 - DNA, 423 bp, Stenotrophomonas maltophilia
atgaagaatggtaagcaggttgtacccgtttttccccgtccgatgctcggcaagatgctgaatgttgacggcgtttccttcacgttcccgaccgtaaagctgctcaatgcagcaaatttgcctgacgcatctttccccgaagcctggagcaaggcagctccggtagcgattgtcgttgacggtgtccgttgcttcactccaaccgaactcggccgccggcgtggcatctcagcccagaagttcaacaagctgctggaaggacgtggtctgcagacgaagcgcgatggccagtggtgcatgactccagctggcgaagccttcggggttctcctgcaggtccacaagaagcagctctccggcactgacgtgcagcagctgaagtggaaggagagcgttctgtctcagctggaccatctgacctga

SEQ ID NO: 4402 - protein, 140 aa, Stenotrophomonas maltophilia
MKNGKQVVPVFPRPMLGKMLNVDGVSFTFPTVKLLNAANLPDASFPEAWSKAAPVAIVVDGVRCFTPTELGRRRGISAQKFNKLLEGRGLQTKRDGQWCMTPAGEAFGVLLQVHKKQLSGTDVQQLKWKESVLSQLDHLT

SEQ ID NO: 4403 - DNA, 492 bp, Stenotrophomonas maltophilia
atgccgactaagcaactgctggcactgtacaaccgaatcgccgacaagcccgccggccccaagacattcgcgacccgggcgaagctcgtggcccggatcgagcaaatcgcggcagacaaggacattcatctgtcgtcgtccgggcagccgaagatgcccgaggtggccgctaagcgcgcagagccgaaggccgacgtcgccgagcggcccgatgcctccgataagaagtcccaaggcaagggtatcggcgctctcgcacgcgcgatcctgatggacccggcgggctattcgcacgcggtggtggccgaaatggtcaacgcgcagatcgacggtgcggcgactacggacaagtgcgtccgctggtatgccaacgagatgaggaaaagaggtgtaaacgttccgtctcgacgccgcgcgcgacggctcaccagccagcttaaggatagcgcagagcaagcacaggccatcgctttccttagcgcgagccgttga

SEQ ID NO: 4404 - protein, 163 aa, Stenotrophomonas maltophilia
MPTKQLLALYNRIADKPAGPKTFATRAKLVARIEQIAADKDIHLSSSGQPKMPEVAAKRAEPKADVAERPDASDKKSQGKGIGALARAILMDPAGYSHAVVAEMVNAQIDGAATTDKCVRWYANEMRKRGVNVPSRRRARRLTSQLKDSAEQAQAIAFLSASR

SEQ ID NO: 4405 - DNA, 867 bp, Stenotrophomonas maltophilia
atgagtgcaattgtggcccgcgacgtcagtgcgccccccgtcggtggatcgaaaaagaagccaaaaaagactgcccgtgtcaatgggggtgttgcaactaatgacttagttcactcggcgtacgttgactccaacgatgcggtattcccgcacatcctcgacatctatgtaccgcaaggagcgcgcatcgctgacgtcacgtacggccgaggcgtcttctggaagcgagttgacttggccaactatgaagttctgttcagcgacctgaagcgtgatggaatccctgaatttgtgcgaggcggagtggatgcgaggaagctcccgtatggggacgccactctggatgccctcatctttgacccaccgtacatgcataccccggggggcactgcacacaatggtcatcagaacttcgaggcgtactatgcgaacaatgccgagcagaacccgcaggtgattgaagaaatatggcgcgagacttcaggcaatccgcccaagtatcacgaagctgtcttggatttgtactatcgctccgcccgtgaggctcttcgcgttcttaagccggaggggatctacgtagtcaaatgtcaggacgaagtctgtgcgaacaagcagcgtctaacccatgtagagataacgaacgagctcgagcggcagggctttgtagtcgaagaccttttcgttgtaatacagacgatgaagccaggagtttctcgtttaaagaccaagcaatatcacgccagaaagaaccattcctacttcatggtttatcgaaagccaaaagtgaagaagcctcgaaagaccaagaacgccatcaaccttgagttagggcatcccactcgaagaaaaactcgccaaaaggtttaa

SEQ ID NO: 4406 - protein, 288 aa, Stenotrophomonas maltophilia
MSAIVARDVSAPPVGGSKKKPKKTARVNGGVATNDLVHSAYVDSNDAVFPHILDIYVPQGARIADVTYGRGVFWKRVDLANYEVLFSDLKRDGIPEFVRGGVDARKLPYGDATLDALIFDPPYMHTPGGTAHNGHQNFEAYYANNAEQNPQVIEEIWRETSGNPPKYHEAVLDLYYRSAREALRVLKPEGIYVVKCQDEVCANKQRLTHVEITNELERQGFVVEDLFVVIQTMKPGVSRLKTKQYHARKNHSYFMVYRKPKVKKPRKTKNAINLELGHPTRRKTRQKV

SEQ ID NO: 4407 - DNA, 807 bp, Citrobacter freundii
atggccgatcgcagtgccgagccgtggtatgccacggcggcctatctctacgttctgcatctggatagcccggcgctggcctgggagtacctgcgccgccatccagactatcggcacgactggctgcgccgtcgtcgccaaccggatactgccgggcattgggggctgcgcctgctggaagatcccgctctggatgcgcgggatgcgcacccggcctggttccccgatcacgatgccgtggtgcagctctacccggatgccgatccgccgcccgatgcgctgtgctttgatttctggaggctgccgggccacaaacacctgatccatgacggcaagcgcctggtgctggtggcgcactggcccggctgctgcctgcgtttcgtgctcgcgccaggcttggccgatggcatggcttacgcctatgccatccgggcctgcgccgcgccttgcgaacgctatgcagccctggcgagcgaattgaacaagatcgccgtagcagccggtgccgtacctgcggcgaccgtccggccacgtccgccgctgtccgcattgctggaactgcacacgcttcaggcgctggacgcgaccctggcgggtgcgtccttgcgggaggtggccgaagggctgtttggtttggatgccgttaccgccgactggcacgccgacagcgctctgcgcgcgcgcgtgcgacggctggtgcgccggggcgatgggctgatgcgcggcggttatcgccgtctggcacagcttccggttgtcacttcgcatgaggggggacgtttcgcaacccctgcagaacgtccctga

SEQ ID NO: 4408 - protein, 268 aa, Citrobacter freundii
MADRSAEPWYATAAYLYVLHLDSPALAWEYLRRHPDYRHDWLRRRRQPDTAGHWGLRLLEDPALDARDAHPAWFPDHDAVVQLYPDADPPPDALCFDFWRLPGHKHLIHDGKRLVLVAHWPGCCLRFVLAPGLADGMAYAYAIRACAAPCERYAALASELNKIAVAAGAVPAATVRPRPPLSALLELHTLQALDATLAGASLREVAEGLFGLDAVTADWHADSALRARVRRLVRRGDGLMRGGYRRLAQLPVVTSHEGGRFATPAERP

SEQ ID NO: 4409 - DNA, 348 bp, Citrobacter freundii
atgactccgctcatcaccgccgacgagcgcacgcgcctgctggccaacggccaggcccgcgctgccgggcaggacaccgacccgctgcccgtggcacgcctgttcacgccagatgcgcatgccacctggctgctggcttcgctcgacccagccgatggcgatactgcccacggcctgatcgacttggggattggcatgcctgcactgggaacggtgaagctgtccgacctggccgccatcgtcgggccgcgccagcagcccgtgatgcgggatcgctacttccagccggtgcggcggctgtcggagtacctgcggctggccgaagacaacggctcgatcaccgattga

SEQ ID NO: 4410 - protein, 115 aa, Citrobacter freundii
MTPLITADERTRLLANGQARAAGQDTDPLPVARLFTPDAHATWLLASLDPADGDTAHGLIDLGIGMPALGTVKLSDLAAIVGPRQQPVMRDRYFQPVRRLSEYLRLAEDNGSITD

SEQ ID NO: 4411 - DNA, 333 bp, Burkholderia cenocepacia
gtgaagaactggatatttctggctgtttcaatctttggcgaggtcatcgcaacttccgcactgaagtctagccatggattcactaggttagttccttccgttgtagttgtggctggctacgggcttgcgttctatttcttgtctctcgcgctcaagtccattccggtcggtattgcttacgctgtatgggctgggcttggcatcgtgcttgtggcagctattgcttggattttccatggccaaaaactagacttctgggcgttcattggcatgggacttatcgtcagtggcgtcgccgttctaaacctgctatccaaggtcagcgcacattga

SEQ ID NO: 4412 - protein, 110 aa, Burkholderia cenocepacia
MKNWIFLAVSIFGEVIATSALKSSHGFTRLVPSVVVVAGYGLAFYFLSLALKSIPVGIAYAVWAGLGIVLVAAIAWIFHGQKLDFWAFIGMGLIVSGVAVLNLLSKVSAH

SEQ ID NO: 4413 - DNA, 906 bp, Citrobacter freundii
atggcagtcacgaaagagcagattttttccgccgccgacgacttggccgccgccggccagaagcccacgcttgaggcaatccggcagatcaccggcgggagctacacaaccatttccccggccctgaacgagtggaaggcccgccaggccaccgccgccgcgcccctgcgcgagcctgcgccccaggccgtcgccgaccgcctggccgaactgggcagcgacctatggacgatcgccctcgacctggcgaacgcccgccttgccgttgagcgggaagggctggagaaggcccgcgccgagctagaagccgaccgcaacgaggcaaccgagctggccgacaaactggccggcgacgtggaagccctgcaatcccgcttggcgtccatcgaggccgccgaagcggccgcacgcggcgaagccgacgagctgcgcggccaactggccaccgcccaggaacaggcgcacacggcagaggcacgcgcccaagagatcgagcgccgggccggcgagctgcgcacggaactggacagggcgcaccaggacgccgaccaggcacgcggggcactggctgaacagcagaaggccagccaggcggccgccgctcaactcgaccaggtgcgcgccgaactggtgaaggtacaggccaaggccgaggccagcgaggaagctcaccaggaacagcgcaaggccacagcgggcgaggcacatcgcatggccgaacgcctcaccgccgcccaggccgagcgcgaccaggccacgaaggcggccgcacaggcccgcgaggaagccgcccgcctggccgggcagctcgacacgctcaaggaacaatcggccgcgctgctggctcgcatcacgccgccggcggccgaggcgaagccgaccaggaaaaagcccggcggcgagtga

SEQ ID NO: 4414 - protein, 301 aa, Citrobacter freundii
MAVTKEQIFSAADDLAAAGQKPTLEAIRQITGGSYTTISPALNEWKARQATAAAPLREPAPQAVADRLAELGSDLWTIALDLANARLAVEREGLEKARAELEADRNEATELADKLAGDVEALQSRLASIEAAEAAARGEADELRGQLATAQEQAHTAEARAQEIERRAGELRTELDRAHQDADQARGALAEQQKASQAAAAQLDQVRAELVKVQAKAEASEEAHQEQRKATAGEAHRMAERLTAAQAERDQATKAAAQAREEAARLAGQLDTLKEQSAALLARITPPAAEAKPTRKKPGGE

SEQ ID NO: 4415 - DNA, 336 bp, Citrobacter koseri
atggggctggtaatcaaagccgcgctcggtgcgctggtagtgctgttgattggtgttttagcaaaaacgaaaaattattatatcgccgggctgattccacttttcccgacctttgcgcttatcgcgcattatattgttgccagcgaacgcggcattgaagccttacgcgcaaccatcatttttagtatgtggtcgattattccctattttgtttacctggtgtcgctgtggtatttcaccggaatgatgcgcttgcccgccgcttttgttggttctgttgcgtgttgggggataagcgcatgggtgttgattatatgctggataaagctgcattaa

SEQ ID NO: 4416 - protein, 111 aa, Citrobacter koseri
MGLVIKAALGALVVLLIGVLAKTKNYYIAGLIPLFPTFALIAHYIVASERGIEALRATIIFSMWSIIPYFVYLVSLWYFTGMMRLPAAFVGSVACWGISAWVLIICWIKLH

SEQ ID NO: 4417 - DNA, 729 bp, Acinetobacter pittii
atgaacactatcgtatttgtggaagatgatgcggaagtcggttcactgattgccgcgtacctggcaaaacatgatatgcaggttaccgtagagccgcgcggcgaccaggccgaagaaaccattttgcgagaaaatccggatttggtgttactcgacatcatgctaccaggcaaggacggcatgaccatttgtcgtgatttacgcgcaaagtggtctggaccgattgttcttctaacctctctcgatagcgatatgaaccacatcctggcactggaaatgggtgcctgcgactatattctcaaaacgatgccccctgctgttttgctagcgcgtttacgtttgcatttgcgtcagaatgagcaagccacactgaccaaaggtcttcaggaaacgtctctgacgtctctgactccctacaaagccctgcatttcggcacgttgaccatcgatcccatcaaccgcgtagtcaccctggctaacactgaaatctcgctctcgacagctgatttcgaattattgtgggaattagctacccatgccgggcaaatcatggaccgcgatgcattgctgaaaaatttacgcggcgtcagttatgacggactggatcgtaacgtggacgtggctatttcgcggttaagaaaaaaactgctcgataacgccgcagaaccttatcgcattaaaactgtgcgtaacaaaggctatctttttgcgcctcatgcatgggaataa

SEQ ID NO: 4418 - protein, 242 aa, Acinetobacter pittii
MNTIVFVEDDAEVGSLIAAYLAKHDMQVTVEPRGDQAEETILRENPDLVLLDIMLPGKDGMTICRDLRAKWSGPIVLLTSLDSDMNHILALEMGACDYILKTMPPAVLLARLRLHLRQNEQATLTKGLQETSLTSLTPYKALHFGTLTIDPINRVVTLANTEISLSTADFELLWELATHAGQIMDRDALLKNLRGVSYDGLDRNVDVAISRLRKKLLDNAAEPYRIKTVRNKGYLFAPHAWE

SEQ ID NO: 4419 - DNA, 1008 bp, Citrobacter koseri
gtgaaaaagcaatggattgttggcacggcactgcttatgttgatgactggtaatgcctgggcagatggcgaaccgccaactgaaaatatcttaaaagatcaattcaaaaagcagtatcacggcattctcaagcttgatgctatcaccttaaaaaatcttgatgctaagggtaatcaggccacctggtcagcggaaggcgatgtctcttccagtgacgatctctatacctgggtcggtcagttggcagattacgaactgctcgaacagacctggacgaaagataaaccggtaaaattctcggcgatgttaaccagtaaaggaacgcccgcgtctggctggtcggtgaacttttactcttttcaggcggcagccagcgatcgtgggcgggtggtcgacgatatcaaaacgaataataaatatctgatcgtgaatagcgaagatttcaattatcgctttagtcagcttgaatctgcgttgaatacccagaagaactcgattcctgcgctggaaaaggaagtgaaagcgcttgataagcaaatggtggcggcgcagaaagcagcggatgcatattggggaaaagatgcaaacggtaagcaaatgacccgcgaagaagcctttaaaaaaattcaccaacagcgtgatgagtttaataaacagaacgatagcgaggcgttcgcggttaaatatgacaaagaggtttatcaaccggcgattgcggcatgtcataaacagagtgaagagtgttatgaagtgccgattcagcagaaacgagatttcgatatcaacgaacaacggcgacagacttttctgcaatcacaaaaactcagccgtaaattgcaggatgactgggtaacgctcgaaaaagggcaatatccgttaacgatgaaagtttcagaaataaacagtaaaaaagtcgcgattttgatgaaaattgacgatatcaaccaagctaatgaacgctggaaaaaagataccgaacaactgcggcgcaatggggtgattaagtaa

SEQ ID NO: 4420 - protein, 335 aa, Citrobacter koseri
MKKQWIVGTALLMLMTGNAWADGEPPTENILKDQFKKQYHGILKLDAITLKNLDAKGNQATWSAEGDVSSSDDLYTWVGQLADYELLEQTWTKDKPVKFSAMLTSKGTPASGWSVNFYSFQAAASDRGRVVDDIKTNNKYLIVNSEDFNYRFSQLESALNTQKNSIPALEKEVKALDKQMVAAQKAADAYWGKDANGKQMTREEAFKKIHQQRDEFNKQNDSEAFAVKYDKEVYQPAIAACHKQSEECYEVPIQQKRDFDINEQRRQTFLQSQKLSRKLQDDWVTLEKGQYPLTMKVSEINSKKVAILMKIDDINQANERWKKDTEQLRRNGVIK

SEQ ID NO: 4421 - DNA, 1110 bp, Klebsiella michiganensis
atgaaacggaatgcgaaaactatcatcgcagggatgattgcactggcaatttcacacaccgctatggctgacgatattaaagtcgccgttgtcggcgcgatgtccggcccgattgcccagtggggcgatatggaatttaacggcgcgcgtcaggcgattaaagacattaatgccaaagggggaattaagggcgacaagctggttggcgtggaatatgacgacgcctgcgacccgaaacaagccgttgcggtcgccaacaaaatcgttaatgacggcattaaatacgttattggtcatctgtgttcttcttctacccaacctgcatcagatatctacgaagacgaaggtattctgatgatctcaccgggagcgaccaacccggagctgacccaacgcggttatcaacacattatgcgtactgccgggctggactcttcccaggggccaacggcggcaaaatacattcttgagacggtgaagccccagcgcatcgccatcattcacgacaaacaacagtatggcgaagggctggcgcgttcggtgcaggacgggctgaaagcggctaacgccaacgtcgtcttcttcgacggtattaccgccggggagaaagatttctccgcgctgatcgcccgcctgaaaaaagaaaacatcgacttcgtttactacggcggttactacccggaaatggggcagatgctgcgccaggcccgttccgttggcctgaaaactcagtttatggggccggaaggtgtgggtaacgcatcattgtcgaatattgccggtgatgctgccgaaggcatgttggtcactatgccaaaacgctatgaccaggatccggcaaaccagggcatcgttgatgcgctgaaagcagacaagaaagatccgtccgggccttatgtctggatcacctacgcggcggtgcaatctctggcgactgcccttgagcgtactggcagcgatgagccgctggcgctggtgaaagatttaaaagctaacggtgcaaacaccgtgattgggccgctgaactgggatgaaaaaggcgatcttaagggatttgattttggtgtcttccagtggcacgccgacggttcatccacggcagccaagtga

SEQ ID NO: 4422 - protein, 369 aa, Klebsiella michiganensis
MKRNAKTIIAGMIALAISHTAMADDIKVAVVGAMSGPIAQWGDMEFNGARQAIKDINAKGGIKGDKLVGVEYDDACDPKQAVAVANKIVNDGIKYVIGHLCSSSTQPASDIYEDEGILMISPGATNPELTQRGYQHIMRTAGLDSSQGPTAAKYILETVKPQRIAIIHDKQQYGEGLARSVQDGLKAANANVVFFDGITAGEKDFSALIARLKKENIDFVYYGGYYPEMGQMLRQARSVGLKTQFMGPEGVGNASLSNIAGDAAEGMLVTMPKRYDQDPANQGIVDALKADKKDPSGPYVWITYAAVQSLATALERTGSDEPLALVKDLKANGANTVIGPLNWDEKGDLKGFDFGVFQWHADGSSTAAK

SEQ ID NO: 4423 - DNA, 927 bp, Acinetobacter pittii
atgtctgagcagtttttgtatttcttgcagcagatgtttaacggcgtcacgctgggcagtacctacgcgctgatagccatcggctacaccatggtttacggcattatcggcatgatcaacttcgcccacggcgaggtttatatgattggcagctacgtctcatttatgatcatcgccgcgctgatgatgatgggcattgataccggctggctgctggtggcggcgggattcgtcggcgcaatcgtcattgccagcgcctacggctggagtatcgaacgggtagcctatcgcccggtgcgtaactctaagcgcctgattgcgctcatctcggcaatcggcatgtccatcttcctgcaaaactacgttagcctgactgaaggttcgcgtgacgtggcgctgcccagtctgtttaacggtcagtgggtggtggggcatagcgaaaacttctctgcctctattaccaccatgcaggcagtgatctggattgttactttcctcgccatgctggcgctgacgattttcattcgttattcccgtatggggcgcgcctgccgtgcctgcgcggaagatctgaaaatggcgagcctgcttggcatcaacaccgaccgggtgattgctttgacctttgttattggcgcggcgatggcggcagtggctggcgtactgctcggtcagttctacggcgtcattaacccctatatcggctttatggccgggatgaaagcctttaccgctgcggtgctcggtgggattggcagcattccaggggcgatgattggtgggctgatcctggggattgcggaggcgctctcttctgcctatctgagtacggaatataaggatgtggtttcatttgccctgctgattctggtgctgctggtgatgccgaccggtattctgggtcgcccggaggtagagaaagtatga

SEQ ID NO: 4424 - protein, 308 aa, Acinetobacter pittii
MSEQFLYFLQQMFNGVTLGSTYALIAIGYTMVYGIIGMINFAHGEVYMIGSYVSFMIIAALMMMGIDTGWLLVAAGFVGAIVIASAYGWSIERVAYRPVRNSKRLIALISAIGMSIFLQNYVSLTEGSRDVALPSLFNGQWVVGHSENFSASITTMQAVIWIVTFLAMLALTIFIRYSRMGRACRACAEDLKMASLLGINTDRVIALTFVIGAAMAAVAGVLLGQFYGVINPYIGFMAGMKAFTAAVLGGIGSIPGAMIGGLILGIAEALSSAYLSTEYKDVVSFALLILVLLVMPTGILGRPEVEKV

SEQ ID NO: 4425 - DNA, 1317 bp, Citrobacter portucalensis
atgaaaccgttacattatacagcttcagcactggcgctcggactggcgttaatggggaatgcacaggcagtgacgaccattccgttctggcattctatggaaggggaactgggtaaagaggtggattctctggcccaacgttttaacgccgaaaatccggattacaaaattgtaccgacctataaaggcaactacgaacagaatttaagcgcggggattgccgcatttcgtaccggcaacgctccggctattttgcaggtttatgaagttggcaccgccaccatgatggcatcgaaagccattaaaccggtatatgacgtgtttaaagaggcggggattcaattcgatgagtcgcagtttgtgccgacggtttccggttactactccgacagcaaaacgggccacttactctcccagccattcaacagctcgactcccgttctctattacaacaaagacgccttcaagaaagcggggttagacccggaacagccgccgaaaacctggcaggatctggcggactatgccgcgaaactgaaagcctccggcatgaagtgcggctacgccagcggctggcagggctggatccaactggaaaactttagcgcttggaacggtctgccgtttgccagcaaaaacaacggctttgacggcacagatgcggtgctggagttcaacaagccggagcaggtgaaacacatcgccatgctcgaggagatgaacaagaagggcgacttcagctacgtcggtcgtaaggatgaatccaccgagaagttctataacggtgattgcgcgatgaccaccgcctcttccggttctcttgccaacattcgcgagtacgccaaatttaactacggcgtaggcatgatgccttacgacggcgatgcgaaagatgcgccacaaaacgccattatcggcggagccagcctgtgggtgatgcagggtaaagataaagaaacgtataccggtgtggcgaagttcctcgatttcctcgcgaagccagaaaacgctgccgagtggcatcagaaaaccggttatctgccaatcaccaaagcagcgtatgacctgacccgtgagcagggcttttatgagaaaaacccaggggcggataccgcgacgcgtcagatgctgaataagccgccgttgccgttcaccaaagggctgcgtctgggcaacatgccgcagatccgcgtgattgtggatgaagagctggagagcgtgtggaccggtaagaagacaccacagcaggcactggataccgccgttgagcgtgggaaccagttactgcgccgctttgagaaatcgacgaagtcttaa

SEQ ID NO: 4426 - protein, 438 aa, Citrobacter portucalensis
MKPLHYTASALALGLALMGNAQAVTTIPFWHSMEGELGKEVDSLAQRFNAENPDYKIVPTYKGNYEQNLSAGIAAFRTGNAPAILQVYEVGTATMMASKAIKPVYDVFKEAGIQFDESQFVPTVSGYYSDSKTGHLLSQPFNSSTPVLYYNKDAFKKAGLDPEQPPKTWQDLADYAAKLKASGMKCGYASGWQGWIQLENFSAWNGLPFASKNNGFDGTDAVLEFNKPEQVKHIAMLEEMNKKGDFSYVGRKDESTEKFYNGDCAMTTASSGSLANIREYAKFNYGVGMMPYDGDAKDAPQNAIIGGASLWVMQGKDKETYTGVAKFLDFLAKPENAAEWHQKTGYLPITKAAYDLTREQGFYEKNPGADTATRQMLNKPPLPFTKGLRLGNMPQIRVIVDEELESVWTGKKTPQQALDTAVERGNQLLRRFEKSTKS

SEQ ID NO: 4427 - DNA, 846 bp, Klebsiella variicola
atgattgagaaccgtccgtggctgacgatattcagccataccatgctgatcctcgggatcgcggtgatcctcttcccgctgtacgtggcgtttgtcgcggcgacgctggataaacaggccgtctatgccgcgccgatgacgctcatccccggcacacatctgctggaaaatatccacaacatctgggttaacggggtaggtacgaatagcgcgccgttctggcggatgttgcttaacagctttgtgatggcgttcagcattacgctcggcaaaattaccgtctcgatgctctcggcatttgccattgtctggtttcgttttccgctacgtaacctcttcttctggatgatttttatcaccctgatgctgccggttgaagtacgtatcttcccgacggtggaagtcatcgccaacctgaagatgctcgacagctacgccggtttaacgctgccgctgatggcctcggcgaccgccacgtttctgtttcgccagttctttatgacgctgccggatgaactggtggaagcggcgcggatcgacggcgcatcgccaatgcgcttcttttgcgacatcgtttttccgctctccaaaactaatctggcggcgctgtttgtgatcacctttatttacggctggaaccagtatttgtggccgttgttgattattaccgacgtggatctcggcaccaccgtggcagggatcaaagggatgatcgccactggcgaaggcaccacggaatggaactcagtgatggcggcgatgttgttaaccctgatcccaccagtagtgattgttttagtgatgcagcgtgccttcgtgcgcggcctggtcgatagtgagaaataa

SEQ ID NO: 4428 - protein, 281 aa, Klebsiella variicola
MIENRPWLTIFSHTMLILGIAVILFPLYVAFVAATLDKQAVYAAPMTLIPGTHLLENIHNIWVNGVGTNSAPFWRMLLNSFVMAFSITLGKITVSMLSAFAIVWFRFPLRNLFFWMIFITLMLPVEVRIFPTVEVIANLKMLDSYAGLTLPLMASATATFLFRQFFMTLPDELVEAARIDGASPMRFFCDIVFPLSKTNLAALFVITFIYGWNQYLWPLLIITDVDLGTTVAGIKGMIATGEGTTEWNSVMAAMLLTLIPPVVIVLVMQRAFVRGLVDSEK

SEQ ID NO: 4429 - DNA, 828 bp, Citrobacter koseri
atgagtgtgctcattaatgaaaaactgcattcgcggcggctgaaatggcgctggccgctctcgcgtcaggtgaccttaagcattggcacgttagcggttttactcactgtatggtggacggtggcggcgctgcaactgattagcccgctgtttttgccgccgccgcaacaagtactggcaaaactgctcaccattgccggaccgcagggatttatggacgccacgctgtggcagcatctggcagccagcctgacgcgcattgtgctggcgctactcgcggcggtggtgatcggtattccggtcgggatcgccatggggctaagcccgacggtgcgcggcattctggatccggtaatcgaactttatcgtccggtgtcgccgctggcttatttgccgctgatggtgatctggtttggtattggtgaaacctcgaagatcttactgatctatttagcgatttttgcaccggtggcgatgtcggcgctggcgggggtgaaaagcgcgcagcaggttcgcattcgtgccgcccagtcgctgggtgccagccgtgcgcaggtgctgtggtttgtcattttgcccggcgcgctgccggaaatcctcaccggattacgcattggtctgggtgtgggctggtctacgctggtagcggcggagctgattgccgcgacgcgcggtttaggatttatggttcagtcagcgggtgaatttctcgcgactgacgtggtgctggcgggaatcgcggtgattgcgattatcgcctttcttttagaactgggtttgcgcgcgttacagcgccgtctgacgccctggcatggagaagtacaatga

SEQ ID NO: 4430 - protein, 275 aa, Citrobacter koseri
MSVLINEKLHSRRLKWRWPLSRQVTLSIGTLAVLLTVWWTVAALQLISPLFLPPPQQVLAKLLTIAGPQGFMDATLWQHLAASLTRIVLALLAAVVIGIPVGIAMGLSPTVRGILDPVIELYRPVSPLAYLPLMVIWFGIGETSKILLIYLAIFAPVAMSALAGVKSAQQVRIRAAQSLGASRAQVLWFVILPGALPEILTGLRIGLGVGWSTLVAAELIAATRGLGFMVQSAGEFLATDVVLAGIAVIAIIAFLLELGLRALQRRLTPWHGEVQ

SEQ ID NO: 4431 - DNA, 768 bp, Citrobacter koseri
atgctgcaaatctctcatctctatgccgattatggcggcaaaccggcactggaagatatcaacctgacgctggaaagcggcgagctactggtggtgctggggccgtccggctgcggtaaaaccacgttgctgaatctgattgccggttttgtgccttatcagcatggcagcattcaactggcgggtaagcgtattgagggaccgggagcagagcgcggggtggtttttcagaatgaagggctgctaccgtggcgcaatgtacaggacaacgtggcgttcggcctgcaattggcaggtatagagaaaatacagcgactggaaatcgcgcaccaggtgctgaaaaaagtggggctggaaggcgcagaaaaacgctatatctggcagctttccggtggtcaacgtcagcgggtggggattgcccgcgcgctggcggcgaatccccagctgttattactcgacgaaccgtttggtgcgctggacgccttcacccgcgaccagatgcaaactctgctgctgaaactctggcaggagacgggcaagcaggtgctgttgattacccacgatatagaagaagcggtgtttatggcgactgaactggttctgctttcatccggccctggccgtgtgctggagcggctgccgctcaactttgctcgccgctttgttgcgggagagtcgagccgcagcatcaagtccgatccacaattcatcgccatgcgcgaatatgttttaagccgcgtatttgagcaacgggaggcgttctcatga

SEQ ID NO: 4432 - protein, 255 aa, Citrobacter koseri
MLQISHLYADYGGKPALEDINLTLESGELLVVLGPSGCGKTTLLNLIAGFVPYQHGSIQLAGKRIEGPGAERGVVFQNEGLLPWRNVQDNVAFGLQLAGIEKIQRLEIAHQVLKKVGLEGAEKRYIWQLSGGQRQRVGIARALAANPQLLLLDEPFGALDAFTRDQMQTLLLKLWQETGKQVLLITHDIEEAVFMATELVLLSSGPGRVLERLPLNFARRFVAGESSRSIKSDPQFIAMREYVLSRVFEQREAFS

SEQ ID NO: 4433 - DNA, 891 bp, Citrobacter koseri
atgaccaaagtaggcttacgcattgatgtcgatacctttcgtggcacccgtgaaggcgtgccgcgtctgctggaaatcttgagtaagcataatattcaggccagcatttttttcagcgtcggcccggacaatatgggccgccatctctggcgactggtgaagccacagtttttgtggaagatgctgcgctcaaacgcggcatcgctttatggctgggatattttactggcaggtacggcctggccaggtaaagagattggtcatgccaatgccgatatcattcgtgaagcggctaaacatcacgaagtcggcctgcacgcctgggatcaccatgcctggcaagcccgtagcggtaactgggatcggcaaacaatgatcgacgatattgcacgcggtcttcgcactctggaagagattatcggtcaaccggtaacctgttctgccgctgcgggctggcgtgccgaccagaaggtgatcgaagcaaaagaagcgttccatttgcgctacaacagcgattgtcgtggggccatgccgttccgtccattgctcgaatcaggaaaccctggcactgcgcaaattccggtgaccttacccacctgggatgaagtgattggtcgggatgtgaaaacagaagattttaacggttggttactcaaccgcatcctgcgagataaaggcacgccggtttataccattcatgcagaagttgaaggctgcgcttatcagcataattttgtggatctcctcaaacgcgcagctcaggaaggcgtgacattttgccctttaagcgaactgttatcagagacgttgccgctcggacaagttgttcgcggaaatattgccggacgtgaaggctggctgggttgccaacaaattgcgggtagtcgctga

SEQ ID NO: 4434 - protein, 296 aa, Citrobacter koseri
MTKVGLRIDVDTFRGTREGVPRLLEILSKHNIQASIFFSVGPDNMGRHLWRLVKPQFLWKMLRSNAASLYGWDILLAGTAWPGKEIGHANADIIREAAKHHEVGLHAWDHHAWQARSGNWDRQTMIDDIARGLRTLEEIIGQPVTCSAAAGWRADQKVIEAKEAFHLRYNSDCRGAMPFRPLLESGNPGTAQIPVTLPTWDEVIGRDVKTEDFNGWLLNRILRDKGTPVYTIHAEVEGCAYQHNFVDLLKRAAQEGVTFCPLSELLSETLPLGQVVRGNIAGREGWLGCQQIAGSR

SEQ ID NO: 4435 - DNA, 147 bp, Citrobacter koseri
gtgactatcgatatggaaaaagtggattttaaagccctgcagggtatttcaggaatcaacgtttctgctgaagataccaaaaaaggtatcactatggcgcaaatggaactggtgatgaaagccgctggttttaaagaagtgaaataa

SEQ ID NO: 4436 - protein, 48 aa, Citrobacter koseri
MTIDMEKVDFKALQGISGINVSAEDTKKGITMAQMELVMKAAGFKEVK

SEQ ID NO: 4437 - DNA, 147 bp, Citrobacter koseri
atgaggcactggagcagattcagtgcagaggtgacctgctttatcaaacttaattgtgacaaaatggcgattgagaaggtgcaattgacttatccggattcggtcgtggcgaggtggtgcccctgcattctgctaaccgggttatga

SEQ ID NO: 4438 - protein, 48 aa, Citrobacter koseri
MRHWSRFSAEVTCFIKLNCDKMAIEKVQLTYPDSVVARWCPCILLTGL

SEQ ID NO: 4439 - DNA, 2091 bp, Citrobacter koseri
atgcgaataaccactctggcttccgtagtcattccctgtctcggattttcagccagcagcatagctactgcagaggatgtgatgattgtctcggcatccggctatgagaaaaagctgactaacgcagccgccagtgtttctgtgattagccaggaggaattgcagtccagccagtaccacgatctggcggaggctctgagatcagtagagggtgtggatgttgaaagtggtacgggtaaaaccggtgggctggaaatcagcatccgaggaatgccagccagttacacgctgatactgattgatggtgttcgtcagggcggaagcagtgacgtgactcccaacggtttttctgccatgaataccgggttcatgccccctctggccgccattgagcgtattgaggttatcagggggccgatgtccacactgtatggctctgatgcgatgggcggtgtggtgaatatcattaccagaaagaatgcagacaaatggctctcttccgtcaatgcagggctgaatctgcaggaaagcaacaaatggggtaacagcagccagtttaatttctggagcagtggcccccttgtggatgattctgtcagcctgcaggtacgcggtagcacacaacagcgtcagggctcatcggtcacatcactgagcgatacagcagccacgcgtattccttatcccacggagtcacagaattataatcttggtgcacgtcttgactggaaggcgtcggagcaggatgtgctctggtttgatatggataccacccggcagcgttatgataaccgggatgggcaactggggagtctgacggggggatatgaccggaccctgcgctatgagcggaacaaaatttcagctggctatgatcatactttcaccttcggaacatggaaatcgtatctgaactggaacgagacagaaaataaaggtcgtgagctcgtacgcagtgtactgaagcgcgacaaatgggggcttgccggtcagccgcgggagcttaaggaatcgaaccttatcctgaattcattactgcttacccctctgggagaatctcatctggttacggtggggggcgagtttcagagctcgtccatgaaagacggagttgtccttgccagcacaggtgaaactttccggcagaaaagctggtcggtatttgctgaggatgagtggcatctcacggatgcacttgcgctgactgcgggcagccgctatgaacatcatgagcaattcgggggacacttcagtccgcgtgcatatctggtctgggatgtggcagatgcctggacgctgaaaggcggtgtgaccacgggatataaggcacccagaatggggcagctacataaagggattagtggtgtgtccgggcagggaaaaacaaatctacttggtaaccccgacctgaagccggaagagagcgtcagttatgaggctggggtgtattacgataaccccgccggtctgaatgccaatgtcacaggttttatgactgacttctccaacaagattgtctcttattccataaatgataacaccaatagctatgtaaacagcggaaaggcccggttgcacggtgtggaatttgccggcacattgccgctgtggtcagaggatgtcacgctgtcactgaattacacctggacccgaagtgaacaacgtgatggtgataacaaaggtgcgccgctgagttatacccctgaacacatggtgaatgcgaaactgaactggcagatcaccgaagaggtggcatcatggctgggtgcccgttatcgcgggaaaacaccacgtttcacccagaattattcgtcactgagcgctgtacagaagaaagtgtatgatgagaaaggagaatacctgaaagcctggacggtggtggatgcaggtctgtcgtggaagatgacggatgccctgacgctgaatgctgcggtgaataacctgctcaacaaggattacagtgacgtgagcctgtacagtgccggtaagagtacgctgtatgccggtgattacttccagacgggatcatcaacaacaggatatgtgatacctgagcgaaattactggatgtcgctgaactatcagttctga

SEQ ID NO: 4440 - protein, 696 aa, Citrobacter koseri
MRITTLASVVIPCLGFSASSIATAEDVMIVSASGYEKKLTNAAASVSVISQEELQSSQYHDLAEALRSVEGVDVESGTGKTGGLEISIRGMPASYTLILIDGVRQGGSSDVTPNGFSAMNTGFMPPLAAIERIEVIRGPMSTLYGSDAMGGVVNIITRKNADKWLSSVNAGLNLQESNKWGNSSQFNFWSSGPLVDDSVSLQVRGSTQQRQGSSVTSLSDTAATRIPYPTESQNYNLGARLDWKASEQDVLWFDMDTTRQRYDNRDGQLGSLTGGYDRTLRYERNKISAGYDHTFTFGTWKSYLNWNETENKGRELVRSVLKRDKWGLAGQPRELKESNLILNSLLLTPLGESHLVTVGGEFQSSSMKDGVVLASTGETFRQKSWSVFAEDEWHLTDALALTAGSRYEHHEQFGGHFSPRAYLVWDVADAWTLKGGVTTGYKAPRMGQLHKGISGVSGQGKTNLLGNPDLKPEESVSYEAGVYYDNPAGLNANVTGFMTDFSNKIVSYSINDNTNSYVNSGKARLHGVEFAGTLPLWSEDVTLSLNYTWTRSEQRDGDNKGAPLSYTPEHMVNAKLNWQITEEVASWLGARYRGKTPRFTQNYSSLSAVQKKVYDEKGEYLKAWTVVDAGLSWKMTDALTLNAAVNNLLNKDYSDVSLYSAGKSTLYAGDYFQTGSSTTGYVIPERNYWMSLNYQF

SEQ ID NO: 4441 - DNA, 522 bp, Citrobacter koseri
ttgcagtggcttaataaaatgaaaaaaataattttctctaacgagagtgcagtctatgatgaacttatgattcatttcccatgccagccattacctcatatttcaaatgatattataggactggaggaactggatattgtatataattttttccaaaagaaacaatggaatgaaatagccaataatttaaaaataaaggataactcttatgctttagagttaggaattacattcctccctgagaaagtattctgctattacatccctctgtatatttatgtctcgttgtttaataagaatgatttttgggtttttgaatccgattttattcaacaatatttatgtcctgagtatcgggattacgatgattttttgaattttgtttttaatttttcagatatacaactatctattattgcacagtttatgtcttatgaatcagacgctggattcttttatgcaagtaaagcttgtatggatttttgggaagattattcacctctattacataagaaaatttaa

SEQ ID NO: 4442 - protein, 173 aa, Citrobacter koseri
MQWLNKMKKIIFSNESAVYDELMIHFPCQPLPHISNDIIGLEELDIVYNFFQKKQWNEIANNLKIKDNSYALELGITFLPEKVFCYYIPLYIYVSLFNKNDFWVFESDFIQQYLCPEYRDYDDFLNFVFNFSDIQLSIIAQFMSYESDAGFFYASKACMDFWEDYSPLLHKKI

SEQ ID NO: 4443 - DNA, 894 bp, Citrobacter freundii
atgactagtctaaaaactagtattaaggctatcacttatttaagtgatactggttgtctggagattcagggggccagtctagcaagtcgttttggttatgctgcaaaccagatacgccgtgaccgtccgctgacacatgaagaactgatacgccatgtacccagtatttttggggaagaccggcacacctcccgcagtgaacggtatgcgtacattcccaccattaccgtcctggaaaatctgcagcgggaaggctttcagccgttcttcgcctgccagacccgtgtgcgcgacccgggccgccggggatacacaaaacacatgctgcgtctgcggcgggccggagagataaacggagaacatgtccctgaaattattctgctcaactctcatgacggtacctccagctaccagatgctgccgggttacttcaggttcgtctgccagaacgggtgcgtctgtggccagtctctgggggaagtgcgtgttccacaccggggaaatgtagtggagaaagttatcgaaggggcttacgaggtggtgggcgtgtttgaccggatagaggagaagcgtgatgccatgcagtcgctggtcctgccgccaccggcacgccaggcgctggcacaggcggcactgacttaccgttatggtgacgaacatcagcccgtcaccaccgccgacattctgacgccgcgacgccgggaggattacggtaaggacctgtggagcgcatatcagaccatccaggagaatatgctgaaaggcgggatttccggtcgcagtgcaaaaggaaaacgtatccatacccgggccattcacagcattgataccgacattaagctcaatcgcgcattgtgggtgatggcagaaacgatgctggagagcctgcgctga

SEQ ID NO: 4444 - protein, 297 aa, Citrobacter freundii
MTSLKTSIKAITYLSDTGCLEIQGASLASRFGYAANQIRRDRPLTHEELIRHVPSIFGEDRHTSRSERYAYIPTITVLENLQREGFQPFFACQTRVRDPGRRGYTKHMLRLRRAGEINGEHVPEIILLNSHDGTSSYQMLPGYFRFVCQNGCVCGQSLGEVRVPHRGNVVEKVIEGAYEVVGVFDRIEEKRDAMQSLVLPPPARQALAQAALTYRYGDEHQPVTTADILTPRRREDYGKDLWSAYQTIQENMLKGGISGRSAKGKRIHTRAIHSIDTDIKLNRALWVMAETMLESLR

SEQ ID NO: 4445 - DNA, 369 bp, Citrobacter freundii
gtgtcagacacactccccgggacaacacttcccgacgacaatcacgaccgcccctggtgggggctgccctgcaccgtgacgccctgtttcggggcacgtctggtgcaggagggtaaccggttgcattaccttgccgaccgcgccggtatcagaggcctgttcagcgatgcagatgcgtaccacctggaccaggcctttccgctgctgatgaaacaactggaactcatgctcaccagcggtgaactgaatccccgccatcagcataccgtcacgctgtatgcaaaagggctgacctgcaaagccgataccctcagcagttgtggttacgtttatctggctgtttatccgacgcccgaaatgaaaaattaa

SEQ ID NO: 4446 - protein, 122 aa, Citrobacter freundii
MSDTLPGTTLPDDNHDRPWWGLPCTVTPCFGARLVQEGNRLHYLADRAGIRGLFSDADAYHLDQAFPLLMKQLELMLTSGELNPRHQHTVTLYAKGLTCKADTLSSCGYVYLAVYPTPEMKN

SEQ ID NO: 4447 - DNA, 198 bp, Citrobacter freundii
atgaaatcattaaccacggaaaccgcactggatattctgattgcgtggctgcaggacaatatcgactgcgaatcgggaattatctttgacaacaatgaggataaaacggattcagcagcactgttgccctgtatcgaacaggccagagaagatatccgtaccctgcgccaactgcagcttcagcaccagaaccggtga

SEQ ID NO: 4448 - protein, 65 aa, Citrobacter freundii
MKSLTTETALDILIAWLQDNIDCESGIIFDNNEDKTDSAALLPCIEQAREDIRTLRQLQLQHQNR

SEQ ID NO: 4449 - DNA, 231 bp, Shigella flexneri
atgttgcacctgttcagcggtaaaccaatccccgacaaccggggaaacatcacccttcgtctggatgatcacattcagtctgttcagggtaaagagagctatgaagatgagatgttcagcatcagatactttaagaagggctccgcgcatatcacgttcagaaaaccagaactggttgacagactgaatgatattatcgcaaaacactatcctgatatgctggcagtatag

SEQ ID NO: 4450 - protein, 76 aa, Shigella flexneri
MLHLFSGKPIPDNRGNITLRLDDHIQSVQGKESYEDEMFSIRYFKKGSAHITFRKPELVDRLNDIIAKHYPDMLAV

SEQ ID NO: 4451 - DNA, 492 bp, Proteus mirabilis
atgatgaaactggccctgacactggaagccgacagcgttaacgtacaggcactgaacatagggcgcattgtcgttgacgtcgatggtattgagctcgctgaactgattaacatggtctgcgataacggctactcccttcgtgttgttgatgaatctgaccagacctcagcagaatgcacgccaccatttgctacccttaccggcatacgctgcagtaccgcacatatcacggaaacggacaacgcctggttgtactcgctgtcacaccagaccagtgacttcggtgaatcagaatggattcattttacaggtagcggatatctgttacgtaccgatgcgtggtcatacccggttctgcggcttaaacgcctggggctgtcaaaaacgttccgtcgtctggtcgtcacactcatccggcgttatggcgtcagtctcattcatctggatgccagcgctgaatgcctgccgggtttacccactttcgactggtaa

SEQ ID NO: 4452 - protein, 163 aa, Proteus mirabilis
MMKLALTLEADSVNVQALNIGRIVVDVDGIELAELINMVCDNGYSLRVVDESDQTSAECTPPFATLTGIRCSTAHITETDNAWLYSLSHQTSDFGESEWIHFTGSGYLLRTDAWSYPVLRLKRLGLSKTFRRLVVTLIRRYGVSLIHLDASAECLPGLPTFDW

SEQ ID NO: 4453 - DNA, 1530 bp, Escherichia coli
atgatgacgacaaaactatcactccctgaacttgacacaactaaactgcctgacaggtgccaggcattacttgatgaaatgcatgaagaaacaggaatacgccgtgaaatacttctgtctgttatgctgacggtcatggctgcctcggtccaggatacgcatgaagttgaactttccggagggcaacgtaccagccttcagatatttatgtgtctttcatcagcatcaggcagtggaaaaacctctgcctgcgcaaaattaatcgctcctgttcatgaaacagaagaagaactacatcaggcatatatcgacgataaaaaaaactatgaccgaatgatggaaatgtggacaacagataaaaaaatcctggagcggagatataaaaaggaaattgaaagatccccggaaaatgctgctgctgcacgagcagcacttgaaaagtgtatagcaaataaacccgaacctcccgtacaacaggttctcatcgtgaatgacgcgacaccagaagggatagctttgaaactcagccagtcaccctctcttctgttgctgtctgatgaaggaggtactattctggataagcgtttcgaacgcaaatcggcactgtacaacacattatggagtgggcaaccagtcaacgttgaacgggcatccagacccgggttccggctgaatgatgtccgtctcactatacttatactgactcaaccggtaatatttaataagttttttactctcactggcgatcagatccggggcaatggctttctggcccggttgctattttgcgaacccggagcaattaaaataatgacgacagaaccgcatactgccactcctgttgtgacgcaacaatgtgcaagctgttttcgtaagaaaagttttggcagtcagatcagagactctctgagagcatccagagaaagacgtgcaaaaagtaaagagcgcatctgcatgacattatcaaatgcagcatcccgcgcactggagcgctttcacaaagaaaatatggatactgtcagacagaatcctcatatgggtacatttgaagacattattgtcagaaaaagagagcaggttgtcaggatagcagcacttctggaactggagaaagatccagactcgacagtaataacgctggaaagtactaatagcgccatttatctcattgaattttatttcaagcatcttatatataaacttgaatcccttcgggaaatatccccggctgagaaacttgataaatggcttcagaaaagaattatcacaacagcaggttacatattccagaaaagttatattttacaatatgccccatatgctctcaggaaaaaatgtgttctggatgaagcacttgacatactggcggaacaaaggaaaataaggattgatgataacctggttgtttatataggaaacacgattacaccatccgaactggcaaaaaaactaaatattcctgcattcgatgccggagttttcatttgtgatcatcaaaacatactgaagtatcaccgaaacagactatag

SEQ ID NO: 4454 - protein, 509 aa, Escherichia coli
MMTTKLSLPELDTTKLPDRCQALLDEMHEETGIRREILLSVMLTVMAASVQDTHEVELSGGQRTSLQIFMCLSSASGSGKTSACAKLIAPVHETEEELHQAYIDDKKNYDRMMEMWTTDKKILERRYKKEIERSPENAAAARAALEKCIANKPEPPVQQVLIVNDATPEGIALKLSQSPSLLLLSDEGGTILDKRFERKSALYNTLWSGQPVNVERASRPGFRLNDVRLTILILTQPVIFNKFFTLTGDQIRGNGFLARLLFCEPGAIKIMTTEPHTATPVVTQQCASCFRKKSFGSQIRDSLRASRERRAKSKERICMTLSNAASRALERFHKENMDTVRQNPHMGTFEDIIVRKREQVVRIAALLELEKDPDSTVITLESTNSAIYLIEFYFKHLIYKLESLREISPAEKLDKWLQKRIITTAGYIFQKSYILQYAPYALRKKCVLDEALDILAEQRKIRIDDNLVVYIGNTITPSELAKKLNIPAFDAGVFICDHQNILKYHRNRL

SEQ ID NO: 4455 - DNA, 1836 bp, Shigella sonnei
atgcgcacatttacaaatatgttgtatgatatttgtactgttttggggttgtttaaggaaggcgagaatccggcacacaagcggaagagtaccaattttgaaatgcatcaaaaattctgggatcaacgttataatgagatcagtcgtattattgatgctgaaggggtgttcagtcaggagcaacggcggatcatatatgcccgatatgaacatttttattacatgatgaattcttatccagtgcattccacactaaaacctgaattccttcgcagctattgtctgcgcacttttggggttatttttcttgttgtagatatgtataatacatacagaccagagaatgactctgctttttattatcatatttataattttttacagaaatcgtattgtccttgtcttgatcacgctgatacagaaagcgatgaagctgctgttaaacgttatcttcgggaatatctggctgaactgggattcaacaaggaagattttcatgaaaatggaaagctgtatgctctggggaaatatacaggaactatacggaaggataacgggaaaagcaagagcctgatgcaacaatatatcatggctatcaaaaatgaatataaaaaggattaccgggagaagaagctggataaggatgaactggagaaagtgctcaggaatattgataaattctataatgcattttattcattaagtgtcttacttgatatacaacgaaagacgaagatacttcaaagccttgcatattatctcagagtgttggtgagagaaggactctggattcatggtttgtatggttacgctgcgcaatatctttatgactttaccagctttgatacaacgccttatgcaaaaaaattactggaaatgttttataagtttcaaaacagtgcagaaggaacattgtctcgttatagtgtttcacttgatgataaatctcaggaatatatttcccgtctgaaagatcttgtatttaatattaatgataagaatggttgtgatgacgcatatctgaaaaagattataagctattttgggcagttgcagaatgaggctgttcatgtgaccagctgctacgaaacacttgcggtgtacatttgtctgataaggaaaaataaaattaatgatgtgctgcagcattatgatgacatggaaagaaaaggattgtttggtgaattaccttcaggatatgtcaggggggcattatcgttgcttcggacagcactggaggttaaagtaaatagaaaaaatataaagtatggctcgttgttttattggcttgaccatgtaaaagcctatcaggatgcatttattgaaaaaataccacttattgatcctgtatataaggagggtgaaatacagtatgatgcgaacaattttaccctgatgcgtgttattaagatgtataattgtatgcttgaaaagatcagtacgaaaccatatattgcgcccccatatattacaggtttgcttgatgacgtagagaaggtgctggataagataaatattctgatagataaagagtatgtttatgatggtaagacgctggcagaagtcattatggaaaacaaagtattatccagtcgcgaacgtaaagaaactatgatagggcttttcacaggcagtaagaaatatactttactgcaatgtgttgagaagcttggtgtattagttcactatgtgaaatcaccggtcgatgaaattaaaaatgtgatgatgttgtatggcgataaggccgaaaacaggaacagacgcagaatgatatatgatgcgttaaccattatttgtgaagatgacatcaggaataaccctcctgagctgtcgtga

SEQ ID NO: 4456 - protein, 611 aa, Shigella sonnei
MRTFTNMLYDICTVLGLFKEGENPAHKRKSTNFEMHQKFWDQRYNEISRIIDAEGVFSQEQRRIIYARYEHFYYMMNSYPVHSTLKPEFLRSYCLRTFGVIFLVVDMYNTYRPENDSAFYYHIYNFLQKSYCPCLDHADTESDEAAVKRYLREYLAELGFNKEDFHENGKLYALGKYTGTIRKDNGKSKSLMQQYIMAIKNEYKKDYREKKLDKDELEKVLRNIDKFYNAFYSLSVLLDIQRKTKILQSLAYYLRVLVREGLWIHGLYGYAAQYLYDFTSFDTTPYAKKLLEMFYKFQNSAEGTLSRYSVSLDDKSQEYISRLKDLVFNINDKNGCDDAYLKKIISYFGQLQNEAVHVTSCYETLAVYICLIRKNKINDVLQHYDDMERKGLFGELPSGYVRGALSLLRTALEVKVNRKNIKYGSLFYWLDHVKAYQDAFIEKIPLIDPVYKEGEIQYDANNFTLMRVIKMYNCMLEKISTKPYIAPPYITGLLDDVEKVLDKINILIDKEYVYDGKTLAEVIMENKVLSSRERKETMIGLFTGSKKYTLLQCVEKLGVLVHYVKSPVDEIKNVMMLYGDKAENRNRRRMIYDALTIICEDDIRNNPPELS

SEQ ID NO: 4457 - DNA, 219 bp, Shigella boydii
gtgataacgcatatggtttataaatctgacagcgatgaactagcagtactgcgggcagaaaatacccggctggtctcattacttgaagctcatgggattgaatggcgacgtaaaccgcagagccctgtgcagtgcgttttcgtattatccacggatgagaaagttgcgttatttcgtcggttgtttcgtgggcgtgatgatgtatgggcccttcgatag

SEQ ID NO: 4458 - protein, 72 aa, Shigella boydii
MITHMVYKSDSDELAVLRAENTRLVSLLEAHGIEWRRKPQSPVQCVFVLSTDEKVALFRRLFRGRDDVWALR

SEQ ID NO: 4459 - DNA, 201 bp, Shigella boydii
atgaacgccaatgaaccgagcaccagttgctgcgtgtgctgcaaggaaatcccgctcgatgccgccttcacgccggaaggggccgagtacgtggagcatttctgcgggctggagtgctatcagcgcttccaggcgcgggccagcactgcgaccgaaaccagcgtcaaaccggacgcttgtgattcgccgccgtcaggttga

SEQ ID NO: 4460 - protein, 66 aa, Shigella boydii
MNANEPSTSCCVCCKEIPLDAAFTPEGAEYVEHFCGLECYQRFQARASTATETSVKPDACDSPPSG

SEQ ID NO: 4461 - DNA, 417 bp, Shigella boydii
atgtatattgaacagcattctcgctatcaaaataaagctaataacatccaattaagatatgatgataagcagtttcatacaacggttatcaaagatgttctattatggattgaacataatttagatcagtctttactgcttgatgatgtggcgaataaagcgggttataccaagtggtattttcagcggctgttcaaaaaagtaacaggggtcacactggctagctatattcgtgctcgtcgtttgacgaaagcggctgttgagttgaggttgacgaaaaaaactatccttgagatcgcattaaaatatcaatttgattcccaacaatcttttacacgtcgatttaagtacatttttaaggttacaccaagttattatcggcgtaataaattatgggaattggaggcaatgcactga

SEQ ID NO: 4462 - protein, 138 aa, Shigella boydii
MYIEQHSRYQNKANNIQLRYDDKQFHTTVIKDVLLWIEHNLDQSLLLDDVANKAGYTKWYFQRLFKKVTGVTLASYIRARRLTKAAVELRLTKKTILEIALKYQFDSQQSFTRRFKYIFKVTPSYYRRNKLWELEAMH

SEQ ID NO: 4463 - DNA, 1206 bp, Shigella boydii
atgaatagttcgacaaagatcgcattggtaattacgttactcgatgccatggggattggccttatcatgccagtcttgccaacgttattacgtgaatttattgcttcggaagatatcgctaaccactttggcgtattgcttgcactttatgcgttaatgcaggttatctttgctccttggcttggaaaaatgtctgaccgatttggtcggcgcccagtgctgttgttgtcattaataggcgcatcgctggattacttattgctggctttttcaagtgcgctttggatgctgtatttaggccgtttgctttcagggatcacaggagctactggggctgtcgcggcatcggtcattgccgataccacctcagcttctcaacgcgtgaagtggttcggttggttaggggcaagttttgggcttggtttaatagcggggcctattattggtggttttgcaggagagatttcaccgcatagtcccttttttatcgctgcgttgctaaatattgtcgctttccttgtggttatgttttggttccgtgaaaccaaaaatacacgtgataatacagataccgaagtaggggttgagacgcaatcgaattcggtatacatcactttatttaaaacgatgcccattttgttgattatttatttttcagcgcaattgataggccaaattcccgcaacggtgtgggtgctatttaccgaaaatcgttttggatggaatagcatgatggttggcttttcattagcgggtcttggtcttttacactcagtattccaagcctttgtggcaggaagaatagccactaaatggggcgaaaaaacggcagtactgctcggatttattgcagatagtagtgcatttgcctttttagcgtttatatctgaaggttggttagttttccctgttttaattttattggctggtggtgggatcgctttacctgcattacagggagtgatgtctatccaaacaaagagtcatcagcaaggtgctttacagggattattggtgagccttaccaatgcaaccggtgttattggcccattactgtttgctgttatttataatcattcactaccaatttgggatggctggatttggattattggtttagcgttttactgtattattatcctgctatcgatgaccttcatgttaacccctcaagctcaggggagtaaacaggagacaagtgcttag

SEQ ID NO: 4464 - protein, 401 aa, Shigella boydii
MNSSTKIALVITLLDAMGIGLIMPVLPTLLREFIASEDIANHFGVLLALYALMQVIFAPWLGKMSDRFGRRPVLLLSLIGASLDYLLLAFSSALWMLYLGRLLSGITGATGAVAASVIADTTSASQRVKWFGWLGASFGLGLIAGPIIGGFAGEISPHSPFFIAALLNIVAFLVVMFWFRETKNTRDNTDTEVGVETQSNSVYITLFKTMPILLIIYFSAQLIGQIPATVWVLFTENRFGWNSMMVGFSLAGLGLLHSVFQAFVAGRIATKWGEKTAVLLGFIADSSAFAFLAFISEGWLVFPVLILLAGGGIALPALQGVMSIQTKSHQQGALQGLLVSLTNATGVIGPLLFAVIYNHSLPIWDGWIWIIGLAFYCIIILLSMTFMLTPQAQGSKQETSA

SEQ ID NO: 4465 - DNA, 360 bp, Citrobacter koseri
atgcaacgaatcattttaatcatcattggctggctggctggcggtagtgctgggtacgctgggcgtggtattaccggtattaccgacgacgccgtttatcctgctggcggcctggtgctttgcccgttcttccccgcgctttcacgcctggttgctgtaccgctgatggtttggcagctatctacgtttctggcagaaacatcatgcgatgccgcgcggcgtcaaaccgcgggcgattttgcttattttgctcacgtttgccatttctctgtggttcgtccagatgccatgggtgcgcatcatgttgctggtaattctcgcctgtttgcttttctatatgtggcgaattccggtgattga

SEQ ID NO: 4466 - protein, 119 aa, Citrobacter koseri
MQRIILIIIGWLAGGSAGYAGRGITGITDDAVYPAGGLVLCPFFPALSRLVAVPLMVWQLSTFLAETSCDAARRQTAGDFAYFAHVCHFSVVRPDAMGAHHVAGNSRLFAFLYVANSGD

SEQ ID NO: 4467 - DNA, 168 bp, Citrobacter koseri
atgcttgactctgtagcgggaaagcgtattatgtacaccccagagctgctgagaaaaaacgaagcggcactgctctttaacaatttatcagacaatctgtgtgggcactcgaagatacggattcttaacgtcgcaagacgaaaaatgaataccaagtctcaagagtga

SEQ ID NO: 4468 - protein, 55 aa, Citrobacter koseri
MLDSVAGKRIMYTPELLRKNEAALLFNNLSDNLCGHSKIRILNVARRKMNTKSQE

SEQ ID NO: 4469 - DNA, 435 bp, Shigella boydii
atggaaaataatttggaaaacctgaccattggcgtttttgccaaggcggccggggtcaacgtggagacaatccgcttctatcagcgcaagggcctgttgcgggaaccggacaagccttacggcagcatccgccgctatggggaggcggacgtggttcgggtgaaattcgtgaaatcggcacagcggctggggttcagtctggacgagattgccgagctgttgcggctcgacgatggcacccactgcgaggaggccagcagcctggccgaacacaagctcaaggacgtgcgcgagaagatggccgacttggcgcgcatggaaaccgtgctgtctgaactcgtgtgcgcctgccatgcacgaaaggggaatgtttcctgcccgttgatcgcgtcactacagggcgaagcaggcctggcaaggtcagctatgccttag

SEQ ID NO: 4470 - protein, 144 aa, Shigella boydii
MENNLENLTIGVFAKAAGVNVETIRFYQRKGLLREPDKPYGSIRRYGEADVVRVKFVKSAQRLGFSLDEIAELLRLDDGTHCEEASSLAEHKLKDVREKMADLARMETVLSELVCACHARKGNVSCPLIASLQGEAGLARSAMP

SEQ ID NO: 4471 - DNA, 558 bp, Shigella boydii
atgcgactttttggttacgctcgggtctcaaccagtcagcagtctcttgatcttcaggtcagagcactcaaagacgcaggtgtgaaagcaaaccgtatatttaccgataaggcatccggcagttcaacagaccgggaagggctggatttgctgaggatgaaggtggaggaaggtgatgtcattctggttaagaagctcgaccgtcttggccgcgacactgccgatatgatccaactgataaaggaatttgacgctcagggcgtggcagtccggttcattgatgacgggatcagtaccgacggtgatatggggcaaatggtggtcaccatcctgtcggctgtggcacaggctgaacgccggaggatcctagaacgcacgaatgagggccgacaggaagcaaagctgaaaggaatcaaatttggccgcaggcgtaccgtggacaggaacgtcgtgctgacgcttcatcagaagggcactggtgcaacggaaattgctcatcagctcagtattgcccgctccacggtttataaaattcttgaagacgaaagggcctcgtga

SEQ ID NO: 4472 - protein, 185 aa, Shigella boydii
MRLFGYARVSTSQQSLDLQVRALKDAGVKANRIFTDKASGSSTDREGLDLLRMKVEEGDVILVKKLDRLGRDTADMIQLIKEFDAQGVAVRFIDDGISTDGDMGQMVVTILSAVAQAERRRILERTNEGRQEAKLKGIKFGRRRTVDRNVVLTLHQKGTGATEIAHQLSIARSTVYKILEDERAS

SEQ ID NO: 4473 - DNA, 543 bp, Shigella boydii
gtgagttttcgttccactgagcgtcagacccctacaagcgtggaacacatctacgccgcaggcgactgcaccgaccagccgcagttcgtctatgtggcggcagcggccggcactcgcgccgcgatcaacatgaccggcggtgacgcggccctgaacctgaccgcgatgccggccgtggtgttcaccgacccgcaagtggcgaccgtaggctacagcgaggcggaagcgcaccatgacggcatcaaaactgatagtcgcacgctaacgctggacaacgtgccgcgcgcgctcgccaacttcgacacgcgcggcttcatcaaactggtggttgaagaaggcagcggacgactgatcggcgtgcaggcagtggccccggaagcgggcgaactgatccagacggccgcactggcgattcgcaaccggatgacggtgcaggaactggccgaccagttgttcccctacctgacgatggtcgaagggttgaagctcgcggcgcagaccttcaacaaggatgtgaagcagctttcctgctgcgccgggtga

SEQ ID NO: 4474 - protein, 180 aa, Shigella boydii
MSFRSTERQTPTSVEHIYAAGDCTDQPQFVYVAAAAGTRAAINMTGGDAALNLTAMPAVVFTDPQVATVGYSEAEAHHDGIKTDSRTLTLDNVPRALANFDTRGFIKLVVEEGSGRLIGVQAVAPEAGELIQTAALAIRNRMTVQELADQLFPYLTMVEGLKLAAQTFNKDVKQLSCCAG

SEQ ID NO: 4475 - DNA, 927 bp, Citrobacter freundii
atgccaaactggtgctcaaatcgtatgtatttttctggtgaaccggcacagatcgctgagattaaacgactggccagcggtgcagttacaccgctttatcgccgcgccacaaatgaaggtattcagctgtttctggccggaagtgccggacttctgcagatcactgaaaatatccgctctgagcagtgccccggagtgacggctgccggacgtggtgctgtatcaccggaaaatatcgcgttcacccgctggctgacacacctgcagaacggtgtactgctggatgagcaaaactgcctgatgctgcatgaactctggctgcagagcggtactggacagcgtcgctgggaagagttaccggatgatgtcagggaaactatcactgtgcatttcaccgcaaaaagaggtgactggtgtgacatctggggtaacgaggatgtatcggtgtggtggaaccgtctgtgtgacaacgtactgccggaaaaaaccatgccgtttgacctgctgacggttttgccgacccgcctggatattgaagtgaatggctttaacggcggtgttctgaacggtgttccttctgcatatcactggtatacagaacggtatggcgtgaagtggccttgtgggtatgacctgaatatcagcagtcagggggaaaacttcattcaggtagatttcgacacgccgtggtgtcagccggaaagcgacgttgttgcagaattaagccgccgtttcggctgcacgctggagcactggtacgccgaacagggctgcaatttctgtggctggcagttgtatgagcgcggagagctcgttgatgtgctgtggggggaactggaatggtcttccccgacagatgatgatgagctgccggaagtcaccggacctgcgtggataatcgacaatgtggcgcattatggcggatga

SEQ ID NO: 4476 - protein, 308 aa, Citrobacter freundii
MPNWCSNRMYFSGEPAQIAEIKRLASGAVTPLYRRATNEGIQLFLAGSAGLLQITENIRSEQCPGVTAAGRGAVSPENIAFTRWLTHLQNGVLLDEQNCLMLHELWLQSGTGQRRWEELPDDVRETITVHFTAKRGDWCDIWGNEDVSVWWNRLCDNVLPEKTMPFDLLTVLPTRLDIEVNGFNGGVLNGVPSAYHWYTERYGVKWPCGYDLNISSQGENFIQVDFDTPWCQPESDVVAELSRRFGCTLEHWYAEQGCNFCGWQLYERGELVDVLWGELEWSSPTDDDELPEVTGPAWIIDNVAHYGG

SEQ ID NO: 4477 - DNA, 684 bp, Citrobacter freundii
atgtcccgttttgtcctcggtaactgcatcgatgttatggcccgtatccctgataacgccattgatttcatcctcaccgacccgccgtacctcgtcggttttcgtgaccgtcaggggcgtaccattgccggcgataaaaccgacgaatggctgcaaccggcctgtaatgagatgtaccgcgtactcaaaaaagacgcgttaatggtgagcttctatggctggaatcgcgtcgatcgctttatgtctgcctggaaaaatgcgggattcagcgttgttggtcacctggtcttcaccaaaaactacacatcgaaggccgcatatgtgggctatcgccacgaatgcgcctacatcctggcaaaaggccgtccacgtctgccacaaaaaccgctgccggacgtgctgggctggaaatattcgggcaatcgccatcacccgacggaaaagcccgttaccagcctgcaaccgctgattgagagcttcacacacccgaacgcgattgtgctggacccgtttgcaggcagcggctcaacctgcgtggccgccctccagtccggacgccggtatatcggtatcgagctgcttgagcagtatcaccgtgccgggcagcaacgccttgccgccgtacaacgggccatgcagcagggggccgcgaatgatgactggtttatgccggaggctgcgtaa

SEQ ID NO: 4478 - protein, 227 aa, Citrobacter freundii
MSRFVLGNCIDVMARIPDNAIDFILTDPPYLVGFRDRQGRTIAGDKTDEWLQPACNEMYRVLKKDALMVSFYGWNRVDRFMSAWKNAGFSVVGHLVFTKNYTSKAAYVGYRHECAYILAKGRPRLPQKPLPDVLGWKYSGNRHHPTEKPVTSLQPLIESFTHPNAIVLDPFAGSGSTCVAALQSGRRYIGIELLEQYHRAGQQRLAAVQRAMQQGAANDDWFMPEAA

SEQ ID NO: 4479 - DNA, 222 bp, Citrobacter freundii
atgaactatgccggacacgaaaaacttcgcgccgaagtggcggaggtggccaatgccatgtgtgaccttcgggccaggctgaacgatatggagcatcgctgtcgctttgattccgatgtgcttgttgaacgcctgacacgtcagacgctgtatcgcgccaatcgcctgttcatggaggcgtataccgaaattctggaactggattcctgcttcaaagattga

SEQ ID NO: 4480 - protein, 73 aa, Citrobacter freundii
MNYAGHEKLRAEVAEVANAMCDLRARLNDMEHRCRFDSDVLVERLTRQTLYRANRLFMEAYTEILELDSCFKD

SEQ ID NO: 4481 - DNA, 435 bp, Citrobacter freundii
atgtacggaacatgcgaaacgctctgccgtgagctggcagcgcagtatacggagaacacgccgctgatgctggttgtctggtccccggaagagattcaggcactggctgacggtatggaaatttctctgaccggttatgaaatcaggaccgtcctggcacgcctggaggacatcccggaagaacagcggattgagtccggtatttcttccgctgcggtgatggagatcatcaataacgtgagcgaaaaccgccaggtgaccgtccctgctgaactgctggcgtccctgattcagaccgctgaacaggcattgtggaaacgtgaatgggccgcccgggatcatggcctcgccgtcccggaatgcgtcacccgccgtcaggaggtggttaatcaggcccgcaccctgctgaaaaacaacacacacgaaaacgactga

SEQ ID NO: 4482 - protein, 144 aa, Citrobacter freundii
MYGTCETLCRELAAQYTENTPLMLVVWSPEEIQALADGMEISLTGYEIRTVLARLEDIPEEQRIESGISSAAVMEIINNVSENRQVTVPAELLASLIQTAEQALWKREWAARDHGLAVPECVTRRQEVVNQARTLLKNNTHEND

SEQ ID NO: 4483 - DNA, 771 bp, Citrobacter portucalensis
atgaatgaaacgctgaatgcactgatttatcgccacgccagcaacctgttgctggcgcagggctggccggaagaaacggatgttgaccagcgtaacccgaagtatccgggctggatcagcatttacgtgcggctggatacgccccggctggcgacgttacttatcaaccgtcacggcggcgtactgccgccgctcctggcctctgccattcagaaactgaccggaaccggggcggaacttgttctgtccggcagtcagtggcagtcgctgccggtacttccggcagacggaacgcaggtgtctttcccgtatgccggagaatggctgaccgaagacgaaatcagggcagttcttgatgcggtgcacgatgcggtacgaagcatctgttaccaggtggcagaagatgcgcggcgtatccgtgcggcgctgaccaccaccggtcagacgttgctgacccgccagacgcgccgctttcgcctggtggtgaaggaaagcgatcacccctgctggctcgatgaagacgacgaaaacctgcccgtggtgctcgatgccatcctgaaccggggcgctcgtttttcgtcggtggaaatgtatctggtcagcgattgtattgagcatatcctgtccagtgggctggcctgcgatgtgctgcgtataccggatgaaccgccccgccgctggtttgaccgtggtgttctgcgggaggtggtccgggaagcccgggccgaaatccgcagcatggcggatgccctggcgaaaatccggaaatga

SEQ ID NO: 4484 - protein, 256 aa, Citrobacter portucalensis
MNETLNALIYRHASNLLLAQGWPEETDVDQRNPKYPGWISIYVRLDTPRLATLLINRHGGVLPPLLASAIQKLTGTGAELVLSGSQWQSLPVLPADGTQVSFPYAGEWLTEDEIRAVLDAVHDAVRSICYQVAEDARRIRAALTTTGQTLLTRQTRRFRLVVKESDHPCWLDEDDENLPVVLDAILNRGARFSSVEMYLVSDCIEHILSSGLACDVLRIPDEPPRRWFDRGVLREVVREARAEIRSMADALAKIRK

SEQ ID NO: 4485 - DNA, 423 bp, Citrobacter koseri
atgtactgtactgttaaagaaatcatccgcgatgtactggatacagacgtgccggacagtgaatgcgtttttgccgtggtgctgacccgtggggatgtgcgtcacatagcccaggactggaacctgtcagacgatgagctggaaaccgtcatgcagcggctggacgatgcttttgtatatggcgcatgtgacagagttgtttccgatattgtcaatgaactgatggaagaaaagcgcgccagccgtcatgtgacagtcccggcggtgatgctggaaaaagtgatggcgctggcaggtagtgaaatgaagcgcctgtatgccgtcgggagtgagaacgggggcgacggtgacgcattcgtcagggaggaactcgaagcaatggacgttgtgttgcaggcgctggacggggagacgatgtcatga

SEQ ID NO: 4486 - protein, 140 aa, Citrobacter koseri
MYCTVKEIIRDVLDTDVPDSECVFAVVLTRGDVRHIAQDWNLSDDELETVMQRLDDAFVYGACDRVVSDIVNELMEEKRASRHVTVPAVMLEKVMALAGSEMKRLYAVGSENGGDGDAFVREELEAMDVVLQALDGETMS

SEQ ID NO: 4487 - DNA, 231 bp, Shigella boydii
atgacggtaagtattgtttcaccttccgcagcggctgtaaagccccgccgtcatccccgtttcagacgcgaagacatccccgcgccggaaattgaccccgtgctgaaagccttcgggcgacacatagcccggagttttcaccggggacgtggtgtacacatccccgccatgaaaaacacggctttcgggcaggtgctccgcacactcgaactgaaacgcgcttttaactga

SEQ ID NO: 4488 - protein, 76 aa, Shigella boydii
MTVSIVSPSAAAVKPRRHPRFRREDIPAPEIDPVLKAFGRHIARSFHRGRGVHIPAMKNTAFGQVLRTLELKRAFN

SEQ ID NO: 4489 - DNA, 1362 bp, Shigella boydii
atgacattagcagcaatcaccatgaccgccccggaagctgccagccctgtacagatgtaccgcgcgacctactcaccggatgacaacaaactgcgcctgtatgccgcgtcacgcctcgacccggagacgtataaaaaagtccatgatgccggtttccgctgggcaccaaaacaagcgctgtttgtcgcgccagcctggacaccgggccgggaagatgtgctcctctcacttgccggagagattgtggatgaagacagcacgcttgctgaacgtcaggaagcacgggcggagcggtttaccggatacagtgggaagcgggccagtgaatctgcacaggcacttgatgaagtggaaagactggccgcgatgatcccgcccggtcagcccattcttgtggggcatcacagtgaacgccgcgcccgccgtgatgcgcagcgtattgaaaacggcatgaaacgtgccgtgatgctctttgatcgtgcggaatactgggaagagcgggcgcggtcggcactgcttcacgcgaagtataaagaacgtccggacgttcgctggcgtcgtatcaaaaaaatcgaagctgatttgcgcaaggctgaaaagaccatcgcgcagtcgcagaaatatctgacgatgtggcgggctgaatcgctggatctgaatatggcaaaactcatcagcagtcatgaccatatcagcgcctgtttcccgctggatatgtatccgcgcccggcagaaaaaagccagtatgaagggagccggtcgttatggtcggccctggatgatgacatcatcaccacggagcaggcccgcgaaattgcgatccgctgtcatgaacggcagattcagcatcagcaacgctgggttaaccactatcagaaccgcctgatctatgagcgtgccatgctggacgaaagcggcggcgtggttacccggacacaggattttgagccgggcggacaggttttcagccggggcgagtggctgactatcatccgcgtgaacaaaagcaacggggcggtgagttcagtcacaacgccaaattacagttttctcgggtacagcggcacgatgaaagtgacgcccgatcgcatcacggactacaaagcaccatcggcagaagaggctgccgtcgccagtcaggccgcgaagcgtccgccggtagtcaactatccgggggaaggtttccgggaaatgacaaaggcacagtgggccgccctgccccgggactgtaaggccgtgcgcagtgtggcagagacagaagaccacggggcataccgctaccgctgcacaatggataataatttccgcctggtgagtgtgtatatcaccgacatgaaaatcacggaaatcccacagaaataa

SEQ ID NO: 4490 - protein, 453 aa, Shigella boydii
MTLAAITMTAPEAASPVQMYRATYSPDDNKLRLYAASRLDPETYKKVHDAGFRWAPKQALFVAPAWTPGREDVLLSLAGEIVDEDSTLAERQEARAERFTGYSGKRASESAQALDEVERLAAMIPPGQPILVGHHSERRARRDAQRIENGMKRAVMLFDRAEYWEERARSALLHAKYKERPDVRWRRIKKIEADLRKAEKTIAQSQKYLTMWRAESLDLNMAKLISSHDHISACFPLDMYPRPAEKSQYEGSRSLWSALDDDIITTEQAREIAIRCHERQIQHQQRWVNHYQNRLIYERAMLDESGGVVTRTQDFEPGGQVFSRGEWLTIIRVNKSNGAVSSVTTPNYSFLGYSGTMKVTPDRITDYKAPSAEEAAVASQAAKRPPVVNYPGEGFREMTKAQWAALPRDCKAVRSVAETEDHGAYRYRCTMDNNFRLVSVYITDMKITEIPQK

SEQ ID NO: 4491 - DNA, 564 bp, Shigella boydii
atgcacagtcagttaagagaacgtatccggctgctgcgcgcaaggctggataacgccgcgccggttgctgaaatccgggctgaatctcagctttttgtgacacctgccccggtctgtgatcgcctggtgacgctggcggaaatcagcaaccgggatcacattctggaaccctctgccggcaccggggccatactgcgggcgattcgggataccgcgccggaggccatgtgtgatgcggtggagagcaacagcgggctggtccggtatctgcgggaaaattttaacggtgtcagggtacagtgtggcgacttcatggaatggcagccggtgcagtattacagccggattatcatgaatccgccgttcagccacgggcaggatatccggcatatcctgcgggccttttccctgctgcgtccgggtggcgttctggtcgccgtctgtctcaacgggccacgccagcaggagaagctgttaccgttttctgacatccgcgaggagctgccgcgcgacacgtttgcttatacccatgttccgacgatgattattcgtctgcgcgcctga

SEQ ID NO: 4492 - protein, 187 aa, Shigella boydii
MHSQLRERIRLLRARLDNAAPVAEIRAESQLFVTPAPVCDRLVTLAEISNRDHILEPSAGTGAILRAIRDTAPEAMCDAVESNSGLVRYLRENFNGVRVQCGDFMEWQPVQYYSRIIMNPPFSHGQDIRHILRAFSLLRPGGVLVAVCLNGPRQQEKLLPFSDIREELPRDTFAYTHVPTMIIRLRA

SEQ ID NO: 4493 - DNA, 567 bp, Shigella boydii
atggcgggtgatgcactgacattccgtgtggcgtttgtcgttcgctggctgctgtgggtcgtcaggtttgtggttatctggccgctggcaacaatggccctgatggctctgtttgttttatggaaggacaacaccacgccggggaaattactggttaaggagattaacttcgtaagacaaacagcacctgccggacagttcccggtcagtgaatgctggttttcttcctctgattcttcaggcagatcagaaatacaggatatctgccattaccgcgcggctgatgctgcagattatgtcagagagactgaccgatcactgatgcaactggtcaccgcattctgggcaacgctggcacttatgtatatgtcgtttgcggcaggcaccgggaaatatccggtgcgacccggaaaaatgaaatgtatccgggtggtaaccgcagatgaacgtctgaaggacgtttatacggaagacgcttccctgccgggaaaaatcagtaaatgtcctgtttatcttcctgatgacagaacaaacagaaacaacggagataaaaatgaacatgcgtaa

SEQ ID NO: 4494 - protein, 188 aa, Shigella boydii
MAGDALTFRVAFVVRWLLWVVRFVVIWPLATMALMALFVLWKDNTTPGKLLVKEINFVRQTAPAGQFPVSECWFSSSDSSGRSEIQDICHYRAADAADYVRETDRSLMQLVTAFWATLALMYMSFAAGTGKYPVRPGKMKCIRVVTADERLKDVYTEDASLPGKISKCPVYLPDDRTNRNNGDKNEHA

SEQ ID NO: 4495 - DNA, 738 bp, Shigella boydii
atgacatcagacaatatcgctgaatatgttggtgagaataatcaatttactgagaagcctgtaactgaataccccccggtgatacaggataatacagtgaccactaaagactatctgtacagcaataatattgatactgaccttttagtggttatcggagggcttattgttatattgtttctcatgatgcttatcatgtactttattaattctctcaggcataaggaattaactgaaatactgacaaaaatatcttttcctgaaaaatccgggagcaattcgcttaatccggaagcggtcagctgtaatttgttgtccctgtgtgtgttggcaccggtactctgtacacccagaaagctggcagaagtctccagggagatcatcgtggcgagtgcgcaggaaattgcatggacgccggggagcagtcgtattgatggtcatcagggcgaaaatattacctggtctctgtcatcgcagtctcctgccgataagtatgatctcatcaataaaacgtcccgtgtttctcctgacagtggccgtttttatgaaccggacacagttctggatcaccgtgaacgggtacgcctttttattcagatccagtttccgcacgggagtgactggtctgaagtattgcgcctgactgacattgttacagagaaggtctcttccggcgggactgcaggcgggtatcaccaccggcatacagggtacacctggtctgtttctgtgaattaa

SEQ ID NO: 4496 - protein, 245 aa, Shigella boydii
MTSDNIAEYVGENNQFTEKPVTEYPPVIQDNTVTTKDYLYSNNIDTDLLVVIGGLIVILFLMMLIMYFINSLRHKELTEILTKISFPEKSGSNSLNPEAVSCNLLSLCVLAPVLCTPRKLAEVSREIIVASAQEIAWTPGSSRIDGHQGENITWSLSSQSPADKYDLINKTSRVSPDSGRFYEPDTVLDHRERVRLFIQIQFPHGSDWSEVLRLTDIVTEKVSSGGTAGGYHHRHTGYTWSVSVN

SEQ ID NO: 4497 - DNA, 1161 bp, Citrobacter freundii
atgttgctctgcccgctcctggccggggcgaatcacccgggtctgctgtccgtccgacagcgtgacactgtcaccggaaaccgccgtcaccgtccagacgctgttggccacataaccgcgctcccggtcactcttcgtgaagcgcatccggtcaccggtccccacccggatggtgtccggggtgtacagtgtgacgccttcagccaccgcctcccggggcgaaatcagccgcgtgttaccttccgcatcctccagggttatcagcccgtcatccttactgataccggcaatccggtgatacacattatccaccagggcaagggcatccgggttattctcccaggtggagagacgacgcagctccccgtcacgtatattcgctgtgttcaggacaggcaccatgacctgcacctgccccagttctccggccttttcccgtgcatcatgaatcatgctgttcagtacgcgccggtcctcattcaggtgcgtgacaatcagcgtctgctcccgtgcttccggtgtcctgccggtatagtcgcggacaatggctgcatacagtgtcatggggacatccggaaaagcctcgcctttcagcatcgccttctgctgcgcttctgccagtttcgcttcctggctgtgactgaactccgtcacggagtgctccggtgcccatgcgccctccagacgtggcacctgagacggtttcacacgctcaagcccggacagcgccctttccacatcccggttaatcaggctgtataccgcctcccgcagttccggcgtctgacgcacaatctccttcatgatgaccacatcggcagcactgcgcgtctgctggagacggaaaggctgaccgggcgcgatggcctgcagctggtccgtgtcaccgctggccacagcccgaccgccaccggccgcaatcagggcgtatgcccgtgccatgtcggtattgcccaccatagagctctcatcgagaaggaacagcgtgttgctgaaatccggcgtttctccgctgcgctgctgcagctgcgtgtcatgcagaaaggacgccagcgtctgtgcatccacgccggcgctgcgcatctccccgaccgcacggtgtgtgggccccagccccacgacacggggacgttcactctccggcagcatgttcacggctga

SEQ ID NO: 4498 - protein, 386 aa, Citrobacter freundii
MLLCPLLAGANHPGLLSVRQRDTVTGNRRHRPDAVGHITALPVTLREAHPVTGPHPDGVRGVQCDAFSHRLPGRNQPRVTFRILQGYQPVILTDTGNPVIHIIHQGKGIRVILPGGETTQLPVTYIRCVQDRHHDLHLPQFSGLFPCIMNHAVQYAPVLIQVRDNQRLLPCFRCPAGIVADNGCIQCHGDIRKSLAFQHRLLLRFCQFRFLAVTELRHGVLRCPCALQTWHLRRFHTLKPGQRPFHIPVNQAVYRLPQFRRLTHNLLHDDHIGSTARLLETERLTGRDGLQLVRVTAGHSPTATGRNQGVCPCHVGIAHHRALIEKEQRVAEIRRFSAALLQLRVMQKGRQRLCIHAGAAHLPDRTVCGPQPHDTGTFTLRQHVHG

SEQ ID NO: 4499 - DNA, 279 bp, Shigella boydii
atgaaaaaaattattgcattacttttcgttgcaacctttgcaacttctgccagcgcagcgatgactcagacatgccaagactattataaagaaatagataatttcatggacaaaatgaaagaaatggggacacctgacgcacaaattaatgtaataaaacaacaatatgaacaatcaaaacaacaaatatcggcactacctgaatcaagtcaggatatggcctgtaaacaaggtttggaggcactaaaacaatcaatgtcagccgtcggtattaaataa

SEQ ID NO: 4500 - protein, 92 aa, Shigella boydii
MKKIIALLFVATFATSASAAMTQTCQDYYKEIDNFMDKMKEMGTPDAQINVIKQQYEQSKQQISALPESSQDMACKQGLEALKQSMSAVGIK

SEQ ID NO: 4501 - DNA, 738 bp, Shigella boydii
atggcaaagcaaaagtttaaaatcaccaactggtcagcttacaacaaggcactcagacagcgtggttcgctgacgatctggcttgatgaatctgctattgctgcatggactgactgcgcaaagcctgaaggtcgtggtcggactctccactacacctatatggcgatcaccacggttctgatgatgaagcgcgtgtttaatctgccactccgggcattacagggcttcgttgactcgatttttacgctgatggctctgccgctgcgttgcccggactactctctggtcagcaaacatgcaaagagcgttaacatcagcataaaaacgccaacccggggtgaaatctcgcatctggttatcgatgctactggcctgaaggtcttcggggaaggcgaatggaaagtcaggcaacatggggctgacaggcgcagagtatggcgcaaacttcatctggctgcagacggtgtgacgcatgagataatctgtgccgatttatcgctcagcggtacgacagatgcgcaggcactgccggggctgattaaccagacccaccgaaaaataagagaagcttcagcagacggcgcttatgacacgcgcaactgtcatgatgcgttgctgaggaaaaaaatcaggccacttatccctccacgaaacggggcgcaatactggccgggcagataccatgaacgtaaccatgcggtggctaatcagcatctgagcggtggcaatgatgtatga

SEQ ID NO: 4502 - protein, 245 aa, Shigella boydii
MAKQKFKITNWSAYNKALRQRGSLTIWLDESAIAAWTDCAKPEGRGRTLHYTYMAITTVLMMKRVFNLPLRALQGFVDSIFTLMALPLRCPDYSLVSKHAKSVNISIKTPTRGEISHLVIDATGLKVFGEGEWKVRQHGADRRRVWRKLHLAADGVTHEIICADLSLSGTTDAQALPGLINQTHRKIREASADGAYDTRNCHDALLRKKIRPLIPPRNGAQYWPGRYHERNHAVANQHLSGGNDV

SEQ ID NO: 4503 - DNA, 201 bp, Shigella sonnei
atgctgaatattattaaaaaattgtttgaatgtgtttttgtatgcgatgattttacgaataactccaccgcaccaataaaattattgtgtctgatcctgggtaacatatggctaccttattttatttggttattttatgtcgccattaaatatctcattatagaagtaaactatcaaaaaacgctcattattaaaatgtaa

SEQ ID NO: 4504 - protein, 66 aa, Shigella sonnei
MLNIIKKLFECVFVCDDFTNNSTAPIKLLCLILGNIWLPYFIWLFYVAIKYLIIEVNYQKTLIIKM

SEQ ID NO: 4505 - DNA, 333 bp, Citrobacter koseri
atgtcctggctttatcccgatcggggagactttattgctgtggtcggcagaatgcaggatatcaacgccgttcgtcaggtaaaagcggcattgttgtcatcccgggatttatctgtttattctatgaatgccccagggtttattcccggtattgatttttctgatcacctcaattattggcaacacgatattcccgccgtaatgattactgacaccgctttttatcgtaataaacaataccacttgcccggtgataccgcagacagattgaattatcagaaaatggctcaggtggtagatggtgttataaccttgttatacaacagtaaataa

SEQ ID NO: 4506 - protein, 110 aa, Citrobacter koseri
MSWLYPDRGDFIAVVGRMQDINAVRQVKAALLSSRDLSVYSMNAPGFIPGIDFSDHLNYWQHDIPAVMITDTAFYRNKQYHLPGDTADRLNYQKMAQVVDGVITLLYNSK

SEQ ID NO: 4507 - DNA, 165 bp, Citrobacter koseri
atgttgttgaatcgtgtccgttgtgaagcaatggaaaaaatacgggtctattttgacaggaatttgtgtcgattcctccccccaaaagagagtattttcttgatctgtgacacgcttttgttattccataacaaaaacgcagcaacaaatttacgtattttttaa

SEQ ID NO: 4508 - protein, 54 aa, Citrobacter koseri
MLLNRVRCEAMEKIRVYFDRNLCRFLPPKESIFLICDTLLLFHNKNAATNLRIF

SEQ ID NO: 4509 - DNA, 927 bp, Citrobacter koseri
atgctcccgccttattttttgttcaaagagatgacagacacacagtatattggccgcttcgccccctctccttccggcgagcttcattttggctctctgatcgccgcgctcggcagctatttgcaggctcgcgcccggcaaggtcgctggctggtacgcatagaagatatcgacccgcctcgtgaagttcccggtgccgcagaaactatcctgcgccagctggaacattacggtctgcactgggacggcgatgttctctggcaatcgcaacgtcacgacgcctatcgtgaagcactcgcctggttacatgaacaaggactaagttattactgcacctgtacgcgtgcgcgtattcaaagcattggcggtatttacgacggtcattgccgggtgttgcatcatggaccagacaacgccgcagtgcgtatccgccagcagcatccggtcacgcaatttactgacctgctgcgaggcattattcacgccgacgaaaaactggcacgggaagattttatcattcatcgccgtgatgggttgttcgcctacaacctggctgttgtggttgatgatcatttccagggcgttacagaaatagtgcgtggggctgatctgattgaaccaacagtaaggcaaatcccgctgtaccagctttttggctggaaagtgccagattacattcatctgccgctggcgcttaatccacaaggcgctaaactttccaagcagaatcatgcgcctgcgttgccgaaaggcgatccacgcccggtactaatcgcggcacttcaatttctggggcagcaggcagaagcacactggcaggatttcagcgtcgagcaaatccttcagtcagccgtcaaaaactggatgctgaccgccgtgcccgagtcggcaattgtaaattcaacattctcaaatgcgtcatgctga

SEQ ID NO: 4510 - protein, 308 aa, Citrobacter koseri
MLPPYFLFKEMTDTQYIGRFAPSPSGELHFGSLIAALGSYLQARARQGRWLVRIEDIDPPREVPGAAETILRQLEHYGLHWDGDVLWQSQRHDAYREALAWLHEQGLSYYCTCTRARIQSIGGIYDGHCRVLHHGPDNAAVRIRQQHPVTQFTDLLRGIIHADEKLAREDFIIHRRDGLFAYNLAVVVDDHFQGVTEIVRGADLIEPTVRQIPLYQLFGWKVPDYIHLPLALNPQGAKLSKQNHAPALPKGDPRPVLIAALQFLGQQAEAHWQDFSVEQILQSAVKNWMLTAVPESAIVNSTFSNASC

SEQ ID NO: 4511 - DNA, 636 bp, Shigella sonnei
gtgaaatttccgctacctggacgcataaaaccggaactctcgccaaaagccgggcactccgaaggaattgacgcgttgcgctgctctgtaacggcatttaccgcaagccatttatttcgccagcgacaatccgcagagaaccaaacgcatcaggaaacgactgaacacaataaatactgtattgatcaacatattatactggcacctccagcacgcagtgaggatacactgtatcatcagcgaatcttatcactgcggagctggttgaacgactttctgagcgaaataagtcggttcccggtaacaacaacagaatccttttttaattattgtttcgttgtttttggtgtgattcagaaaataaatattttagacagtagccagtcaggcgttaaaaatggggcggatagtgaggcggttttggctgcgcttattgaacatttagaattgatcaatccttctggcagattaagccaaaatacccgttcggcaatgcttcagttacgcgaagaggaatggtctgaattctttttttggttgctaaattctctggagtgtctggattatgtgattattaatttaactccagaaagcaaaaaaacgttgatgagtgaacaccgtaacaatattcggtag

SEQ ID NO: 4512 - protein, 211 aa, Shigella sonnei
MKFPLPGRIKPELSPKAGHSEGIDALRCSVTAFTASHLFRQRQSAENQTHQETTEHNKYCIDQHIILAPPARSEDTLYHQRILSLRSWLNDFLSEISRFPVTTTESFFNYCFVVFGVIQKINILDSSQSGVKNGADSEAVLAALIEHLELINPSGRLSQNTRSAMLQLREEEWSEFFFWLLNSLECLDYVIINLTPESKKTLMSEHRNNIR

SEQ ID NO: 4513 - DNA, 219 bp, Enterobacter cloacae complex
gtgctgccactgtatcccgacatcagcccggaaattattgcgattgctatcggttcaggtgcaattggctgcacgatcgttacggactcgcttttctggctggtgaagcaatattgcggcgctacgctcaatgaaacatttaaatactatacgacagcgacatttatcgcttcagtcgtcgctctggcgggcacattcctgctgtcatttatcatctaa

SEQ ID NO: 4514 - protein, 72 aa, Enterobacter cloacae complex
MLPLYPDISPEIIAIAIGSGAIGCTIVTDSLFWLVKQYCGATLNETFKYYTTATFIASVVALAGTFLLSFII

SEQ ID NO: 4515 - DNA, 132 bp, Acinetobacter pittii
atgcgtcagttttatcagcactattttaccgcgacagcgaagttgtgctggttgcgttggttaagcgtcccacaacgattaaccatgcttgaaggactgatgcagtgggatgaccgcaattctgaaagttga

SEQ ID NO: 4516 - protein, 43 aa, Acinetobacter pittii
MRQFYQHYFTATAKLCWLRWLSVPQRLTMLEGLMQWDDRNSES

SEQ ID NO: 4517 - DNA, 516 bp, Citrobacter koseri
atgcgctaccgttcactatctctacttattccatgtgcactgctgctgagtgcctgtaccaccgtcacgccagcttataaagataacggcccccgcaccggttcctgtgtccagggagggcctgacagtgtggctcaacaattctacgactaccgcattcaacatcgcagcaatgacattaccgccctgcgcccctatttgagtgacaaactggcaacccaacttagcgatgccagccgcgataatagtcatcgtgaattgttaagcagcgatccgttctccagtcgaaccaccttgccagacagcgcccacgttgccagtgcatcgactatccctaatcgtgatgcccgtaacattccattgcgggtggatctcaaacagggtgaccagggctggcaggatgaagtgttaatgattcaggaaggccagtgttgggtcatcgacgatgtgcgctacttaggcggtagcgttcatgccacggcgggtacgctccgtcagtccatcgagaatcgctaa

SEQ ID NO: 4518 - protein, 171 aa, Citrobacter koseri
MRYRSLSLLIPCALLLSACTTVTPAYKDNGPRTGSCVQGGPDSVAQQFYDYRIQHRSNDITALRPYLSDKLATQLSDASRDNSHRELLSSDPFSSRTTLPDSAHVASASTIPNRDARNIPLRVDLKQGDQGWQDEVLMIQEGQCWVIDDVRYLGGSVHATAGTLRQSIENR

SEQ ID NO: 4519 - DNA, 444 bp, Citrobacter koseri
atgacacacgttctgcgcgccagaaggctgctgactgaagagggatggttcgatgaccatcagttgcgtgttgctgacggtgtcatcgcagcaatcgaaccgattccagtgggcgtgactgaacgcgatgcggaactgctctgccccgcttacatcgacacccatgtacacggtggtgcgggcgttgatgtaatggatgacgcgccggatgtactcgacaagctggcaatgcacaaggcacgcgaaggtgtcggcagttggttaccgaccaccgtaaccgcgccgcttaataccattcatgcggcgctgaaacgtattgctcaacgttgccaacgcggcggacctggtgcgcaagtgctggggagttatctcgaaggaccgtacttcacgccgcagaataaaggcgcgcatccgccgggtaatgctgccaacttactgatttag

SEQ ID NO: 4520 - protein, 147 aa, Citrobacter koseri
MTHVLRARRLLTEEGWFDDHQLRVADGVIAAIEPIPVGVTERDAELLCPAYIDTHVHGGAGVDVMDDAPDVLDKLAMHKAREGVGSWLPTTVTAPLNTIHAALKRIAQRCQRGGPGAQVLGSYLEGPYFTPQNKGAHPPGNAANLLI

SEQ ID NO: 4521 - DNA, 435 bp, Citrobacter koseri
atgttaagtattattttgacagggcatggcgggtttgccagtggcatggaaaaagcaatgaagcaaatcctcggcgatcaatcgcagtttattgccatcgattttcccgaaacctcaagcgccgcgctgcttacatcgcagcttgaagaggccatcgcccaactggattgtgaagacggcattgtttttctgacggatttgctgggcggcacgccgtttcgcgtagcttcaacgctggcgatgcaaaaaccgggctgtgaagtgattaccggcaccaatttgcaactgctactggagatggtgctggagcgcgaagggttaagcggtgaagaattccgtgtacaggcgctggagtgtggacaccgagggctgaccagtctggtggacgtgttaggccgctgccatgaagaatgtccggtcgaggaaggaatatga

SEQ ID NO: 4522 - protein, 144 aa, Citrobacter koseri
MLSIILTGHGGFASGMEKAMKQILGDQSQFIAIDFPETSSAALLTSQLEEAIAQLDCEDGIVFLTDLLGGTPFRVASTLAMQKPGCEVITGTNLQLLLEMVLEREGLSGEEFRVQALECGHRGLTSLVDVLGRCHEECPVEEGI

SEQ ID NO: 4523 - DNA, 810 bp, Citrobacter pasteurii
atggcatctaatcaaaccaccctgccgaacgtcagcgaaaatgaagaaacactgctgactggcgtcaatgaaaacgtgtatgaagatcggagcattgccgcggagctgacgaaaaaagatatcaaccgcgtcgcctggcgttccatgctgttacaagcgtcttttaactacgaacgtatgcaggcttctggctggttgtacggtctgctgcctgctctgaaaaagatccacactaataaacgcgacctggcgcgcgccatgaaggggcatatgggtttcttcaatacccatccgtttctggtgacgtttgttatcggcattatccttgcgatggagcgttctaagcaggacgttaacagtattcagagcaccaaaattgccgtcggtgcgccgcttggcgggattggcgatgcgatgttctggctaacgctactgccgatttgtggcgggataggcgcaagcctcgcgctacaaggctctattcttggcgcagtcgtctttattgtgctgttcaacgtggtacacttggggctgcgttttggtctggcgcattatgcttaccgcatgggcgtggcggcgattccccttattaaagcgaataccaaaaaagtcggccatgctgcgtcaatcgttggaatgacggtaatcggcgcactggtggcaacctatgttcgtttaagcaccacgctggaaatcacggcgggcgacgcagtagttaagttacaggctgatgttatcgacaaactgatgcctgccttcttaccgctggtctacaccctgaccatgttctggctggtacgccgcggctag

SEQ ID NO: 4524 - protein, 269 aa, Citrobacter pasteurii
MASNQTTLPNVSENEETLLTGVNENVYEDRSIAAELTKKDINRVAWRSMLLQASFNYERMQASGWLYGLLPALKKIHTNKRDLARAMKGHMGFFNTHPFLVTFVIGIILAMERSKQDVNSIQSTKIAVGAPLGGIGDAMFWLTLLPICGGIGASLALQGSILGAVVFIVLFNVVHLGLRFGLAHYAYRMGVAAIPLIKANTKKVGHAASIVGMTVIGALVATYVRLSTTLEITAGDAVVKLQADVIDKLMPAFLPLVYTLTMFWLVRRG

SEQ ID NO: 4525 - DNA, 339 bp, Citrobacter freundii
atggcgcatcggctactcattggtaaaggaatgatcaccttgaatctcaaacggatttttctcaccctcaccttacttcccttgtttgctgttgccgctgatgattgcgcactctcagatccgacgctgaccgtacaggcgtataccgttaatcctcaaacagagcgggtgaaaatgtactggcaaaaagccaatggcgaagcgtggggaacgttacatgctctgctggcggatattaatagtcagggtcaggtgcagatggcgatgaacggcggcatctatgatgaaagctatgcgccgctcggtttgtacatcgaaaacggtcagcagaaggtgtaa

SEQ ID NO: 4526 - protein, 112 aa, Citrobacter freundii
MAHRLLIGKGMITLNLKRIFLTLTLLPLFAVAADDCALSDPTLTVQAYTVNPQTERVKMYWQKANGEAWGTLHALLADINSQGQVQMAMNGGIYDESYAPLGLYIENGQQKV

SEQ ID NO: 4527 - DNA, 219 bp, Escherichia coli
atgtcatctcaacttcagaactgtgttgattgtggtaaagcattaagtcgaacagccacaacgtgcgggaattgcagctcaacggacccttttggaaaaaaacggcgcagcgatcgcttttaccagtggtttgtagggctgtttattacggctattattattgctggcggattatggtacatggggcttcttgacgtaccgggattactactcagataa

SEQ ID NO: 4528 - protein, 72 aa, Escherichia coli
MSSQLQNCVDCGKALSRTATTCGNCSSTDPFGKKRRSDRFYQWFVGLFITAIIIAGGLWYMGLLDVPGLLLR

SEQ ID NO: 4529 - DNA, 381 bp, Escherichia coli
atgactttacctgccgggtattatcagattgatccggagatccgtgccctggtggccgcgatgaacattcacggcttccgcacatatgcttcctgtcagggacatggtttccctgttacaaagctgcctccttatattgcctttgcctgtccggtaaaaatggctgcccttcttgagcagcgactgcggcaggatgctgaatcagcaataccacgtctggcatggggatggtcggtgaagggggcttttaacagtaagtttcagctctgtttcaggcttcagcccgacacccctcattactggtataaccggtattgtcgtcactcgttatgtgccgatttcagaacactgatatcgttactgaagtcgttatctgagtag

SEQ ID NO: 4530 - protein, 126 aa, Escherichia coli
MTLPAGYYQIDPEIRALVAAMNIHGFRTYASCQGHGFPVTKLPPYIAFACPVKMAALLEQRLRQDAESAIPRLAWGWSVKGAFNSKFQLCFRLQPDTPHYWYNRYCRHSLCADFRTLISLLKSLSE

SEQ ID NO: 4531 - DNA, 306 bp, Shigella flexneri
atggcaacaatggacagtaaatatattcagcacctcaggaaaataggtgctgtgctgctcaggctgataagcagaacattaaaattatttccttttggtcttgtaatagtgcccgttatattattttattttgcacctgacagttttctcgctgaaattattcatgaatggaagaacgcagatatatcagaacaagtgacacttgtcagattatatctgaaggtgacatttacatgtgcgtttgtggctgtttttctcaattatcttttttctgatgagttcatgcctgtaaatagcagaaagtga

SEQ ID NO: 4532 - protein, 101 aa, Shigella flexneri
MATMDSKYIQHLRKIGAVLLRLISRTLKLFPFGLVIVPVILFYFAPDSFLAEIIHEWKNADISEQVTLVRLYLKVTFTCAFVAVFLNYLFSDEFMPVNSRK

SEQ ID NO: 4533 - DNA, 297 bp, Shigella flexneri
atgagcgcattttcttttaacaccacttatcagccaacaggcgatcagcagaaagacgcaatcgcacaaatcgggatcatgcagaatcgtgctgttcaggcaaatcttgcatatcagagctgccgggattctggtgcactctttaaggtgctccaccaggtcaataatgagctgcatgacttactggatagcctggagaatcatactcctcttgtcagaaaaaacgctgatgagttgatcgcgctgttactgcttttcactcggcaggttggtcagtcccgaactgacctgatttga

SEQ ID NO: 4534 - protein, 98 aa, Shigella flexneri
MSAFSFNTTYQPTGDQQKDAIAQIGIMQNRAVQANLAYQSCRDSGALFKVLHQVNNELHDLLDSLENHTPLVRKNADELIALLLLFTRQVGQSRTDLI

SEQ ID NO: 4535 - DNA, 192 bp, Citrobacter koseri
atgatgaccatcagcgatatcattgaaattattatcgtttgcgcactgatatttttcccgctgggctatctggcgcggcactctttgcgacgcattcgcgacaccttacgtttgttctttgctaaacctcgttatgttaaaccggccgggacgttacgccgcacggaaaaagccagggcaaccaaaaaatga

SEQ ID NO: 4536 - protein, 63 aa, Citrobacter koseri
MMTISDIIEIIIVCALIFFPLGYLARHSLRRIRDTLRLFFAKPRYVKPAGTLRRTEKARATKK

SEQ ID NO: 4537 - DNA, 1560 bp, Acinetobacter pittii
gtggaccctgtattctctatcggtatctcatcattatgggatgagctgcgacatatgccagcaggcggcgtctggtggtttaacgtcgatcgccatgaagatgctatcagtctggcgaatcaaacaattgcatcccaggctgaaaccgcacacgtcgcggtcattagcatggacagcgatccggcgaaaatctttcaattagatgattctcaagggccggaaaaaataaaattattttcaatgctaaatcatgaaaaaggtctatactatttggcccgtgatttgcagtgttctattgatccccataattacctttttattcttgtttgcgcaaataacgcatggcaaaatattcctgccgagcggcttcgctcatggttggataaaatgaataaatggagcaggttaaaccattgttcgcttttggtaattaatcccggaaataataacgataaacaattttcattgttgcttgaggaataccgttcactttttggtcttgccagtttgcgttttcagggtgaccaacatttgctggatattgccttctggtgcaacgaaaaaggggtcagcgcccgtcagcagcttagcgttcagcaacaaaatggtatctggacattagttcaaagcgaagaggcggagatccaaccacgcagcgacgaaaaacgcattctgagtaatgttgctgtactggaaggtgcgccgccgctatcggaacactggcaactgttcaacaataacgaagtcctgttcaatgaagcccgtaccgctcaggcggcgacggtggtcttttctttacagcaaaatgcgcaaatcgagccactggcccgcagcattcataccctgcgtcgccagcgcggtagtgcgatgaaaatcctcgtgcgggaaaataccgctagcctgcgcgccaccgatgaacgtttgttattggcctgcggtgcaaatatggttattccgtggaatgcgccactctcccgttgtctgacgatgatcgaaagcgtgcaagggcagaagtttagtcgctatgtaccggaagatatcactaccttgctgtcaatgacccagccgctcaaactgcgtggtttccagaagtgggatgtgttctgtaatgccgtcaacaacatgatgaataaccctctcttgcctgcccacggtaaaggcgttctggttgccctacgtccggtaccgggtatccgcgttgagcaagccctgacgctatgtcgccctaaccgtaccggcgatatcatgaccattggcggtaatcggctggtgctgtttctctcattctgtcggattaacgatctggataccgcgttgaatcatattttcccattgcctactggcgacattttctcaaaccgtatggtctggtttgaagatgatcaaatcagtgccgagctggtgcagatgcgcctgcttgccccagaacaatggggaatgccgctgcctttaacgcaaagttctaaaccggtcatcaatgccgagcacgatggtcgccactggcgacgaataccagaacccatgcgactgttagatgatgctgtggagcgctcatcatga

SEQ ID NO: 4538 - protein, 519 aa, Acinetobacter pittii
MDPVFSIGISSLWDELRHMPAGGVWWFNVDRHEDAISLANQTIASQAETAHVAVISMDSDPAKIFQLDDSQGPEKIKLFSMLNHEKGLYYLARDLQCSIDPHNYLFILVCANNAWQNIPAERLRSWLDKMNKWSRLNHCSLLVINPGNNNDKQFSLLLEEYRSLFGLASLRFQGDQHLLDIAFWCNEKGVSARQQLSVQQQNGIWTLVQSEEAEIQPRSDEKRILSNVAVLEGAPPLSEHWQLFNNNEVLFNEARTAQAATVVFSLQQNAQIEPLARSIHTLRRQRGSAMKILVRENTASLRATDERLLLACGANMVIPWNAPLSRCLTMIESVQGQKFSRYVPEDITTLLSMTQPLKLRGFQKWDVFCNAVNNMMNNPLLPAHGKGVLVALRPVPGIRVEQALTLCRPNRTGDIMTIGGNRLVLFLSFCRINDLDTALNHIFPLPTGDIFSNRMVWFEDDQISAELVQMRLLAPEQWGMPLPLTQSSKPVINAEHDGRHWRRIPEPMRLLDDAVERSS

SEQ ID NO: 4539 - DNA, 237 bp, Shigella flexneri
atggttgcctccggagcagtttgcggtgatgcctttcccgggaatggattgccagtgcggggactgtggagcttaattccggtgttggtggcctttccgttgattttatgccaacagccccctgtgactgacaggctgcctcgtcattccattcgtatctccagtaacagggggttgtattgtattttattgtgccggttcaggtgtgcgtttcccggcgcgtctgcaccggcttaa

SEQ ID NO: 4540 - protein, 78 aa, Shigella flexneri
MVASGAVCGDAFPGNGLPVRGLWSLIPVLVAFPLILCQQPPVTDRLPRHSIRISSNRGLYCILLCRFRCAFPGASAPA

SEQ ID NO: 4541 - DNA, 156 bp, Citrobacter koseri
atgccgggttacacagagtatgtcctggctgaaggatctttctcatacgggcaggcggttgctgtcataaccgcttaccgcaatgtgtttatccaggatgacccgggaatgcattttcgtcgggttatccgcaacgcggaaggtcagcgacgctga

SEQ ID NO: 4542 - protein, 51 aa, Citrobacter koseri
MPGYTEYVLAEGSFSYGQAVAVITAYRNVFIQDDPGMHFRRVIRNAEGQRR

SEQ ID NO: 4543 - DNA, 822 bp, Shigella flexneri
atgcgattagccagtcgttttggttatgctgcaaaccagatacgtcgtgaccgcccactgacacatgaagagctgatgcaccatgtgccggggattttcggggaagataaacacacgtcccgaagccagaactatacgtacatccccactatcaccgtactggaaagcctgcagcgggaaggttttcagccctttttcgcctgccagacccgtgtgcgcgacccgggccgccggggatacacaaaacacatgctgcgtctgcggcgggccggagagataaacggagaacatgtccctgaaattattctgctcaactctcatgacggtacctccagctaccagatgctgccgggttacttcaggttcgtctgccagaacggatgcgtctgtggtcagtctctgggggaagtgcgtgttccgcaccggggaaatgtggtggacagagtcattgaaggggcttacgaggtggtgggcgtgtttgaccggattgaggaaaagcgtgatgccatgcagtcgctgattctgccgccaccggcacgccaggcgctggcacaggcggcactgacttaccgttatggtgacgaacatcagcccgtcaccaccgccgacattctgacgccacgacgccgggaggattacggtaaggacctgtggagtgcttatcagaccattcaggagaatatgctgaaaggcggaatttcaggtcgcagcgctaaaggaaaacgtatccatacccgtgccattcacagcattgacactgacattaagctcaaccgcgcattgtgggtgatggcggaaaccctgctggagagcctgcgctga

SEQ ID NO: 4544 - protein, 273 aa, Shigella flexneri
MRLASRFGYAANQIRRDRPLTHEELMHHVPGIFGEDKHTSRSQNYTYIPTITVLESLQREGFQPFFACQTRVRDPGRRGYTKHMLRLRRAGEINGEHVPEIILLNSHDGTSSYQMLPGYFRFVCQNGCVCGQSLGEVRVPHRGNVVDRVIEGAYEVVGVFDRIEEKRDAMQSLILPPPARQALAQAALTYRYGDEHQPVTTADILTPRRREDYGKDLWSAYQTIQENMLKGGISGRSAKGKRIHTRAIHSIDTDIKLNRALWVMAETLLESLR

SEQ ID NO: 4545 - DNA, 210 bp, Klebsiella oxytoca
atgtttgagtccggccttcgcaccatcggaacatcaatagacgtcaacggacgtctttttttgtgcctaaaatccagtatccgcaaggctttcctcgctttttcactcaacctaagtcaacctgattcaatctacatcaacttactgatgcgggtacaactgcgggtatttcccggttcgataatgtttgtacccacacagaacccttga

SEQ ID NO: 4546 - protein, 69 aa, Klebsiella oxytoca
MFESGLRTIGTSIDVNGRLFLCLKSSIRKAFLAFSLNLSQPDSIYINLLMRVQLRVFPGSIMFVPTQNP

SEQ ID NO: 4547 - DNA, 396 bp, Shigella boydii
atgaccaatatcgaaagattagaacgctgtgccgatattatgcggcgcagatggatttatgaccctgaagcgggtttattgtttagccgtgaaacaaaagacgttatcaaaggcagcatgaccaataaagggcatttggttgtaacggtacatgaaggtaaattcaaagtgacactcacctatcagaaagcctgctatgtatacacatacggcgcttatgacgagacattatatgaagtgcaccacgttaatttgaacaaacaggataaccgcatcaagaatattcgcctgatgccgaaagaaaagcaccgccggatacataaaaacgtccgcaaacttattcggctgggccacacacaatggcttcaaccgcaattaattgaacaatcactataa

SEQ ID NO: 4548 - protein, 131 aa, Shigella boydii
MTNIERLERCADIMRRRWIYDPEAGLLFSRETKDVIKGSMTNKGHLVVTVHEGKFKVTLTYQKACYVYTYGAYDETLYEVHHVNLNKQDNRIKNIRLMPKEKHRRIHKNVRKLIRLGHTQWLQPQLIEQSL

SEQ ID NO: 4549 - DNA, 543 bp, Shigella sonnei
atggacgcatttgaggtactggcaaataaaggcgctgaactggtagcacagcgtgataaaaccgccaacgaaggggaacgcgcactgctaaataaacagattaaagcgatccgtatggcccagtttaaattaatcagtaatgaagttatcgaaacaattaaaccgcagatcccacaaatcgttgctgacgctattaaagccgccggactggagaaacgcattgccgggctaaaaacgaacgcagagaaaatggagatgcacaaacagagcggtgctccgaatcccgatgagtacttctcaccggatgttgagtttatggcgcaggttgaggaacgtctgggtagctgtctcaccgaggaacagcgtcgctattttgatggagtggatagttcggcaggtattgacctgaactcgtatttcggtcgtgaaattgagcattttgatgccgccccgtctatgccggagccagaaccagaaatggccaccgatcctgaagctgagcaacggaaacgcgtattcaatgcgatagggattcggtactga

SEQ ID NO: 4550 - protein, 180 aa, Shigella sonnei
MDAFEVLANKGAELVAQRDKTANEGERALLNKQIKAIRMAQFKLISNEVIETIKPQIPQIVADAIKAAGLEKRIAGLKTNAEKMEMHKQSGAPNPDEYFSPDVEFMAQVEERLGSCLTEEQRRYFDGVDSSAGIDLNSYFGREIEHFDAAPSMPEPEPEMATDPEAEQRKRVFNAIGIRY

SEQ ID NO: 4551 - DNA, 651 bp, Shigella boydii
atgagaaatattatgaaaaatgtactgattcttggtgctggcggtcagatagcccgccatgtgattaatcaactggcagataaacaaactattaaacaaactttatttgcccgtcagccagcaaaaatacacaaaccctatccaactaatagccagattattatgggggatgtactgaatcatgcagcactgaagcaggccatgcagggacaggatattgtgtatgccaaccttacgggggaagatttagatattcaggcaaattcagtgatcgctgcgatgaaagcctgtgatgttaaacgtctgatctttgttctttccctcggtatttatgatgaagttccaggaaaatttgtcgaatggaataatgcagttattggtgaacccctaaaaccattccgcagggctgcggatgcaattgaggcttctggactggaatatacaattcttcgccctgcctggctgactgatgaagatattattgattatgagcttacctctcgcaatgaaccattcaaaggtacgatcgtatcacgtaagagtgtcgcagcattaattacagatatcatcgataaacctgagaaacacattggtgagaatataggcatcaatcaacccgggactgatggcgataagccattcttcatgtaa

SEQ ID NO: 4552 - protein, 216 aa, Shigella boydii
MRNIMKNVLILGAGGQIARHVINQLADKQTIKQTLFARQPAKIHKPYPTNSQIIMGDVLNHAALKQAMQGQDIVYANLTGEDLDIQANSVIAAMKACDVKRLIFVLSLGIYDEVPGKFVEWNNAVIGEPLKPFRRAADAIEASGLEYTILRPAWLTDEDIIDYELTSRNEPFKGTIVSRKSVAALITDIIDKPEKHIGENIGINQPGTDGDKPFFM

SEQ ID NO: 4553 - DNA, 153 bp, Escherichia coli
atgtcccacgctgtggacggtacttacattaaggcacaacaggacaaaatggtcaattcttcgttatgtaaaaaagcgtcagtggatacatattttaatgttatggaagttaatttaattatttacaatgatgatgtaataatgatgaattaa

SEQ ID NO: 4554 - protein, 50 aa, Escherichia coli
MSHAVDGTYIKAQQDKMVNSSLCKKASVDTYFNVMEVNLIIYNDDVIMMN

SEQ ID NO: 4555 - DNA, 456 bp, Citrobacter koseri
atgcctaatgattacaacccaaacaacgtggcaccacccgaaaaaaaactgctgcaaaaatccattgaaatagatggttttacccaacccattgtggtcacacatacggataaaaatgccatggaaatcgtggatggttttcaccgccatgaaattggtaaaggctcatcatcattaaaattacgcttaaaaggttatttgccggtgacctgtctggaaggtacgcgtaatcaacgcatcgccgcgactattcgtcataatcgcgctcgtggacgccatcaaatcaccgccatgtcggaaatcgtccgtgaacttagccagttgggatgggatgataataaaattggcaaagagctgggaatggacagcgacgaagtgctgcgactgaagcaaattaacggcctgcaagagttgtttgccgaccgtcaatattcccgcgcctggacggttaaatag

SEQ ID NO: 4556 - protein, 151 aa, Citrobacter koseri
MPNDYNPNNVAPPEKKLLQKSIEIDGFTQPIVVTHTDKNAMEIVDGFHRHEIGKGSSSLKLRLKGYLPVTCLEGTRNQRIAATIRHNRARGRHQITAMSEIVRELSQLGWDDNKIGKELGMDSDEVLRLKQINGLQELFADRQYSRAWTVK

SEQ ID NO: 4557 - DNA, 903 bp, Shigella sonnei
atggccaatctctacgacttgaaaaagttcgacttaaatcttcttgtcatatttgagtgtatttaccagcatttaagcattagcaaagctgctgaatcactatatatcaccccatcagccgtgagccagtcgttacaacgcttacgtgcgcaatttaatgaccctttattcattcgctcaggaaaaggtatcgcgccgacgacaacagggttgaatctgcatcaccatcttgagaaaaacctcaaaggccttgaacaaacaattaatatagtcaataagtccgaactaaagaaaaactttattatctacggccctcagctcatttcttgctctaataatagtatgctgatccgctgcctacggcaagatgcctctgtcgagattgagtgccatgatatcctcatgtcagcagagaatgctgaagaactgttggttcaccgcaaagccgatctggtgatcacccaaatgccagtgatcagccgttccgtcatttgcatgccattgcatacaattcgcaatactctaatttgtagtaataagcatccgcgaattactgacaatagcacttatgaacaaattatggcagaagagttcacccaattaatagccaaatcagcaggagttgatgatattcaaatggaaatagacgagaagtttatgaatcgcaaaatttcatttcgtggttcctctttgctgacaataattaatagcattgcagttacagatttactgggaatagtcccctatgaactttataactaccaccgtgactttcttaatttaaaagagataaaactagaatatccgttaccttcaataaagctttacatttcctataataaatcttctttaaataatttggtgttctcccgatttattgaccgtctaaatgagagtttttga

SEQ ID NO: 4558 - protein, 300 aa, Shigella sonnei
MANLYDLKKFDLNLLVIFECIYQHLSISKAAESLYITPSAVSQSLQRLRAQFNDPLFIRSGKGIAPTTTGLNLHHHLEKNLKGLEQTINIVNKSELKKNFIIYGPQLISCSNNSMLIRCLRQDASVEIECHDILMSAENAEELLVHRKADLVITQMPVISRSVICMPLHTIRNTLICSNKHPRITDNSTYEQIMAEEFTQLIAKSAGVDDIQMEIDEKFMNRKISFRGSSLLTIINSIAVTDLLGIVPYELYNYHRDFLNLKEIKLEYPLPSIKLYISYNKSSLNNLVFSRFIDRLNESF

SEQ ID NO: 4559 - DNA, 351 bp, Acinetobacter pittii
atgatggatctcgataatattcctgatacgcaaacagaagctgaagagctggaagaagtggtgatggggcttatcatcaactctggacaagcgcgtagcctggcgtatgccgcattgaaacaggcgaagcagggcgattttgccgcagcgaaagccatgatggatcagtcacggatggcattgaatgaagcgcatctggtacagacgaaactgattgaaggcgatgcgggcgaaggtaagatgaaagtgagtctggtgctggtccacgctcaggatcatttaatgacgtccatgcttgcgcgtgaactgattactgaattaattgagcttcatgaaaaactgaaggcataa

SEQ ID NO: 4560 - protein, 116 aa, Acinetobacter pittii
MMDLDNIPDTQTEAEELEEVVMGLIINSGQARSLAYAALKQAKQGDFAAAKAMMDQSRMALNEAHLVQTKLIEGDAGEGKMKVSLVLVHAQDHLMTSMLARELITELIELHEKLKA

SEQ ID NO: 4561 - DNA, 168 bp, Acinetobacter pittii
atgcagccagtgattaacgcgccggaaattgccactgcccgagaacagcagttgtttaatggcaaaaacttccatgtgtttatctataacaaaactgagagtatcagcggactgcatcagcacgactattatgaatttactctagtattaaccgggcgttatttctag

SEQ ID NO: 4562 - protein, 55 aa, Acinetobacter pittii
MQPVINAPEIATAREQQLFNGKNFHVFIYNKTESISGLHQHDYYEFTLVLTGRYF

SEQ ID NO: 4563 - DNA, 345 bp, Citrobacter koseri
atgcagtctctcgatccactcttcgcgcgtttatcccgttcaaaatttcgctctcgctttcgtctgggcatgaaagagcgtcagtattgcctggagaaaggcgcgccagtcatcgaacaacatgcggcggattttgtcgctaaacgtcttgctccggcattaccggctaatgacggtaagcaaacccccatgcgcgggcatccggtgtttatcgctcagcacgccaccgcgacctgctgtcgcggttgtctggctaagtggcataacattccgcagggtgtttcgttaagcgaagaacaacaacgttatatcgtggcggtaatctatcactggctggttgtatag

SEQ ID NO: 4564 - protein, 114 aa, Citrobacter koseri
MQSLDPLFARLSRSKFRSRFRLGMKERQYCLEKGAPVIEQHAADFVAKRLAPALPANDGKQTPMRGHPVFIAQHATATCCRGCLAKWHNIPQGVSLSEEQQRYIVAVIYHWLVV

SEQ ID NO: 4565 - DNA, 456 bp, Citrobacter koseri
atgattacattcaaaccaacgcgaaacatcgacctgatagaagcagtcggaaatcaccctgacattatcgccgggagcaacaacggtgatggatacgactacaaacctgaatgccgttactttgaggtgaacgtgcacggtcagtttggcggcattgtttactatcaggagattcagccgctgacattagattgccacgccatgtacctgccagagattcgcggcttcagcaaggaaattgggctggcgttctggcgatacattctgactaacaccaccgttcagtgcgtaacatcgttcgctgcacgcaaattccgacacggtcagatgtactgcgcaatgattggccttaagcgtgtaggaaccatcaagaaatacttcaaaggcgtggatgacgtgactttttacagcggcacatgcgaagaactaatcgacttcctgaatcacgggagatag

SEQ ID NO: 4566 - protein, 151 aa, Citrobacter koseri
MITFKPTRNIDLIEAVGNHPDIIAGSNNGDGYDYKPECRYFEVNVHGQFGGIVYYQEIQPLTLDCHAMYLPEIRGFSKEIGLAFWRYILTNTTVQCVTSFAARKFRHGQMYCAMIGLKRVGTIKKYFKGVDDVTFYSGTCEELIDFLNHGR

SEQ ID NO: 4567 - DNA, 1731 bp, Escherichia coli
atggttaattaccgtgatttgttagagcaggctggcgcacgttacggtgtgccagaagggttgatgactgcactgggtgccaaggagtcttcttacaaccctgccgcagtaagctccgccggggctgtaggattgactcaggtcatgcctaggacatggcgtgatatgggttataccgatgagcaaatgcaaaaccccgaatatcaggctgacgctggcgcgcgctatctggcaaagatgtaccagcagtttggtaactggcgtgacgctcttcaggcttatcacgacggtcccggcaacgttatgaaggcaaagcgtggtgaatatacgccaggacctgaaggccgcggttacgttgatgatcgctttgctcaatgggctggtgacccggtgacagactcaacagtcgaacagcgcgccacctctgcaaaggtacatcctcagcaagcccctaacaacccgtttgcacaactggaagtacagtcatccgaacaagtatcggcatcaggtgtgcagtcagacccaaataatccatttgctcagattgagcagcaggcagccagtcagcagccacctcaacccgtaagttctgtcgcaccgaaacctgttcagcaacaaacagttaatcaggccaataatgcaccaacacgggaagaaccatcattgatgcaacaagctggcgattggctcactggtggtcaaagtgcagggcaaattgcagaacaggctggtcgtggtctggtaaacataccatttgacgtattgcagggtggcgcaagtctgattaatgcaatcagtcaggggcttggggggccaaaagtattggatgatgtttatcgtccagtagacagaccgacagacccctacgcgcaagctggagagtcaataggcggttatcttgttcctggagcaggtgtagctggaaacatggtcattggttctctcgctgacgcggcgaatcaacggggtgattttgccgaaaatgccgctattaatgccggacttagcattgctacgcatggcctgataaatggcgttacccgtggtgttcgtggtgcatcaaatataattagtggcaataaaacatctgcacagagagcgaccactgcgccaacagaaacatcaccattctccggtgatgccgctgcagcaacaaatcctgcggttcatgccgcagaggcaagagtagcacaaggtgtaccaatgacgcctgcgacgaagaacccagaggaagtcgttcgcacagtagcagcacaaaaaaggccaaatctcgcttcatcgcttgatgaactagatatcaatcctcaggctgaagttctggagtctgctgaaaggcttaatgttgattcattactcccttcacacttttccgggaacgagcaatacaaggcagttgagcaagcaatcaagtcccgtgcgggttctgctctacaggtgcaggaaaatgaagcaatcaggcagctagcacagggcgcgggtgagataattgatcgcgtttccggtgcaaaagatgctcttggtatgagcgacaagtttattgatacggtcaatggaagaatgtctgcgctgatgaaacgaagcgaccagctttatcgcaatgttgaaaaggcgatgcctgcaggtgcaaaaattgatgcgccatcaacaaggtcaatgctcaaacaggtggcagaagatcttggcgggatgaaaaaccttgaccctattgaaaagagagttgaggtagcctga

SEQ ID NO: 4568 - protein, 576 aa, Escherichia coli
MVNYRDLLEQAGARYGVPEGLMTALGAKESSYNPAAVSSAGAVGLTQVMPRTWRDMGYTDEQMQNPEYQADAGARYLAKMYQQFGNWRDALQAYHDGPGNVMKAKRGEYTPGPEGRGYVDDRFAQWAGDPVTDSTVEQRATSAKVHPQQAPNNPFAQLEVQSSEQVSASGVQSDPNNPFAQIEQQAASQQPPQPVSSVAPKPVQQQTVNQANNAPTREEPSLMQQAGDWLTGGQSAGQIAEQAGRGLVNIPFDVLQGGASLINAISQGLGGPKVLDDVYRPVDRPTDPYAQAGESIGGYLVPGAGVAGNMVIGSLADAANQRGDFAENAAINAGLSIATHGLINGVTRGVRGASNIISGNKTSAQRATTAPTETSPFSGDAAAATNPAVHAAEARVAQGVPMTPATKNPEEVVRTVAAQKRPNLASSLDELDINPQAEVLESAERLNVDSLLPSHFSGNEQYKAVEQAIKSRAGSALQVQENEAIRQLAQGAGEIIDRVSGAKDALGMSDKFIDTVNGRMSALMKRSDQLYRNVEKAMPAGAKIDAPSTRSMLKQVAEDLGGMKNLDPIEKRVEVA

SEQ ID NO: 4569 - DNA, 1524 bp, Shigella flexneri
ttgataatcagcgaaatgcaacgcaagcttgccacatgggcagccaccgatccgtccctacggattcaacggctgctgcgtctaataacacaaccagaatggctggctgaagcggcgcggatcacgctttcaccaaagggggcccatacccccggcgttgatggcgtgaacaaaacaatgctacaggccagactggctgttgagctgcaaatcctcagggatgaattactctcaggccactaccagcccttgcccgccagacgggtttacatccctaaaagcaacggcaaactgcgaccactgggtatccccgcgttgcgggatcgtattgttcagcgggccatgctgatggcgatggagccgatatgggagagtgattttcatacgctctcatatggcttccggcctgagcgcagtgtccaccacgcgatccgcacggtgaaattacagctcacagactgcggtgaaacccggggacgctgggtgattgaaggcgacctgtccagttacttcgacaccgtacatcatcgactgctgatgaaggctgtacgccgcaggatcagtgacgcacgtttcatgactctgctgtggaaaaccatcaaggcgggacatatcgatgtcggtctctttcgggcggccagtgaaggtgtgccacagggcggtgttatatcgccgctattatcgaacatcatgctgaatgagttcgatcaatacctgcatgagcgctacctgagcgggaaagccagaaaagatcggtggtactggaataacagtatccaacggggccgaagtacggcggtcagagaaaactggcagtggaaacccgcggtggcgtactgccgctatgccgatgattttgtcctcatcgtcaaaggcaccaaagcacaggcggaagccatcagggaggagtgtcggggtgtgctcgaaggcagtctgaaactcaggctgaacatggataagactaaaatcacccatgttaatgacggctttatctttctggggcacaggatcattcgcaaacgcagtcgttatggcgagatgcgagtggtctcaacgatcccgcaggagaaagccagaaacttcgccgcatcgctgacagcactgttatcaggcaactacagtgaaagcaaagtcgatatggctgaacaactcaaccgaaaactgaaaggctgggccatgttctatcagttcgttgattttaaggccaaagtcttcagttatatcgaccgtgtcgtgttctggaagctggctcactggctggcccgcaaataccgtacaggtatcgcttccctgatgaggtggtggtgtaaatcaccgaaaccgggtcagagcaaaacgtgggttttatttggtaaaaccaatcacggcaagctcagcggcgaaatactgtaccggttggtggggcaaggcaagaagctgttccgctggcggctacccgaaggtaatccctatctgaggacggagaccagaaacacgtatacatcgcgctttacagaagtggcaatggcgttcgccagcatttaa

SEQ ID NO: 4570 - protein, 507 aa, Shigella flexneri
MIISEMQRKLATWAATDPSLRIQRLLRLITQPEWLAEAARITLSPKGAHTPGVDGVNKTMLQARLAVELQILRDELLSGHYQPLPARRVYIPKSNGKLRPLGIPALRDRIVQRAMLMAMEPIWESDFHTLSYGFRPERSVHHAIRTVKLQLTDCGETRGRWVIEGDLSSYFDTVHHRLLMKAVRRRISDARFMTLLWKTIKAGHIDVGLFRAASEGVPQGGVISPLLSNIMLNEFDQYLHERYLSGKARKDRWYWNNSIQRGRSTAVRENWQWKPAVAYCRYADDFVLIVKGTKAQAEAIREECRGVLEGSLKLRLNMDKTKITHVNDGFIFLGHRIIRKRSRYGEMRVVSTIPQEKARNFAASLTALLSGNYSESKVDMAEQLNRKLKGWAMFYQFVDFKAKVFSYIDRVVFWKLAHWLARKYRTGIASLMRWWCKSPKPGQSKTWVLFGKTNHGKLSGEILYRLVGQGKKLFRWRLPEGNPYLRTETRNTYTSRFTEVAMAFASI

SEQ ID NO: 4571 - DNA, 414 bp, Citrobacter koseri
atgttaaagcgttatttagtactctcggtagcaacggcagcattttcattaccttctttggtttatgccgcacaacaaaacattcttagcgtgcacattttgaaccagcaaacaggaaaacccgctgccgacgtgacagtcactcttgaaaagaaagcggataacggctggttacaacttaataccgccaaaacagataaggatggacgaattaaggcactgtggcccgagcaaactgcgactactggcgattaccgtgtcgtatttaaaaccggggactatttcaagaaacaaaatcttgaaagtttcttccctgagattcccgttgaatttcatattaataaagtgaacgagcattatcatgtgcctttgttactcagccaatatgggtattcaacctatcgtggcagttaa

SEQ ID NO: 4572 - protein, 137 aa, Citrobacter koseri
MLKRYLVLSVATAAFSLPSLVYAAQQNILSVHILNQQTGKPAADVTVTLEKKADNGWLQLNTAKTDKDGRIKALWPEQTATTGDYRVVFKTGDYFKKQNLESFFPEIPVEFHINKVNEHYHVPLLLSQYGYSTYRGS

SEQ ID NO: 4573 - DNA, 918 bp, Shigella boydii
atgaacttcagacgcctgaaatacttcgtaaaaattgtagatattggtagcctgacccaggctgctgaagtattgcatatcgcacaaccagcgctcagccagcaggttgccatactggaaggtgagttaaatcaacagcttttgattcgcacaaaacggggcgttacgccaacagacgccggaaaaattctctatacccatgcacgggccattttacgtcagtgtgagcaggcccaactggcggtgcataacgttggtcagtcattatcggggcaagtctcgattggctttgcgccaggaaccgctgcgtcatccatcaccatgcccttattacaggcggttcgcgctgaattcccggaggtcgttatctatcttcatgaaaatagtggtgcagtgcttaacgaaaaactgataaatcaccaactcgatatggcggtgatttatgagcattcccctgtggctggggtatccagtcaggctttgctgaaagaagatcttttcctggtaggaactcaagattgcccggggcaaaacgttgatgttaatgctattgcgcaaatgaacctttttctccccagtgattacagcgctgttagacttcgtgttgatgaggctttttccctacggcggctcacggcaaaagtcattggtgaaattgagtctattgccacgcttaccgcagcgattgccagcggcatgggcgttgcagtattacctgaatcggctgcgcgttcgttatgtggcgcagtaaatgggtggatgtcacgcattaccactccttcaatgagtctctctttgtccttaaatttacccgccagagcaaacttgtcaccacaggcacaggcagtgaaagagttgttaatgtcagtgattagttctccagtgatggaaaaaaggcagtggcaattggtgagctaa

SEQ ID NO: 4574 - protein, 305 aa, Shigella boydii
MNFRRLKYFVKIVDIGSLTQAAEVLHIAQPALSQQVAILEGELNQQLLIRTKRGVTPTDAGKILYTHARAILRQCEQAQLAVHNVGQSLSGQVSIGFAPGTAASSITMPLLQAVRAEFPEVVIYLHENSGAVLNEKLINHQLDMAVIYEHSPVAGVSSQALLKEDLFLVGTQDCPGQNVDVNAIAQMNLFLPSDYSAVRLRVDEAFSLRRLTAKVIGEIESIATLTAAIASGMGVAVLPESAARSLCGAVNGWMSRITTPSMSLSLSLNLPARANLSPQAQAVKELLMSVISSPVMEKRQWQLVS

SEQ ID NO: 4575 - DNA, 936 bp, Citrobacter koseri
atgatgcgtcgtgtaaatattctttgctcatttgctctgctttttgccagccaaaatagcctggcggtaacttatccattacctccagagggtagccgtttagtggggcagtcgcttactgtaactgttcctgatcacaatactcagccgctggagacttttgccgcacaatacgggcaagggttaagtaatatgctggaagcgaatccgggcgctgatgtttttttgccgaagcctggctcacaactcaccattccgcagcaactgattttgcccgccactgttcgtaaagggattgtggttaacgtcgctgaaatgcgtctttattactatccgccagacagtaatacagtggaagtctttcctattggtatcggccaggctgggcgagaaaccccgcgtaactgggtgactaccgttgaacgtaaacaagaagcaccaacctggacgccaacgccgaacacccggcgcgaatatgcgaaacgaggggagagtttgcccgcatttgttcctgcggggcccgataaccccatggggctgtacgcgatttatattggcaggttgtatgccatccacggtaccaatgccaattttggtattgggctccgtgtaagtcagggctgtattcgtctgcgtaatgacgatatcaaatatctgtttgataatgttcctgtaggcactcgtgtacaaattattgatcagccagtgaaatacacaacggaaccggatggttcaaagtggctggaagttcatgagccgctgtcgcgcaatcgtgcagaatatgagtctgaccgaaaagtgccattgccggtaaccccatctttgcgggcgtttatcaacgggcaagaagttgatgtaaatcgcgcaaatgctgcgttgcaacatcgatcgggaatgcctgtgcaaattagttctggttcaagacagatgttttaa

SEQ ID NO: 4576 - protein, 311 aa, Citrobacter koseri
MMRRVNILCSFALLFASQNSLAVTYPLPPEGSRLVGQSLTVTVPDHNTQPLETFAAQYGQGLSNMLEANPGADVFLPKPGSQLTIPQQLILPATVRKGIVVNVAEMRLYYYPPDSNTVEVFPIGIGQAGRETPRNWVTTVERKQEAPTWTPTPNTRREYAKRGESLPAFVPAGPDNPMGLYAIYIGRLYAIHGTNANFGIGLRVSQGCIRLRNDDIKYLFDNVPVGTRVQIIDQPVKYTTEPDGSKWLEVHEPLSRNRAEYESDRKVPLPVTPSLRAFINGQEVDVNRANAALQHRSGMPVQISSGSRQMF

SEQ ID NO: 4577 - DNA, 744 bp, Shigella boydii
atgagcaaattattttgggcgatgctctcatttattacgcgtctgcctgtaccgcgtcgctggtcccagggactggatttcgagcattattctcgcggtattattacttttcctttgattggattattgcttggcgcgattagcgggctggtcttcatggtgctgcaggcatggtgtggcgcaccactggcggcactgtttagcgtacttgtgctggcgctgatgaccggggaattccatctggacggcctcgctgatacctgtgatggcgtattttctgcacgtagtcgcgatcgcatgttggaaatcatgcgtgatagccgtttaggcacccacggcggtctggcattgatttttgtggtactggcaaagattctggtgttaagcgagttggctctgcgtggcgaaccgatccttgcatcgctggcggcagcatgtgcggtcagccgcgggactgccgcattattgatgtatcgtcatcgttatgcgcgggaagaagggcttggcaatgtgttcattggcaaaattgatgggcgacaaacctgcgtcacactcggcttagccgctatttttgctgccgtattattgctgggtatgcatggtgtggctgctatggtggtgacgatggtggcgattttcatcctcggtcagcttctcaaacgtacgctgggcgggcaaacgggcgatacgctgggagcagccatagagcttggtgaactggtcttcctgctggcactgctataa

SEQ ID NO: 4578 - protein, 247 aa, Shigella boydii
MSKLFWAMLSFITRLPVPRRWSQGLDFEHYSRGIITFPLIGLLLGAISGLVFMVLQAWCGAPLAALFSVLVLALMTGEFHLDGLADTCDGVFSARSRDRMLEIMRDSRLGTHGGLALIFVVLAKILVLSELALRGEPILASLAAACAVSRGTAALLMYRHRYAREEGLGNVFIGKIDGRQTCVTLGLAAIFAAVLLLGMHGVAAMVVTMVAIFILGQLLKRTLGGQTGDTLGAAIELGELVFLLALL

SEQ ID NO: 4579 - DNA, 510 bp, Acinetobacter pittii
atggtagtgtccgctattgccagtacacctcactcttcacaggttctgtatatcgctacctcgcaaatccttgatgatgagatggctgcacggatagaacatcatcggcaaagccgcccggagcactggcgcacagtggagcgctggcaacatcttgatgaattaattcatgcagacattaacccgaatgaggctgtgttgctggaatgcgttaccacaatggtgactaatctgttgtttgattatggcggcgataaagaccctgatgaatgggattatcaggcgatggaacaggcgattaatgctgagattcagtcgttgattgctgcctgccaacgttgccccgcaaaggttgtattagtgactaacgaagtgggaatggggattgtgccggagagtcgtctggcacgacattttcgtgatattgccgggcgggtaaatcagcagttggccgctgcggcaaatgaagtatggctggtggtttcgggtattggagtaaaaatcaaatga

SEQ ID NO: 4580 - protein, 169 aa, Acinetobacter pittii
MVVSAIASTPHSSQVLYIATSQILDDEMAARIEHHRQSRPEHWRTVERWQHLDELIHADINPNEAVLLECVTTMVTNLLFDYGGDKDPDEWDYQAMEQAINAEIQSLIAACQRCPAKVVLVTNEVGMGIVPESRLARHFRDIAGRVNQQLAAAANEVWLVVSGIGVKIK

SEQ ID NO: 4581 - DNA, 657 bp, Shigella boydii
atgtcccggatagaagcggtatttttcgactgcgacggtacgctggtcgacagtgaagtcatttgctcccgcgcatatgtaacgatgtttcaggaatttggtattacgctcgatcctgaagaggtattcaaacgtttcaaaggtgtaaaactgtacgaaattatcgatattgtttcccttgaacatggtgttacgttagcgaaaacagaagctgaacacgtttaccgtgcagaagtcgctcggctgttcgattcagccatcgaaggggctggagcgctcctgtcagcgatcactgcgccaatgtgtgtggtatctaacggcccaaataacaaaatgcagcattctatgggcaagctgaatatgttgcactacttcccggataaactgttcagcggctacgatattcagcgctggaagccagacccggcgttaatgttccatgcggcaaaagcgatgaatgtaaatgtagaaaactgcattctggttgatgactcagttgccggtgcgcaatctggtatcgacgcaggtatggaagtgttctacttctgcgccgacccgcacaataagccgatcgttcacccgaaagtcaccacctttacccatctttcgcagttaccggaactgtggaaagcgcgtggttgggatattacggcatag

SEQ ID NO: 4582 - protein, 218 aa, Shigella boydii
MSRIEAVFFDCDGTLVDSEVICSRAYVTMFQEFGITLDPEEVFKRFKGVKLYEIIDIVSLEHGVTLAKTEAEHVYRAEVARLFDSAIEGAGALLSAITAPMCVVSNGPNNKMQHSMGKLNMLHYFPDKLFSGYDIQRWKPDPALMFHAAKAMNVNVENCILVDDSVAGAQSGIDAGMEVFYFCADPHNKPIVHPKVTTFTHLSQLPELWKARGWDITA

SEQ ID NO: 4583 - DNA, 1338 bp, Acinetobacter pittii
atgagtcatcaacataccacccagacttctggtcagaggatgctggaacgtgtttttaaactgcgcgaacatggtactacggcacgaactgaagtgattgccgggttcaccaccttcctgacgatggtctacatcgtatttgttaacccacaaattctgggcgttgctggcatggacaccagtgccgtcttcgtaacaacctgtctgattgctgctttcggtagcattatgatgggattgtttgcaaaccttccggtggcgctggctcctgcgatggggcttaacgcctttttcgcttttgtggttgtccaggcaatggggctgccgtggcagatcggtatgggcgcaatcttctggggcgctgtcggactgcttcttttgaccattttccgcgttcgttactggatgattgctaacattccggtaagtctgcgtgtgggtattaccagcggtatcggcctgtttatcggcatgatggggctgaaaaacgcaggtgtgattgtcgctaactcggaaacgctggtgagcatcggtaatctgacttctcacagcgtacttctgggtatcctcggctttttcatcattgctattctggcctcgcgcaacattcacgcagcggtgctggtttctatcgtggtgacgacgctgctgggctggatgctgggtgatgtgcactacaatggcatcgtttctgcgccgccgagcgtaatgacagttgtgggtcatgtagatttagccgggtcgtttaacctcgggctggcaggggtgattttctctttcatgttggtcaacttgtttgactcctccggtacgctgattggcgtgaccgataaagcaggtctggcggatgagaaggggaaattcccgcgcatgaagcaggcgctgtatgtcgacagtatctcttccgtgaccggttcgtttatcggtacttcttccgttacggcttatattgagtcctcttccggcgtatcggttggcggtcgtaccggtctgacggcagtggttgttggtctgctgttcctgctggttatctttctgtcgccgctggcgggaatggtgccaggctacgctgcagctggcgcgttgatctacgttggcgtgttgatgacctcaagtcttgctcgcgtgaactggcaggatcttactgaatctgttccggcgtttattaccgccgtgatgatgccgttcagcttttcgattaccgaaggtattgcgctgggctttatctcctactgcgtgatgaagattggtaccgggcgtctgcgtgaccttagcccgtgcgtaatcatcgttgcgctgctgtttatcctgaagattgtatttatcgacgctcattaa

SEQ ID NO: 4584 - protein, 445 aa, Acinetobacter pittii
MSHQHTTQTSGQRMLERVFKLREHGTTARTEVIAGFTTFLTMVYIVFVNPQILGVAGMDTSAVFVTTCLIAAFGSIMMGLFANLPVALAPAMGLNAFFAFVVVQAMGLPWQIGMGAIFWGAVGLLLLTIFRVRYWMIANIPVSLRVGITSGIGLFIGMMGLKNAGVIVANSETLVSIGNLTSHSVLLGILGFFIIAILASRNIHAAVLVSIVVTTLLGWMLGDVHYNGIVSAPPSVMTVVGHVDLAGSFNLGLAGVIFSFMLVNLFDSSGTLIGVTDKAGLADEKGKFPRMKQALYVDSISSVTGSFIGTSSVTAYIESSSGVSVGGRTGLTAVVVGLLFLLVIFLSPLAGMVPGYAAAGALIYVGVLMTSSLARVNWQDLTESVPAFITAVMMPFSFSITEGIALGFISYCVMKIGTGRLRDLSPCVIIVALLFILKIVFIDAH

SEQ ID NO: 4585 - DNA, 567 bp, Acinetobacter pittii
atgtctgaaaaattgcaggtggttacgttactggggagcctgcgcaaaggctcatttaatggcatggttgcacgtaccctgccgaaaattgctccggcgagcatggaagtcaatgcgttaccttccattgccgacattcccctgtatgacgctgacgtacagcaggaagaaggttttccagcaacggttgaagctctggcggaacagatccgtcaggctgacggtgtggtgatcgtcacgccggaatataactactcggtaccgggtgggctgaaaaatgccatcgactggctttcccgcctgccggatcaaccgctggccggtaaaccggtgttgattcagaccagctcaatgggcgtgattggcggcgcgcgctgtcagtatcacctgcgccagattctggttttcctcgatgcaatggtgatgaacaagccggaatttatgggcggcgtgattcagaacaaagttgatccgcaaaccggagaagtgattgatcagggtacgctggaccacctgaccgggcaattgaccgcatttggtgagtttattcagcgagttaagatctaa

SEQ ID NO: 4586 - protein, 188 aa, Acinetobacter pittii
MSEKLQVVTLLGSLRKGSFNGMVARTLPKIAPASMEVNALPSIADIPLYDADVQQEEGFPATVEALAEQIRQADGVVIVTPEYNYSVPGGLKNAIDWLSRLPDQPLAGKPVLIQTSSMGVIGGARCQYHLRQILVFLDAMVMNKPEFMGGVIQNKVDPQTGEVIDQGTLDHLTGQLTAFGEFIQRVKI

SEQ ID NO: 4587 - DNA, 750 bp, Citrobacter koseri
atggcgactcactttgcccgagggattttaacggaaggacatctgatttctgttcgtctcccctcccagtgtcatcaagaagcccgaaacattccccctcatcgtcaaagccgttttctggcgtccagaggtttactcgcagaactgatgttcatgctgtatggcattggcgaattgccggaaatcgtcaccctgccgaaaggtaaaccggttttcagtgataaaaatttgccttcgttttctatttcctatgccgggaatatggttggcgtggcgttaacaaccgaaggtgaatgtggcctcgatatggaactacagcgtgcgacgcgcgggtttcatagcccacacgcgcccgataaccacaccttttccagcaatgaatcgctatggatcagtaaacaaaacgatcctaacgaagcgcgggcgcagctcattacgctgcgccgaagcgtgctaaaactaaccggtgatgttttgaatgacgatccgcgcgatctgcagctgctgcccattgccggacgcctgaaatgtgctcatgtaaatcatgtagaagcgttatgcgacgcggaggacgtgctggtgtggtccgtggcggtcacgcccgcgattgaaaagctcagtgtctgggagttagatggcaaacacagctggaaaagcctgccggatattcacagccgcgccaacaatcctaccagccggatgatgcgttttgcccagctctctaccgtgaagtctttttcgccaaattga

SEQ ID NO: 4588 - protein, 249 aa, Citrobacter koseri
MATHFARGILTEGHLISVRLPSQCHQEARNIPPHRQSRFLASRGLLAELMFMLYGIGELPEIVTLPKGKPVFSDKNLPSFSISYAGNMVGVALTTEGECGLDMELQRATRGFHSPHAPDNHTFSSNESLWISKQNDPNEARAQLITLRRSVLKLTGDVLNDDPRDLQLLPIAGRLKCAHVNHVEALCDAEDVLVWSVAVTPAIEKLSVWELDGKHSWKSLPDIHSRANNPTSRMMRFAQLSTVKSFSPN

SEQ ID NO: 4589 - DNA, 837 bp, Acinetobacter baumannii
atgttcatgccgcctgtttttcctgctcattggcacgtttcgcaacctgttctcattgcggacaccttttccagcctcgtttggaaagtttcattgccagacgggactcctgcaatcgtcaagggattgaaacctataaaagacattgctgatgaactgcgcggggccggctatctggtatggcgcaatgggaggggagcagtccggttgctcggtcgtgagaacaatctgatgttgctcgaatatgccggggagcgaatgctctctcacatcgttgccgagcacggcgactaccaggcgaccgaaattgcagcggaactaatggcgaagctgtatgccgcatctgaggaacccctgccttctgcccttctcccgatccgggatcgctttgcagctttgtttcagcgggcgcgcgatgatcaaaacgcaggttgtcaaactgactacgtccacgcggcgattatagccgatcaaatgatgagcaatgcctcggaactgcgtgggctacatggcgatctgcatcatgaaaacatcatgttctccagtcgcggctggctggtgatagatcccgtcggtctggtcggtgaagtgggctttggcgccgccaatatgttctacgatccggctgacagagacgacctttgtctcgatcctagacgcattgcacagatggcggacgcattctctcgtgcgctggacgtcgatccgcgtcgcctgctcgaccaggcgtacgcttatgggtgcctttccgcagcttggaacgcggatggagaagaggagcaacgcgatctagctatcgcggccgcgatcaagcaggtgcgacagacgtcatactag

SEQ ID NO: 4590 - protein, 278 aa, Acinetobacter baumannii
MFMPPVFPAHWHVSQPVLIADTFSSLVWKVSLPDGTPAIVKGLKPIKDIADELRGAGYLVWRNGRGAVRLLGRENNLMLLEYAGERMLSHIVAEHGDYQATEIAAELMAKLYAASEEPLPSALLPIRDRFAALFQRARDDQNAGCQTDYVHAAIIADQMMSNASELRGLHGDLHHENIMFSSRGWLVIDPVGLVGEVGFGAANMFYDPADRDDLCLDPRRIAQMADAFSRALDVDPRRLLDQAYAYGCLSAAWNADGEEEQRDLAIAAAIKQVRQTSY

SEQ ID NO: 4591 - DNA, 165 bp, Shigella flexneri
atgatggagatattctggaccatgctggccagccaggacaggaagcgcattcgtgaatacattgcggagcagaacctgatagcagccattgaactggacgaacggattggttatttcggacgaacgcaccggcttacgccggttttacatctgtactacatgtaa

SEQ ID NO: 4592 - protein, 54 aa, Shigella flexneri
MMEIFWTMLASQDRKRIREYIAEQNLIAAIELDERIGYFGRTHRLTPVLHLYYM

SEQ ID NO: 4593 - DNA, 924 bp, Shigella flexneri
atgacgattgaaagcttttttattggcacccgccgctctgataaacgttacgggcctcagagcaaggatatgcaggtttctgaattcatttctctgatttctcccaaaaatgcccctcataaggttgtgttacctgattttactggtctggcaattcggcttgatgcacaaatcaggaaccagtttcatcaactgaaagaggatgagcacttccttcgatatcggcagttgtcggaaaggtggtatcaggcgggctctattagtgacagaaacaaccgcagtaagcgttttgagaagatcatggatgactcacttgattttttgctttacagccaagacgtcatgcctaacatcaatccagatgatctccaatggcatgattacgaaaaggctagcagtaagggtaaaatgtactgtgtagcgcttctgttccatgtcattgcacgggctgcatatgaacccgaatctgtgggtaaagatccgacacttccagaatattgccggtggatgaaaaattggatagagaaaacattaggtcatgattttttagatagaatgatgatctattgtgcgctgtttgccccagcgtattttcccgcgttacaacgtctgagcggagagaaagaaacgcgtgatgtccatgaattcctggctgagcatgttcgcactttagctcaaaaaaattcttcagaggtaaattatagagatcaacggcaattcacgtttggctacaccatgttcacgaagcaacaatttgaatttctggacatgatgcgcgatgtccattaccggattgattgtattgaacagctccttctggaccttatagaacgtaaggttgtggatttcactgatgcatctgttgcaggcacgtggattgagaagcaaattcagcggcttgaatcaaacgacgtaaagcagtaa

SEQ ID NO: 4594 - protein, 307 aa, Shigella flexneri
MTIESFFIGTRRSDKRYGPQSKDMQVSEFISLISPKNAPHKVVLPDFTGLAIRLDAQIRNQFHQLKEDEHFLRYRQLSERWYQAGSISDRNNRSKRFEKIMDDSLDFLLYSQDVMPNINPDDLQWHDYEKASSKGKMYCVALLFHVIARAAYEPESVGKDPTLPEYCRWMKNWIEKTLGHDFLDRMMIYCALFAPAYFPALQRLSGEKETRDVHEFLAEHVRTLAQKNSSEVNYRDQRQFTFGYTMFTKQQFEFLDMMRDVHYRIDCIEQLLLDLIERKVVDFTDASVAGTWIEKQIQRLESNDVKQ

SEQ ID NO: 4595 - DNA, 675 bp, Shigella flexneri
atgctccagccgcccgcattggagaaattcttcaaattcccgttgcacatagcccggcaattcctttccctgctctgccataagcgcagcgaatgccgggtaatactcgtcaacgatctgatagagaagggtttgctcgggtcggtggctctggtaacgaccagtatcccgatcccggctggccgtcctggccgccacatgaggcatgttccgcgtccttgcaatactgtgtttacatacagtctatcgcttagcggaaagttcttttaccctcagccgaaatgcctgccgttgctagacattgccagccagtgcccgtcactccctgtcgtctgggcgttcctctgggctaaacatcgacatgatccggcgcttaatatcgccgtccttgttgaccagcgtcttggtcacgaaggccgcgtattctttggcgttgtcgtaccctttccagacctcgtgggggtcaagagcgtaggcgcaaacccgcccagcgactgggattctgaccaaggcgcgttctgtctcaaggtacttgagccagttccgaatcgtgcgggtgctaacctccagatggtcagccaggaactgctgatcgcagacaacagcgccacaggtagggtcgatgtgttcagcgaagaaggcatacaggccagcggcccccgcattgccctttga

SEQ ID NO: 4596 - protein, 224 aa, Shigella flexneri
MLQPPALEKFFKFPLHIARQFLSLLCHKRSECRVILVNDLIEKGLLGSVALVTTSIPIPAGRPGRHMRHVPRPCNTVFTYSLSLSGKFFYPQPKCLPLLDIASQCPSLPVVWAFLWAKHRHDPALNIAVLVDQRLGHEGRVFFGVVVPFPDLVGVKSVGANPPSDWDSDQGAFCLKVLEPVPNRAGANLQMVSQELLIADNSATGRVDVFSEEGIQASGPRIAL

SEQ ID NO: 4597 - DNA, 123 bp, Enterobacter hormaechei
atgggcacaccacgttttacccctgaatttaagggattactggaaaggctgggacatatccctccggcagaagcagaaaaagcttattatgctgccatcggaaacgatgatctggcaacctga

SEQ ID NO: 4598 - protein, 40 aa, Enterobacter hormaechei
MGTPRFTPEFKGLLERLGHIPPAEAEKAYYAAIGNDDLAT

SEQ ID NO: 4599 - DNA, 519 bp, Shigella flexneri
atgcagaacgccagacacccgaaaacacacagggaactgtgtgaactggcctgccgttttctccgcaacaacggctttaaggtggtgttcagtgaccgttttcacgcatggacgtcctgcggtgaacatcctgatgccctgggcttccgtaacggagcgtcatgtctcattgaggtgaaatgctcacggtctgatttcctggctgaccggaaaaaggtgttccggtcagagccggaaaagggcatgggagactggcgtttttatctctgcgagccgggggtgattaccgtggccgatttaccggcgggctgggggttgctgtatgcgattaacgggcgggtcaggaaagtacatggctggcccggaaatcatcagtgggtggttacggtcgcgaaaccgttcggggcaaacaaacaggctgaatgcgattatctgttcagtgctctgcgtcggctggaaatccggggcgtgacggagaacggtgcagatgctgacagggtgcagacatatgggctatga

SEQ ID NO: 4600 - protein, 172 aa, Shigella flexneri
MQNARHPKTHRELCELACRFLRNNGFKVVFSDRFHAWTSCGEHPDALGFRNGASCLIEVKCSRSDFLADRKKVFRSEPEKGMGDWRFYLCEPGVITVADLPAGWGLLYAINGRVRKVHGWPGNHQWVVTVAKPFGANKQAECDYLFSALRRLEIRGVTENGADADRVQTYGL

SEQ ID NO: 4601 - DNA, 216 bp, Shigella flexneri
atgtctaaccaacaccagtatggcctcttaccgtgcaaattgcaaggaggagtaaaccatgaaactaccgggagacgcccttatctggtgcgtattaatcgtgtgctgcacgttgttgatattcacactcctgacccggaatcgcctgtgcgaagtccggctgaaggacggatacagggaagttacggcaacaatggcttacgaatccggcggtaa

SEQ ID NO: 4602 - protein, 71 aa, Shigella flexneri
MSNQHQYGLLPCKLQGGVNHETTGRRPYLVRINRVLHVVDIHTPDPESPVRSPAEGRIQGSYGNNGLRIRR

SEQ ID NO: 4603 - DNA, 564 bp, Shigella flexneri
atgcacagtcagttaagagaacgtatccggctgatgcgcgcaaggctggataacgccgcgccggttgctgaaatccgggctgaatctcagctttttgtgactcctgccccggtctgtgatcgcctggtgacgctggcggaaatcagcaaccgtgatcacattctggaaccctctgccggcaccggggccatactgcgggcgattcgggataccgcgccggaggccatgtgtgatgcggtggagattaacagcgggctggtccggtatctgcgggaaaattttaacggtgtcagggtacagtgtggcgacttcatggaatggcagccggtgcagtattacagccggatcattatgaatccgccgttcatccacgggcaggatatccggcatatcctgcgggctttttccctgttgcgtccggggggcgtgctggttgccgtctgtctgaacgggccgcgccagcaggagaagctgttaccgttttctgacatccgcgaggagctgccgcgcggcacgtttgcttataccgatgtcccgacgatgattattcgtttgcgtgcctga

SEQ ID NO: 4604 - protein, 187 aa, Shigella flexneri
MHSQLRERIRLMRARLDNAAPVAEIRAESQLFVTPAPVCDRLVTLAEISNRDHILEPSAGTGAILRAIRDTAPEAMCDAVEINSGLVRYLRENFNGVRVQCGDFMEWQPVQYYSRIIMNPPFIHGQDIRHILRAFSLLRPGGVLVAVCLNGPRQQEKLLPFSDIREELPRGTFAYTDVPTMIIRLRA

SEQ ID NO: 4605 - DNA, 231 bp, Citrobacter koseri
atgcagctcatgttatttaatttgttttccccagcacttaagcttaatactggcctggcaattctttcgcctggtgcatttgaagttcactctgacggaatagatgcggataacgaattgtttcactatactattaaaaaagcatataccccatataatatacacacttacaagacagaggaagttgtaaaccagaggaatataaaagttaaaaacatgaccttagggtaa

SEQ ID NO: 4606 - protein, 76 aa, Citrobacter koseri
MQLMLFNLFSPALKLNTGLAILSPGAFEVHSDGIDADNELFHYTIKKAYTPYNIHTYKTEEVVNQRNIKVKNMTLG

SEQ ID NO: 4607 - DNA, 189 bp, Citrobacter freundii
atgttgacccgcaaaagtatagataccgttcggctctctgttggtgctgagaagctctcacaacgtgaatgggactggatgaagatgctcaaacccatggacccaccacctgcgatggtcgcggcctccatcctggagcgccgtggcgacacagcagcccttacccggctacaggataccgggggttaa

SEQ ID NO: 4608 - protein, 62 aa, Citrobacter freundii
MLTRKSIDTVRLSVGAEKLSQREWDWMKMLKPMDPPPAMVAASILERRGDTAALTRLQDTGG

SEQ ID NO: 4609 - DNA, 144 bp, Escherichia coli
atgatttttaccaaaatcattaggggattcatcagcaccctgcgtgagtttcacgagaagctgcgtgaactgctgacgacgctgaatctgaagctggaaccggcgaatgattttcgtgatgaaccggtgaagttaacggcgtga

SEQ ID NO: 4610 - protein, 47 aa, Escherichia coli
MIFTKIIRGFISTLREFHEKLRELLTTLNLKLEPANDFRDEPVKLTA

SEQ ID NO: 4611 - DNA, 1053 bp, Shigella boydii
ttgcgatatttattatttgtatttagttttatacttttaatttttaatttagttacattcaatttttcaatcacccaaaaatgtgtcagtctttttatatggttgcttttatttcctttttatggcttctttgtcggcttattagctggtaataaaataaatgatatactgtttgatgtgcaaccatacctttttatgctgtcacttatatatctatttacactaagatatactttaaaagtattttcatgtgagatttttattaaaatagttaatgcatttgcattatatggatcactgttatatatttcatacataattttgttgaatttcggtttgttaaattttaatttaatttatgaacacttatcattgactagcgagttcttttttcgtcccgatggggcttttttttccaaatccttctacttttttggtgtcggtgcgattatcagttttgtcgacaaaaaatatttaaaatgtctcataatagtgcttgcgatattattgacagaatcaagaggtgtattactttttacaacattatcactgttattagccagttttaaattacataagctatatttaaatactattataataatattgggcagcgttctatttataattatgctttacatggtcggatcacgcagtgaagattctgactctgttagatttaatgatttatatttttattataaaaatgttgatttagcgacgttcttgtttggaagaggatttggttcatttatattagatcgattaaggattgaaatagtacctcttgagatacttcagaaaacaggcgttattggtgtatttatatcattagttcctatgttgcttatctttttgaaaggctattttttaaatagtacaaaaacatcattaatgatgtcgttaatactttttttcagtattaccgtttctataactaatccatttctttttacacccatgggaatttttattataggcgttgtagttttatgggtattttctatagaaaatatccaaattagtaataacctcacttctggagcaaaataa

SEQ ID NO: 4612 - protein, 350 aa, Shigella boydii
MRYLLFVFSFILLIFNLVTFNFSITQKCVSLFIWLLLFPFYGFFVGLLAGNKINDILFDVQPYLFMLSLIYLFTLRYTLKVFSCEIFIKIVNAFALYGSLLYISYIILLNFGLLNFNLIYEHLSLTSEFFFRPDGAFFSKSFYFFGVGAIISFVDKKYLKCLIIVLAILLTESRGVLLFTTLSLLLASFKLHKLYLNTIIIILGSVLFIIMLYMVGSRSEDSDSVRFNDLYFYYKNVDLATFLFGRGFGSFILDRLRIEIVPLEILQKTGVIGVFISLVPMLLIFLKGYFLNSTKTSLMMSLILFFSITVSITNPFLFTPMGIFIIGVVVLWVFSIENIQISNNLTSGAK

SEQ ID NO: 4613 - DNA, 150 bp, Shigella sonnei
atgtggcccatttttcctgctgacgtaatatatttagaggattatcaaattcatgattaccgacggccattgcatcataaccaattagattcattccacgaatatcgggttcagccttctgaaggtctgattcaggtacaccggtgttaa

SEQ ID NO: 4614 - protein, 49 aa, Shigella sonnei
MWPIFPADVIYLEDYQIHDYRRPLHHNQLDSFHEYRVQPSEGLIQVHRC

SEQ ID NO: 4615 - DNA, 240 bp, Citrobacter koseri
gtggacgtcggcgcgaaaagcgagatctaccgcatcatgaaccagatggcgcgcaaaggggtggcgattctgatgatctccagcgagctgccggaagtggtgggcatgagcgaccgggtgtacgtgatgcgcgaaggcagcatcgcgggtgaactgcacgggcgcgacatctctcaggaaaacattatgacgctggcaaccggcgtgaacgacactcatcatcaggcggtgcaatcatga

SEQ ID NO: 4616 - protein, 79 aa, Citrobacter koseri
MDVGAKSEIYRIMNQMARKGVAILMISSELPEVVGMSDRVYVMREGSIAGELHGRDISQENIMTLATGVNDTHHQAVQS

SEQ ID NO: 4617 - DNA, 327 bp, Citrobacter rodentium
atgattaaaacaacgttactattttttgctactgcgctgtgtgaaattattggatgctttctgccctggttgtggttaaaacgaaacgccagtatctggctgttgcttccggcggggatttcactggcgctgtttgtctggttgttaacgttgcatcctgcggcgagtgggcgtgtttacgcggcttatggtggcgtttatgtctgcacggcattgatgtggctgcgcgttgtggatggcgtgaaactaagtctttatgactggacgggtgcgttgattgcgctttgcggaatgttgatcattgttgcgggctgggggcgcacgtag

SEQ ID NO: 4618 - protein, 108 aa, Citrobacter rodentium
MIKTTLLFFATALCEIIGCFLPWLWLKRNASIWLLLPAGISLALFVWLLTLHPAASGRVYAAYGGVYVCTALMWLRVVDGVKLSLYDWTGALIALCGMLIIVAGWGRT

SEQ ID NO: 4619 - DNA, 738 bp, Klebsiella oxytoca
atgacatcagacaatatcgctgaatatgttggtgagaataatcaatttactgagaagcctgtagctgaataccccccggtgatacaggataatacagtgaccactaaagactatctgtacagcaataatattgatactgaccttttagtggttatcggagggcttattgttatattgtttctcatgatgcttatcatgtactttattaattctctcaggcataaggaattaactgaaatactgacaaaaatatcttttcctgaaaaatccgggagcaatttgcttaaaccggaggcggtcagctgtaatttgttgtccctgtgtgtgctggcaccggtattctgtacacccagaaagctggctgaagtttccagggagatcatcgtggcgagtgcgcaggaaattgcatggacgccggggagcagtcgtattgatggtcatcagggcgaaaatattacctggtctctgtcatcgcagtctcctgccgataagtatgatctcatcaataaaacgtcccgtgtttctcctgacagtggccgtttttatgaaccggacacagttctggatcaccgtgaacgggtacgcctttttattcagatccagtttccgcacgggagtgactggtctgaagtattgcgcctgactgatattgttacagagaaggtctcttccggcagggctgcaggcgggtatcaccaccggcatacagggtacacctggtctgtttctgtgaattaa

SEQ ID NO: 4620 - protein, 245 aa, Klebsiella oxytoca
MTSDNIAEYVGENNQFTEKPVAEYPPVIQDNTVTTKDYLYSNNIDTDLLVVIGGLIVILFLMMLIMYFINSLRHKELTEILTKISFPEKSGSNLLKPEAVSCNLLSLCVLAPVFCTPRKLAEVSREIIVASAQEIAWTPGSSRIDGHQGENITWSLSSQSPADKYDLINKTSRVSPDSGRFYEPDTVLDHRERVRLFIQIQFPHGSDWSEVLRLTDIVTEKVSSGRAAGGYHHRHTGYTWSVSVN

SEQ ID NO: 4621 - DNA, 474 bp, Klebsiella oxytoca
atgcataaatcagaagctgaaaaaatagattctattctggatgaacatcaacagatatatcgcagacataaccgaatagataacatcctggcgttttttgcgtgtattgcatggattccctgtattattgctgcgttcggcgttgatggtatatatctgaaaatcctgtttgcggtccttgcctgctgtggtgcggtatgcttttttattttcttcttcaccctcctgccggaatcactcatggtcctcagccgtcagagcctgcttcagcttatgcgtctgactgaagacgtaccggatgcgagacaggaactgcttaaccgtctgctgtccggtaaaaaactgactggtcgggatgaaaaggatatccggcgtctctggcaggagaaagtggatgcaatgcaggagtctgccacccgtcagcgtgaacaggataccatccggaagtttactgaagggaataaatccgaatga

SEQ ID NO: 4622 - protein, 157 aa, Klebsiella oxytoca
MHKSEAEKIDSILDEHQQIYRRHNRIDNILAFFACIAWIPCIIAAFGVDGIYLKILFAVLACCGAVCFFIFFFTLLPESLMVLSRQSLLQLMRLTEDVPDARQELLNRLLSGKKLTGRDEKDIRRLWQEKVDAMQESATRQREQDTIRKFTEGNKSE

SEQ ID NO: 4623 - DNA, 150 bp, Shigella flexneri
atgccatctgaacatgatgaacaactggattcgactgatacgcagcttcccggcgaatatgacctttttgatttaatggtgcaggttactgaagagaacctgcacgccccggtggcttttgggccgcctgtcggccgggaagcgttatag

SEQ ID NO: 4624 - protein, 49 aa, Shigella flexneri
MPSEHDEQLDSTDTQLPGEYDLFDLMVQVTEENLHAPVAFGPPVGREAL

SEQ ID NO: 4625 - DNA, 1299 bp, Shigella flexneri
atggtttggctggaaattatcgtagtacttggtgcaatattttttggtattcgccaggggggaatcggtattggtttatgtggcgggcttgggcttgccattctgactctgggatttggtctgcctatggggtcgccgccagtcgacgtgatcctgattattatgaccgttgttgtggcggcctcagccttacaggccgcaggcggaatggattatctggtacgcgtcgctggtaattttatgcggcgtaacccgaaatatatcaacataatcgcgccgattatcacctggtctatgaccattatggccggtactgggtttattgttttttccacgctgccggtgattgctgaagtggcgaaagagtccggtatccgtccttcccgcacgcttgccggttcggttgtcgcttcgcaggttgcgatttccggttcgccgatcagcgccgcaatggcggctatgctcactattatggaggtaaacggtgtcagttttattcaagtgatgtcggtatgtcttcccacctcttttgctgccgcgatggtcgccgcttttattgcttcccgacagggatgtgagttgcaggatgacgaggtctaccttgagcgcctgcaaaaaggactggtgcaaaaatacgagaataatagcagcatcaagccaggtgcgacgctctccgtcggattgttcctgctggcgacggtcgctattgttattcttgctgccttcccccaactgcgtccgggttttgatatcggtaaaccgatggaaacacgcgatatcattattatctgtatgctctctgccgcctgcctgatggtggtgctgtgtaagacggcgaccgatgccattattctcacctccacattccgtgcggggatgagttcgctggcggtaattctcggcattgtaaccttaggcaccacttttattgatgcgcatttaactgagattaaagatattgctggtgatattttgcaggcgtatccgatgttgttggcgctggttctttttggcacttgcgcgctgctctactcgcaaggtgcgaccacgccgttaattatcccgcttgccgtcgcgcttgacgtgcccacctgggcaattctggcgtcctatgtggccgtcaccggagtatttgtactgccaacgtatccaacatcactggctgccatggaatttgatactaccggcacaactcgtgtaggcaaatatgtgctgaatcatccatttatgctgcctgggttggggggaattattgctggagtggcattaggctttgtgattgcgccaatgattatttag

SEQ ID NO: 4626 - protein, 432 aa, Shigella flexneri
MVWLEIIVVLGAIFFGIRQGGIGIGLCGGLGLAILTLGFGLPMGSPPVDVILIIMTVVVAASALQAAGGMDYLVRVAGNFMRRNPKYINIIAPIITWSMTIMAGTGFIVFSTLPVIAEVAKESGIRPSRTLAGSVVASQVAISGSPISAAMAAMLTIMEVNGVSFIQVMSVCLPTSFAAAMVAAFIASRQGCELQDDEVYLERLQKGLVQKYENNSSIKPGATLSVGLFLLATVAIVILAAFPQLRPGFDIGKPMETRDIIIICMLSAACLMVVLCKTATDAIILTSTFRAGMSSLAVILGIVTLGTTFIDAHLTEIKDIAGDILQAYPMLLALVLFGTCALLYSQGATTPLIIPLAVALDVPTWAILASYVAVTGVFVLPTYPTSLAAMEFDTTGTTRVGKYVLNHPFMLPGLGGIIAGVALGFVIAPMII

SEQ ID NO: 4627 - DNA, 720 bp, Shigella flexneri
gtgaaaggtttaattggtgtactcggtggaatggggccggcagctaccgtcgacctgtttaataaatttgtaacttttaccgctgcacaatgtgatcaggaacatattcctttaattatttcttcgatcccggatattcctgaccgtaccgatgcattaatgcatcatgggcgttcaccattacccgttatgcgtgattatatgcataagctggaagatgccggggcagaatgtattgttattccctgtaataccgcgcattactggttcaaagaattaaaagatgcttgtcatattgatatattaagtatcgtagaaactacgatcaatgaagttcgcgcctgtggtaaaacccgaattggcttgttagccaccaatgccacgctatatatgggtttataccaaaaaggaattgagtcgctgggatttacctgtgtcagccccgatgccgacggtcagaaaaaagtgatggaaagtatttattccttgaaagctggcaatatagcgcacgcacaaaagttgatgaatgagcaggctgaaatattattttcccgcggtgcagaaatccttgttcttggttgtacagaaattccggttattctggcgcaagccgttaaagagcagccttcccgctatattgactcaacggcgtcactcgttcgtgccggaataaaatggtacgaaaatcgtgtcggtaaacattatcttttaacccaataa

SEQ ID NO: 4628 - protein, 239 aa, Shigella flexneri
MKGLIGVLGGMGPAATVDLFNKFVTFTAAQCDQEHIPLIISSIPDIPDRTDALMHHGRSPLPVMRDYMHKLEDAGAECIVIPCNTAHYWFKELKDACHIDILSIVETTINEVRACGKTRIGLLATNATLYMGLYQKGIESLGFTCVSPDADGQKKVMESIYSLKAGNIAHAQKLMNEQAEILFSRGAEILVLGCTEIPVILAQAVKEQPSRYIDSTASLVRAGIKWYENRVGKHYLLTQ

SEQ ID NO: 4629 - DNA, 765 bp, Shigella flexneri
gtgaccagctgctacgaaacacttgcggtgtacatttgtctgataaggaaaaataaaattaatgatgtgctgcagcattatgatgacatggaaagaaaaggattgtttggtgaattaccttcaggatatgtcaggggggcattatcgttgcttcggacagcactggaggttaaagtaaatagaaaaaatataaagtatggctcgttgttttattggcttgaccatgtaaaagcctatcaggatgcatttattgaaaaaataccacttattgatcctgtatataaggagggtgaaatacagtatgatgcgaacaattttaccctgatgcgtgttattaagatgtataattgtatgcttgaaaagatcagtacgaaaccatatattgcgcccccatatattacaggtttgcttgatgacgtagagaaggtgctggataagataaatattctgatagataaagagtatgtttatgatggtaagacgctggcagaagtcattatggaaaacaaagtattatccagtcgcgaacgtaaagaaactatgatagggcttttcacaggcagtaagaaatatactttactgcaatgtgttgagaagcttggtgtattagttcactatgtgaaatcaccggtcgatgaaattaaaaatgtgatgatgttgtatggcgataaggccgaaaacaggaacagacgcagaatgatatatgatgcgttaaccattatttgtgaagatgacatcaggaataaccctcctgagctgtcgtga

SEQ ID NO: 4630 - protein, 254 aa, Shigella flexneri
MTSCYETLAVYICLIRKNKINDVLQHYDDMERKGLFGELPSGYVRGALSLLRTALEVKVNRKNIKYGSLFYWLDHVKAYQDAFIEKIPLIDPVYKEGEIQYDANNFTLMRVIKMYNCMLEKISTKPYIAPPYITGLLDDVEKVLDKINILIDKEYVYDGKTLAEVIMENKVLSSRERKETMIGLFTGSKKYTLLQCVEKLGVLVHYVKSPVDEIKNVMMLYGDKAENRNRRRMIYDALTIICEDDIRNNPPELS

SEQ ID NO: 4631 - DNA, 249 bp, Klebsiella oxytoca
atgaaatccgcagcatggcggatgcactggcaaaaatccggaaatgatgacgctggcggggaaaaatctccgccttttccagccggtccccggaaagagcaaaaggatgtcgccgcaggctccgctttacccggccatgcggggcatggccttgtgggttttcagttatgtggcctcagcgtcgtgtgcgggctgtgccgtgcctccatcgtagccgggcttctgcgggcgggttgcaaggtaaggtga

SEQ ID NO: 4632 - protein, 82 aa, Klebsiella oxytoca
MKSAAWRMHWQKSGNDDAGGEKSPPFPAGPRKEQKDVAAGSALPGHAGHGLVGFQLCGLSVVCGLCRASIVAGLLRAGCKVR

SEQ ID NO: 4633 - DNA, 204 bp, Escherichia coli
atgcttcattattttgtcatgatactttattttgtcctaatccttcttttaggagtgtttacctgcttcgcaggaataagacttggtttagggcttgcggggaaatggagaaagggtatggatcttcgctttttgcttcttattggtgggattctttttcttcatcttggcctttatctcttcaaggtgttcgtgaacgcttaa

SEQ ID NO: 4634 - protein, 67 aa, Escherichia coli
MLHYFVMILYFVLILLLGVFTCFAGIRLGLGLAGKWRKGMDLRFLLLIGGILFLHLGLYLFKVFVNA

SEQ ID NO: 4635 - DNA, 195 bp, Citrobacter freundii
atgaacgtcaagaacatgttttacggtgccattctggtaagtgctgtatgggcggttattttgctctcatggtttgaatccagccttaccttaagcgattacctccggtacgaatcggtaatcctgatcccatgcctgctgtgggttgctgtttatggattaggtaaactttacctccaaagaacatcaaactag

SEQ ID NO: 4636 - protein, 64 aa, Citrobacter freundii
MNVKNMFYGAILVSAVWAVILLSWFESSLTLSDYLRYESVILIPCLLWVAVYGLGKLYLQRTSN

(The sequence listing continues in the following parts.)

1-34. (canceled)

35. A method for treating a patient suffering from an infection with an antimicrobial drug resistant microorganism, the method comprising the steps of:
(a) obtaining or providing a sample containing or suspected of containing at least one microorganism from the patient;
(b) performing or having performed a genotyping assay on the sample to determine (i) the presence or absence in the microorganism of at least one nucleotide sequence identified in Table I or a variant of the nucleotide sequence and/or (ii) the presence or absence in the microorganism of at least one difference in at least one nucleotide sequence identified in Table I compared with a reference sequence; wherein the presence or absence of the at least one nucleotide sequence or variant thereof and/or the difference indicates that the microorganism is resistant to one or more antimicrobial drugs;
(c) administering to the patient an antimicrobial drug that is different from the one or more antimicrobial drugs to which the microorganism is resistant.

36. The method of claim 35, wherein the microorganism is selected from the group consisting of Acinetobacter, Escherichia, Klebsiella, Morganella, Proteus, Pseudomonas, Salmonella, Serratia, Stenotrophomonas, Shigella, Enterobacter, Kluyvera, Burkholdia, Citrobacter, Pantoea, Raoultella, and Staphylococcus.

37. The method of claim 35, wherein the microorganism is (1) an Acinetobacter species, (2) an Escherichia species, (3) a Klebsiella species, (4) a Morganella species, (5) a Proteus species, (6) a Pseudomonas species, (7) a Salmonella species, (8) a Serratia species, (9) a Stenotrophomonas species, (10) a Shigella species, (11) an Enterobacter species, (12) a Staphylococcus species, (13) a Burkholderia species, (14) a Citrobacter species, (15) a Kluyvera species, (16) a Pantoea species, or (17) a Raoultella species; and
wherein step (b) comprises:
(b′ 1) performing or having performed a genotyping assay on the sample to determine (i) the presence or absence in the Acinetobacter species of at least one nucleotide sequence identified in rows 0 to 183, 282 to 289, and 291 to 325 of Table I or a variant of the nucleotide sequence, and/or (ii) the presence in the Acinetobacter species of at least one difference in at least one nucleotide sequence identified in rows 184 to 281, 290, and 326 to 330 of Table I compared with a reference sequence;
(b′2) performing or having performed a genotyping assay on the sample to determine (i) the presence or absence in the Escherichia species of at least one nucleotide sequence identified in rows 1248 to 1499 of Table I or a variant of the nucleotide sequence, and/or (ii) the presence in the Escherichia species of at least one difference in at least one nucleotide sequence identified in rows 1500 to 1586 of Table I compared with a reference sequence;
(b′3) performing or having performed a genotyping assay on the sample to determine (i) the presence or absence in the Klebsiella species of at least one nucleotide sequence identified in rows 1587 to 1696, 1743 to 1782, 1792 to 2133, 2208 to 2396, 2425 to 2427, and 2431 to 2446 of Table I or a variant of the nucleotide sequence, and/or (ii) the presence and/or absence in the Klebsiella species of at least one difference in at least one nucleotide sequence identified in rows 1697 to 1742, 1783 to 1791, 2134 to 2207, 2397 to 2424, 2428 to 2430, 2447, and 2448 of Table I compared with a reference sequence;
(b′4) performing or having performed a genotyping assay on the sample to determine (i) the presence or absence in the Morganella species of at least one nucleotide sequence identified in rows 2460 to 2569 of Table I or a variant of the nucleotide sequence, and/or (ii) the presence and/or absence in the Morganella species of at least one difference in at least one nucleotide sequence identified in rows 2570 to 2621 of Table I compared with a reference sequence;
(b′5) performing or having performed a genotyping assay on the sample to determine (i) the presence or absence in the Proteus species of at least one nucleotide sequence identified in rows 2623 to 2754, and 2789 to 2792 of Table I or a variant of the nucleotide sequence, and/or (ii) the presence and/or absence in the Proteus species of at least one difference in at least one nucleotide sequence identified in rows 2755 to 2788 of Table I compared with a reference sequence;
(b′6) performing or having performed a genotyping assay on the sample to determine (i) the presence or absence in the Pseudomonas species of at least one nucleotide sequence identified in rows 2793 to 2861, 2877, and 2878 of Table I or a variant of the nucleotide sequence, and/or (ii) the presence and/or absence in the Pseudomonas species of at least one difference in at least one nucleotide sequence identified in rows 2862 to 2876 of Table I compared with a reference sequence;
(b′7) performing or having performed a genotyping assay on the sample to determine (i) the presence or absence in the Salmonella species of at least one nucleotide sequence identified in rows 2885 to 2990 of Table I or a variant of the nucleotide sequence, and/or (ii) the presence in the Salmonella species of at least one difference in at least one nucleotide sequence identified in rows 2991 to 3008 of Table I compared with a reference sequence;
(b′8) performing or having performed a genotyping assay on the sample to determine (i) the presence or absence in the Serratia species of at least one nucleotide sequence identified in rows 3009 to 3013, 3023 to 3028, 3031 to 3131, and 3188 to 3198 of Table I or a variant of the nucleotide sequence, and/or (ii) the presence and/or absence in the Serratia species of at least one difference in at least one nucleotide sequence identified in rows 3014 to 3022, 3029, 3030, 3132 to 3187, 3199, and 3200 of Table I compared with a reference sequence;
(b′9) performing or having performed a genotyping assay on the sample to determine (i) the presence in the Stenotrophomonas species of at least one nucleotide sequence identified in rows 3746 to 3751 of Table I or a variant of the nucleotide sequence;
(b′10) performing or having performed a genotyping assay on the sample to determine (i) the presence or absence in the Shigella species of at least one nucleotide sequence identified in rows 3201 to 3234, 3237 to 3256, and 3263 to 3352 of Table I or a variant of the nucleotide sequence, and/or (ii) the presence in the Shigella species of at least one difference in at least one nucleotide sequence identified in rows 3235, 3236, 3257 to 3262, and 3353 to 3375 of Table I compared with a reference sequence;
(b′ 11) performing or having performed a genotyping assay on the sample to determine (i) the presence or absence in the Enterobacter species of at least one nucleotide sequence identified in rows 692 to 697, 702 to 1074, 1190 to 1201, 1213 to 1226, 1231 to 1233, 1235 to 1239, 1246, and 1247 of Table I or a variant of the nucleotide sequence, and/or (ii) the presence and/or absence in the Enterobacter species of at least one difference in at least one nucleotide sequence identified in rows 698 to 701, 1075 to 1189, 1202 to 1212, 1227 to 1230, 1234, and 1240 to 1245 of Table I compared with a reference sequence;
(b′12) performing or having performed a genotyping assay on the sample to determine (i) the presence or absence in the Staphylococcus species of at least one nucleotide sequence identified in rows 3376 to 3664 of Table I or a variant of the nucleotide sequence, and/or (ii) the presence in the Staphylococcus species of at least one difference in at least one nucleotide sequence identified in rows 3665 to 3745 of Table I compared with a reference sequence;
(b′13) performing or having performed a genotyping assay on the sample to determine (i) the presence or absence in the Burkholderia species of at least the nucleotide sequence identified in row 331 of Table I or a variant of the nucleotide sequence;
(b′14) performing or having performed a genotyping assay on the sample to determine (i) the presence or absence in the Citrobacter species of at least one nucleotide sequence identified in rows 332 to 342, 345 to 361, 365 to 419, 422 to 581, 634 to 650, 653 to 683, 690, and 691 of Table I or a variant of the nucleotide sequence, and/or (ii) the presence in the Citrobacter species of at least one difference in at least one nucleotide sequence identified in rows 343, 344, 362 to 364, 420, 421, 582 to 633, 651, 652, and 684 to 689 of Table I compared with a reference sequence;
(b′15) performing or having performed a genotyping assay on the sample to determine (i) the presence or absence in the Kluyvera species of at least one nucleotide sequence identified in rows 2449 to 2457 of Table I or a variant of the nucleotide sequence, and/or (ii) the presence in the Kluyvera species of at least one difference in at least one nucleotide sequence identified in rows 2458 to 2459 of Table I compared with a reference sequence;
(b′16) performing or having performed a genotyping assay on the sample to determine (i) the presence or absence in the Pantoea species of at least the nucleotide sequence identified in row 2622 of Table I or a variant of the nucleotide sequence; or
(b′17) performing or having performed a genotyping assay on the sample to determine (i) the presence or absence in the Raoultella species of at least one nucleotide sequence identified in rows 2879 to 2881, and 2883 of Table I or a variant of the nucleotide sequence, and/or (ii) the presence in the Raoultella species of at least one difference in at least one nucleotide sequence identified in rows 2882, and 2884 of Table I compared with a reference sequence.

38. The method of claim 37, wherein the genotyping assay comprises using a next generation sequencing or high throughput sequencing method.

39. The method of claim 37, wherein the difference in the nucleotide sequence is at position nc_pos of the nucleotide sequence identified in Table I.

40. The method of claim 39, wherein the difference at position nc_pos is the nc_alt residue for the nucleotide sequence identified in Table I.

41. The method of claim 37, wherein the difference in the nucleotide sequence is a point mutation resulting in a change in the encoded amino acid sequence.

42. The method of claim 37, wherein the one or more antimicrobial drugs to which the microorganism is resistant belong to a class of antimicrobial drugs selected from the group consisting of lactams; penicillins; quinolones and derivatives thereof; aminoglycosides; polyketides; benzene-derived compounds; sulfonamides;
tetracyclines; cephalosporins; lincosamides; macrolides; nitrofuranes; glycopeptides;
oxazolidinones; ansamycins; carbacephems; and folate synthesis inhibitors.

43. The method of claim 37, wherein the one or more antimicrobial drugs to which the microorganism is resistant is selected from the group consisting of amoxicillin/K clavulanate (AUG), ampicillin (AM), ampicillin/sulbactam (A/S), aztreonam (AZT), cefazolin (CFZ), cefepime (CPE), cefotaxime (CFT), ceftazidime (CAZ), ceftriaxone (CAX), cefuroxime (CRM), cephalotin (CF), ciprofloxacin (CP), ertapenem (ETP), gentamicin (GM), imipenem (IMP), levofloxacin (LVX), meropenem (MER), piperacillin/tazobactam (P/T), tetracycline (TE), tobramycin (TO), and trimethoprim/sulfamethoxazole (T/S).

44. A method for treating a patient infected with an antimicrobial drug resistant microorganism, the method comprising:
administering to the patient an antimicrobial drug capable of killing or inhibiting the growth of an antimicrobial drug resistant microorganism;
wherein prior to said administration, a sample containing or suspected of containing the antimicrobial drug resistant microorganism from the patient has been tested to determine (i) the presence or absence in the microorganism of at least one nucleotide sequence identified in Table I or a variant of the nucleotide sequence and/or (ii) the presence or absence in the microorganism of at least one difference in at least one nucleotide sequence identified in Table I compared with a reference sequence;
wherein the presence or absence of the at least one nucleotide sequence or variant thereof and/or the difference indicates that the microorganism is resistant to one or more antimicrobial drugs; and
wherein said antimicrobial drug capable of killing or inhibiting the growth of an antimicrobial drug resistant microorganism is different from the one or more antimicrobial drugs to which the microorganism is resistant.

45. The method of claim 44, wherein the microorganism is (1) an Acinetobacter species, (2) an Escherichia species, (3) a Klebsiella species, (4) a Morganella species, (5) a Proteus species, (6) a Pseudomonas species, (7) a Salmonella species, (8) a Serratia species, (9) a Stenotrophomonas species, (10) a Shigella species, (11) an Enterobacter species, (12) a Staphylococcus species, (13) a Burkholderia species, (14) a Citrobacter species, (15) a Kluyvera species, (16) a Pantoea species, or (17) a Raoultella species.

46. The method of claim 45, wherein prior to said administration, the sample containing or suspected of containing the antimicrobial drug resistant microorganism from the patient has been tested to determine:
(1) where the microorganism is an Acinetobacter species (i) the presence or absence in the Acinetobacter species of at least one nucleotide sequence identified in rows 0 to 183, 282 to 289, and 291 to 325 of Table I or a variant of the nucleotide sequence, and/or (ii) the presence in the Acinetobacter species of at least one difference in at least one nucleotide sequence identified in rows 184 to 281, 290, and 326 to 330 of Table I compared with a reference sequence;
(2) where the microorganism is an Escherichia species (i) the presence or absence in the Escherichia species of at least one nucleotide sequence identified in rows 1248 to 1499 of Table I or a variant of the nucleotide sequence, and/or (ii) the presence in the Escherichia species of at least one difference in at least one nucleotide sequence identified in rows 1500 to 1586 of Table I compared with a reference sequence;
(3) where the microorganism is a Klebsiella species (i) the presence or absence in the Klebsiella species of at least one nucleotide sequence identified in rows 1587 to 1696, 1743 to 1782, 1792 to 2133, 2208 to 2396, 2425 to 2427, and 2431 to 2446 of Table I or a variant of the nucleotide sequence, and/or (ii) the presence and/or absence in the Klebsiella species of at least one difference in at least one nucleotide sequence identified in rows 1697 to 1742, 1783 to 1791, 2134 to 2207, 2397 to 2424, 2428 to 2430, 2447, and 2448 of Table I compared with a reference sequence;
(4) where the microorganism is a Morganella species (i) the presence or absence in the Morganella species of at least one nucleotide sequence identified in rows 2460 to 2569 of Table I or a variant of the nucleotide sequence, and/or (ii) the presence and/or absence in the Morganella species of at least one difference in at least one nucleotide sequence identified in rows 2570 to 2621 of Table I compared with a reference sequence;
(5) where the microorganism is a Proteus species (i) the presence or absence in the Proteus species of at least one nucleotide sequence identified in rows 2623 to 2754, and 2789 to 2792 of Table I or a variant of the nucleotide sequence, and/or (ii) the presence and/or absence in the Proteus species of at least one difference in at least one nucleotide sequence identified in rows 2755 to 2788 of Table I compared with a reference sequence;
(6) where the microorganism is a Pseudomonas species (i) the presence or absence in the Pseudomonas species of at least one nucleotide sequence identified in rows 2793 to 2861, 2877, and 2878 of Table I or a variant of the nucleotide sequence, and/or (ii) the presence and/or absence in the Pseudomonas species of at least one difference in at least one nucleotide sequence identified in rows 2862 to 2876 of Table I compared with a reference sequence;
(7) where the microorganism is a Salmonella species (i) the presence or absence in the Salmonella species of at least one nucleotide sequence identified in rows 2885 to 2990 of Table I or a variant of the nucleotide sequence, and/or (ii) the presence in the Salmonella species of at least one difference in at least one nucleotide sequence identified in rows 2991 to 3008 of Table I compared with a reference sequence;
(8) where the microorganism is a Serratia species (i) the presence or absence in the Serratia species of at least one nucleotide sequence identified in rows 3009 to 3013, 3023 to 3028, 3031 to 3131, and 3188 to 3198 of Table I or a variant of the nucleotide sequence, and/or (ii) the presence and/or absence in the Serratia species of at least one difference in at least one nucleotide sequence identified in rows 3014 to 3022, 3029, 3030, 3132 to 3187, 3199, and 3200 of Table I compared with a reference sequence;
(9) where the microorganism is a Stenotrophomonas species (i) the presence in the Stenotrophomonas species of at least one nucleotide sequence identified in rows 3746 to 3751 of Table I or a variant of the nucleotide sequence;
(10) where the microorganism is a Shigella species (i) the presence or absence in the Shigella species of at least one nucleotide sequence identified in rows 3201 to 3234, 3237 to 3256, and 3263 to 3352 of Table I or a variant of the nucleotide sequence, and/or (ii) the presence in the Shigella species of at least one difference in at least one nucleotide sequence identified in rows 3235, 3236, 3257 to 3262, and 3353 to 3375 of Table I compared with a reference sequence;
(11) where the microorganism is an Enterobacter species (i) the presence or absence in the Enterobacter species of at least one nucleotide sequence identified in rows 692 to 697, 702 to 1074, 1190 to 1201, 1213 to 1226, 1231 to 1233, 1235 to 1239, 1246, and 1247 of Table I or a variant of the nucleotide sequence, and/or (ii) the presence and/or absence in the Enterobacter species of at least one difference in at least one nucleotide sequence identified in rows 698 to 701, 1075 to 1189, 1202 to 1212, 1227 to 1230, 1234, and 1240 to 1245 of Table I compared with a reference sequence;
(12) where the microorganism is a Staphylococcus species (i) the presence or absence in the Staphylococcus species of at least one nucleotide sequence identified in rows 3376 to 3664 of Table I or a variant of the nucleotide sequence, and/or (ii) the presence in the Staphylococcus species of at least one difference in at least one nucleotide sequence identified in rows 3665 to 3745 of Table I compared with a reference sequence;
(13) where the microorganism is a Burkholderia species (i) the presence or absence in the Burkholderia species of at least the nucleotide sequence identified in row 331 of Table I or a variant of the nucleotide sequence;
(14) where the microorganism is a Citrobacter species (i) the presence or absence in the Citrobacter species of at least one nucleotide sequence identified in rows 332 to 342, 345 to 361, 365 to 419, 422 to 581, 634 to 650, 653 to 683, 690, and 691 of Table I or a variant of the nucleotide sequence, and/or (ii) the presence in the Citrobacter species of at least one difference in at least one nucleotide sequence identified in rows 343, 344, 362 to 364, 420, 421, 582 to 633, 651, 652, and 684 to 689 of Table I compared with a reference sequence;
(15) where the microorganism is a Kluyvera species (i) the presence or absence in the Kluyvera species of at least one nucleotide sequence identified in rows 2449 to 2457 of Table I or a variant of the nucleotide sequence, and/or (ii) the presence in the Kluyvera species of at least one difference in at least one nucleotide sequence identified in rows 2458 to 2459 of Table I compared with a reference sequence;
(16) where the microorganism is a Pantoea species (i) the presence or absence in the Pantoea species of at least the nucleotide sequence identified in row 2622 of Table I or a variant of the nucleotide sequence; or
(17) where the microorganism is a Raoultella species (i) the presence or absence in the Raoultella species of at least one nucleotide sequence identified in rows 2879 to 2881, and 2883 of Table I or a variant of the nucleotide sequence, and/or (ii) the presence in the Raoultella species of at least one difference in at least one nucleotide sequence identified in rows 2882, and 2884 of Table I compared with a reference sequence.

47. The method of claim 46, wherein the difference in the nucleotide sequence is at position nc_pos of the nucleotide sequence identified in Table I.

48. The method of claim 47, wherein the difference at position nc_pos is the nc_alt residue for the nucleotide sequence identified in Table I.

49. The method of claim 46, wherein the difference in the nucleotide sequence is a point mutation resulting in a change in the encoded amino acid sequence.

50. The method of claim 46, wherein the one or more antimicrobial drugs to which the microorganism is resistant belong to a class of antimicrobial drugs selected from the group consisting of lactams; penicillins; quinolones and derivatives thereof; aminoglycosides; polyketides; benzene-derived compounds; sulfonamides; tetracyclines; cephalosporins; lincosamides; macrolides; nitrofuranes; glycopeptides; oxazolidinones; ansamycins; carbacephems; and folate synthesis inhibitors.

51. The method of claim 46, wherein the one or more antimicrobial drugs to which the microorganism is resistant is selected from the group consisting of amoxicillin/K clavulanate (AUG), ampicillin (AM), ampicillin/sulbactam (A/S), aztreonam (AZT), cefazolin (CFZ), cefepime (CPE), cefotaxime (CFT), ceftazidime (CAZ), ceftriaxone (CAX), cefuroxime (CRM), cephalotin (CF), ciprofloxacin (CP), ertapenem (ETP), gentamicin (GM), imipenem (IMP), levofloxacin (LVX), meropenem (MER), piperacillin/tazobactam (P/T), tetracycline (TE), tobramycin (TO), and trimethoprim/sulfamethoxazole (T/S).

52. A method for killing or inhibiting the growth of a population of antimicrobial resistant microorganisms, the method comprising the steps of:
(a) obtaining or providing a sample containing or suspected of containing at least one microorganism from a population of microorganisms;
(b) performing or having performed a genotyping assay on the sample to determine (i) the presence or absence in the microorganism of at least one nucleotide sequence identified in Table I or a variant of the nucleotide sequence and/or (ii) the presence or absence in the microorganism of at least one difference in at least one nucleotide sequence identified in Table I compared with a reference sequence; wherein the presence or absence of the at least one nucleotide sequence or variant thereof and/or the difference indicates that the microorganism is resistant to one or more antimicrobial drugs; and
(c) exposing the population of microorganisms identified as being resistant to an antimicrobial drug that is different from the one or more antimicrobial drugs to which the microorganism is resistant.

53. The method of claim 52, wherein the sample is obtained from a patient.

54. The method of claim 52, wherein the microorganism is (1) an Acinetobacter species, (2) an Escherichia species, (3) a Klebsiella species, (4) a Morganella species, (5) a Proteus species, (6) a Pseudomonas species, (7) a Salmonella species, (8) a Serratia species, (9) a Stenotrophomonas species, (10) a Shigella species, (11) an Enterobacter species, (12) a Staphylococcus species, (13) a Burkholderia species, (14) a Citrobacter species, (15) a Kluyvera species, (16) a Pantoea species, or (17) a Raoultella species; and
wherein step (b) comprises:
(b′ 1) performing or having performed a genotyping assay on the sample to determine (i) the presence or absence in the Acinetobacter species of at least one nucleotide sequence identified in rows 0 to 183, 282 to 289, and 291 to 325 of Table I or a variant of the nucleotide sequence, and/or (ii) the presence in the Acinetobacter species of at least one difference in at least one nucleotide sequence identified in rows 184 to 281, 290, and 326 to 330 of Table I compared with a reference sequence;
(b′2) performing or having performed a genotyping assay on the sample to determine (i) the presence or absence in the Escherichia species of at least one nucleotide sequence identified in rows 1248 to 1499 of Table I or a variant of the nucleotide sequence, and/or (ii) the presence in the Escherichia species of at least one difference in at least one nucleotide sequence identified in rows 1500 to 1586 of Table I compared with a reference sequence;
(b′3) performing or having performed a genotyping assay on the sample to determine (i) the presence or absence in the Klebsiella species of at least one nucleotide sequence identified in rows 1587 to 1696, 1743 to 1782, 1792 to 2133, 2208 to 2396, 2425 to 2427, and 2431 to 2446 of Table I or a variant of the nucleotide sequence, and/or (ii) the presence and/or absence in the Klebsiella species of at least one difference in at least one nucleotide sequence identified in rows 1697 to 1742, 1783 to 1791, 2134 to 2207, 2397 to 2424, 2428 to 2430, 2447, and 2448 of Table I compared with a reference sequence;
(b′4) performing or having performed a genotyping assay on the sample to determine (i) the presence or absence in the Morganella species of at least one nucleotide sequence identified in rows 2460 to 2569 of Table I or a variant of the nucleotide sequence, and/or (ii) the presence and/or absence in the Morganella species of at least one difference in at least one nucleotide sequence identified in rows 2570 to 2621 of Table I compared with a reference sequence;
(b′5) performing or having performed a genotyping assay on the sample to determine (i) the presence or absence in the Proteus species of at least one nucleotide sequence identified in rows 2623 to 2754, and 2789 to 2792 of Table I or a variant of the nucleotide sequence, and/or (ii) the presence and/or absence in the Proteus species of at least one difference in at least one nucleotide sequence identified in rows 2755 to 2788 of Table I compared with a reference sequence;
(b′6) performing or having performed a genotyping assay on the sample to determine (i) the presence or absence in the Pseudomonas species of at least one nucleotide sequence identified in rows 2793 to 2861, 2877, and 2878 of Table I or a variant of the nucleotide sequence, and/or (ii) the presence and/or absence in the Pseudomonas species of at least one difference in at least one nucleotide sequence identified in rows 2862 to 2876 of Table I compared with a reference sequence;
(b′7) performing or having performed a genotyping assay on the sample to determine (i) the presence or absence in the Salmonella species of at least one nucleotide sequence identified in rows 2885 to 2990 of Table I or a variant of the nucleotide sequence, and/or (ii) the presence in the Salmonella species of at least one difference in at least one nucleotide sequence identified in rows 2991 to 3008 of Table I compared with a reference sequence;
(b′8) performing or having performed a genotyping assay on the sample to determine (i) the presence or absence in the Serratia species of at least one nucleotide sequence identified in rows 3009 to 3013, 3023 to 3028, 3031 to 3131, and 3188 to 3198 of Table I or a variant of the nucleotide sequence, and/or (ii) the presence and/or absence in the Serratia species of at least one difference in at least one nucleotide sequence identified in rows 3014 to 3022, 3029, 3030, 3132 to 3187, 3199, and 3200 of Table I compared with a reference sequence;
(b′9) performing or having performed a genotyping assay on the sample to determine (i) the presence in the Stenotrophomonas species of at least one nucleotide sequence identified in rows 3746 to 3751 of Table I or a variant of the nucleotide sequence;
(b′10) performing or having performed a genotyping assay on the sample to determine (i) the presence or absence in the Shigella species of at least one nucleotide sequence identified in rows 3201 to 3234, 3237 to 3256, and 3263 to 3352 of Table I or a variant of the nucleotide sequence, and/or (ii) the presence in the Shigella species of at least one difference in at least one nucleotide sequence identified in rows 3235, 3236, 3257 to 3262, and 3353 to 3375 of Table I compared with a reference sequence;
(b′ 11) performing or having performed a genotyping assay on the sample to determine (i) the presence or absence in the Enterobacter species of at least one nucleotide sequence identified in rows 692 to 697, 702 to 1074, 1190 to 1201, 1213 to 1226, 1231 to 1233, 1235 to 1239, 1246, and 1247 of Table I or a variant of the nucleotide sequence, and/or (ii) the presence and/or absence in the Enterobacter species of at least one difference in at least one nucleotide sequence identified in rows 698 to 701, 1075 to 1189, 1202 to 1212, 1227 to 1230, 1234, and 1240 to 1245 of Table I compared with a reference sequence;
(b′12) performing or having performed a genotyping assay on the sample to determine (i) the presence or absence in the Staphylococcus species of at least one nucleotide sequence identified in rows 3376 to 3664 of Table I or a variant of the nucleotide sequence, and/or (ii) the presence in the Staphylococcus species of at least one difference in at least one nucleotide sequence identified in rows 3665 to 3745 of Table I compared with a reference sequence;
(b′13) performing or having performed a genotyping assay on the sample to determine (i) the presence or absence in the Burkholderia species of at least the nucleotide sequence identified in row 331 of Table I or a variant of the nucleotide sequence;
(b′14) performing or having performed a genotyping assay on the sample to determine (i) the presence or absence in the Citrobacter species of at least one nucleotide sequence identified in rows 332 to 342, 345 to 361, 365 to 419, 422 to 581, 634 to 650, 653 to 683, 690, and 691 of Table I or a variant of the nucleotide sequence, and/or (ii) the presence in the Citrobacter species of at least one difference in at least one nucleotide sequence identified in rows 343, 344, 362 to 364, 420, 421, 582 to 633, 651, 652, and 684 to 689 of Table I compared with a reference sequence;
(b′15) performing or having performed a genotyping assay on the sample to determine (i) the presence or absence in the Kluyvera species of at least one nucleotide sequence identified in rows 2449 to 2457 of Table I or a variant of the nucleotide sequence, and/or (ii) the presence in the Kluyvera species of at least one difference in at least one nucleotide sequence identified in rows 2458 to 2459 of Table I compared with a reference sequence;
(b′16) performing or having performed a genotyping assay on the sample to determine (i) the presence or absence in the Pantoea species of at least the nucleotide sequence identified in row 2622 of Table I or a variant of the nucleotide sequence; or
(b′17) performing or having performed a genotyping assay on the sample to determine (i) the presence or absence in the Raoultella species of at least one nucleotide sequence identified in rows 2879 to 2881, and 2883 of Table I or a variant of the nucleotide sequence, and/or (ii) the presence in the Raoultella species of at least one difference in at least one nucleotide sequence identified in rows 2882, and 2884 of Table I compared with a reference sequence.

55. The method of claim 54, wherein the genotyping assay comprises using a next generation sequencing or high throughput sequencing method.

56. The method of claim 54, wherein the difference in the nucleotide sequence is at position nc_pos of the nucleotide sequence identified in Table I.

57. The method of claim 56, wherein the difference at position nc_pos is the nc_alt residue for the nucleotide sequence identified in Table I.

58. The method of claim 54, wherein the difference in the nucleotide sequence is a point mutation resulting in a change in the encoded amino acid sequence.

59. The method of claim 54, wherein the one or more antimicrobial drugs to which the microorganism is resistant belong to a class of antimicrobial drugs selected from the group consisting of lactams; penicillins; quinolones and derivatives thereof; aminoglycosides; polyketides; benzene-derived compounds; sulfonamides; tetracyclines; cephalosporins; lincosamides; macrolides; nitrofuranes; glycopeptides; oxazolidinones; ansamycins; carbacephems; and folate synthesis inhibitors.

60. The method of claim 54, wherein the one or more antimicrobial drugs to which the microorganism is resistant is selected from the group consisting of amoxicillin/K clavulanate (AUG), ampicillin (AM), ampicillin/sulbactam (A/S), aztreonam (AZT), cefazolin (CFZ), cefepime (CPE), cefotaxime (CFT), ceftazidime (CAZ), ceftriaxone (CAX), cefuroxime (CRM), cephalotin (CF), ciprofloxacin (CP), ertapenem (ETP), gentamicin (GM), imipenem (IMP), levofloxacin (LVX), meropenem (MER), piperacillin/tazobactam (P/T), tetracycline (TE), tobramycin (TO), and trimethoprim/sulfamethoxazole (T/S).
